(19) United States
(12) Patent Application Publication
(10) Pub. No.: US 2024/0084334 A1
(43) Pub. Date: Mar. 14, 2024

(54) SERPINA-MODULATING COMPOSITIONS AND METHODS

(71) Applicant: Flagship Pioneering Innovations VI, LLC, Cambridge, MA (US)

(72) Inventors: Robert Charles Altshuler, Newton, MA (US); Anne Helen Bothmer, Cambridge, MA (US); Daniel Raymond Chee, Cambridge, MA (US); Cecilia Giovanna Silvia Cotta-Ramusino, Cambridge, MA (US); Kyusik Kim, Worcester, MA (US); Randi Michelle Kotlar, Arlington, MA (US); Gregory David McAllister, Cambridge, MA (US); Ananya Ray, Melrose, MA (US); Nathaniel Roquet, Philadelphia, PA (US); Carlos Sanchez, Boston, MA (US); Barrett Ethan Steinberg, Somerville, MA (US); William Edward Salomon, West Roxbury, MA (US); Robert James Citorik, Somerville, MA (US); William Querbes, Cambridge, MA (US); Luciano Henrique Apponi, Cambridge, MA (US); Zhan Wang, Cambridge, MA (US)

(21) Appl. No.: 18/469,344

(22) Filed: Sep. 18, 2023

Related U.S. Application Data
(63) Continuation of application No. PCT/US2022/076073, filed on Sep. 7, 2022.
(60) Provisional application No. 63/303,905, filed on Jan. 27, 2022.
(60) Provisional application No. 63/253,087, filed on Oct. 6, 2021.
(60) Provisional application No. 63/241,970, filed on Sep. 8, 2021.

(51) Int. Cl. C12N 15/90; C07K 14/81; C12N 9/12; C12N 9/22; C12N 15/11

(52) U.S. Cl. CPC C12N 15/907; C07K 14/8125; C12N 9/1276; C12N 9/22; C12N 15/11; C12Y 207/07049; A61K 48/00; C12N 2310/20

(57) ABSTRACT

The disclosure provides, e.g., compositions, systems, and methods for targeting, editing, modifying, or manipulating a host cell's genome at one or more locations in a DNA sequence in a cell, tissue, or subject. Gene modifying systems for treating alpha-1 antitrypsin deficiency (AATD) are described.

### SEQUENCE LISTING

[0001] The instant application contains a Sequence Listing which has been submitted electronically in XML, format compliant with WIPO Standard ST.26 and is hereby incorporated by reference in its entirety. Said XML copy, created on Sep. 15, 2023, is named V2065-702420FT SL.XML and is 31,115,476 bytes in size.

### CROSS REFERENCE TO RELATED APPLICATIONS

[0002] This application is a continuation of International Application No. PCT/US2022/076073, filed Sep. 7, 2022, which claims the benefit of U.S. Provisional Application No. 63/241,970, filed Sep. 8, 2021, U.S. Provisional Application No. 63/253,087, filed Oct. 6, 2021, and U.S. Provisional Application No. 63/303,905, filed Jan. 27, 2022. The contents of the aforementioned applications are hereby incorporated by reference in their entirety.

### BACKGROUND

[0003] Integration of a nucleic acid of interest into a genome occurs at low frequency and with little site specificity, in the absence of a specialized protein to promote the insertion event. Some existing approaches, like CRISPR/Cas9, are more suited for small edits that rely on host repair pathways, and are less effective at integrating longer sequences. Other existing approaches, like Cre/loxP, require a first step of inserting a loxP site into the genome and then a second step of inserting a sequence of interest into the loxP site. There is a need in the art for improved compositions (e.g., proteins and nucleic acids) and methods for inserting, altering, or deleting sequences of interest in a genome.

[0004] AATD is characterized by low circulating levels of AAT. AAT is produced primarily in liver cells and secreted into the blood, but it is also made by other cell types including lung epithelial cells and certain white blood cells. AAT inhibits several serine proteases secreted by inflammatory cells (most notably neutrophil elastase [NE], proteinase 3, and cathepsin G) and thus protects organs, such as the lung, from protease-induced damage, especially during periods of inflammation.

[0005] The two most common clinical variants of AAT are E264V (PiS) and E342K (PiZ) alleles. The clinical single nucleotide variant E342K (PiZ) leads to structurally unstable and/or inactive AAT protein and, as a consequence, causes toxicity in liver and inactivity in lung. Inheritance is autosomal codominant. More than a half of AATD patients harbor at least one copy of the mutation E342K.

[0006] The mutation most commonly associated with AATD involves a substitution of glutamic acid for lysine (E342K) in the SERPINA1 gene that encodes the AAT protein. The E342K mutation is located at the hinge between the beta sheet and the Reactive Center Loop (RCL) of the AAT protein and causes a loop-sheet dimer that later can extend to form long chains of loop-sheet polymers that that aggregate AAT-Z proteins inside the rough Endoplasmic Reticulum (rER) of hepatocytes during biosynthesis. This mutation, known as the Z mutation or the Z allele, leads to misfolding of the translated protein, which is therefore not secreted into the bloodstream and. Consequently, circulating AAT levels in individuals homozygous for the Z allele (PiZZ) are markedly reduced; only approximately 15% of mutant Z-AAT protein folds correctly and is secreted by the cell. An additional consequence of the Z mutation is that the secreted Z-AAT has reduced activity compared to wild-type protein, with 40% to 80% of normal antiprotease activity (American thoracic society/European respiratory society, Am J Respir Crit Care Med. 2003; 168(7):818-900; and Ogushi et al. J Clin Invest. 1987; 80(5):1366-74).

[0007] There are two disease phenotypes associated with the PiZZ genotype. The accumulation of polymerized Z-AAT protein within hepatocytes results in a gain-of-function cytotoxicity that can result in cellular stress, inflammation, fibrosis, cirrhosis, and hepatocellular carcinoma (HCC) and neonatal liver disease in 12% of patients. This accumulation may spontaneously remit but can be fatal in a small number of children. A loss-of-function phenotype results from the reduced systemic levels of AAT that lead to increased protease digestion of connective tissue in the lower airway. Excess protease-digestion of the connective tissues and alveoli linings deteriorates lung elasticity and pulmonary functions, leading to emphysema, a hallmark of Chronic Obstructive Pulmonary Disease (COPD). This effect is severe in PiZZ individuals and typically manifests in middle age, resulting in a decline in quality of life and shortened lifespan (mean 68 years of age) (Tanash et al. Int J Chron Obstruct Pulm Dis. 2016; 11:1663-9). The effect is more pronounced in PiZZ individuals who smoke, resulting in an even further shortened lifespan (58 years). Piitulainen and Tanash, COPD 2015; 12(1):36-41. PiZZ individuals account for the majority of those with clinically relevant AATD lung disease.

[0008] A milder form of AATD is associated with the SZ genotype in which the Z-allele is combined with an S-allele. The S allele is associated with somewhat reduced levels of circulating AAT, but causes no cytotoxicity in liver cells. The result is clinically significant lung disease but not liver disease. Fregonese and Stolk, Orphanet JRare Dis. 2008; 33:16. As with the ZZ genotype, the deficiency of circulating AAT in subjects with the SZ genotype results in unregulated protease activity that degrades lung tissue over time and can result in emphysema, particularly in smokers.

[0009] While limited treatment options for AATD exist, there is currently no cure. A small fraction of newborn patients and patients at the advanced stage of liver disease undergo liver transplant. The current standard of care for AAT deficient individuals who have or show signs of developing significant lung disease is augmentation therapy or protein replacement therapy. Augmentation therapy involves administration of a human AAT protein concentrate purified from pooled donor plasma to augment the missing AAT. This treatment involves weekly infusion of AAT proteins purified from healthy blood donors. Although infusions of the plasma protein have been shown to improve survival or slow the rate of emphysema progression, augmentation therapy is often not sufficient under challenging conditions (e.g., active lung infection). Augmentation therapy also fails to restore the normal physiological regulation of AAT in patients and efficacy has been difficult to demonstrate. In addition, augmentation therapy cannot address liver disease, which is driven by the toxic gain-of-function of the Z allele. Accordingly, there is a need for new and more effective treatments for AATD.

### SUMMARY OF THE INVENTION

[0010] This disclosure relates to novel compositions, systems and methods for altering a genome at one or more locations in a host cell, tissue or subject, in vivo or in vitro. The disclosure provides gene modifying systems that are capable of modulating (e.g., inserting, altering, or deleting sequences of interest) alpha-1 antitrypsin (AAT) activity and methods of treating alpha-1 antitrypsin deficiency (AATD) by administering one or more such systems to alter a genomic sequence at a single nucleotide to correct the SERPINA1 PiZ mutation causing alpha-1 antitrypsin deficiency.

[0011] In one aspect, the disclosure relates to a system for modifying DNA to correct a human SERPINA1 gene mutation causing AATD comprising (a) a nucleic acid encoding a gene modifying polypeptide capable of target primed reverse transcription, the polypeptide comprising (i) a reverse transcriptase domain and (ii) a Cas9 nickase that binds DNA and has endonuclease activity, and (b) a template RNA comprising (i) a gRNA spacer that is complementary to a first portion of the human SERPINA1 gene, (ii) a gRNA scaffold that binds the polypeptide, (iii) a heterologous object sequence comprising a mutation region to correct the mutation, and (iv) a primer binding site (PBS) sequence comprising at least 3, 4, 5, 6, 7, or 8 bases of 100% homology to a target DNA strand at the 3′ end of the template RNA. The SERPINA1 gene may comprise an E342K mutation (also referred to as a PiZ mutation). The template RNA sequence may comprise a sequence described herein, e.g., in Table 1, 3, 4, 5, 6a, 6B, X2, X3, X3a, X5, or XX.

[0012] The gRNA spacer may comprise at least 15 bases of 100% homology to the target DNA at the 5′ end of the template RNA. The template RNA may further comprise a PBS sequence comprising at least 5 bases of at least 80% homology to the target DNA strand. The template RNA may comprise one or more chemical modifications.

[0013] The domains of the gene modifying polypeptide may be joined by a peptide linker. The polypeptide may comprise one or more peptide linkers. The gene modifying polypeptide may further comprise a nuclear localization signal. The polypeptide may comprise more than one nuclear localization signal, e.g., multiple adjacent nuclear localization signals or one or more nuclear localization signals in different regions of the polypeptide, e.g., one or more nuclear localization signals in the N-terminus of the polypeptide and one or more nuclear localization signals in the C-terminus of the polypeptide. The nucleic acid encoding the gene modifying polypeptide may encode one or more intein domains.

[0014] Introduction of the system into a target cell may result in insertion of at least 1, 2, 3, 4, 5, 10, 15, 20, 25, 30, 35, 40, 45, 50, 60, 70, 80, 90, 100, 150, 200, 250, 300, 350, 400, 500, or 1000 base pairs of exogenous DNA. Introduction of the system into a target cell may result in deletion, wherein the deletion is less than 2, 3, 4, 5, 10, 50, or 100 base pairs of genomic DNA upstream or downstream of the insertion. Introduction of the system into a target cell may result in substitution, e.g., substitution of 1, 2, or 3 nucleotides, e.g., consecutive nucleotides.

[0015] The heterologous object sequence may be at least 5, 10, 25, 50, 100, 150, 200, 250, 300, 400, 500, 600, or 700 base pairs.

[0016] In one aspect, the disclosure relates to a pharmaceutical composition comprising the system described above and a pharmaceutically acceptable excipient or carrier, wherein the pharmaceutically acceptable excipient or carrier is selected from the group consisting of a plasmid vector, a viral vector, a vesicle, and a lipid nanoparticle. In one aspect, the disclosure relates to a pharmaceutical composition comprising the system described above and multiple pharmaceutically acceptable excipients or carriers, wherein the pharmaceutically acceptable excipients or carriers are selected from the group consisting of a plasmid vector, a viral vector, a vesicle, and a lipid nanoparticle, e.g., where the system described above is delivered by two distinct excipients or carriers, e.g., two lipid nanoparticles, two viral vectors, or one lipid nanoparticle and one viral vector. The viral vector may be an adeno-associated virus (AAV).

[0017] In one aspect, the disclosure relates to a host cell (e.g., a mammalian cell, e.g., a human cell) comprising the system described above.

[0018] In one aspect, the disclosure relates to a method of correcting a mutation in the human SERPINA1 gene in a cell, tissue or subject, the method comprising administering the system described above to the cell, tissue or subject, wherein optionally the correction of the mutant SERPINA1 gene comprises an amino acid substitution of K342E (reversing the pathogenic substitution which is E342K). The system may be introduced in vivo, in vitro, ex vivo, or in situ. The nucleic acid of (a) may be integrated into the genome of the host cell. In some embodiments, the nucleic acid of (a) is not integrated into the genome of the host cell. In some embodiments, the heterologous object sequence is inserted at only one target site in the host cell genome. The heterologous object sequence may be inserted at two or more target sites in the host cell genome, e.g., at the same corresponding site in two homologous chromosomes or at two different sites on the same or different chromosomes. The heterologous object sequence may encode a mammalian polypeptide, or a fragment or a variant thereof. The components of the system may be delivered on 1, 2, 3, 4, or more distinct nucleic acid molecules. The system may be introduced into a host cell by electroporation or by using at least one vehicle selected from a plasmid vector, a viral vector, a vesicle, and a lipid nanoparticle.

[0019] Features of the compositions or methods can include one or more of the following enumerated embodiments.

### Enumerated Embodiments

[0020] 1. A template RNA comprising, e.g., from 5′ to 3′:
[0021] (i) a gRNA spacer that is complementary to a first portion of the human SERPINA1 gene, wherein the gRNA spacer has a sequence comprising the core nucleotides of a gRNA spacer sequence of Table 1, or a sequence having 1, 2, or 3 substitutions thereto, and optionally comprises one or more consecutive nucleotides starting with the 3′ end of the flanking nucleotides of the gRNA spacer (e.g., comprises one or more flanking nucleotides that are adjacent to the core nucleotides), or wherein the gRNA spacer has a sequence of a gRNA spacer of Table 6A, 6B, X2, X3, X3a, X5, or XX, or a sequence having 1, 2, or 3 substitutions thereto;
[0022] (ii) a gRNA scaffold that binds a gene modifying polypeptide (e.g., binds the Cas domain of the gene modifying polypeptide),
[0023] (iii) a heterologous object sequence comprising a mutation region to introduce a mutation into (e.g., to correct a mutation in) a second portion of the human SERPINA1 gene (wherein optionally the heterologous object sequence comprises, from 5′ to 3′, a post-edit homology region, a mutation region, and a pre-edit homology region), and
[0024] (iv) a primer binding site (PBS) sequence comprising at least 3, 4, 5, 6, 7, or 8 bases with 100% identity to a third portion of the human SERPINA1 gene.

[0025] 2. The template RNA of embodiment 1, wherein the heterologous object sequence comprises the core nucleotides of an RT template sequence from Table 3, or a sequence having 1, 2, or 3 substitutions thereto, and optionally comprises one or more consecutive nucleotides starting with the 3′ end of the flanking nucleotides of the RT template sequence, or wherein the heterologous object sequence comprises a sequence of an RT template sequence from Tables 6A or 6B.

[0026] 3. The template RNA of embodiment 1, wherein the heterologous object sequence comprises the core nucleotides of the RT template sequence of Table 3 that corresponds to the gRNA spacer sequence, or a sequence having 1, 2, or 3 substitutions thereto, and optionally comprises one or more consecutive nucleotides starting with the 3′ end of the flanking nucleotides of the RT template sequence (e.g., comprises one or more flanking nucleotides that are adjacent to the core nucleotides), or wherein the heterologous object sequence comprises a sequence of an RT template sequence from Tables 6A or 6B.

[0027] 4. The template RNA of any of the preceding embodiments, wherein the heterologous object sequence has the sequence of a heterologous object sequence from a template RNA set out in Table X3, or X3a, or a sequence having at least 70%, 80%, 85%, 90%, 95%, 98%, or 99% identity thereto, or a sequence having 1, 2, or 3 substitutions thereto.

[0028] 5. The template RNA of any of the preceding embodiments, wherein the heterologous object sequence has a length of 6-16 nucletodies (e.g., 6, 8, 10, 12, 14, 15, or 16 nucleotides).

[0029] 6. The template RNA according to any one of the preceding embodiments wherein the PBS sequence has a sequence comprising the core nucleotides of the PBS sequence from the same row of Table 3 as the RT template sequence, or a sequence having 1, 2, or 3 substitutions thereto, and optionally comprises one or more consecutive nucleotides starting with the 5′ end of the flanking nucleotides of the PBS sequence (e.g., comprises one or more flanking nucleotides that are adjacent to the core nucleotides).

[0030] 7. The template RNA according to any one of embodiments 1-5, wherein the PBS sequence has a sequence comprising the core nucleotides of a PBS sequence of Table 3 that corresponds to the RT template sequence, or a sequence having 1, 2, or 3 substitutions thereto, the gRNA spacer sequence, or both, and optionally comprises one or more consecutive nucleotides starting with the 5′ end of the flanking nucleotides of the PBS sequence, or wherein the PBS sequence has a sequence comprising the a PBS sequence of Tables 6A or 6B, or a sequence having 1, 2, or 3 substitutions thereto, that corresponds to the RT template sequence, the gRNA spacer sequence, or both.

[0031] 8. The template RNA of any of the preceding embodiments, wherein the PBS sequence has the sequence of a PBS from a template RNA set out in Table X3, or X3a, or a sequence having at least 70%, 80%, 85%, 90%, 95%, 98%, or 99% identity thereto, or a sequence having 1, 2, or 3 substitutions thereto.

[0032] 9. The template RNA of any of the preceding embodiments, wherein the PBS sequence has a length of 8-12 nucleotides (e.g., 8, 9, 10, 11, or 12 nucleotides).

[0033] 10. The template RNA according to any of embodiments 1-9, wherein the gRNA scaffold comprises a sequence of a gRNA scaffold of Table 12, or a sequence having at least 70%, 75%, 80%, 85%, 90%, 95%, 96%, 97%, 98%, or 99% identity thereto.

[0034] 11. The template RNA according to any of embodiments 1-9, wherein the gRNA scaffold comprises a sequence of a gRNA scaffold of Table 12 that corresponds to the RT template sequence, the gRNA spacer sequence, or both, or a sequence having at least 70%, 75%, 80%, 85%, 90%, 95%, 96%, 97%, 98%, or 99% identity thereto.

[0035] 12. The template RNA of any of the preceding embodiments, wherein the gRNA scaffold has the sequence of a gRNA scaffold from a template RNA set out in Table X2, X3, or X3a, or a sequence having at least 70%, 80%, 85%, 90%, 95%, 98%, or 99% identity thereto.

[0036] 13. The template RNA of any of the preceding embodiments, which comprises a sequence of a template RNA set out in Table X2, X3, or X3a, or a sequence having at least 70%, 80%, 85%, 90%, 95%, 98%, or 99% identity thereto.

[0037] 14. A template RNA comprising, e.g., from 5′ to 3′:
[0038] (i) a gRNA spacer that is complementary to a first portion of the human SERPINA1 gene,
[0039] (ii) a gRNA scaffold that binds a gene modifying polypeptide (e.g., binds the Cas domain of the gene modifying polypeptide),
[0040] (iii) a heterologous object sequence comprising a mutation region to introduce a mutation into (e.g., to correct a mutation in) a second portion of the human SERPINA1 gene, wherein the heterologous object sequence comprises the core nucleotides of an RT template sequence of Table 3, or a sequence having 1, 2, or 3 substitutions thereto, and optionally comprises one or more consecutive nucleotides starting with the 3′ end of the flanking nucleotides of the RT template sequence, or wherein the heterologous object sequence comprises an RT template sequence of Tables 6A or 6B; and
[0041] (iv) a PBS sequence comprising at least 3, 4, 5, 6, 7, or 8 bases of 100% identity to a third portion of the human SERPINA1 gene.

[0042] 15. The template RNA of embodiment 14, wherein the gRNA spacer comprises the core nucleotides of a gRNA spacer sequence of Table 1, or a sequence having 1, 2, or 3 substitutions thereto, and optionally comprises one or more consecutive nucleotides starting with the 3′ end of the flanking nucleotides of the gRNA spacer sequence, or wherein the gRNA spacer comprises a gRNA spacer sequence of Tables 6A or 6B.

[0043] 16. The template RNA of embodiment 14, wherein the heterologous object sequence comprises the core nucleotides of the gRNA spacer sequence of Table 1 that corresponds to the RT template sequence, or a sequence having 1, 2, or 3 substitutions thereto, and optionally comprises one or more consecutive nucleotides starting with the 3′ end of the flanking nucleotides of the gRNA spacer sequence, or wherein the heterologous object sequence comprises the nucleotides of the gRNA spacer sequence of Tables 6A or 6B.

[0044] 17. The template RNA according to any one of embodiments 14-16, wherein the PBS sequence has a sequence comprising the core nucleotides of the PBS sequence from the same row of Table 3 as the RT template sequence, or a sequence having 1, 2, or 3 substitutions thereto, and optionally comprises one or more consecutive nucleotides starting with the 5′ end of the flanking nucleotides of the PBS sequence.

[0045] 18. The template RNA according to any one of embodiments 14-17, wherein the PBS sequence has a sequence comprising the core nucleotides of a PBS sequence of Table 3 that corresponds to the RT template sequence, or a sequence having 1, 2, or 3 substitutions thereto, the gRNA spacer sequence, or both, and optionally comprises one or more consecutive nucleotides starting with the 5′ end of the flanking nucleotides of the PBS sequence, or wherein the PBS sequence has a sequence comprising the a PBS sequence of Tables 6A or 6B that corresponds to the RT template sequence, the gRNA spacer sequence, or both.

[0046] 19. The template RNA according to any of embodiments 14-18, wherein the gRNA scaffold comprises a sequence of a gRNA scaffold of Table 6A or 12, or a sequence having at least 70%, 75%, 80%, 85%, 90%, 95%, 96%, 97%, 98%, or 99% identity thereto.

[0047] 20. The template RNA according to any of embodiments 14-18, wherein the gRNA scaffold comprises a sequence of a gRNA scaffold of Table 6A or 12 that corresponds to the RT template sequence, the gRNA spacer sequence, or both, or a sequence having at least 70%, 75%, 80%, 85%, 90%, 95%, 96%, 97%, 98%, or 99% identity thereto.

[0048] 21. A gene modifying system for modifying DNA, comprising:
[0049] (a) a first RNA comprising, from 5′ to 3, (i) a guide RNA sequence that is complementary to a first portion of the human SERPINA1 gene, wherein the guide RNA sequence has a sequence comprising the core nucleotides of a spacer sequence of Table 1, or a sequence having 1, 2, or 3 substitutions thereto, and optionally comprises one or more consecutive nucleotides starting with the 3′ end of the flanking nucleotides of the guide RNA sequence; and (ii) a sequence (e.g., a scaffold region) that binds a gene modifying polypeptide (e.g., binds the Cas domain of the gene modifying polypeptide), and
[0050] (b) a second RNA comprising (iii) a heterologous object sequence comprising a nucleotide substitution to introduce a mutation into a second portion of the human SERPINA1 gene (wherein optionally the heterologous object sequence comprises, from 5′ to 3′, a post-edit homology region, a mutation region, and a pre-edit homology region), (iv) a primer region comprising at least 5, 6, 7, or 8 bases of 100% identity to a third portion of the human SERPINA1 gene, and (v) an RRS (RNA binding protein recognition sequence) that binds a gene modifying protein.

[0051] 22. The gene modifying system of embodiment 21, wherein the heterologous object sequence comprises the core nucleotides of an RT template sequence from Table 3, or a sequence having 1, 2, or 3 substitutions thereto, and optionally comprises one or more consecutive nucleotides starting with the 3′ end of the flanking nucleotides of the RT template sequence.

[0052] 23. The gene modifying system of embodiment 21, wherein the heterologous object sequence comprises the core nucleotides of the RT template sequence of Table 3 that corresponds to the gRNA spacer sequence, or a sequence having 1, 2, or 3 substitutions thereto, and optionally comprises one or more consecutive nucleotides starting with the 3′ end of the flanking nucleotides of the RT template sequence.

[0053] 24. The gene modifying system of any one of embodiments 21-23, wherein the PBS sequence has a sequence comprising the core nucleotides of the PBS sequence from the same row of Table 3 as the RT template sequence, or a sequence having 1, 2, or 3 substitutions thereto, and optionally comprises one or more consecutive nucleotides starting with the 5′ end of the flanking nucleotides of the PBS sequence.

[0054] 25. The gene modifying system of one of embodiments 21-23, wherein the PBS sequence has a sequence comprising the core nucleotides of a PBS sequence of Table 3 that corresponds to the RT template sequence, or a sequence having 1, 2, or 3 substitutions thereto, the gRNA spacer sequence, or both, and optionally comprises one or more consecutive nucleotides starting with the 5′ end of the flanking nucleotides of the PBS sequence.

[0055] 26. The gene modifying system of any one of embodiments 21-25, wherein the gRNA scaffold comprises a sequence of a gRNA scaffold of Table 12, or a sequence having at least 70%, 75%, 80%, 85%, 90%, 95%, 96%, 97%, 98%, or 99% identity thereto.

[0056] 27. The gene modifying system of any one of embodiments 21-25, wherein the gRNA scaffold comprises a sequence of a gRNA scaffold of Table 12 that corresponds to the RT template sequence, the gRNA spacer sequence, or both, or a sequence having at least 70%, 75%, 80%, 85%, 90%, 95%, 96%, 97%, 98%, or 99% identity thereto.

[0057] 28. A gene modifying system for modifying DNA, comprising:
[0058] (a) a first RNA comprising, from 5′ to 3, (i) a guide RNA sequence that is complementary to a first portion of the human SERPINA1 gene, and (ii) a sequence (e.g., a scaffold region) that binds a gene modifying polypeptide (e.g., binds the Cas domain of the gene modifying polypeptide), and
[0059] (b) a second RNA comprising (iii) a heterologous object sequence comprising a nucleotide substitution to introduce a mutation into a second portion of the human SERPINA1 gene, wherein the heterologous object sequence comprises the core nucleotides of an RT template sequence of Table 3, or a sequence having 1, 2, or 3 substitutions thereto, and optionally comprises one or more consecutive nucleotides starting with the 3′ end of the flanking nucleotides of the RT template sequence, and (iv) a primer region comprising at least 5, 6, 7, or 8 bases of 100% homology to a third portion of the human SERPINA1 gene, and (v) an RRS (RNA binding protein recognition sequence) that binds a gene modifying protein.

[0060] 29. The gene modifying system of embodiment 28, wherein the gRNA spacer comprises the core nucleotides of a gRNA spacer sequence of Table 1, or a sequence having 1, 2, or 3 substitutions thereto, and optionally comprises one or more consecutive nucleotides starting with the 3′ end of the flanking nucleotides of the gRNA spacer sequence.

[0061] 30. The gene modifying system of embodiment 28, wherein the heterologous object sequence comprises the core nucleotides of the gRNA spacer sequence of Table 1 that corresponds to the RT template sequence, or a sequence having 1, 2, or 3 substitutions thereto, and optionally comprises one or more consecutive nucleotides starting with the 3′ end of the flanking nucleotides of the gRNA spacer sequence.

[0062] 31. The gene modifying system of any one of embodiments 28-30, wherein the PBS sequence has a sequence comprising the core nucleotides of the PBS sequence from the same row of Table 3 as the RT template sequence, or a sequence having 1, 2, or 3 substitutions thereto, and optionally comprises one or more consecutive nucleotides starting with the 5′ end of the flanking nucleotides of the PBS sequence.

[0063] 32. The gene modifying system of any one of embodiments 28-30, wherein the PBS sequence has a sequence comprising the core nucleotides of a PBS sequence of Table 3 that corresponds to the RT template sequence, the gRNA spacer sequence, or both, or a sequence having 1, 2, or 3 substitutions thereto, and optionally comprises one or more consecutive nucleotides starting with the 5′ end of the flanking nucleotides of the PBS sequence.

[0064] 33. The gene modifying system of any one of embodiments 28-32, wherein the gRNA scaffold comprises a sequence of a gRNA scaffold of Table 12, or a sequence having at least 70%, 75%, 80%, 85%, 90%, 95%, 96%, 97%, 98%, or 99% identity thereto.

[0065] 34. The gene modifying system of any one of embodiments 28-32, wherein the gRNA scaffold comprises a sequence of a gRNA scaffold of Table 12 that corresponds to the RT template sequence, the gRNA spacer sequence, or both, or a sequence having at least 70%, 75%, 80%, 85%, 90%, 95%, 96%, 97%, 98%, or 99% identity thereto.

[0066] 35. A gRNA comprising (i) a gRNA spacer sequence that is complementary to a first portion of the human SERPINA1 gene, wherein the gRNA spacer has a sequence comprising the core nucleotides of a gRNA spacer sequence of Table 1, Table 2, or Table 4, or a sequence having 1, 2, or 3 substitutions thereto and optionally comprises one or more consecutive nucleotides starting with the 3′ end of the flanking nucleotides of the gRNA spacer sequence; and (ii) a gRNA scaffold.

[0067] 36. The gRNA of embodiment 35, wherein the gRNA scaffold comprises a sequence of a gRNA scaffold of Table 12, or a sequence having at least 70%, 75%, 80%, 85%, 90%, 95%, 96%, 97%, 98%, or 99% identity thereto.

[0068] 37. The gRNA of embodiment 35, wherein the gRNA scaffold comprises a sequence of a gRNA scaffold of Table 12 that corresponds to the gRNA spacer sequence, or a sequence having at least 70%, 75%, 80%, 85%, 90%, 95%, 96%, 97%, 98%, or 99% identity thereto.

[0069] 38. A template RNA comprising: (iii) a heterologous object sequence comprising a mutation region to introduce a mutation into a second portion of the human SERPINA1 gene, wherein the heterologous object sequence comprises the core nucleotides of an RT template sequence of Table 3, or a sequence having 1, 2, or 3 substitutions thereto, and optionally comprises one or more consecutive nucleotides starting with the 3′ end of the flanking nucleotides of the RT template sequence, and (iv) a PBS sequence comprising at least 5, 6, 7, or 8 bases of 100% homology to a third portion of the human SERPINA1 gene.

[0070] 39. The template RNA according to embodiment 38, wherein the PBS sequence has a sequence comprising the core nucleotides of the PBS sequence from the same row of Table 3 as the RT template sequence, or a sequence having 1, 2, or 3 substitutions thereto, and optionally comprises one or more consecutive nucleotides starting with the 5′ end of the flanking nucleotides of the PBS sequence.

[0071] 40. The template RNA according to embodiment 38, wherein the PBS sequence has a sequence comprising the core nucleotides of a PBS sequence of Table 3 that corresponds to the RT template sequence, or a sequence having 1, 2, or 3 substitutions thereto, and optionally comprises one or more consecutive nucleotides starting with the 5′ end of the flanking nucleotides of the PBS sequence.

[0072] 41. The template RNA according to any one of embodiments 1-20 or 38-40, the gene modifying system of any one of embodiments 21-34, or the gRNA of any one of embodiments 35-37, wherein the mutation introduced by the system is a K342E mutation (e.g., to correct a pathogenic E342K mutation) of the SERPINA1 gene.

[0073] 42. The template RNA according to any one of embodiments 1-20 or 38-41 or the gene modifying system of any one of embodiments 21-34 or 41, wherein the pre-edit sequence comprises between about 1 nucleotide to about 35 nucleotides (e.g., comprises about 1-5, 5-10, 10-15, 15-20, 20-25, 25-30, or 30-35 nucleotides) in length.

[0074] 43. The template RNA according to any one of embodiments 1-20 or 38-42 or the gene modifying system of any one of embodiments 21-34, 41, or 42, wherein the mutation region comprises a single nucleotide.

[0075] 44. The template RNA according to any one of embodiments 1-20 or 38-42 or the gene modifying system of any one of embodiments 21-34, 41, or 42, wherein the mutation region is at least two nucleotides in length.

[0076] 45. The template RNA according to any one of embodiments 1-20, 38-42, or 44 or the gene modifying system of any one of embodiments 21-34, 41, 42, or 44, wherein the mutation region is up to 32 (e.g., up to 5, 10, 15, 20, 25, 30, or 32) nucleotides in length and comprises one, two, or three sequence differences relative to a second portion of the human SERPINA1 gene.

[0077] 46. The template RNA according to any one of embodiments 1-20, 38-42, 44, or 45 or the gene modifying system of any one of embodiments 21-34, 41, 42, 44, or 45, wherein the mutation region comprises two sequences differences relative to a second portion of the human SERPINA1 gene.

[0078] 47. The template RNA according to any one of embodiments 1-20, 38-42, or 44-46 or the gene modifying system of any one of embodiments 21-34, 41, 42, or 44-46, wherein the mutation region comprises a first region (e.g., a first nucleotide) designed to correct a pathogenic mutation in the SERPINA1 gene and a second region (e.g., a second nucleotide) designed to inactivate a PAM sequence (e.g., a “PAM-kill” mutation as described in Table 5).

[0079] 48. The template RNA according to any one of embodiments 1-20, 38-46 or the gene modifying system of any one of embodiments 21-34 or 41-46, wherein the mutation region comprises less than 80%, 70%, 60%, 50%, 40%, or 30% identity to corresponding portion of the human SERPINA1 gene.

[0080] 49. The template RNA of any one of the preceding embodiments, wherein the template RNA comprises one or more silent mutations (e.g., silent substitutions), e.g., as exemplified in Table 7B.

[0081] 50. The template RNA of any of the preceding embodiments, wherein the mutation region comprises a first region designed to correct a pathogenic mutation in the SERPINA1 gene and a second region designed to introduce a silent substitution.

[0082] 51. The template RNA of any one of the preceding embodiments, which comprises one or more chemically modified nucleotides.

[0083] 52. A gene modifying system comprising:
[0084] a template RNA of any of embodiments 1-20, 38-42, or a system of any of embodiments 21-34 or 41-46, and
[0085] a gene modifying polypeptide, or a nucleic acid (e.g., RNA) encoding the gene modifying polypeptide.

[0086] 53. The gene modifying system of embodiment 52, wherein the gene modifying polypeptide comprises:
[0087] a reverse transcriptase (RT) domain (e.g., an RT domain from a retrovirus, or a polypeptide domain having at least 75%, 80%, 85%, 90%, 95%, 96%, 97%, 98%, or 99% amino acids sequence identity thereto); and
[0088] a Cas domain that binds to the target DNA molecule and is heterologous to the RT domain (e.g., a Cas9 domain); and
[0089] optionally, a linker disposed between the RT domain and the Cas domain.

[0090] 54. The gene modifying system of embodiment 53, wherein the RT domain comprises:
[0091] (a) an RT domain of Table 6; or
[0092] (b) an RT domain from a murine leukemia virus (MMLV), a porcine endogenous retrovirus (PERV); Avian reticuloendotheliosis virus (AVIRE), a feline leukemia virus (FLV), simian foamy virus (SFV) (e.g., SFV3L), bovine leukemia virus (BLV), Mason-Pfizer monkey virus (MPMV), human foamy virus (HFV), or bovine foamy/syncytial virus (BFV/BSV).

[0093] 55. The gene modifying system of embodiment 53 or 54, wherein the Cas domain comprises a Cas domain of Table X1, XX, or X5, or a sequence having at least 75%, 80%, 85%, 90%, 95%, 96%, 97%, 98%, or 99% amino acids sequence identity thereto.

[0094] 56. The gene modifying system of any of embodiments 53-55, wherein the spacer comprises a spacer of Table XX, or a sequence having 1, 2, or 3 substitutions thereto, and the Cas domain comprises a Cas domain of the same row of Table XX or a sequence having at least 75%, 80%, 85%, 90%, 95%, 96%, 97%, 98%, or 99% amino acids sequence identity thereto.

[0095] 57. The gene modifying system of any of embodiments 53-56, wherein the spacer comprises a spacer of Table XX, and the Cas domain comprises a Cas domain of the same row of Table XX.

[0096] 58. The gene modifying system of any of embodiments 53-57, wherein the spacer comprises a spacer of Table X5, or a sequence having 1, 2, or 3 substitutions thereto, and the Cas domain comprises a Cas domain of the same row of Table X5, or a sequence having at least 75%, 80%, 85%, 90%, 95%, 96%, 97%, 98%, or 99% amino acids sequence identity thereto.

[0097] 59. The gene modifying system of any of embodiments 53-58, wherein the spacer comprises a spacer of Table X5, and the Cas domain comprises a Cas domain of the same row of Table X5.

[0098] 60. The gene modifying system of any of embodiments 53-59, wherein the spacer comprises a spacer of Table 6A, or a sequence having 1, 2, or 3 substitutions thereto, and the Cas domain comprises a Cas domain of the same row of Table 6A, or a sequence having at least 75%, 80%, 85%, 90%, 95%, 96%, 97%, 98%, or 99% amino acids sequence identity thereto.

[0099] 61. The gene modifying system of any of embodiments 53-60, wherein the spacer comprises a spacer of Table 6A, and the Cas domain comprises a Cas domain of the same row of Table 6A.

[0100] 62. The gene modifying system of any of embodiments 53-51, wherein the spacer comprises a spacer of Table 6B, or a sequence having 1, 2, or 3 substitutions thereto, and the Cas domain comprises a Cas domain of the same row of Table 6B, or a sequence having at least 75%, 80%, 85%, 90%, 95%, 96%, 97%, 98%, or 99% amino acids sequence identity thereto.

[0101] 63. The gene modifying system of any of embodiments 53-62, wherein the spacer comprises a spacer of Table 6B, and the Cas domain comprises a Cas domain of the same row of Table 6B.

[0102] 64. The gene modifying system of any one of embodiments 53-63, wherein the Cas domain comprises a Cas domain of Table 7 or Table 8.

[0103] 65. The gene modifying system of any one of embodiments 53-64, wherein the Cas domain:
[0104] (a) is a Cas9 domain;
[0105] (b) is a SpCas9 domain, a BlatCas9 domain, a Nme2Cas9 domain, a PnpCas9 domain, a SauCas9 domain, a SauCas9-KKH domain, a SauriCas9 domain, a SauriCas9-KKH domain, a ScaCas9-Sc++domain, a SpyCas9 domain, a SpyCas9-NG domain, a SpyCas9-SpRY domain, or a St1Cas9 domain; and/or
[0106] (c) is a Cas9 domain comprising an N670A mutation, an N611A mutation, an N605A mutation, an N580A mutation, an N588A mutation, an N872A mutation, an N863 mutation, an N622A mutation, or an H840A mutation.

[0107] 66. The gene modifying system of embodiment 65, wherein the Cas9 domain binds a PAM sequence listed in Table 7 or Table 12.

[0108] 67. The gene modifying system of embodiment 66, wherein a second portion of the human SERPINA1 gene overlaps with a PAM recognized by the Cas domain, e.g., wherein the second portion of the human SERPINA1 gene is within the PAM or wherein the PAM is within the second portion of the human SERPINA1 gene).

[0109] 68. The gene modifying system any one of embodiments 53-67, wherein the gRNA spacer is a gRNA spacer according to Table 1, and the Cas domain comprises a Cas domain listed in the same row of Table 1, or a sequence having at least 70%, 75%, 80%, 85%, 90%, 95%, 96%, 97%, 98%, or 99% identity thereto.

[0110] 69. The gene modifying system of any one of the preceding embodiments, wherein the template RNA comprises a sequence of a template RNA sequence of Table 6A or 6B or a sequence having at least 70%, 75%, 80%, 85%, 90%, 95%, 96%, 97%, 98%, or 99% identity thereto.

[0111] 70. The gene modifying system of any one of embodiments 53-69, wherein:
[0112] (a) the template RNA comprises a sequence of a template RNA sequence of Table 3;
[0113] (b) the Cas domain comprises a Cas domain of Table 7 or Table 8;
[0114] (c) the linker comprises a linker sequence of Table 10 (e.g., of any of SEQ ID NOs: 5217, 5106, 5190, and 5218); and
[0115] (d) the gene modifying polypeptide comprises one or two NLS sequences from Table 11 (e.g., of any of SEQ ID NOs: 5245, 5290, 5323, 5330, 5349, 5350, 5351, and 4001).

[0116] 71. The gene modifying system of any of embodiments 53-70, which produces a first nick in a first strand of the human SERPINA1 gene.

[0117] 72. The gene modifying system of embodiment 71, which further comprises a second strand-targeting gRNA spacer that directs a second nick to the second strand of the human SERPINA1 gene.

[0118] 73. The gene modifying system of embodiment 72, wherein the second strand-targeting gRNA comprises a sequence comprising the core nucleotides of a left gRNA spacer sequence or a right gRNA spacer sequence from Table 2, and optionally comprises one or more consecutive nucleotides starting with the 3′ end of the flanking nucleotides of the left gRNA spacer sequence or right gRNA spacer sequence.

[0119] 74. The gene modifying system of embodiment 72, wherein the second strand-targeting gRNA comprises a sequence comprising the core nucleotides of a left gRNA spacer sequence or a right gRNA spacer sequence from Table 2 that corresponds to the gRNA spacer sequence of (i), and optionally comprises one or more consecutive nucleotides starting with the 3′ end of the flanking nucleotides of the left gRNA spacer sequence or right gRNA spacer sequence.

[0120] 75. The gene modifying system of embodiment 72, wherein the second strand-targeting gRNA comprises a sequence comprising the core nucleotides of a second nick gRNA sequence from Table 4, or a sequence having at least 70%, 75%, 80%, 85%, 90%, 95%, 96%, 97%, 98%, or 99% identity thereto, and optionally comprises one or more consecutive nucleotides starting with the 3′ end of the flanking nucleotides of the second nick gRNA sequence.

[0121] 76. The gene modifying system of embodiment 72, wherein the second strand-targeting gRNA comprises a sequence comprising the core nucleotides of the second nick gRNA sequence from Table 4 that corresponds to the gRNA spacer sequence of (i), or a sequence having at least 70%, 75%, 80%, 85%, 90%, 95%, 96%, 97%, 98%, or 99% identity thereto, and optionally comprises one or more consecutive nucleotides starting with the 3′ end of the flanking nucleotides of the second nick gRNA sequence.

[0122] 77. The gene modifying system of any one of the preceding embodiments, wherein the second strand-targeting gRNA has a “PAM-in orientation” with the template RNA of the gene modifying system, e.g., as exemplified in Table 4.

[0123] 78. The gene modifying system of any one of the preceding embodiments, the second strand-targeting gRNA targets a sequence overlapping the target mutation of the template RNA.

[0124] 79. The gene modifying system of embodiment 78, wherein second strand-targeting gRNA comprises:
[0125] (i) a sequence (e.g., a spacer sequence) complementary to the SERPINA1 mutation;
[0126] (ii) a sequence (e.g., a spacer sequence) complementary to the wild-type sequence at the target locus;
[0127] (iii) a sequence (e.g., a spacer sequence) complementary to a SNP proximal to the target locus, e.g., a SNP contained in the genomic DNA of a subject (e.g., a patient);
[0128] (iv) a sequence (e.g., spacer sequence) complementary to or comprising one or more silent substitutions proximal to the target locus.

[0129] 80. The template RNA, gene modifying system, or gRNA, of any one of the preceding embodiments, wherein the gRNA spacer comprises about 1, 2, 3, or more flanking nucleotides of the gRNA spacer.

[0130] 81. The template RNA or gene modifying system of any one of the preceding embodiments, wherein the heterologous object sequence comprises about 2, 3, 4, 5, 10, 20, 30, 40, or more flanking nucleotides of the RT template sequence.

[0131] 82. The template RNA or gene modifying system, of any one of the preceding embodiments, wherein the heterologous object sequence comprises between about 8-30, 9-25, 10-20, 11-16, or 12-15 (e.g., about 11-16) nucleotides.

[0132] 83. The template RNA or gene modifying system, of any one of the preceding embodiments, wherein the mutation region comprises 1, 2, or 3 nucleotide positions of sequence differences relative to the corresponding portion of the human SERPINA1 gene.

[0133] 84. The template RNA or gene modifying system of any one of the preceding embodiments, wherein the mutation region comprises at least 2 nucleotide positions of sequence difference relative to the corresponding portion of the human SERPINA1 gene.

[0134] 85. The template RNA or gene modifying system, of any one of the preceding embodiments, wherein the post-edit homology region and/or pre-edit homology region comprises 100% identity to the SERPINA1 gene.

[0135] 86. The template RNA or gene modifying system of any one of the preceding embodiments, wherein the PBS sequence additionally comprises about 1, 2, 3, 4, 5, 6, 7, or more flanking nucleotides.

[0136] 87. The template RNA or gene modifying system of any one of the preceding embodiments, wherein the PBS sequence comprises about 5-20, 8-16, 8-14, 8-13, 9-13, 9-12, or 10-12 (e.g., about 9-12) nucleotides.

[0137] 88. The template RNA or gene modifying system of any one of the preceding embodiments, wherein the PBS sequence binds within 1, 2, 3, 4, 5, 6, 7, 8, 9, or 10 nucleotides of a nick site in the SERPINA1 gene.

[0138] 89. The gene modifying system of any one of the preceding embodiments, wherein the domains of the gene modifying polypeptide are joined by a peptide linker.

[0139] 90. The gene modifying system of embodiment 89, wherein the linker comprises a sequence of a linker of Table 10 (e.g., of any of SEQ ID NOs: 5217, 5106, 5190, and 5218).

[0140] 91. The gene modifying system of any one of the preceding embodiments, wherein the gene modifying polypeptide further comprise one or more nuclear localization sequences (NLS).

[0141] 92. The gene modifying system of embodiment 91, wherein the gene modifying polypeptide comprises a first NLS and a second NLS.

[0142] 93. The gene modifying system of embodiment 91 or 92, wherein the NLS comprises a sequence of a NLS of Table 11 (e.g., of any of SEQ ID NOs: 5245, 5290, 5323, 5330, 5349, 5350, 5351, and 4001).

[0143] 94. A template RNA comprising a sequence of a template RNA of Table 4, or a sequence having at least 70%, 75%, 80%, 85%, 90%, 95%, 96%, 97%, 98%, or 99% identity thereto.

[0144] 95. A template RNA comprising a sequence of a template RNA of Table 4.

[0145] 96. A gene modifying system comprising:
[0146] (i) a template RNA comprising a sequence of a template RNA of Table 4, or a sequence having at least 70%, 75%, 80%, 85%, 90%, 95%, 96%, 97%, 98%, or 99% identity thereto; and
[0147] (ii) a second-nick gRNA sequence from the same row of Table 4 as (i), a sequence having at least 70%, 75%, 80%, 85%, 90%, 95%, 96%, 97%, 98%, or 99% identity thereto.

[0148] 97. A gene modifying system comprising:
[0149] (i) a template RNA comprising a sequence of a template RNA of Table 4; and
[0150] (ii) a second-nick gRNA sequence from the same row of Table 4 as (i).

[0151] 98. A DNA encoding the template RNA of any one of embodiments 1-20, 38-48, 80-88, 94, or 95, or the gRNA of any one of embodiments 35-37.

[0152] 99. A pharmaceutical composition, comprising the system of any one of embodiments 52-93, 96, or 97, or one or more nucleic acids encoding the same, and a pharmaceutically acceptable excipient or carrier.

[0153] 100. The pharmaceutical composition of embodiment 99, wherein the pharmaceutically acceptable excipient or carrier is selected from the group consisting of a plasmid vector, a viral vector, a vesicle, and a lipid nanoparticle.

[0154] 101. The pharmaceutical composition of embodiment 100, wherein the viral vector is an adeno-associated virus.

[0155] 102. A host cell (e.g., a mammalian cell, e.g., a human cell) comprising the template RNA or gene modifying system of any one of the preceding embodiments.

[0156] 103. A method of making the template RNA of any one of embodiments 1-20, 38-48, 80-88, 94, or 953, the method comprising synthesizing the template RNA by in vitro transcription (e.g., solid state synthesis) or by introducing a DNA encoding the template RNA into a host cell under conditions that allow for production of the template RNA.

[0157] 104. A method for modifying a target site in the human SERPINA1 gene in a cell, the method comprising contacting the cell with the gene modifying system of any one of embodiments 52-93, 96, or 97, or DNA encoding the same, thereby modifying the target site in the human SERPINA1 gene in a cell.

[0158] 105. A method for modifying a target site in the human SERPINA1 gene in a cell, the method comprising contacting the cell with: (i) the template RNA of any one of embodiments 52-93, 96, or 97, or DNA encoding the same; and (ii) a gene modifying polypeptide or a nucleic acid encoding a gene modifying polypeptide, thereby modifying the target site in the human SERPINA1 gene in a cell.

[0159] 106. A method for treating a subject having a disease or condition associated with a mutation in the human SERPINA1 gene, the method comprising administering to the subject the gene modifying system of any one of embodiments 52-93, 96, or 97, or DNA encoding the same, thereby treating the subject having a disease or condition associated with a mutation in the human SERPINA1 gene.

[0160] 107. A method for treating a subject having a disease or condition associated with a mutation in the human SERPINA1 gene, the method comprising administering to the subject the template RNA of any one of embodiments 52-93, 96, or 97, or DNA encoding the same; and (ii) a gene modifying polypeptide or a nucleic acid encoding a gene modifying polypeptide, thereby treating the subject having a disease or condition associated with a mutation in the human SERPINA1 gene.

[0161] 108. The method of embodiment 106 or 107, wherein the disease or condition is alpha-1 antitrypsin deficiency (AATD).

[0162] 109. The method of any one of embodiments 106-108, wherein the subject has an E342K mutation (i.e., a PiZ mutation).

[0163] 110. A method for treating a subject having AATD the method comprising administering to the subject the gene modifying system of any one of embodiments 52-93, 96, or 97, or DNA encoding the same, thereby treating the subject having AATD.

[0164] 111. A method for treating a subject having AATD the method comprising administering to the subject (i) the template RNA of any one of embodiments 52-93, 96, or 97, or DNA encoding the same, and (ii) a gene modifying polypeptide or a nucleic acid encoding a gene modifying polypeptide, thereby treating the subject having AATD.

[0165] 112. The gene modifying system or method of any one of the preceding embodiments, wherein introduction of the system into a target cell results in a correction of a pathogenic mutation in the SERPINA1 gene.

[0166] 113. The gene modifying system or method of any one of the preceding embodiments, wherein the pathogenic mutation is a E342K mutation, and wherein the correction comprises an amino acid substitution of K342E.

[0167] 114. The gene modifying system or method of any of the preceding embodiments, wherein correction of the mutation occurs in at least 30% (e.g., 30%, 40%, 50%, 60%, 70%, or more) of target nucleic acids.

[0168] 115. The gene modifying system or method of any of the preceding embodiments, wherein correction of the mutation occurs in at least 30% (e.g., 30%, 40%, 50%, 60%, 70%, or more) of target cells.

[0169] 116. The gene modifying system or method of any of the preceding embodiments, wherein the gene modifying system comprises a second strand-targeting gRNA, and wherein correction of the mutation in a population of target cells is increased relative to a population of target cells treated with a gene modifying system comprising a template RNA without a second strand-targeting gRNA.

[0170] 117. The gene modifying system or method of any of the preceding embodiments, wherein the template RNA comprises one or more silent substitutions (e.g., as exemplified in Tables 7B), and wherein correction of the mutation in a population of target cells is increased relative to a population of target cells treated with a gene modifying system comprising a template RNA that does not comprise one or more silent substitutions.

[0171] 118. The method of any of the preceding embodiments, wherein the cell is a mammalian cell, such as a human cell.

[0172] 119. The method of any one of the preceding embodiments, wherein the subject is a human.

[0173] 120. The method of any of the preceding embodiments, wherein the contacting occurs ex vivo, e.g., wherein the cell's or subject's DNA is modified ex vivo.

[0174] 121. The method of any of the preceding embodiments, wherein the contacting occurs in vivo, e.g., wherein the cell's or subject's DNA is modified in vivo.

[0175] 122. The method of any of the preceding embodiments, wherein contacting the cell or the subject with the system comprises contacting the cell or a cell within the subject with a nucleic acid (e.g., DNA or RNA) encoding the gene modifying polypeptide under conditions that allow for production of the gene modifying polypeptide.

### BRIEF DESCRIPTION OF THE DRAWINGS

[0176] The patent or application file contains at least one drawing executed in color. Copies of this patent or patent application publication with color drawing(s) will be provided by the Office upon request and payment of the necessary fee.

[0177] FIG. 1 depicts a gene modifying system as described herein. The left hand diagram shows the gene modifying polypeptide, which comprises a Cas nickase domain (e.g., spCas9 N863A) and a reverse transcriptase domain (RT domain) which are linked by a linker. The right hand diagram shows the template RNA which comprises, from 5′ to 3′, a gRNA spacer, a gRNA scaffold, a heterologous object sequence, and a primer binding site sequence (PBS sequence). The heterologous object sequence can comprise a mutation region that comprises one or more sequence differences relative to the target site. The heterologous object sequence can also comprise a pre-edit homology region and a post-edit homology region, which flank the mutation region. Without wishing to be bound by theory, it is thought that the gRNA spacer of the template RNA binds to the second strand of a target site in the genome, and the gRNA scaffold of the template RNA binds to the gene modifying polypeptide, e.g., localizing the gene modifying polypeptide to the target site in the genome. It is thought that the Cas domain of the gene modifying polypeptide nicks the target site (e.g., the first strand of the target site), e.g., allowing the PBS sequence to bind to a sequence adjacent to the site to be altered on the first strand of the target site. It is thought that the RT domain of the gene modifying polypeptide uses the first strand of the target site that is bound to the complementary sequence comprising the PBS sequence of the template RNA as a primer and the heterologous object sequence of the template RNA as a template to, e.g., polymerize a sequence complementary to the heterologous object sequence. Without wishing to be bound by theory, it is thought that reverse transcription can then proceed through the pre-edit homology region, then through the mutation region, and then through the post-edit homology region, thereby producing a DNA strand comprising a mutation specified by the heterologous object sequence.

[0178] FIG. 2 is a graph showing the percent rewriting achieved using the RNAV209-013 or RNAV214-040 gene modifying polypeptides with the indicated template RNAs.

[0179] FIG. 3 is a graph showing the amount of Fah mRNA relative to wild type when template RNAs are used with the RNAV209-013 or RNAV214-040 gene modifying polypeptides.

[0180] FIG. 4 is a graph showing the percentage of Cas9-positive hepatocytes 6 hours following dosing with LNPs containing various gene modifying polypeptides and template RNAs.

[0181] FIG. 5 is a graph showing the rewrite levels in liver samples 6 days following dosing with LNPs containing various gene modifying polypeptides and template RNAs.

[0182] FIG. 6 is a graph showing wild type Fah mRNA restoration compared to littermate heterozygous mice in liver samples following dosing with LNPs containing various gene modifying polypeptides and template RNAs.

[0183] FIG. 7 is a graph showing Fah protein distribution in liver samples following dosing with LNPs containing various gene modifying polypeptides and template RNAs.

[0184] FIG. 8 is a series of western blots showing Cas9-RT Expression 6 hours after infusion of Cas9-RT mRNA+TTR guide LNP. Each lane represents an individual animal where 20 μg of tissue homogenate was added per lane. Positive control was from an in vitro cell experiment where Cas9-RT was expressed (described previously). GAPDH was used as a loading control for each sample. n=4 per group, vehicle or treated.

[0185] FIG. 9 is a graph showing gene editing of TTR locus after treatment with Cas9-RT mRNA+TTR guide LNP. Level of indels detected at the TTR locus measured by TIDE analysis of Sanger sequencing of the TTR locus where the protospacer targets.

[0186] FIG. 10 is a graph showing that TTR Serum levels decrease after treatment with Cas9-RT mRNA+TTR guide LNP. Measurement of circulating TTR levels 5 days after mice were treated with LNPs encapsulating Cas9-RT+TTR guide RNA.

[0187] FIG. 11 is a graph showing Cas9-RT Expression after infusion of Cas9-RT mRNA+TTR guide LNP. Relative expression quantified by ProteinSimple Jess capillary electrophoresis Western blot. Numbers in the symbols are animal number in group. Vehicle n=2, Cas9-RT+TTR guide n=3.

[0188] FIG. 12 is a graph showing gene editing of TTR locus after infusion of Cas9-RT mRNA+TTR guide LNP. Level of indels detected at the TTR locus were measured by amplicon sequencing of the TTR locus where the protospacer targets. Each animal had 8 different biopsies taken across the liver where amplicon sequencing measured the percentage of reads showing an indel.

[0189] FIG. 13 is a graph showing percent indel activity of various gene modifying systems comprising template RNAs comprising 5 SpCas9 spacers, in combination with wild type SpCas9 polypeptide evaluated in HEK293T cells.

[0190] FIG. 14 is a graph showing percent indel at the PiZ mutation site in HEK293T landing pad cells after treatment with the gene modifying systems.

[0191] FIG. 15 is a graph showing a ranking of active spacer by indel activity and distance from the PiZ mutation following screening evaluation in HEK293T cells.

[0192] FIG. 16 is a graph showing percent perfect rewrite activity for various gene modifying systems comprising template RNAs.

[0193] FIGS. 17A-17B are heat maps graphing the % rewriting of gene modifying systems comprising various SpRY EDO template RNAs (varying PBS and RT lengths) and an exemplary SpRY Cas9-containing gene modifying polypeptide (FIG. 17A) and gene modifying systems comprising various St1_ED4 template RNAs (varying PBS and RT lengths) and an exemplary St1Cas9-containing gene modifying polypeptide (FIG. 17B).

[0194] FIG. 18 is a graph showing top-performing 17 combinations of template RNAs and gene modifying polypeptides comprising Cas9 variants (as ranked by rewriting activity).

### DETAILED DESCRIPTION

### Definitions

[0195] The term “expression cassette,” as used herein, refers to a nucleic acid construct comprising, nucleic acid elements sufficient for the expression of the nucleic acid molecule of the instant invention.

[0196] A “gRNA spacer”, as used herein, refers to a portion of a nucleic acid that has complementarity to a target nucleic acid and can, together with a gRNA scaffold, target a Cas protein to the target nucleic acid.

[0197] A “gRNA scaffold”, as used herein, refers to a portion of a nucleic acid that can bind a Cas protein and can, together with a gRNA spacer, target the Cas protein to the target nucleic acid. In some embodiments, the gRNA scaffold comprises a crRNA sequence, tetraloop, and tracrRNA sequence.

[0198] A “gene modifying polypeptide”, as used herein, refers to a polypeptide comprising a retroviral reverse transcriptase, or a polypeptide comprising an amino acid sequence having at least 75%, 80%, 85%, 90%, 95%, 96%, 97%, 98%, or 99% amino acid sequence identity to a retroviral reverse transcriptase, which is capable of integrating a nucleic acid sequence (e.g., a sequence provided on a template nucleic acid) into a target DNA molecule (e.g., in a mammalian host cell, such as a genomic DNA molecule in the host cell). In some embodiments, the gene modifying polypeptide is capable of integrating the sequence substantially without relying on host machinery. In some embodiments, the gene modifying polypeptide integrates a sequence into a random position in a genome, and in some embodiments, the gene modifying polypeptide integrates a sequence into a specific target site. In some embodiments, a gene modifying polypeptide includes one or more domains that, collectively, facilitate 1) binding the template nucleic acid, 2) binding the target DNA molecule, and 3) facilitate integration of the at least a portion of the template nucleic acid into the target DNA. Gene modifying polypeptides include both naturally occurring polypeptides as well as engineered variants of the foregoing, e.g., having one or more amino acid substitutions to the naturally occurring sequence. Gene modifying polypeptides also include heterologous constructs, e.g., where one or more of the domains recited above are heterologous to each other, whether through a heterologous fusion (or other conjugate) of otherwise wild-type domains, as well as fusions of modified domains, e.g., by way of replacement or fusion of a heterologous sub-domain or other substituted domain. Exemplary gene modifying polypeptides, and systems comprising them and methods of using them, that can be used in the methods provided herein are described, e.g., in PCT/US2021/020948, which is incorporated herein by reference with respect to gene modifying polypeptides that comprise a retroviral reverse transcriptase domain. In some embodiments, a gene modifying polypeptide integrates a sequence into a gene. In some embodiments, a gene modifying polypeptide integrates a sequence into a sequence outside of a gene. A “gene modifying system,” as used herein, refers to a system comprising a gene modifying polypeptide and a template nucleic acid.

[0199] The term “domain” as used herein refers to a structure of a biomolecule that contributes to a specified function of the biomolecule. A domain may comprise a contiguous region (e.g., a contiguous sequence) or distinct, non-contiguous regions (e.g., non-contiguous sequences) of a biomolecule. Examples of protein domains include, but are not limited to, an endonuclease domain, a DNA binding domain, a reverse transcription domain; an example of a domain of a nucleic acid is a regulatory domain, such as a transcription factor binding domain. In some embodiments, a domain (e.g., a Cas domain) can comprise two or more smaller domains (e.g., a DNA binding domain and an endonuclease domain).

[0200] As used herein, the term “exogenous”, when used with reference to a biomolecule (such as a nucleic acid sequence or polypeptide) means that the biomolecule was introduced into a host genome, cell or organism by the hand of man. For example, a nucleic acid that is as added into an existing genome, cell, tissue or subject using recombinant DNA techniques or other methods is exogenous to the existing nucleic acid sequence, cell, tissue or subject.

[0201] As used herein, “first strand” and “second strand”, as used to describe the individual DNA strands of target DNA, distinguish the two DNA strands based upon which strand the reverse transcriptase domain initiates polymerization, e.g., based upon where target primed synthesis initiates. The first strand refers to the strand of the target DNA upon which the reverse transcriptase domain initiates polymerization, e.g., where target primed synthesis initiates. The second strand refers to the other strand of the target DNA. First and second strand designations do not describe the target site DNA strands in other respects; for example, in some embodiments the first and second strands are nicked by a polypeptide described herein, but the designations ‘first’ and ‘second’ strand have no bearing on the order in which such nicks occur.

[0202] The term “heterologous,” as used herein to describe a first element in reference to a second element means that the first element and second element do not exist in nature disposed as described. For example, a heterologous polypeptide, nucleic acid molecule, construct or sequence refers to (a) a polypeptide, nucleic acid molecule or portion of a polypeptide or nucleic acid molecule sequence that is not native to a cell in which it is expressed, (b) a polypeptide or nucleic acid molecule or portion of a polypeptide or nucleic acid molecule that has been altered or mutated relative to its native state, or (c) a polypeptide or nucleic acid molecule with an altered expression as compared to the native expression levels under similar conditions. For example, a heterologous regulatory sequence (e.g., promoter, enhancer) may be used to regulate expression of a gene or a nucleic acid molecule in a way that is different than the gene or a nucleic acid molecule is normally expressed in nature. In another example, a heterologous domain of a polypeptide or nucleic acid sequence (e.g., a DNA binding domain of a polypeptide or nucleic acid encoding a DNA binding domain of a polypeptide) may be disposed relative to other domains or may be a different sequence or from a different source, relative to other domains or portions of a polypeptide or its encoding nucleic acid. In certain embodiments, a heterologous nucleic acid molecule may exist in a native host cell genome, but may have an altered expression level or have a different sequence or both. In other embodiments, heterologous nucleic acid molecules may not be endogenous to a host cell or host genome but instead may have been introduced into a host cell by transformation (e.g., transfection, electroporation), wherein the added molecule may integrate into the host genome or can exist as extra-chromosomal genetic material either transiently (e.g., mRNA) or semi-stably for more than one generation (e.g., episomal viral vector, plasmid or other self-replicating vector).

[0203] As used herein, “insertion” of a sequence into a target site refers to the net addition of DNA sequence at the target site, e.g., where there are new nucleotides in the heterologous object sequence with no cognate positions in the unedited target site. In some embodiments, a nucleotide alignment of the PBS sequence and heterologous object sequence to the target nucleic acid sequence would result in an alignment gap in the target nucleic acid sequence.

[0204] As used herein, a “deletion” generated by a heterologous object sequence in a target site refers to the net deletion of DNA sequence at the target site, e.g., where there are nucleotides in the unedited target site with no cognate positions in the heterologous object sequence. In some embodiments, a nucleotide alignment of the PBS sequence and heterologous object sequence to the target nucleic acid sequence would result in an alignment gap in the molecule comprising the PBS sequence and heterologous object sequence.

[0205] The term “inverted terminal repeats” or “ITRs” as used herein refers to AAV viral cis-elements named so because of their symmetry. These elements promote efficient multiplication of an AAV genome. It is hypothesized that the minimal elements for ITR function are a Rep-binding site (RBS; 5′-GCGCGCTCGCTCGCTC-3′ for AAV2; SEQ ID NO: 4601) and a terminal resolution site (TRS; 5′-AGTTGG-3′ for AAV2) plus a variable palindromic sequence allowing for hairpin formation. According to the present invention, an ITR comprises at least these three elements (RBS, TRS, and sequences allowing the formation of an hairpin). In addition, in the present invention, the term “ITR” refers to ITRs of known natural AAV serotypes (e.g. ITR of a serotype 1, 2, 3, 4, 5, 6, 7, 8, 9, 10 or 11 AAV), to chimeric ITRs formed by the fusion of ITR elements derived from different serotypes, and to functional variants thereof. “Functional variant” refers to a sequence presenting a sequence identity of at least 80%, 85%, 90%, preferably of at least 95% with a known ITR and allowing multiplication of the sequence that includes said ITR in the presence of Rep proteins.

[0206] The term “mutation region,” as used herein, refers to a region in a template RNA having one or more sequence difference relative to the corresponding sequence in a target nucleic acid. The sequence difference may comprise, for example, a substitution, insertion, frameshift, or deletion.

[0207] The term “mutated” when applied to nucleic acid sequences means that nucleotides in a nucleic acid sequence are inserted, deleted, or changed compared to a reference (e.g., native) nucleic acid sequence. A single alteration may be made at a locus (a point mutation), or multiple nucleotides may be inserted, deleted, or changed at a single locus. In addition, one or more alterations may be made at any number of loci within a nucleic acid sequence. A nucleic acid sequence may be mutated by any method known in the art.

[0208] “Nucleic acid molecule” refers to both RNA and DNA molecules including, without limitation, complementary DNA (“cDNA”), genomic DNA (“gDNA”), and messenger RNA (“mRNA”), and also includes synthetic nucleic acid molecules, such as those that are chemically synthesized or recombinantly produced, such as RNA templates, as described herein. The nucleic acid molecule can be double-stranded or single-stranded, circular, or linear. If single-stranded, the nucleic acid molecule can be the sense strand or the antisense strand. Unless otherwise indicated, and as an example for all sequences described herein under the general format “SEQ ID NO:,” or “nucleic acid comprising SEQ ID NO:1” refers to a nucleic acid, at least a portion which has either (i) the sequence of SEQ ID NO:1, or (ii) a sequence complimentary to SEQ ID NO:1. The choice between the two is dictated by the context in which SEQ ID NO:1 is used. For instance, if the nucleic acid is used as a probe, the choice between the two is dictated by the requirement that the probe be complementary to the desired target. Nucleic acid sequences of the present disclosure may be modified chemically or biochemically or may contain non-natural or derivatized nucleotide bases, as will be readily appreciated by those of skill in the art. Such modifications include, for example, labels, methylation, substitution of one or more naturally occurring nucleotides with an analog, inter-nucleotide modifications such as uncharged linkages (for example, methyl phosphonates, phosphotriesters, phosphoramidates, carbamates, etc.), charged linkages (for example, phosphorothioates, phosphorodithioates, etc.), pendant moieties, (for example, polypeptides), intercalators (for example, acridine, psoralen, etc.), chelators, alkylators, and modified linkages (for example, alpha anomeric nucleic acids, etc.). Also included are chemically modified bases (see, for example, Table 13), backbones (see, for example, Table 14), and modified caps (see, for example, Table 15). Also included are synthetic molecules that mimic polynucleotides in their ability to bind to a designated sequence via hydrogen bonding and other chemical interactions. Such molecules are known in the art and include, for example, those in which peptide linkages substitute for phosphate linkages in the backbone of a molecule, e.g., peptide nucleic acids (PNAs). Other modifications can include, for example, analogs in which the ribose ring contains a bridging moiety or other structure such as modifications found in “locked” nucleic acids (LNAs). In various embodiments, the nucleic acids are in operative association with additional genetic elements, such as tissue-specific expression-control sequence(s) (e.g., tissue-specific promoters and tissue-specific microRNA recognition sequences), as well as additional elements, such as inverted repeats (e.g., inverted terminal repeats, such as elements from or derived from viruses, e.g., AAV ITRs) and tandem repeats, inverted repeats/direct repeats, homology regions (segments with various degrees of homology to a target DNA), untranslated regions (UTRs) (5′, 3′, or both 5′ and 3′ UTRs), and various combinations of the foregoing. The nucleic acid elements of the systems provided by the invention can be provided in a variety of topologies, including single-stranded, double-stranded, circular, linear, linear with open ends, linear with closed ends, and particular versions of these, such as doggybone DNA (dbDNA), closed-ended DNA (ceDNA).

[0209] As used herein, a “gene expression unit” is a nucleic acid sequence comprising at least one regulatory nucleic acid sequence operably linked to at least one effector sequence. A first nucleic acid sequence is operably linked with a second nucleic acid sequence when the first nucleic acid sequence is placed in a functional relationship with the second nucleic acid sequence. For instance, a promoter or enhancer is operably linked to a coding sequence if the promoter or enhancer affects the transcription or expression of the coding sequence. Operably linked DNA sequences may be contiguous or non-contiguous. Where necessary to join two protein-coding regions, operably linked sequences may be in the same reading frame.

[0210] The terms “host genome” or “host cell”, as used herein, refer to a cell and/or its genome into which protein and/or genetic material has been introduced. It should be understood that such terms are intended to refer not only to the particular subject cell and/or genome, but to the progeny of such a cell and/or the genome of the progeny of such a cell. Because certain modifications may occur in succeeding generations due to either mutation or environmental influences, such progeny may not, in fact, be identical to the parent cell, but are still included within the scope of the term “host cell” as used herein. A host genome or host cell may be an isolated cell or cell line grown in culture, or genomic material isolated from such a cell or cell line, or may be a host cell or host genome which composing living tissue or an organism. In some instances, a host cell may be an animal cell or a plant cell, e.g., as described herein. In certain instances, a host cell may be a mammalian cell, a human cell, avian cell, reptilian cell, bovine cell, horse cell, pig cell, goat cell, sheep cell, chicken cell, or turkey cell. In certain instances, a host cell may be a corn cell, soy cell, wheat cell, or rice cell.

[0211] As used herein, “operative association” describes a functional relationship between two nucleic acid sequences, such as a 1) promoter and 2) a heterologous object sequence, and means, in such example, the promoter and heterologous object sequence (e.g., a gene of interest) are oriented such that, under suitable conditions, the promoter drives expression of the heterologous object sequence. For instance, a template nucleic acid carrying a promoter and a heterologous object sequence may be single-stranded, e.g., either the (+) or (−) orientation. An “operative association” between the promoter and the heterologous object sequence in this template means that, regardless of whether the template nucleic acid will be transcribed in a particular state, when it is in the suitable state (e.g., is in the (+) orientation, in the presence of required catalytic factors, and NTPs, etc.), it is accurately transcribed. Operative association applies analogously to other pairs of nucleic acids, including other tissue-specific expression control sequences (such as enhancers, repressors and microRNA recognition sequences), IR/DR, ITRs, UTRs, or homology regions and heterologous object sequences or sequences encoding a retroviral RT domain.

[0212] The term “primer binding site sequence” or “PBS sequence,” as used herein, refers to a portion of a template RNA capable of binding to a region comprised in a target nucleic acid sequence. In some instances, a PBS sequence is a nucleic acid sequence comprising at least 3, 4, 5, 6, 7, or 8 bases with 100% identity to the region comprised in the target nucleic acid sequence. In some embodiments the primer region comprises at least 5, 6, 7, 8 bases with 100% identity to the region comprised in the target nucleic acid sequence. Without wishing to be bound by theory, in some embodiments when a template RNA comprises a PBS sequence and a heterologous object sequence, the PBS sequence binds to a region comprised in a target nucleic acid sequence, allowing a reverse transcriptase domain to use that region as a primer for reverse transcription, and to use the heterologous object sequence as a template for reverse transcription.

[0213] As used herein, a “stem-loop sequence” refers to a nucleic acid sequence (e.g., RNA sequence) with sufficient self-complementarity to form a stem-loop, e.g., having a stem comprising at least two (e.g., 3, 4, 5, 6, 7, 8, 9, or 10) base pairs, and a loop with at least three (e.g., four) base pairs. The stem may comprise mismatches or bulges.

[0214] As used herein, a “tissue-specific expression-control sequence” means nucleic acid elements that increase or decrease the level of a transcript comprising the heterologous object sequence in a target tissue in a tissue-specific manner, e.g., preferentially in on-target tissue(s), relative to off-target tissue(s). In some embodiments, a tissue-specific expression-control sequence preferentially drives or represses transcription, activity, or the half-life of a transcript comprising the heterologous object sequence in the target tissue in a tissue-specific manner, e.g., preferentially in an on-target tissue(s), relative to an off-target tissue(s). Exemplary tissue-specific expression-control sequences include tissue-specific promoters, repressors, enhancers, or combinations thereof, as well as tissue-specific microRNA recognition sequences. Tissue specificity refers to on-target (tissue(s) where expression or activity of the template nucleic acid is desired or tolerable) and off-target (tissue(s) where expression or activity of the template nucleic acid is not desired or is not tolerable). For example, a tissue-specific promoter drives expression preferentially in on-target tissues, relative to off-target tissues. In contrast, a microRNA that binds the tissue-specific microRNA recognition sequences is preferentially expressed in off-target tissues, relative to on-target tissues, thereby reducing expression of a template nucleic acid in off-target tissues. Accordingly, a promoter and a microRNA recognition sequence that are specific for the same tissue, such as the target tissue, have contrasting functions (promote and repress, respectively, with concordant expression levels, i.e., high levels of the microRNA in off-target tissues and low levels in on-target tissues, while promoters drive high expression in on-target tissues and low expression in off-target tissues) with regard to the transcription, activity, or half-life of an associated sequence in that tissue.

### Table of Contents

[0215] 1) Introduction

[0216] 2) Gene modifying systems
[0217] a) Polypeptide components of gene modifying systems
   [0218] i) Writing domain
   [0219] ii) Endonuclease domains and DNA binding domains
      [0220] (1) Gene modifying polypeptides comprising Cas domains
      [0221] (2) TAL Effectors and Zinc Finger Nucleases
   [0222] iii) Linkers
   [0223] iv) Localization sequences for gene modifying systems
   [0224] v) Evolved Variants of Gene Modifying Polypeptides and Systems
   [0225] vi) Inteins
   [0226] vii) Additional domains
[0227] b) Template nucleic acids
   [0228] i) gRNA spacer and gRNA scaffold
   [0229] ii) Heterologous object sequence
   [0230] iii) PBS sequence
   [0231] iv) Exemplary Template Sequences
[0232] c) gRNAs with inducible activity
[0233] d) Circular RNAs and Ribozymes in Gene Modifying Systems
[0234] e) Target Nucleic Acid Site
[0235] f) Second strand nicking

[0236] 3) Production of Compositions and Systems

[0237] 4) Therapeutic Applications

[0238] 5) Administration and Delivery
[0239] a) Tissue Specific Activity/Administration
   [0240] i) Promoters
   [0241] ii) microRNAs
[0242] b) Viral vectors and components thereof
[0243] c) AAV Administration
[0244] d) Lipid Nanoparticles

[0245] 6) Kits, Articles of Manufacture, and Pharmaceutical Compositions

[0246] 7) Chemistry, Manufacturing, and Controls (CMC)

### INTRODUCTION

[0247] This disclosure relates to methods for treating alpha-1 antitrypsin deficiency (AATD) and compositions for targeting, editing, modifying or manipulating a DNA sequence (e.g., inserting a heterologous object sequence into a target site of a mammalian genome) at one or more locations in a DNA sequence in a cell, tissue or subject, e.g., in vivo or in vitro. The heterologous object DNA sequence may include, e.g., a substitution.

[0248] More specifically, the disclosure provides methods for treating AATD using reverse transcriptase-based systems for altering a genomic DNA sequence of interest, e.g., by inserting, deleting, or substituting one or more nucleotides into/from the sequence of interest.

[0249] The disclosure provides, in part, methods for treating AATD using a gene modifying system comprising a gene modifying polypeptide component and a template nucleic acid (e.g., template RNA) component. In some embodiments, a gene modifying system can be used to introduce an alteration into a target site in a genome. In some embodiments, the gene modifying polypeptide component comprises a writing domain (e.g., a reverse transcriptase domain), a DNA-binding domain, and an endonuclease domain (e.g., nickase domain). In some embodiments, the template nucleic acid (e.g., template RNA) comprises a sequence (e.g., a gRNA spacer) that binds a target site in the genome (e.g., that binds to a second strand of the target site), a sequence (e.g., a gRNA scaffold) that binds the gene modifying polypeptide component, a heterologous object sequence, and a PBS sequence. Without wishing to be bound by theory, it is thought that the template nucleic acid (e.g., template RNA) binds to the second strand of a target site in the genome, and binds to the gene modifying polypeptide component (e.g., localizing the polypeptide component to the target site in the genome). It is thought that the endonuclease (e.g., nickase) of the gene modifying polypeptide component cuts the target site (e.g., the first strand of the target site), e.g., allowing the PBS sequence to bind to a sequence adjacent to the site to be altered on the first strand of the target site. It is thought that the writing domain (e.g., reverse transcriptase domain) of the polypeptide component uses the first strand of the target site that is bound to the complementary sequence comprising the PBS sequence of the template nucleic acid as a primer and the heterologous object sequence of the template nucleic acid as a template to, e.g., polymerize a sequence complementary to the heterologous object sequence. Without wishing to be bound by theory, it is thought that selection of an appropriate heterologous object sequence can result in substitution, deletion, and/or insertion of one or more nucleotides at the target site.

### Gene Modifying Systems

[0250] In some embodiments, a gene modifying system described herein comprises: (A) a gene modifying polypeptide or a nucleic acid encoding the gene modifying polypeptide, wherein the gene modifying polypeptide comprises (i) a reverse transcriptase domain, and either (x) an endonuclease domain that contains DNA binding functionality or (y) an endonuclease domain and separate DNA binding domain; and (B) a template RNA. A gene modifying polypeptide, in some embodiments, acts as a substantially autonomous protein machine capable of integrating a template nucleic acid sequence into a target DNA molecule (e.g., in a mammalian host cell, such as a genomic DNA molecule in the host cell), substantially without relying on host machinery. For example, the gene modifying protein may comprise a DNA-binding domain, a reverse transcriptase domain, and an endonuclease domain. In some embodiments, the DNA-binding function may involve an RNA component that directs the protein to a DNA sequence, e.g., a gRNA spacer. In other embodiments, the gene modifying polypeptide may comprise a reverse transcriptase domain and an endonuclease domain. The RNA template element of a gene modifying system is typically heterologous to the gene modifying polypeptide element and provides an object sequence to be inserted (reverse transcribed) into the host genome. In some embodiments, the gene modifying polypeptide is capable of target primed reverse transcription. In some embodiments, the gene modifying polypeptide is capable of second-strand synthesis.

[0251] In some embodiments the gene modifying system is combined with a second polypeptide. In some embodiments, the second polypeptide may comprise an endonuclease domain. In some embodiments, the second polypeptide may comprise a polymerase domain, e.g., a reverse transcriptase domain. In some embodiments, the second polypeptide may comprise a DNA-dependent DNA polymerase domain. In some embodiments, the second polypeptide aids in completion of the genome edit, e.g., by contributing to second-strand synthesis or DNA repair resolution.

[0252] A functional gene modifying polypeptide can be made up of unrelated DNA binding, reverse transcription, and endonuclease domains. This modular structure allows combining of functional domains, e.g., dCas9 (DNA binding), MMLV reverse transcriptase (reverse transcription), FokI (endonuclease). In some embodiments, multiple functional domains may arise from a single protein, e.g., Cas9 or Cas9 nickase (DNA binding, endonuclease). In some embodiments, a gene modifying polypeptide includes one or more domains that, collectively, facilitate 1) binding the template nucleic acid, 2) binding the target DNA molecule, and 3) facilitate integration of the at least a portion of the template nucleic acid into the target DNA. In some embodiments, the gene modifying polypeptide is an engineered polypeptide that comprises one or more amino acid substitutions to a corresponding naturally occurring sequence. In some embodiments, the gene modifying polypeptide comprises two or more domains that are heterologous relative to each other, e.g., through a heterologous fusion (or other conjugate) of otherwise wild-type domains, or well as fusions of modified domains, e.g., by way of replacement or fusion of a heterologous sub-domain or other substituted domain. For instance, in some embodiments, one or more of: the RT domain is heterologous to the DBD; the DBD is heterologous to the endonuclease domain; or the RT domain is heterologous to the endonuclease domain.

[0253] In some embodiments, a template RNA molecule for use in the system comprises, from 5′ to 3′ (1) a gRNA spacer; (2) a gRNA scaffold; (3) heterologous object sequence (4) a primer binding site (PBS) sequence. In some embodiments:
[0254] (1) Is a gRNA spacer of ˜18-22 nt, e.g., is 20 nt
[0255] (2) Is a gRNA scaffold comprising one or more hairpin loops, e.g., 1, 2, of 3 loops for associating the template with a Cas domain, e.g., a nickase Cas9 domain. In some embodiments, the gRNA scaffold comprises the sequence, from 5′ to 3′,

(SEQ ID NO: 5008)
GTTTTAGAGCTAGAAATAGCAAGTTAAAATAAGGCTAG
TCCGTTATCAACTTGAAAAAGTGGGACCGAGTCGGTCC.

[0256] (3) In some embodiments, the heterologous object sequence is, e.g., 7-74, e.g., 10-20, 20-30, 30-40, 40-50, 50-60, 60-70, or 70-80 nt or, 80-90 nt in length. In some embodiments, the first (most 5′) base of the sequence is not C.
[0257] (4) In some embodiments, the PBS sequence that binds the target priming sequence after nicking occurs is e.g., 3-20 nt, e.g., 7-15 nt, e.g., 12-14 nt. In some embodiments, the PBS sequence has 40-60% GC content.

[0258] In some embodiments, a second gRNA associated with the system may help drive complete integration. In some embodiments, the second gRNA may target a location that is 0-200 nt away from the first-strand nick, e.g., 0-50, 50-100, 100-200 nt away from the first-strand nick. In some embodiments, the second gRNA can only bind its target sequence after the edit is made, e.g., the gRNA binds a sequence present in the heterologous object sequence, but not in the initial target sequence.

[0259] In some embodiments, a gene modifying system described herein is used to make an edit in HEK293, K562, U205, or HeLa cells. In some embodiment, a gene modifying system is used to make an edit in primary cells, e.g., primary cortical neurons from E18.5 mice.

[0260] In some embodiments, a gene modifying polypeptide as described herein comprises a reverse transcriptase or RT domain (e.g., as described herein) that comprises a MoMLV RT sequence or variant thereof. In embodiments, the MoMLV RT sequence comprises one or more mutations selected from D200N, L603W, T330P, T306K, W313F, D524G, E562Q, D583N, P51L, S67R, E67K, T197A, H204R, E302K, F309N, L435G, N454K, H594Q, D653N, R110S, and K103L. In embodiments, the MoMLV RT sequence comprises a combination of mutations, such as D200N, L603W, and T330P, optionally further including T306K and/or W313F.

[0261] In some embodiments, an endonuclease domain (e.g., as described herein) nCas9, e.g., comprising an N863A mutation (e.g., in spCas9) or a H840A mutation.

[0262] In some embodiments, the heterologous object sequence (e.g., of a system as described herein) is about 1-50, 50-100, 100-200, 200-300, 300-400, 400-500, 500-600, 600-700, 700-800, 800-900, 900-1000, or more, nucleotides in length.

[0263] In some embodiments, the RT and endonuclease domains are joined by a flexible linker, e.g., comprising the amino acid sequence SGGSSGGSSGSETPGTSESATPESSGGSSGGSS (SEQ ID NO: 5006).

[0264] In some embodiments, the endonuclease domain is N-terminal relative to the RT domain. In some embodiments, the endonuclease domain is C-terminal relative to the RT domain.

[0265] In some embodiments, the system incorporates a heterologous object sequence into a target site by TPRT, e.g., as described herein.

[0266] In some embodiments, a gene modifying polypeptide comprises a DNA binding domain. In some embodiments, a gene modifying polypeptide comprises an RNA binding domain. In some embodiments, the RNA binding domain comprises an RNA binding domain of B-box protein, MS2 coat protein, dCas, or an element of a sequence of a table herein. In some embodiments, the RNA binding domain is capable of binding to a template RNA with greater affinity than a reference RNA binding domain.

[0267] In some embodiments, a gene modifying system is capable of producing an insertion into the target site of at least 45, 50, 55, 60, 65, 70, 75, 80, 85, 90, 95, or 100 nucleotides (and optionally no more than 500, 400, 300, 200, or 100 nucleotides). In some embodiments, a gene modifying system is capable of producing an insertion into the target site of at least 1, 2, 3, 4, 5, 6, 7, 8, 9, 10, 15, 20, 25, 30, 35, 40, 45, 50, 55, 60, 65, 70, 75, 80, 85, 90, 95, or 100 nucleotides (and optionally no more than 500, 400, 300, 200, or 100 nucleotides). In some embodiments, a gene modifying system is capable of producing an insertion into the target site of at least 0.2, 0.3, 0.4, 0.5, 0.6, 0.7, 0.8, 0.9, 1, 1.5, 2, 2.5, 3, 3.5, 4, 4.5, 5, 5.5, 6, 6.5, 7, 7.5, 8, 8.5, 9, 9.5 or 10 kilobases (and optionally no more than 1, 5, 10, or 20 kilobases). In some embodiments, a gene modifying system is capable of producing a deletion of at least 81, 85, 90, 95, 100, 110, 120, 130, 140, 150, 160, 170, 180, 190, or 200 nucleotides (and optionally no more than 500, 400, 300, or 200 nucleotides). In some embodiments, a gene modifying system is capable of producing a deletion of at least 81, 85, 90, 95, 100, 110, 120, 130, 140, 150, 160, 170, 180, 190, or 200 nucleotides (and optionally no more than 500, 400, 300, or 200 nucleotides). In some embodiments, a gene modifying system is capable of producing a deletion of at least 1, 2, 3, 4, 5, 6, 7, 8, 9, 10, 15, 20, 25, 30, 35, 40, 45, 50, 55, 60, 65, 70, 75, 80, 85, 90, 95, 100, 110, 120, 130, 140, 150, 160, 170, 180, 190, or 200 nucleotides (and optionally no more than 500, 400, 300, or 200 nucleotides). In some embodiments, a gene modifying system is capable of producing a deletion of at least 0.2, 0.3, 0.4, 0.5, 0.6, 0.7, 0.8, 0.9, 1, 1.5, 2, 2.5, 3, 3.5, 4, 4.5, 5, 5.5, 6, 6.5, 7, 7.5, 8, 8.5, 9, 9.5 or 10 kilobases (and optionally no more than 1, 5, 10, or 20 kilobases). In some embodiments, a gene modifying system is capable of producing a substitution into the target site of at least 1, 2, 3, 4, 5, 6, 7, 8, 9, 10, 15, 20, 25, 30, 35, 40, 45, 50, 60, 70, 80, 90, or 100 or more nucleotides. In some embodiments, a gene modifying system is capable of producing a substitution in the target site of 1-2, 2-3, 3-4, 4-5, 5-10, 10-15, 15-20, 20-30, 30-40, 40-50, 50-60, 60-70, 70-80, 80-90, or 90-100 nucleotides.

[0268] In some embodiments, the substitution is a transition mutation. In some embodiments, the substitution is a transversion mutation. In some embodiments, the substitution converts an adenine to a thymine, an adenine to a guanine, an adenine to a cytosine, a guanine to a thymine, a guanine to a cytosine, a guanine to an adenine, a thymine to a cytosine, a thymine to an adenine, a thymine to a guanine, a cytosine to an adenine, a cytosine to a guanine, or a cytosine to a thymine.

[0269] In some embodiments, an insertion, deletion, substitution, or combination thereof, increases or decreases expression (e.g. transcription or translation) of a gene. In some embodiments, an insertion, deletion, substitution, or combination thereof, increases or decreases expression (e.g. transcription or translation) of a gene by altering, adding, or deleting sequences in a promoter or enhancer, e.g. sequences that bind transcription factors. In some embodiments, an insertion, deletion, substitution, or combination thereof alters translation of a gene (e.g. alters an amino acid sequence), inserts or deletes a start or stop codon, alters or fixes the translation frame of a gene. In some embodiments, an insertion, deletion, substitution, or combination thereof alters splicing of a gene, e.g. by inserting, deleting, or altering a splice acceptor or donor site. In some embodiments, an insertion, deletion, substitution, or combination thereof alters transcript or protein half-life. In some embodiments, an insertion, deletion, substitution, or combination thereof alters protein localization in the cell (e.g. from the cytoplasm to a mitochondria, from the cytoplasm into the extracellular space (e.g. adds a secretion tag)). In some embodiments, an insertion, deletion, substitution, or combination thereof alters (e.g. improves) protein folding (e.g. to prevent accumulation of misfolded proteins). In some embodiments, an insertion, deletion, substitution, or combination thereof, alters, increases, decreases the activity of a gene, e.g. a protein encoded by the gene.

[0270] Exemplary gene modifying polypeptides, and systems comprising them and methods of using them are described, e.g., in PCT/US2021/020948, which is incorporated herein by reference with respect to retroviral RT domains, including the amino acid and nucleic acid sequences therein.

[0271] Exemplary gene modifying polypeptides and retroviral RT domain sequences are also described, e.g., in International Application No. PCT/US21/20948 filed Mar. 4, 2021, e.g., at Table 30, Table 31, and Table 44 therein; the entire application is incorporated by reference herein with respect to retroviral RTs, e.g., in said sequences and tables. Accordingly, a gene modifying polypeptide described herein may comprise an amino acid sequence according to any of the Tables mentioned in this paragraph, or a domain thereof (e.g., a retroviral RT domain), or a functional fragment or variant of any of the foregoing, or an amino acid sequence having at least 70%, 80%, 85%, 90%, 95%, or 99% identity thereto.

[0272] In some embodiments, a polypeptide for use in any of the systems described herein can be a molecular reconstruction or ancestral reconstruction based upon the aligned polypeptide sequence of multiple homologous proteins. In some embodiments, a reverse transcriptase domain for use in any of the systems described herein can be a molecular reconstruction or an ancestral reconstruction, or can be modified at particular residues, based upon alignments of reverse transcriptase domains from the same or different sources. A skilled artisan can, based on the Accession numbers provided herein, align polypeptides or nucleic acid sequences, e.g., by using routine sequence analysis tools as Basic Local Alignment Search Tool (BLAST) or CD-Search for conserved domain analysis. Molecular reconstructions can be created based upon sequence consensus, e.g. using approaches described in Ivics et al., Cell 1997, 501-510; Wagstaff et al., Molecular Biology and Evolution 2013, 88-99.

### Polypeptide Components of Gene Modifying Systems

[0273] In some embodiments, the gene modifying polypeptide possesses the functions of DNA target site binding, template nucleic acid (e.g., RNA) binding, DNA target site cleavage, and template nucleic acid (e.g., RNA) writing, e.g., reverse transcription. In some embodiments, each functions is contained within a distinct domain. In some embodiments, a function may be attributed to two or more domains (e.g., two or more domains, together, exhibit the functionality). In some embodiments, two or more domains may have the same or similar function (e.g., two or more domains each independently have DNA-binding functionality, e.g., for two different DNA sequences). In other embodiments, one or more domains may be capable of enabling one or more functions, e.g., a Cas9 domain enabling both DNA binding and target site cleavage. In some embodiments, the domains are all located within a single polypeptide. In some embodiments, a first domain is in one polypeptide and a second domain is in a second polypeptide. For example, in some embodiments, the sequences may be split between a first polypeptide and a second polypeptide, e.g., wherein the first polypeptide comprises a reverse transcriptase (RT) domain and wherein the second polypeptide comprises a DNA-binding domain and an endonuclease domain, e.g., a nickase domain. As a further example, in some embodiments, the first polypeptide and the second polypeptide each comprise a DNA binding domain (e.g., a first DNA binding domain and a second DNA binding domain). In some embodiments, the first and second polypeptide may be brought together post-translationally via a split-intein to form a single gene modifying polypeptide.

[0274] In some aspects, a gene modifying polypeptide described herein comprises (e.g., a system described herein comprises a gene modifying polypeptide that comprises): 1) a Cas domain (e.g., a Cas nickase domain, e.g., a Cas9 nickase domain); 2) a reverse transcriptase (RT) domain of Table D, or a sequence having at least 70%, 75%, 80%, 85%, 90%, 95%, 97%, 98%, or 99% identity thereto, wherein the RT domain is C-terminal of the Cas domain; and a linker disposed between the RT domain and the Cas domain, wherein the linker has a sequence from the same row of Table D as the RT domain, or a sequence having at least 70%, 75%, 80%, 85%, 90%, 95%, 97%, 98%, or 99% identity thereto.

[0275] In some embodiments, the RT domain has a sequence with 100% identity to the RT domain of Table D and the linker has a sequence with 100% identity to the linker sequence from the same row of Table D as the RT domain. In some embodiments, the Cas domain comprises a sequence of Table 8, or a sequence having at least 70%, 75%, 80%, 85%, 90%, 95%, 98%, or 99% identity thereto. In some embodiments, the gene modifying polypeptide comprises an amino acid sequence according to any of SEQ ID NOs: 1-3332 in the sequence listing, or a sequence having at least 70%, 75%, 80%, 85%, 90%, 95%, 97%, 98%, or 99% identity thereto.

[0276] In some embodiments, the gene modifying polypeptide comprises a GG amino acid sequence between the Cas domain and the linker, an AG amino acid sequence between the RT domain and the second NLS, and/or a GG amino acid sequence between the linker and the RT domain. In some embodiments, the gene modifying polypeptide comprises a sequence of SEQ ID NO: 4000 which comprises the first NLS and the Cas domain, or a sequence having at least 70%, 75%, 80%, 85%, 90%, 95%, 98%, or 99% identity thereto. In some embodiments, the gene modifying polypeptide comprises a sequence of SEQ ID NO: 4001 which comprises the second NLS, or a sequence having at least 70%, 75%, 80%, 85%, 90%, 95%, 98%, or 99% identity thereto.

Exemplary N-terminal NLS-Cas9 domain
(SEQ ID NO: 4000)
MPAAKRVKLDGGDKKYSIGLDIGTNSVGWAVITDEYKVPSK
KFKVLGNTDRHSIKKNLIGALLFDSGETAEATRLKRTARR
RYTRRKNRICYLQEIFSNEMAKVDDSFFHRLEESFLVEED
KKHERHPIFGNIVDEVAYHEKYPTIYHLRKKLVDSTDKAD
LRLIYLALAHMIKFRGHFLIEGDLNPDNSDVDKLFIQLVQ
TYNQLFEENPINASGVDAKAILSARLSKSRRLENLIAQLP
GEKKNGLFGNLIALSLGLTPNFKSNFDLAEDAKLQLSKDT
YDDDLDNLLAQIGDQYADLFLAAKNLSDAILLSDILRVNT
EITKAPLSASMIKRYDEHHQDLTLLKALVRQQLPEKYKEI
FFDQSKNGYAGYIDGGASQEEFYKFIKPILEKMDGTEELL
VKLNREDLLRKQRTFDNGSIPHQIHLGELHAILRRQEDFY
PFLKDNREKIEKILTFRIPYYVGPLARGNSRFAWMTRKSE
ETITPWNFEEVVDKGASAQSFIERMTNFDKNLPNEKVLPK
HSLLYEYFTVYNELTKVKYVTEGMRKPAFLSGEQKKAIVD
LLFKTNRKVTVKQLKEDYFKKIECFDSVEISGVEDRFNAS
LGTYHDLLKIIKDKDFLDNEENEDILEDIVLTLTLFEDRE
MIEERLKTYAHLFDDKVMKQLKRRRYTGWGRLSRKLINGI
RDKQSGKTILDFLKSDGFANRNFMQLIHDDSLTFKEDIQK
AQVSGQGDSLHEHIANLAGSPAIKKGILQTVKVVDELVKV
MGRHKPENIVIEMARENQTTQKGQKNSRERMKRIEEGIKE
LGSQILKEHPVENTQLQNEKLYLYYLQNGRDMYVDQELDI
NRLSDYDVDHIVPQSFLKDDSIDNKVLTRSDKARGKSDNV
PSEEVVKKMKNYWRQLLNAKLITQRKFDNLTKAERGGLSE
LDKAGFIKRQLVETRQITKHVAQILDSRMNTKYDENDKLI
REVKVITLKSKLVSDFRKDFQFYKVREINNYHHAHDAYLN
AVVGTALIKKYPKLESEFVYGDYKVYDVRKMIAKSEQEIG
KATAKYFFYSNIMNFFKTEITLANGEIRKRPLIETNGETG
EIVWDKGRDFATVRKVLSMPQVNIVKKTEVQTGGFSKESI
LPKRNSDKLIARKKDWDPKKYGGFDSPTVAYSVLVVAKVE
KGKSKKLKSVKELLGITIMERSSFEKNPIDFLEAKGYKEV
KKDLIIKLPKYSLFELENGRKRMLASAGELQKGNELALPS
KYVNFLYLASHYEKLKGSPEDNEQKQLFVEQHKHYLDEII
EQISEFSKRVILADANLDKVLSAYNKHRDKPIREQAENII
HLFTLTNLGAPAAFKYFDTTIDRKRYTSTKEVLDATLIHQ
SITGLYETRIDLSQLGGDGG
Exemplary C-terminal sequence comprising
an NLS
(SEQ ID NO: 4001)
AGKRTADGSEFEKRTADGSEFESPKKKAKVE

[0277] Writing Domain (RT Domain)

[0278] In certain aspects of the present invention, the writing domain of the gene modifying system possesses reverse transcriptase activity and is also referred to as a reverse transcriptase domain (a RT domain). In some embodiments, the RT domain comprises an RT catalytic portion and RNA-binding region (e.g., a region that binds the template RNA).

[0279] In some embodiments, a nucleic acid encoding the reverse transcriptase is altered from its natural sequence to have altered codon usage, e.g. improved for human cells. In some embodiments the reverse transcriptase domain is a heterologous reverse transcriptase from a retrovirus. In some embodiments, the RT domain comprising a gene modifying polypeptide has been mutated from its original amino acid sequence, e.g., has at least 1, 2, 3, 4, 5, 6, 7, 8, 9, 10, 20, 30, 40, 50, 60, 70, 80, 90, or 100 substitutions. In some embodiments, the RT domain is derived from the RT of a retrovirus, e.g., HIV-1 RT, Moloney Murine Leukemia Virus (MMLV) RT, avian myeloblastosis virus (AMV) RT, or Rous Sarcoma Virus (RSV) RT.

[0280] In some embodiments, the retroviral reverse transcriptase (RT) domain exhibits enhanced stringency of target-primed reverse transcription (TPRT) initiation, e.g., relative to an endogenous RT domain. In some embodiments, the RT domain initiates TPRT when the 3 nt in the target site immediately upstream of the first strand nick, e.g., the genomic DNA priming the RNA template, have at least 66% or 100% complementarity to the 3 nt of homology in the RNA template. In some embodiments, the RT domain initiates TPRT when there are less than 5 nt mismatched (e.g., less than 1, 2, 3, 4, or 5 nt mismatched) between the template RNA homology and the target DNA priming reverse transcription. In some embodiments, the RT domain is modified such that the stringency for mismatches in priming the TPRT reaction is increased, e.g., wherein the RT domain does not tolerate any mismatches or tolerates fewer mismatches in the priming region relative to a wild-type (e.g., unmodified) RT domain. In some embodiments, the RT domain comprises a HIV-1 RT domain. In embodiments, the HIV-1 RT domain initiates lower levels of synthesis even with three nucleotide mismatches relative to an alternative RT domain (e.g., as described by Jamburuthugoda and Eickbush J Mol Biol 407(5):661-672 (2011); incorporated herein by reference in its entirety). In some embodiments, the RT domain forms a dimer (e.g., a heterodimer or homodimer). In some embodiments, the RT domain is monomeric. In some embodiments, an RT domain, naturally functions as a monomer or as a dimer (e.g., heterodimer or homodimer). In some embodiments, an RT domain naturally functions as a monomer, e.g., is derived from a virus wherein it functions as a monomer. In embodiments, the RT domain is selected from an RT domain from murine leukemia virus (MLV; sometimes referred to as MoMLV) (e.g., P03355), porcine endogenous retrovirus (PERV) (e.g., UniProt Q4VFZ2), mouse mammary tumor virus (MMTV) (e.g., UniProt P03365), Avian reticuloendotheliosis virus (AVIRE) (e.g., UniProtKB accession: P03360); Feline leukemia virus (FLV or FeLV) (e.g., e.g., UniProtKB accession: P10273); Mason-Pfizer monkey virus (MPMV) (e.g., UniProt P07572), bovine leukemia virus (BLV) (e.g., UniProt P03361), human T-cell leukemia virus-1 (HTLV-1) (e.g., UniProt P03362), human foamy virus (HFV) (e.g., UniProt P14350), simian foamy virus (SFV) (e.g., SFV3L) (e.g., UniProt P23074 or P27401), or bovine foamy/syncytial virus (BFV/BSV) (e.g., UniProt O41894), or a functional fragment or variant thereof (e.g., an amino acid sequence having at least 70%, 80%, 90%, 95%, or 99% identity thereto). In some embodiments, an RT domain is dimeric in its natural functioning. In some embodiments, the RT domain is derived from a virus wherein it functions as a dimer. In embodiments, the RT domain is selected from an RT domain from avian sarcoma/leukemia virus (ASLV) (e.g., UniProt A0A142BKH1), Rous sarcoma virus (RSV) (e.g., UniProt P03354), avian myeloblastosis virus (AMV) (e.g., UniProt Q83133), human immunodeficiency virus type I (HIV-1) (e.g., UniProt P03369), human immunodeficiency virus type II (HIV-2) (e.g., UniProt P15833), simian immunodeficiency virus (SIV) (e.g., UniProt P05896), bovine immunodeficiency virus (BIV) (e.g., UniProt P19560), equine infectious anemia virus (EIAV) (e.g., UniProt P03371), or feline immunodeficiency virus (FIV) (e.g., UniProt P16088) (Herschhorn and Hizi Cell Mol Life Sci 67(16):2717-2747 (2010)), or a functional fragment or variant thereof (e.g., an amino acid sequence having at least 70%, 80%, 90%, 95%, or 99% identity thereto). Naturally heterodimeric RT domains may, in some embodiments, also be functional as homodimers. In some embodiments, dimeric RT domains are expressed as fusion proteins, e.g., as homodimeric fusion proteins or heterodimeric fusion proteins. In some embodiments, the RT function of the system is fulfilled by multiple RT domains (e.g., as described herein). In further embodiments, the multiple RT domains are fused or separate, e.g., may be on the same polypeptide or on different polypeptides.

[0281] In some embodiments, a gene modifying system described herein comprises an integrase domain, e.g., wherein the integrase domain may be part of the RT domain. In some embodiments, an RT domain (e.g., as described herein) comprises an integrase domain. In some embodiments, an RT domain (e.g., as described herein) lacks an integrase domain, or comprises an integrase domain that has been inactivated by mutation or deleted. In some embodiment, a gene modifying system described herein comprises an RNase H domain, e.g., wherein the RNase H domain may be part of the RT domain. In some embodiments, the RNase H domain is not part of the RT domain and is covalently linked via a flexible linker. In some embodiments, an RT domain (e.g., as described herein) comprises an RNase H domain, e.g., an endogenous RNAse H domain or a heterologous RNase H domain. In some embodiments, an RT domain (e.g., as described herein) lacks an RNase H domain. In some embodiments, an RT domain (e.g., as described herein) comprises an RNase H domain that has been added, deleted, mutated, or swapped for a heterologous RNase H domain. In some embodiments, the polypeptide comprises an inactivated endogenous RNase H domain. In some embodiments, an endogenous RNase H domain from one of the other domains of the polypeptide is genetically removed such that it is not included in the polypeptide, e.g., the endogenous RNase H domain is partially or completely truncated from the comprising domain. In some embodiments, mutation of an RNase H domain yields a polypeptide exhibiting lower RNase activity, e.g., as determined by the methods described in Kotewicz et al. Nucleic Acids Res 16(1):265-277 (1988) (incorporated herein by reference in its entirety), e.g., lower by at least 10%, 20%, 30%, 40%, 50%, 60%, 70%, 80%, or 90% compared to an otherwise similar domain without the mutation. In some embodiments, RNase H activity is abolished.

[0282] In some embodiments, an RT domain is mutated to increase fidelity compared to an otherwise similar domain without the mutation. For instance, in some embodiments, a YADD (SEQ ID NO: 25690) or YMDD (SEQ ID NO: 25691) motif in an RT domain (e.g., in a reverse transcriptase) is replaced with YVDD (SEQ ID NO: 25692). In embodiments, replacement of the YADD (SEQ ID NO: 25690) or YMDD (SEQ ID NO: 25691) or YVDD (SEQ ID NO: 25692) results in higher fidelity in retroviral reverse transcriptase activity (e.g., as described in Jamburuthugoda and Eickbush J Mol Biol 2011; incorporated herein by reference in its entirety).

[0283] In some embodiments, a gene modifying polypeptide described herein comprises an RT domain having an amino acid sequence according to Table 6, or a sequence having at least 70%, 80%, 85%, 90%, 95%, 97%, 98%, or 99% identity thereto. In some embodiments, a nucleic acid described herein encodes an RT domain having an amino acid sequence according to Table 6, or a sequence having at least 70%, 80%, 85%, 90%, 95%, 97%, 98%, or 99% identity thereto.

TABLE 6
Exemplary reverse transcriptase domains from retroviruses

| RT | SEQ ID | |
|---|---|---|
| Name | NO: | RT amino acid sequence |
| AVIRE_ | 8,001 | TAPLEEEYRLFLEAPIQNVTLLEQWKREIPKVWAEINPPGLASTQAPIHV |
| P03360 | | QLLSTALPVRVRQYPITLEAKRSLRETIRKFRAAGILRPVHSPWNTPLLP |
| | | VRKSGTSEYRMVQDLREVNKRVETIHPTVPNPYTLLSLLPPDRIWYSVLD |
| | | LKDAFFCIPLAPESQLIFAFEWADAEEGESGQLTWTRLPQGFKNSPTLFD |
| | | EALNRDLQGFRLDHPSVSLLQYVDDLLIAADTQAACLSATRDLLMTLAEL |
| | | GYRVSGKKAQLCQEEVTYLGFKIHKGSRSLSNSRTQAILQIPVPKTKRQV |
| | | REFLGTIGYCRLWIPGFAELAQPLYAATRGGNDPLVWGEKEEEAFQSLKL |
| | | ALTQPPALALPSLDKPFQLFVEETSGAAKGVLTQALGPWKRPVAYLSKRL |
| | | DPVAAGWPRCLRAIAAAALLTREASKLTFGQDIEITSSHNLESLLRSPPD |
| | | KWLTNARITQYQVLLLDPPRVRFKQTAALNPATLLPETDDTLPIHHCLDT |
| | | LDSLTSTRPDLTDQPLAQAEATLFTDGSSYIRDGKRYAGAAVVTLDSVIW |
| | | AEPLPIGTSAQKAELIALTKALEWSKDKSVNIYTDSRYAFATLHVHGMIY |
| | | RERGLLTAGGKAIKNAPEILALLTAVWLPKRVAVMHCKGHQKDDAPTSTG |
| | | NRRADEVAREVAIRPLSTQATIS |
| AVIRE_ | 8,002 | TAPLEEEYRLFLEAPIQNVTLLEQWKREIPKVWAEINPPGLASTQAPIHV |
| P03360_ | | QLLSTALPVRVRQYPITLEAKRSLRETIRKFRAAGILRPVHSPWNTPLLP |
| 3mut | | VRKSGTSEYRMVQDLREVNKRVETIHPTVPNPYTLLSLLPPDRIWYSVLD |
| | | LKDAFFCIPLAPESQLIFAFEWADAEEGESGQLTWTRLPQGFKNSPTLFN |
| | | EALNRDLQGFRLDHPSVSLLQYVDDLLIAADTQAACLSATRDLLMTLAEL |
| | | GYRVSGKKAQLCQEEVTYLGFKIHKGSRSLSNSRTQAILQIPVPKTKRQV |
| | | REFLGTIGYCRLWIPGFAELAQPLYAATRPGNDPLVWGEKEEEAFQSLKL |
| | | ALTQPPALALPSLDKPFQLFVEETSGAAKGVLTQALGPWKRPVAYLSKRL |
| | | DPVAAGWPRCLRAIAAAALLTREASKLTFGQDIEITSSHNLESLLRSPPD |
| | | KWLTNARITQYQVLLLDPPRVRFKQTAALNPATLLPETDDTLPIHHCLDT |
| | | LDSLTSTRPDLTDQPLAQAEATLFTDGSSYIRDGKRYAGAAVVTLDSVIW |
| | | AEPLPIGTSAQKAELIALTKALEWSKDKSVNIYTDSRYAFATLHVHGMIY |
| | | RERGWLTAGGKAIKNAPEILALLTAVWLPKRVAVMHCKGHQKDDAPTSTG |
| | | NRRADEVAREVAIRPLSTQATIS |
| AVIRE_ | 8,003 | TAPLEEEYRLFLEAPIQNVTLLEQWKREIPKVWAEINPPGLASTQAPIHV |
| P03360_ | | QLLSTALPVRVRQYPITLEAKRSLRETIRKFRAAGILRPVHSPWNTPLLP |
| 3mutA | | VRKSGTSEYRMVQDLREVNKRVETIHPTVPNPYTLLSLLPPDRIWYSVLD |
| | | LKDAFFCIPLAPESQLIFAFEWADAEEGESGQLTWTRLPQGFKNSPTLFN |
| | | EALNRDLQGFRLDHPSVSLLQYVDDLLIAADTQAACLSATRDLLMTLAEL |
| | | GYRVSGKKAQLCQEEVTYLGFKIHKGSRSLSNSRTQAILQIPVPKTKRQV |
| | | REFLGKIGYCRLFIPGFAELAQPLYAATRPGNDPLVWGEKEEEAFQSLKL |
| | | ALTQPPALALPSLDKPFQLFVEETSGAAKGVLTQALGPWKRPVAYLSKRL |
| | | DPVAAGWPRCLRAIAAAALLTREASKLTFGQDIEITSSHNLESLLRSPPD |
| | | KWLTNARITQYQVLLLDPPRVRFKQTAALNPATLLPETDDTLPIHHQLDT |
| | | LDSLTSTRPDLTDQPLAQAEATLFTDGSSYIRDGKRYAGAAVVTLDSVIW |
| | | AEPLPIGTSAQKAELIALTKALEWSKDKSVNIYTDSRYAFATLHVHGMIY |
| | | RERGWLTAGGKAIKNAPEILALLTAVWLPKRVAVMHCKGHQKDDAPTSTG |
| | | NRRADEVAREVAIRPLSTQATIS |
| BAEVM_ | 8,004 | TVSLQDEHRLFDIPVTTSLPDVWLQDFPQAWAETGGLGRAKCQAPIIIDL |
| P10272 | | KPTAVPVSIKQYPMSLEAHMGIRQHIIKFLELGVLRPCRSPWNTPLLPVK |
| | | KPGTQDYRPVQDLREINKRTVDIHPTVPNPYNLLSTLKPDYSWYTVLDLK |
| | | DAFFCLPLAPQSQELFAFEWKDPERGISGQLTWTRLPQGFKNSPTLFDEA |
| | | LHRDLTDFRTQHPEVTLLQYVDDLLLAAPTKKACTQGTRHLLQELGEKGY |
| | | RASAKKAQICQTKVTYLGYILSEGKRWLTPGRIETVARIPPPRNPREVRE |
| | | FLGTAGFCRLWIPGFAELAAPLYALTKESTPFTWQTEHQLAFEALKKALL |
| | | SAPALGLPDTSKPFTLFLDERQGIAKGVLTQKLGPWKRPVAYLSKKLDPV |
| | | AAGWPPCLRIMAATAMLVKDSAKLTLGQPLTVITPHTLEAIVRQPPDRWI |
| | | TNARLTHYQALLLDTDRVQFGPPVTLNPATLLPVPENQPSPHDCRQVLAE |
| | | THGTREDLKDQELPDADHTWYTDGSSYLDSGTRRAGAAVVDGHNTIWAQS |
| | | LPPGTSAQKAELIALTKALELSKGKKANIYTDSRYAFATAHTHGSIYERR |
| | | GLLTSEGKEIKNKAEIIALLKALFLPQEVAIIHCPGHQKGQDPVAVGNRQ |
| | | ADRVARQAAMAEVLTLATEPDNTSHIT |
| BAEVM_ | 8,005 | TVSLQDEHRLFDIPVTTSLPDVWLQDFPQAWAETGGLGRAKCQAPIIIDL |
| P10272_ | | KPTAVPVSIKQYPMSLEAHMGIRQHIIKFLELGVLRPCRSPWNTPLLPVK |
| 3mut | | KPGTQDYRPVQDLREINKRTVDIHPTVPNPYNLLSTLKPDYSWYTVLDLK |
| | | DAFFCLPLAPQSQELFAFEWKDPERGISGQLTWTRLPQGFKNSPTLFNEA |
| | | LHRDLTDFRTQHPEVTLLQYVDDLLLAAPTKKACTQGTRHLLQELGEKGY |
| | | RASAKKAQICQTKVTYLGYILSEGKRWLTPGRIETVARIPPPRNPREVRE |
| | | FLGTAGFCRLWIPGFAELAAPLYALTKPSTPFTWQTEHQLAFEALKKALL |
| | | SAPALGLPDTSKPFTLFLDERQGIAKGVLTQKLGPWKRPVAYLSKKLDPV |
| | | AAGWPPCLRIMAATAMLVKDSAKLTLGQPLTVITPHTLEAIVRQPPDRWI |
| | | TNARLTHYQALLLDTDRVQFGPPVTLNPATLLPVPENQPSPHDCRQVLAE |
| | | THGTREDLKDQELPDADHTWYTDGSSYLDSGTRRAGAAVVDGHNTIWAQS |
| | | LPPGTSAQKAELIALTKALELSKGKKANIYTDSRYAFATAHTHGSIYERR |
| | | GWLTSEGKEIKNKAEIIALLKALFLPQEVAIIHCPGHQKGQDPVAVGNRQ |
| | | ADRVARQAAMAEVLTLATEPDNTSHIT |
| BAEVM_ | 8,006 | TVSLQDEHRLFDIPVTTSLPDVWLQDFPQAWAETGGLGRAKCQAPIIIDL |
| P10272_ | | KPTAVPVSIKQYPMSLEAHMGIRQHIIKFLELGVLRPCRSPWNTPLLPVK |
| 3mutA | | KPGTQDYRPVQDLREINKRTVDIHPTVPNPYNLLSTLKPDYSWYTVLDLK |
| | | DAFFCLPLAPQSQELFAFEWKDPERGISGQLTWTRLPQGFKNSPTLFNEA |
| | | LHRDLTDFRTQHPEVTLLQYVDDLLLAAPTKKACTQGTRHLLQELGEKGY |
| | | RASAKKAQICQTKVTYLGYILSEGKRWLTPGRIETVARIPPPRNPREVRE |
| | | FLGKAGFCRLFIPGFAELAAPLYALTKPSTPFTWQTEHQLAFEALKKALL |
| | | SAPALGLPDTSKPFTLFLDERQGIAKGVLTQKLGPWKRPVAYLSKKLDPV |
| | | AAGWPPCLRIMAATAMLVKDSAKLTLGQPLTVITPHTLEAIVRQPPDRWI |
| | | TNARLTHYQALLLDTDRVQFGPPVTLNPATLLPVPENQPSPHDCRQVLAE |
| | | THGTREDLKDQELPDADHTWYTDGSSYLDSGTRRAGAAVVDGHNTIWAQS |
| | | LPPGTSAQKAELIALTKALELSKGKKANIYTDSRYAFATAHTHGSIYERR |
| | | GWLTSEGKEIKNKAEIIALLKALFLPQEVAIIHCPGHQKGQDPVAVGNRQ |
| | | ADRVARQAAMAEVLTLATEPDNTSHIT |
| BLVAU_ | 8,007 | GVLDAPPSHIGLEHLPPPPEVPQFPLNLERLQALQDLVHRSLEAGYISPW |
| P25059 | | DGPGNNPVFPVRKPNGAWRFVHDLRVTNALTKPIPALSPGPPDLTAIPTH |
| | | LPHIICLDLKDAFFQIPVEDRFRSYFAFTLPTPGGLQPHRRFAWRVLPQG |
| | | FINSPALFERALQEPLRQVSAAFSQSLLVSYMDDILYVSPTEEQRLQCYQ |
| | | TMAAHLRDLGFQVASEKTRQTPSPVPFLGQMVHERMVTYQSLPTLQISSP |
| | | ISLHQLQTVLGDLQWVSRGTPTTRRPLQLLYSSLKGIDDPRAIIHLSPEQ |
| | | QQGIAELRQALSHNARSRYNEQEPLLAYVHLTRAGSTLVLFQKGAQFPLA |
| | | YFQTPLTDNQASPWGLLLLLGCQYLQAQALSSYAKTILKYYHNLPKTSLD |
| | | NWIQSSEDPRVQELLQLWPQISSQGIQPPGPWKTLVTRAEVFLTPQFSPE |
| | | PIPAALCLFSDGAARRGAYCLWKDHLLDFQAVPAPESAQKGELAGLLAGL |
| | | AAAPPEPLNIWVDSKYLYSLLRTLVLGAWLQPDPVPSYALLYKSLLRHPA |
| | | IFVGHVRSHSSASHPIASLNNYVDQL |
| BLVAU_ | 8,008 | GVLDAPPSHIGLEHLPPPPEVPQFPLNLERLQALQDLVHRSLEAGYISPW |
| P25059_ | | DGPGNNPVFPVRKPNGAWRFVHDLRVTNALTKPIPALSPGPPDLTAIPTH |
| 2mut | | LPHIICLDLKDAFFQIPVEDRFRSYFAFTLPTPGGLQPHRRFAWRVLPQG |
| | | FINSPALFQRALQEPLRQVSAAFSQSLLVSYMDDILYVSPTEEQRLQCYQ |
| | | TMAAHLRDLGFQVASEKTRQTPSPVPFLGQMVHERMVTYQSLPTLQISSP |
| | | ISLHQLQTVLGDLQWVSRGTPTTRRPLQLLYSSLKPIDDPRAIIHLSPEQ |
| | | QQGIAELRQALSHNARSRYNEQEPLLAYVHLTRAGSTLVLFQKGAQFPLA |
| | | YFQTPLTDNQASPWGLLLLLGCQYLQAQALSSYAKTILKYYHNLPKTSLD |
| | | NWIQSSEDPRVQELLQLWPQISSQGIQPPGPWKTLVTRAEVFLTPQFSPE |
| | | PIPAALCLFSDGAARRGAYCLWKDHLLDFQAVPAPESAQKGELAGLLAGL |
| | | AAAPPEPLNIWVDSKYLYSLLRTLVLGAWLQPDPVPSYALLYKSLLRHPA |
| | | IFVGHVRSHSSASHPIASLNNYVDQL |
| BLVJ_ | 8,009 | GVLDTPPSHIGLEHLPPPPEVPQFPLNLERLQALQDLVHRSLEAGYISPW |
| P03361 | | DGPGNNPVFPVRKPNGAWRFVHDLRATNALTKPIPALSPGPPDLTAIPTH |
| | | PPHIICLDLKDAFFQIPVEDRFRFYLSFTLPSPGGLQPHRRFAWRVLPQG |
| | | FINSPALFERALQEPLRQVSAAFSQSLLVSYMDDILYASPTEEQRSQCYQ |
| | | ALAARLRDLGFQVASEKTSQTPSPVPFLGQMVHEQIVTYQSLPTLQISSP |
| | | ISLHQLQAVLGDLQWVSRGTPTTRRPLQLLYSSLKRHHDPRAIIQLSPEQ |
| | | LQGIAELRQALSHNARSRYNEQEPLLAYVHLTRAGSTLVLFQKGAQFPLA |
| | | YFQTPLTDNQASPWGLLLLLGCQYLQTQALSSYAKPILKYYHNLPKTSLD |
| | | NWIQSSEDPRVQELLQLWPQISSQGIQPPGPWKTLITRAEVFLTPQFSPD |
| | | PIPAALCLFSDGATGRGAYCLWKDHLLDFQAVPAPESAQKGELAGLLAGL |
| | | AAAPPEPVNIWVDSKYLYSLLRTLVLGAWLQPDPVPSYALLYKSLLRHPA |
| | | IVVGHVRSHSSASHPIASLNNYVDQL |
| BLVJ_ | 8,010 | GVLDTPPSHIGLEHLPPPPEVPQFPLNLERLQALQDLVHRSLEAGYISPW |
| P03361_ | | DGPGNNPVFPVRKPNGAWRFVHDLRATNALTKPIPALSPGPPDLTAIPTH |
| 2mut | | PPHIICLDLKDAFFQIPVEDRFRFYLSFTLPSPGGLQPHRRFAWRVLPQG |
| | | FINSPALFNRALQEPLRQVSAAFSQSLLVSYMDDILYASPTEEQRSQCYQ |
| | | ALAARLRDLGFQVASEKTSQTPSPVPFLGQMVHEQIVTYQSLPTLQISSP |
| | | ISLHQLQAVLGDLQWVSRGTPTTRRPLQLLYSSLKRHHDPRAIIQLSPEQ |
| | | LQGIAELRQALSHNARSRYNEQEPLLAYVHLTRAGSTLVLFQKGAQFPLA |
| | | YFQTPLTDNQASPWGLLLLLGCQYLQTQALSSYAKPILKYYHNLPKTSLD |
| | | NWIQSSEDPRVQELLQLWPQISSQGIQPPGPWKTLITRAEVFLTPQFSPD |
| | | PIPAALCLFSDGATGRGAYCLWKDHLLDFQAVPAPESAQKGELAGLLAGL |
| | | AAAPPEPVNIWVDSKYLYSLLRTWVLGAWLQPDPVPSYALLYKSLLRHPA |
| | | IVVGHVRSHSSASHPIASLNNYVDQL |
| BLVJ_ | 8,011 | GVLDTPPSHIGLEHLPPPPEVPQFPLNLERLQALQDLVHRSLEAGYISPW |
| P03361_ | | DGPGNNPVFPVRKPNGAWRFVHDLRATNALTKPIPALSPGPPDLTAPPTH |
| 2mutB | | PPHIICLDLKDAFFQIPVEDRFRFYLSFTLPSPGGLQPHRRFAWRVLPQG |
| | | FINSPALFQRALQEPLRQVSAAFSQSLLVSYMDDILYASPTEEQRSQCYQ |
| | | ALAARLRDLGFQVASEKTSQTPSPVPFLGQMVHEQIVTYQSLPTLQISSP |
| | | ISLHQLQAVLGDLQWVSRGTPTTRRPLQLLYSSLKRHHDPRAIIQLSPEQ |
| | | LQGIAELRQALSHNARSRYNEQEPLLAYVHLTRAGSTLVLFQKGAQFPLA |
| | | YFQTPLTDNQASPWGLLLLLGCQYLQTQALSSYAKPILKYYHNLPKTSLD |
| | | NWIQSSEDPRVQELLQLWPQISSQGIQPPGPWKTLITRAEVFLTPQFSPD |
| | | PIPAALCLFSDGATGRGAYCLWKDHLLDFQAVPAPESAQKGELAGLLAGL |
| | | AAAPPEPVNIWVDSKYLYSLLRTWVLGAWLQPDPVPSYALLYKSLLRHPA |
| | | IVVGHVRSHSSASHPIASLNNYVDQL |
| FFV_ | 8,012 | MDLLKPLTVERKGVKIKGYWNSQADITCVPKDLLQGEEPVRQQNVTTIHG |
| O93209 | | TQEGDVYYVNLKIDGRRINTEVIGTTLDYAIITPGDVPWILKKPLELTIK |
| | | LDLEEQQGTLLNNSILSKKGKEELKQLFEKYSALWQSWENQVGHRRIRPH |
| | | KIATGTVKPTPQKQYHINPKAKPDIQIVINDLLKQGVLIQKESTMNTPVY |
| | | PVPKPNGRWRMVLDYRAVNKVTPLIAVQNQHSYGILGSLFKGRYKTTIDL |
| | | SNGFWAHPIVPEDYWITAFTWQGKQYCWTVLPQGFLNSPGLFTGDVVDLL |
| | | QGIPNVEVYVDDVYISHDSEKEHLEYLDILFNRLKEAGYIISLKKSNIAN |
| | | SIVDFLGFQITNEGRGLTDTFKEKLENITAPTTLKQLQSILGLLNFARNF |
| | | IPDFTELIAPLYALIPKSTKNYVPWQIEHSTTLETLITKLNGAEYLQGRK |
| | | GDKTLIMKVNASYTTGYIRYYNEGEKKPISYVSIVFSKTELKFTELEKLL |
| | | TTVHKGLLKALDLSMGQNIHVYSPIVSMQNIQKTPQTAKKALASRWLSWL |
| | | SYLEDPRIRFFYDPQMPALKDLPAVDTGKDNKKHPSNFQHIFYTDGSAIT |
| | | SPTKEGHLNAGMGIVYFINKDGNLQKQQEWSISLGNHTAQFAEIAAFEFA |
| | | LKKCLPLGGNILVVTDSNYVAKAYNEELDVWASNGFVNNRKKPLKHISKW |
| | | KSVADLKRLRPDVVVTHEPGHQKLDSSPHAYGNNLADQLATQASFKVH |
| FFV_ | 8,013 | MDLLKPLTVERKGVKIKGYWNSQADITCVPKDLLQGEEPVRQQNVTTIHG |
| O93209_ | | TQEGDVYYVNLKIDGRRINTEVIGTTLDYAIITPGDVPWILKKPLELTIK |
| 2mut | | LDLEEQQGTLLNNSILSKKGKEELKQLFEKYSALWQSWENQVGHRRIRPH |
| | | KIATGTVKPTPQKQYHINPKAKPDIQIVINDLLKQGVLIQKESTMNTPVY |
| | | PVPKPNGRWRMVLDYRAVNKVTPLIAVQNQHSYGILGSLFKGRYKTTIDL |
| | | SNGFWAHPIVPEDYWITAFTWQGKQYCWTVLPQGFLNSPGLFNGDVVDLL |
| | | QGIPNVEVYVDDVYISHDSEKEHLEYLDILFNRLKEAGYIISLKKSNIAN |
| | | SIVDFLGFQITNEGRGLTDTFKEKLENITAPTTLKQLQSILGLLNFARNF |
| | | IPDFTELIAPLYALIPKSPKNYVPWQIEHSTTLETLITKLNGAEYLQGRK |
| | | GDKTLIMKVNASYTTGYIRYYNEGEKKPISYVSIVFSKTELKFTELEKLL |
| | | TTVHKGLLKALDLSMGQNIHVYSPIVSMQNIQKTPQTAKKALASRWLSWL |
| | | SYLEDPRIRFFYDPQMPALKDLPAVDTGKDNKKHPSNFQHIFYTDGSAIT |
| | | SPTKEGHLNAGMGIVYFINKDGNLQKQQEWSISLGNHTAQFAEIAAFEFA |
| | | LKKCLPLGGNILVVTDSNYVAKAYNEELDVWASNGFVNNRKKPLKHISKW |
| | | KSVADLKRLRPDVVVTHEPGHQKLDSSPHAYGNNLADQLATQASFKVH |
| FFV_ | 8,014 | MDLLKPLTVERKGVKIKGYWNSQADITCVPKDLLQGEEPVRQQNVTTIHG |
| O93209_ | | TQEGDVYYVNLKIDGRRINTEVIGTTLDYAIITPGDVPWILKKPLELTIK |
| 2mutA | | LDLEEQQGTLLNNSILSKKGKEELKQLFEKYSALWQSWENQVGHRRIRPH |
| | | KIATGTVKPTPQKQYHINPKAKPDIQIVINDLLKQGVLIQKESTMNTPVY |
| | | PVPKPNGRWRMVLDYRAVNKVTPLIAVQNQHSYGILGSLFKGRYKTTIDL |
| | | SNGFWAHPIVPEDYWITAFTWQGKQYCWTVLPQGFLNSPGLFNGDVVDLL |
| | | QGIPNVEVYVDDVYISHDSEKEHLEYLDILFNRLKEAGYIISLKKSNIAN |
| | | SIVDFLGFQITNEGRGLTDTFKEKLENITAPTTLKQLQSILGKLNFARNF |
| | | IPDFTELIAPLYALIPKSPKNYVPWQIEHSTTLETLITKLNGAEYLQGRK |
| | | GDKTLIMKVNASYTTGYIRYYNEGEKKPISYVSIVFSKTELKFTELEKLL |
| | | TTVHKGLLKALDLSMGQNIHVYSPIVSMQNIQKTPQTAKKALASRWLSWL |
| | | SYLEDPRIRFFYDPQMPALKDLPAVDTGKDNKKHPSNFQHIFYTDGSAIT |
| | | SPTKEGHLNAGMGIVYFINKDGNLQKQQEWSISLGNHTAQFAEIAAFEFA |
| | | LKKCLPLGGNILVVTDSNYVAKAYNEELDVWASNGFVNNRKKPLKHISKW |
| | | KSVADLKRLRPDVVVTHEPGHQKLDSSPHAYGNNLADQLATQASFKVH |
| FFV_ | 8,015 | VPWILKKPLELTIKLDLEEQQGTLLNNSILSKKGKEELKQLFEKYSALWQ |
| O93209- | | SWENQVGHRRIRPHKIATGTVKPTPQKQYHINPKAKPDIQIVINDLLKQG |
| Pro | | VLIQKESTMNTPVYPVPKPNGRWRMVLDYRAVNKVTPLIAVQNQHSYGIL |
| | | GSLFKGRYKTTIDLSNGFWAHPIVPEDYWITAFTWQGKQYCWTVLPQGFL |
| | | NSPGLFTGDVVDLLQGIPNVEVYVDDVYISHDSEKEHLEYLDILFNRLKE |
| | | AGYIISLKKSNIANSIVDFLGFQITNEGRGLTDTFKEKLENITAPTTLKQ |
| | | LQSILGLLNFARNFIPDFTELIAPLYALIPKSTKNYVPWQIEHSTTLETL |
| | | ITKLNGAEYLQGRKGDKTLIMKVNASYTTGYIRYYNEGEKKPISYVSIVF |
| | | SKTELKFTELEKLLTTVHKGLLKALDLSMGQNIHVYSPIVSMQNIQKTPQ |
| | | TAKKALASRWLSWLSYLEDPRIRFFYDPQMPALKDLPAVDTGKDNKKHPS |
| | | NFQHIFYTDGSAITSPTKEGHLNAGMGIVYFINKDGNLQKQQEWSISLGN |
| | | HTAQFAEIAAFEFALKKCLPLGGNILVVTDSNYVAKAYNEELDVWASNGF |
| | | VNNRKKPLKHISKWKSVADLKRLRPDVVVTHEPGHQKLDSSPHAYGNNLA |
| | | DQLATQASFKVH |
| FFV_ | 8,016 | VPWILKKPLELTIKLDLEEQQGTLLNNSILSKKGKEELKQLFEKYSALWQ |
| O93209- | | SWENQVGHRRIRPHKIATGTVKPTPQKQYHINPKAKPDIQIVINDLLKQG |
| Pro_ | | VLIQKESTMNTPVYPVPKPNGRWRMVLDYRAVNKVTPLIAVQNQHSYGIL |
| 2mut | | GSLFKGRYKTTIDLSNGFWAHPIVPEDYWITAFTWQGKQYCWTVLPQGFL |
| | | NSPGLFNGDWVDLLQGIPNVEVYVDDVYISHDSEKEHLEYLDILFNRLKE |
| | | AGYIISLKKSNIANSIVDFLGFQITNEGRGLTDTFKEKLENITAPTTLKQ |
| | | LQSILGLLNFARNFIPDFTELIAPLYALIPKSPKNYVPWQIEHSTTLETL |
| | | ITKLNGAEYLQGRKGDKTLIMKVNASYTTGYIRYYNEGEKKPISYVSIVF |
| | | SKTELKFTELEKLLTTVHKGLLKALDLSMGQNIHVYSPIVSMQNIQKTPQ |
| | | TAKKALASRWLSWLSYLEDPRIRFFYDPQMPALKDLPAVDTGKDNKKHPS |
| | | NFQHIFYTDGSAITSPTKEGHLNAGMGIVYFINKDGNLQKQQEWSISLGN |
| | | HTAQFAEIAAFEFALKKCLPLGGNILVVTDSNYVAKAYNEELDVWASNGF |
| | | VNNRKKPLKHISKWKSVADLKRLRPDVVVTHEPGHQKLDSSPHAYGNNLA |
| | | DQLATQASFKVH |
| FFV_ | 8,017 | VPWILKKPLELTIKLDLEEQQGTLLNNSILSKKGKEELKQLFEKYSALWQ |
| O93209- | | SWENQVGHRRIRPHKIATGTVKPTPQKQYHINPKAKPDIQIVINDLLKQG |
| Pro_ | | VLIQKESTMNTPVYPVPKPNGRWRMVLDYRAVNKVTPLIAVQNQHSYGIL |
| 2mutA | | GSLFKGRYKTTIDLSNGFWAHPIVPEDYWITAFTWQGKQYCWTVLPQGFL |
| | | NSPGLFNGDVVDLLQGIPNVEVYVDDVYISHDSEKEHLEYLDILFNRLKE |
| | | AGYIISLKKSNIANSIVDFLGFQITNEGRGLTDTFKEKLENITAPTTLKQ |
| | | LQSILGKLNFARNFIPDFTELIAPLYALIPKSPKNYVPWQIEHSTTLETL |
| | | ITKLNGAEYLQGRKGDKTLIMKVNASYTTGYIRYYNEGEKKPISYVSIVF |
| | | SKTELKFTELEKLLTTVHKGLLKALDLSMGQNIHVYSPIVSMQNIQKTPQ |
| | | TAKKALASRWLSWLSYLEDPRIRFFYDPQMPALKDLPAVDTGKDNKKHPS |
| | | NFQHIFYTDGSAITSPTKEGHLNAGMGIVYFINKDGNLQKQQEWSISLGN |
| | | HTAQFAEIAAFEFALKKCLPLGGNILVVTDSNYVAKAYNEELDVWASNGF |
| | | VNNRKKPLKHISKWKSVADLKRLRPDVVVTHEPGHQKLDSSPHAYGNNLA |
| | | DQLATQASFKVH |
| FLV_ | 8,018 | TLQLEEEYRLFEPESTQKQEMDIWLKNFPQAWAETGGMGTAHCQAPVLIQ |
| P10273 | | LKATATPISIRQYPMPHEAYQGIKPHIRRMLDQGILKPCQSPWNTPLLPV |
| | | KKPGTEDYRPVQDLREVNKRVEDIHPTVPNPYNLLSTLPPSHPWYTVLDL |
| | | KDAFFCLRLHSESQLLFAFEWRDPEIGLSGQLTWTRLPQGFKNSPTLFDE |
| | | ALHSDLADFRVRYPALVLLQYVDDLLLAAATRTECLEGTKALLETLGNKG |
| | | YRASAKKAQICLQEVTYLGYSLKDGQRWLTKARKEAILSIPVPKNSRQVR |
| | | EFLGTAGYCRLWIPGFAELAAPLYPLTRPGTLFQWGTEQQLAFEDIKKAL |
| | | LSSPALGLPDITKPFELFIDENSGFAKGVLVQKLGPWKRPVAYLSKKLDT |
| | | VASGWPPCLRMVAAIAILVKDAGKLTLGQPLTILTSHPVEALVRQPPNKW |
| | | LSNARMTHYQAMLLDAERVHFGPTVSLNPATLLPLPSGGNHHDCLQILAE |
| | | THGTRPDLTDQPLPDADLTWYTDGSSFIRNGEREAGAAVTTESEVIWAAP |
| | | LPPGTSAQRAELIALTQALKMAEGKKLTVYTDSRYAFATTHVHGEIYRRR |
| | | GLLTSEGKEIKNKNEILALLEALFLPKRLSIIHCPGHQKGDSPQAKGNRL |
| | | ADDTAKKAATETHSSLTVLP |
| FLV_ | 8,019 | TLQLEEEYRLFEPESTQKQEMDIWLKNFPQAWAETGGMGTAHCQAPVLIQ |
| P10273_ | | LKATATPISIRQYPMPHEAYQGIKPHIRRMLDQGILKPCQSPWNTPLLPV |
| 3mut | | KKPGTEDYRPVQDLREVNKRVEDIHPTVPNPYNLLSTLPPSHPWYTVLDL |
| | | KDAFFCLRLHSESQLLFAFEWRDPEIGLSGQLTWTRLPQGFKNSPTLFNE |
| | | ALHSDLADFRVRYPALVLLQYVDDLLLAAATRTECLEGTKALLETLGNKG |
| | | YRASAKKAQICLQEVTYLGYSLKDGQRWLTKARKEAILSIPVPKNSRQVR |
| | | EFLGTAGYCRLWIPGFAELAAPLYPLTRPGTLFQWGTEQQLAFEDIKKAL |
| | | LSSPALGLPDITKPFELFIDENSGFAKGVLVQKLGPWKRPVAYLSKKLDT |
| | | VASGWPPCLRMVAAIAILVKDAGKLTLGQPLTILTSHPVEALVRQPPNKW |
| | | LSNARMTHYQAMLLDAERVHFGPTVSLNPATLLPLPSGGNHHDCLQILAE |
| | | THGTRPDLTDQPLPDADLTWYTDGSSFIRNGEREAGAAVTTESEVIWAAP |
| | | LPPGTSAQRAELIALTQALKMAEGKKLTVYTDSRYAFATTHVHGEIYRRR |
| | | GWLTSEGKEIKNKNEILALLEALFLPKRLSIIHCPGHQKGDSPQAKGNRL |
| | | ADDTAKKAATETHSSLTVLP |
| FLV_ | 8,020 | TLQLEEEYRLFEPESTQKQEMDIWLKNFPQAWAETGGMGTAHCQAPVLIQ |
| P10273_ | | LKATATPISIRQYPMPHEAYQGIKPHIRRMLDQGILKPCQSPWNTPLLPV |
| 3mutA | | KKPGTEDYRPVQDLREVNKRVEDIHPTVPNPYNLLSTLPPSHPWYTVLDL |
| | | KDAFFCLRLHSESQLLFAFEWRDPEIGLSGQLTWTRLPQGFKNSPTLFNE |
| | | ALHSDLADFRVRYPALVLLQYVDDLLLAAATRTECLEGTKALLETLGNKG |
| | | YRASAKKAQICLQEVTYLGYSLKDGQRWLTKARKEAILSIPVPKNSRQVR |
| | | EFLGKAGYCRLFIPGFAELAAPLYPLTRPGTLFQWGTEQQLAFEDIKKAL |
| | | LSSPALGLPDITKPFELFIDENSGFAKGVLVQKLGPWKRPVAYLSKKLDT |
| | | VASGWPPCLRMVAAIAILVKDAGKLTLGQPLTILTSHPVEALVRQPPNKW |
| | | LSNARMTHYQAMLLDAERVHFGPTVSLNPATLLPLPSGGNHHDCLQILAE |
| | | THGTRPDLTDQPLPDADLTWYTDGSSFIRNGEREAGAAVTTESEVIWAAP |
| | | LPPGTSAQRAELIALTQALKMAEGKKLTVYTDSRYAFATTHVHGEIYRRR |
| | | GWLTSEGKEIKNKNEILALLEALFLPKRLSIIHCPGHQKGDSPQAKGNRL |
| | | ADDTAKKAATETHSSLTVLP |
| FOAMV_ | 8,021 | MNPLQLLQPLPAEIKGTKLLAHWNSGATITCIPESFLEDEQPIKKTLIKT |
| P14350 | | IHGEKQQNVYYVTFKVKGRKVEAEVIASPYEYILLSPTDVPWLTQQPLQL |
| | | TILVPLQEYQEKILSKTALPEDQKQQLKTLFVKYDNLWQHWENQVGHRKI |
| | | RPHNIATGDYPPRPQKQYPINPKAKPSIQIVIDDLLKQGVLTPQNSTMNT |
| | | PVYPVPKPDGRWRMVLDYREVNKTIPLTAAQNQHSAGILATIVRQKYKTT |
| | | LDLANGFWAHPITPESYWLTAFTWQGKQYCWTRLPQGFLNSPALFTADVV |
| | | DLLKEIPNVQVYVDDIYLSHDDPKEHVQQLEKVFQILLQAGYVVSLKKSE |
| | | IGQKTVEFLGFNITKEGRGLTDTFKTKLLNITPPKDLKQLQSILGLLNFA |
| | | RNFIPNFAELVQPLYNLIASAKGKYIEWSEENTKQLNMVIEALNTASNLE |
| | | ERLPEQRLVIKVNTSPSAGYVRYYNETGKKPIMYLNYVFSKAELKFSMLE |
| | | KLLTTMHKALIKAMDLAMGQEILVYSPIVSMTKIQKTPLPERKALPIRWI |
| | | TWMTYLEDPRIQFHYDKTLPELKHIPDVYTSSQSPVKHPSQYEGVFYTDG |
| | | SAIKSPDPTKSNNAGMGIVHATYKPEYQVLNQWSIPLGNHTAQMAEIAAV |
| | | EFACKKALKIPGPVLVITDSFYVAESANKELPYWKSNGFVNNKKKPLKHI |
| | | SKWKSIAECLSMKPDITIQHEKGISLQIPVFILKGNALADKLATQGSYVV |
| | | N |
| FOAMV_ | 8,022 | MNPLQLLQPLPAEIKGTKLLAHWNSGATITCIPESFLEDEQPIKKTLIKT |
| P14350_ | | IHGEKQQNVYYVTFKVKGRKVEAEVIASPYEYILLSPTDVPWLTQQPLQL |
| 2mut | | TILVPLQEYQEKILSKTALPEDQKQQLKTLFVKYDNLWQHWENQVGHRKI |
| | | RPHNIATGDYPPRPQKQYPINPKAKPSIQIVIDDLLKQGVLTPQNSTMNT |
| | | PVYPVPKPDGRWRMVLDYREVNKTIPLTAAQNQHSAGILATIVRQKYKTT |
| | | LDLANGFWAHPITPESYWLTAFTWQGKQYCWTRLPQGFLNSPALFNADVV |
| | | DLLKEIPNVQVYVDDIYLSHDDPKEHVQQLEKVFQILLQAGYVVSLKKSE |
| | | IGQKTVEFLGFNITKEGRGLTDTFKTKLLNITPPKDLKQLQSILGLLNFA |
| | | RNFIPNFAELVQPLYNLIAPAKGKYIEWSEENTKQLNMVIEALNTASNLE |
| | | ERLPEQRLVIKVNTSPSAGYVRYYNETGKKPIMYLNYVFSKAELKFSMLE |
| | | KLLTTMHKALIKAMDLAMGQEILVYSPIVSMTKIQKTPLPERKALPIRWI |
| | | TWMTYLEDPRIQFHYDKTLPELKHIPDVYTSSQSPVKHPSQYEGVFYTDG |
| | | SAIKSPDPTKSNNAGMGIVHATYKPEYQVLNQWSIPLGNHTAQMAEIAAV |
| | | EFACKKALKIPGPVLVITDSFYVAESANKELPYWKSNGFVNNKKKPLKHI |
| | | SKWKSIAECLSMKPDITIQHEKGISLQIPVFILKGNALADKLATQGSYVV |
| | | N |
| FOAMV_ | 8,023 | MNPLQLLQPLPAEIKGTKLLAHWNSGATITCIPESFLEDEQPIKKTLIKT |
| P14350_ | | IHGEKQQNVYYVTFKVKGRKVEAEVIASPYEYILLSPTDVPWLTQQPLQL |
| 2mutA | | TILVPLQEYQEKILSKTALPEDQKQQLKTLFVKYDNLWQHWENQVGHRKI |
| | | RPHNIATGDYPPRPQKQYPINPKAKPSIQIVIDDLLKQGVLTPQNSTMNT |
| | | PVYPVPKPDGRWRMVLDYREVNKTIPLTAAQNQHSAGILATIVRQKYKTT |
| | | LDLANGFWAHPITPESYWLTAFTWQGKQYCWTRLPQGFLNSPALFNADVV |
| | | DLLKEIPNVQVYVDDIYLSHDDPKEHVQQLEKVFQILLQAGYVVSLKKSE |
| | | IGQKTVEFLGFNITKEGRGLTDTFKTKLLNITPPKDLKQLQSILGKLNFA |
| | | RNFIPNFAELVQPLYNLIAPAKGKYIEWSEENTKQLNMVIEALNTASNLE |
| | | ERLPEQRLVIKVNTSPSAGYVRYYNETGKKPIMYLNYVFSKAELKFSMLE |
| | | KLLTTMHKALIKAMDLAMGQEILVYSPIVSMTKIQKTPLPERKALPIRWI |
| | | TWMTYLEDPRIQFHYDKTLPELKHIPDVYTSSQSPVKHPSQYEGVFYTDG |
| | | SAIKSPDPTKSNNAGMGIVHATYKPEYQVLNQWSIPLGNHTAQMAEIAAV |
| | | EFACKKALKIPGPVLVITDSFYVAESANKELPYWKSNGFVNNKKKPLKHI |
| | | SKWKSIAECLSMKPDITIQHEKGISLQIPVFILKGNALADKLATQGSYVV |
| | | N |
| FOAMV_ | 8,024 | VPWLTQQPLQLTILVPLQEYQEKILSKTALPEDQKQQLKTLFVKYDNLWQ |
| P14350- | | HWENQVGHRKIRPHNIATGDYPPRPQKQYPINPKAKPSIQIVIDDLLKQG |
| Pro | | VLTPQNSTMNTPVYPVPKPDGRWRMVLDYREVNKTIPLTAAQNQHSAGIL |
| | | ATIVRQKYKTTLDLANGFWAHPITPESYWLTAFTWQGKQYCWTRLPQGFL |
| | | NSPALFTADVVDLLKEIPNVQVYVDDIYLSHDDPKEHVQQLEKVFQILLQ |
| | | AGYVVSLKKSEIGQKTVEFLGFNITKEGRGLTDTFKTKLLNITPPKDLKQ |
| | | LQSILGLLNFARNFIPNFAELVQPLYNLIASAKGKYIEWSEENTKQLNMV |
| | | IEALNTASNLEERLPEQRLVIKVNTSPSAGYVRYYNETGKKPIMYLNYVF |
| | | SKAELKFSMLEKLLTTMHKALIKAMDLAMGQEILVYSPIVSMTKIQKTPL |
| | | PERKALPIRWITWMTYLEDPRIQFHYDKTLPELKHIPDVYTSSQSPVKHP |
| | | SQYEGVFYTDGSAIKSPDPTKSNNAGMGIVHATYKPEYQVLNQWSIPLGN |
| | | HTAQMAEIAAVEFACKKALKIPGPVLVITDSFYVAESANKELPYWKSNGF |
| | | VNNKKKPLKHISKWKSIAECLSMKPDITIQHEKGISLQIPVFILKGNALA |
| | | DKLATQGSYVVN |
| FOAMV_ | 8,025 | VPWLTQQPLQLTILVPLQEYQEKILSKTALPEDQKQQLKTLFVKYDNLWQ |
| P14350- | | HWENQVGHRKIRPHNIATGDYPPRPQKQYPINPKAKPSIQIVIDDLLKQG |
| Pro_ | | VLTPQNSTMNTPVYPVPKPDGRWRMVLDYREVNKTIPLTAAQNQHSAGIL |
| 2mut | | ATIVRQKYKTTLDLANGFWAHPITPESYWLTAFTWQGKQYCWTRLPQGFL |
| | | NSPALFNADVVDLLKEIPNVQVYVDDIYLSHDDPKEHVQQLEKVFQILLQ |
| | | AGYVVSLKKSEIGQKTVEFLGFNITKEGRGLTDTFKTKLLNITPPKDLKQ |
| | | LQSILGLLNFARNFIPNFAELVQPLYNLIAPAKGKYIEWSEENTKQLNMV |
| | | IEALNTASNLEERLPEQRLVIKVNTSPSAGYVRYYNETGKKPIMYLNYVF |
| | | SKAELKFSMLEKLLTTMHKALIKAMDLAMGQEILVYSPIVSMTKIQKTPL |
| | | PERKALPIRWITWMTYLEDPRIQFHYDKTLPELKHIPDVYTSSQSPVKHP |
| | | SQYEGVFYTDGSAIKSPDPTKSNNAGMGIVHATYKPEYQVLNQWSIPLGN |
| | | HTAQMAEIAAVEFACKKALKIPGPVLVITDSFYVAESANKELPYWKSNGF |
| | | VNNKKKPLKHISKWKSIAECLSMKPDITIQHEKGISLQIPVFILKGNALA |
| | | DKLATQGSYVVN |
| FOAMV_ | 8,026 | VPWLTQQPLQLTILVPLQEYQEKILSKTALPEDQKQQLKTLFVKYDNLWQ |
| P14350- | | HWENQVGHRKIRPHNIATGDYPPRPQKQYPINPKAKPSIQIVIDDLLKQG |
| Pro_ | | VLTPQNSTMNTPVYPVPKPDGRWRMVLDYREVNKTIPLTAAQNQHSAGIL |
| 2mutA | | ATIVRQKYKTTLDLANGFWAHPITPESYWLTAFTWQGKQYCWTRLPQGFL |
| | | NSPALFNADVVDLLKEIPNVQVYVDDIYLSHDDPKEHVQQLEKVFQILLQ |
| | | AGYVVSLKKSEIGQKTVEFLGFNITKEGRGLTDTFKTKLLNITPPKDLKQ |
| | | LQSILGKLNFARNFIPNFAELVQPLYNLIAPAKGKYIEWSEENTKQLNMV |
| | | IEALNTASNLEERLPEQRLVIKVNTSPSAGYVRYYNETGKKPIMYLNYVF |
| | | SKAELKFSMLEKLLTTMHKALIKAMDLAMGQEILVYSPIVSMTKIQKTPL |
| | | PERKALPIRWITWMTYLEDPRIQFHYDKTLPELKHIPDVYTSSQSPVKHP |
| | | SQYEGVFYTDGSAIKSPDPTKSNNAGMGIVHATYKPEYQVLNQWSIPLGN |
| | | HTAQMAEIAAVEFACKKALKIPGPVLVITDSFYVAESANKELPYWKSNGF |
| | | VNNKKKPLKHISKWKSIAECLSMKPDITIQHEKGISLQIPVFILKGNALA |
| | | DKLATQGSYVVN |
| GALV_ | 8,027 | VLNLEEEYRLHEKPVPSSIDPSWLQLFPTVWAERAGMGLANQVPPVVVEL |
| P21414 | | RSGASPVAVRQYPMSKEAREGIRPHIQKFLDLGVLVPCRSPWNTPLLPVK |
| | | KPGTNDYRPVQDLREINKRVQDIHPTVPNPYNLLSSLPPSYTWYSVLDLK |
| | | DAFFCLRLHPNSQPLFAFEWKDPEKGNTGQLTWTRLPQGFKNSPTLFDEA |
| | | LHRDLAPFRALNPQVVLLQYVDDLLVAAPTYEDCKKGTQKLLQELSKLGY |
| | | RVSAKKAQLCQREVTYLGYLLKEGKRWLTPARKATVMKIPVPTTPRQVRE |
| | | FLGTAGFCRLWIPGFASLAAPLYPLTKESIPFIWTEEHQQAFDHIKKALL |
| | | SAPALALPDLTKPFTLYIDERAGVARGVLTQTLGPWRRPVAYLSKKLDPV |
| | | ASGWPTCLKAVAAVALLLKDADKLTLGQNVTVIASHSLESIVRQPPDRWM |
| | | TNARMTHYQSLLLNERVSFAPPAVLNPATLLPVESEATPVHRCSEILAEE |
| | | TGTRRDLEDQPLPGVPTWYTDGSSFITEGKRRAGAPIVDGKRTVWASSLP |
| | | EGTSAQKAELVALTQALRLAEGKNINIYTDSRYAFATAHIHGAIYKQRGL |
| | | LTSAGKDIKNKEEILALLEAIHLPRRVAIIHCPGHQRGSNPVATGNRRAD |
| | | EAAKQAALSTRVLAGTTKP |
| GALV_ | 8,028 | VLNLEEEYRLHEKPVPSSIDPSWLQLFPTVWAERAGMGLANQVPPVVVEL |
| P21414_ | | RSGASPVAVRQYPMSKEAREGIRPHIQKFLDLGVLVPCRSPWNTPLLPVK |
| 3mut | | KPGTNDYRPVQDLREINKRVQDIHPTVPNPYNLLSSLPPSYTWYSVLDLK |
| | | DAFFCLRLHPNSQPLFAFEWKDPEKGNTGQLTWTRLPQGFKNSPTLFNEA |
| | | LHRDLAPFRALNPQVVLLQYVDDLLVAAPTYEDCKKGTQKLLQELSKLGY |
| | | RVSAKKAQLCQREVTYLGYLLKEGKRWLTPARKATVMKIPVPTTPRQVRE |
| | | FLGTAGFCRLWIPGFASLAAPLYPLTKPSIPFIWTEEHQQAFDHIKKALL |
| | | SAPALALPDLTKPFTLYIDERAGVARGVLTQTLGPWRRPVAYLSKKLDPV |
| | | ASGWPTCLKAVAAVALLLKDADKLTLGQNVTVIASHSLESIVRQPPDRWM |
| | | TNARMTHYQSLLLNERVSFAPPAVLNPATLLPVESEATPVHRCSEILAEE |
| | | TGTRRDLEDQPLPGVPTWYTDGSSFITEGKRRAGAPIVDGKRTVWASSLP |
| | | EGTSAQKAELVALTQALRLAEGKNINIYTDSRYAFATAHIHGAIYKQRGW |
| | | LTSAGKDIKNKEEILALLEAIHLPRRVAIIHCPGHQRGSNPVATGNRRAD |
| | | EAAKQAALSTRVLAGTTKP |
| GALV_ | 8,029 | VLNLEEEYRLHEKPVPSSIDPSWLQLFPTVWAERAGMGLANQVPPVVVEL |
| P21414_ | | RSGASPVAVRQYPMSKEAREGIRPHIQKFLDLGVLVPCRSPWNTPLLPVK |
| 3mutA | | KPGTNDYRPVQDLREINKRVQDIHPTVPNPYNLLSSLPPSYTWYSVLDLK |
| | | DAFFCLRLHPNSQPLFAFEWKDPEKGNTGQLTWTRLPQGFKNSPTLFNEA |
| | | LHRDLAPFRALNPQVVLLQYVDDLLVAAPTYEDCKKGTQKLLQELSKLGY |
| | | RVSAKKAQLCQREVTYLGYLLKEGKRWLTPARKATVMKIPVPTTPRQVRE |
| | | FLGKAGFCRLFIPGFASLAAPLYPLTKPSIPFIWTEEHQQAFDHIKKALL |
| | | SAPALALPDLTKPFTLYIDERAGVARGVLTQTLGPWRRPVAYLSKKLDPV |
| | | ASGWPTCLKAVAAVALLLKDADKLTLGQNVTVIASHSLESIVRQPPDRWM |
| | | TNARMTHYQSLLLNERVSFAPPAVLNPATLLPVESEATPVHRCSEILAEE |
| | | TGTRRDLEDQPLPGVPTWYTDGSSFITEGKRRAGAPIVDGKRTVWASSLP |
| | | EGTSAQKAELVALTQALRLAEGKNINIYTDSRYAFATAHIHGAIYKQRGW |
| | | LTSAGKDIKNKEEILALLEAIHLPRRVAIIHCPGHQRGSNPVATGNRRAD |
| | | EAAKQAALSTRVLAGTTKP |
| HTL1A_ | 8,030 | AVLGLEHLPRPPQISQFPLNPERLQALQHLVRKALEAGHIEPYTGPGNNP |
| P03362 | | VFPVKKANGTWRFIHDLRATNSLTIDLSSSSPGPPDLSSLPTTLAHLQTI |
| | | DLRDAFFQIPLPKQFQPYFAFTVPQQCNYGPGTRYAWKVLPQGFKNSPTL |
| | | FEMQLAHILQPIRQAFPQCTILQYMDDILLASPSHEDLLLLSEATMASLI |
| | | SHGLPVSENKTQQTPGTIKFLGQIISPNHLTYDAVPTVPIRSRWALPELQ |
| | | ALLGEIQWVSKGTPTLRQPLHSLYCALQRHTDPRDQIYLNPSQVQSLVQL |
| | | RQALSQNCRSRLVQTLPLLGAIMLTLTGTTTVVFQSKEQWPLVWLHAPLP |
| | | HTSQCPWGQLLASAVLLLDKYTLQSYGLLCQTIHHNISTQTFNQFIQTSD |
| | | HPSVPILLHHSHRFKNLGAQTGELWNTFLKTAAPLAPVKALMPVFTLSPV |
| | | IINTAPCLFSDGSTSRAAYILWDKQILSQRSFPLPPPHKSAQRAELLGLL |
| | | HGLSSARSWRCLNIFLDSKYLYHYLRTLALGTFQGRSSQAPFQALLPRLL |
| | | SRKVVYLHHVRSHTNLPDPISRLNALTDALLITPVLQL |
| HTL1A_ | 8,031 | AVLGLEHLPRPPQISQFPLNPERLQALQHLVRKALEAGHIEPYTGPGNNP |
| P03362_ | | VFPVKKANGTWRFIHDLRATNSLTIDLSSSSPGPPDLSSLPTTLAHLQTI |
| 2mut | | DLRDAFFQIPLPKQFQPYFAFTVPQQCNYGPGTRYAWKVLPQGFKNSPTL |
| | | FQMQLAHILQPIRQAFPQCTILQYMDDILLASPSHEDLLLLSEATMASLI |
| | | SHGLPVSENKTQQTPGTIKFLGQIISPNHLTYDAVPTVPIRSRWALPELQ |
| | | ALLGEIQWVSKGTPTLRQPLHSLYCALQPHTDPRDQIYLNPSQVQSLVQL |
| | | RQALSQNCRSRLVQTLPLLGAIMLTLTGTTTVVFQSKEQWPLVWLHAPLP |
| | | HTSQCPWGQLLASAVLLLDKYTLQSYGLLCQTIHHNISTQTFNQFIQTSD |
| | | HPSVPILLHHSHRFKNLGAQTGELWNTFLKTAAPLAPVKALMPVFTLSPV |
| | | IINTAPCLFSDGSTSRAAYILWDKQILSQRSFPLPPPHKSAQRAELLGLL |
| | | HGLSSARSWRCLNIFLDSKYLYHYLRTLALGTFQGRSSQAPFQALLPRLL |
| | | SRKVVYLHHVRSHTNLPDPISRLNALTDALLITPVLQL |
| HTL1A_ | 8,032 | AVLGLEHLPRPPQISQFPLNPERLQALQHLVRKALEAGHIEPYTGPGNNP |
| P03362_ | | VFPVKKANGTWRFIHDLRATNSLTIDLSSSSPGPPDLSSPPTTLAHLQTI |
| 2mutB | | DLRDAFFQIPLPKQFQPYFAFTVPQQCNYGPGTRYAWKVLPQGFKNSPTL |
| | | FQMQLAHILQPIRQAFPQCTILQYMDDILLASPSHEDLLLLSEATMASLI |
| | | SHGLPVSENKTQQTPGTIKFLGQIISPNHLTYDAVPTVPIRSRWALPELQ |
| | | ALLGEIQWVSKGTPTLRQPLHSLYCALQPHTDPRDQIYLNPSQVQSLVQL |
| | | RQALSQNCRSRLVQTLPLLGAIMLTLTGTTTVVFQSKEQWPLVWLHAPLP |
| | | HTSQCPWGQLLASAVLLLDKYTLQSYGLLCQTIHHNISTQTFNQFIQTSD |
| | | HPSVPILLHHSHRFKNLGAQTGELWNTFLKTAAPLAPVKALMPVFTLSPV |
| | | IINTAPCLFSDGSTSRAAYILWDKQILSQRSFPLPPPHKSAQRAELLGLL |
| | | HGLSSARSWRCLNIFLDSKYLYHYLRTLALGTFQGRSSQAPFQALLPRLL |
| | | SRKVVYLHHVRSHTNLPDPISRLNALTDALLITPVLQL |
| HTL1C_ | 8,033 | AVLGLEHLPRPPEISQFPLNPERLQALQHLVRKALEAGHIEPYTGPGNNP |
| P14078 | | VFPVKKANGTWRFIHDLRATNSLTIDLSSSSPGPPDLSSLPTTLAHLQTI |
| | | DLKDAFFQIPLPKQFQPYFAFTVPQQCNYGPGTRYAWRVLPQGFKNSPTL |
| | | FEMQLAHILQPIRQAFPQCTILQYMDDILLASPSHADLQLLSEATMASLI |
| | | SHGLPVSENKTQQTPGTIKFLGQIISPNHLTYDAVPKVPIRSRWALPELQ |
| | | ALLGEIQWVSKGTPTLRQPLHSLYCALQRHTDPRDQIYLNPSQVQSLVQL |
| | | RQALSQNCRSRLVQTLPLLGAIMLTLTGTTTVVFQSKQQWPLVWLHAPLP |
| | | HTSQCPWGQLLASAVLLLDKYTLQSYGLLCQTIHHNISTQTFNQFIQTSD |
| | | HPSVPILLHHSHRFKNLGAQTGELWNTFLKTTAPLAPVKALMPVFTLSPV |
| | | IINTAPCLFSDGSTSQAAYILWDKHILSQRSFPLPPPHKSAQRAELLGLL |
| | | HGLSSARSWRCLNIFLDSKYLYHYLRTLALGTFQGRSSQAPFQALLPRLL |
| | | SRKVVYLHHVRSHTNLPDPISRLNALTDALLITPVLQL |
| HTL1C_ | 8,034 | AVLGLEHLPRPPEISQFPLNPERLQALQHLVRKALEAGHIEPYTGPGNNP |
| P14078_ | | VFPVKKANGTWRFIHDLRATNSLTIDLSSSSPGPPDLSSLPTTLAHLQTI |
| 2mut | | DLKDAFFQIPLPKQFQPYFAFTVPQQCNYGPGTRYAWRVLPQGFKNSPTL |
| | | FQMQLAHILQPIRQAFPQCTILQYMDDILLASPSHADLQLLSEATMASLI |
| | | SHGLPVSENKTQQTPGTIKFLGQIISPNHLTYDAVPKVPIRSRWALPELQ |
| | | ALLGEIQWVSKGTPTLRQPLHSLYCALQPHTDPRDQIYLNPSQVQSLVQL |
| | | RQALSQNCRSRLVQTLPLLGAIMLTLTGTTTVVFQSKQQWPLVWLHAPLP |
| | | HTSQCPWGQLLASAVLLLDKYTLQSYGLLCQTIHHNISTQTFNQFIQTSD |
| | | HPSVPILLHHSHRFKNLGAQTGELWNTFLKTTAPLAPVKALMPVFTLSPV |
| | | IINTAPCLFSDGSTSQAAYILWDKHILSQRSFPLPPPHKSAQRAELLGLL |
| | | HGLSSARSWRCLNIFLDSKYLYHYLRTLALGTFQGRSSQAPFQALLPRLL |
| | | SRKVVYLHHVRSHTNLPDPISRLNALTDALLITPVLQL |
| HTL1L_ | 8,035 | GLEHLPRPPEISQFPLNPERLQALQHLVRKALEAGHIEPYTGPGNNPVFP |
| P0C211 | | VKKANGTWRFIHDLRATNSLTVDLSSSSPGPPDLSSLPTTLAHLQTIDLK |
| | | DAFFQIPLPKQFQPYFAFTVPQQCNYGPGTRYAWKVLPQGFKNSPTLFEM |
| | | QLASILQPIRQAFPQCVILQYMDDILLASPSPEDLQQLSEATMASLISHG |
| | | LPVSQDKTQQTPGTIKFLGQIISPNHITYDAVPTVPIRSRWALPELQALL |
| | | GEIQWVSKGTPTLRQPLHSLYCALQGHTDPRDQIYLNPSQVQSLMQLQQA |
| | | LSQNCRSRLAQTLPLLGAIMLTLTGTTTVVFQSKQQWPLVWLHAPLPHTS |
| | | QCPWGQLLASAVLLLDKYTLQSYGLLCQTIHHNISIQTFNQFIQTSDHPS |
| | | VPILLHHSHRFKNLGAQTGELWNTFLKTAAPLAPVKALTPVFTLSPIIIN |
| | | TAPCLFSDGSTSQAAYILWDKHILSQRSFPLPPPHKSAQQAELLGLLHGL |
| | | SSARSWHCLNIFLDSKYLYHYLRTLALGTFQGKSSQAPFQALLPRLLAHK |
| | | VIYLHHVRSHTNLPDPISKLNALTDALLITPIL |
| HTL1L_ | 8,036 | GLEHLPRPPEISQFPLNPERLQALQHLVRKALEAGHIEPYTGPGNNPVFP |
| P0C211_ | | VKKANGTWRFIHDLRATNSLTVDLSSSSPGPPDLSSLPTTLAHLQTIDLK |
| 2mut | | DAFFQIPLPKQFQPYFAFTVPQQCNYGPGTRYAWKVLPQGFKNSPTLFQM |
| | | QLASILQPIRQAFPQCVILQYMDDILLASPSPEDLQQLSEATMASLISHG |
| | | LPVSQDKTQQTPGTIKFLGQIISPNHITYDAVPTVPIRSRWALPELQALL |
| | | GEIQWVSKGTPTLRQPLHSLYCALQGHTDPRDQIYLNPSQVQSLMQLQQA |
| | | LSQNCRSRLAQTLPLLGAIMLTLTGTTTVVFQSKQQWPLVWLHAPLPHTS |
| | | QCPWGQLLASAVLLLDKYTLQSYGLLCQTIHHNISIQTFNQFIQTSDHPS |
| | | VPILLHHSHRFKNLGAQTGELWNTFLKTAAPLAPVKALTPVFTLSPIIIN |
| | | TAPCLFSDGSTSQAAYILWDKHILSQRSFPLPPPHKSAQQAELLGLLHGL |
| | | SSARSWHCLNIFLDSKYLYHYLRTLAWGTFQGKSSQAPFQALLPRLLAHK |
| | | VIYLHHVRSHTNLPDPISKLNALTDALLITPIL |
| HTL1L_ | 8,037 | GLEHLPRPPEISQFPLNPERLQALQHLVRKALEAGHIEPYTGPGNNPVFP |
| P0C211_ | | VKKANGTWRFIHDLRATNSLTVDLSSSSPGPPDLSSPPTTLAHLQTIDLK |
| 2mutB | | DAFFQIPLPKQFQPYFAFTVPQQCNYGPGTRYAWKVLPQGFKNSPTLFQM |
| | | QLASILQPIRQAFPQCVILQYMDDILLASPSPEDLQQLSEATMASLISHG |
| | | LPVSQDKTQQTPGTIKFLGQIISPNHITYDAVPTVPIRSRWALPELQALL |
| | | GEIQWVSKGTPTLRQPLHSLYCALQGHTDPRDQIYLNPSQVQSLMQLQQA |
| | | LSQNCRSRLAQTLPLLGAIMLTLTGTTTVVFQSKQQWPLVWLHAPLPHTS |
| | | QCPWGQLLASAVLLLDKYTLQSYGLLCQTIHHNISIQTFNQFIQTSDHPS |
| | | VPILLHHSHRFKNLGAQTGELWNTFLKTAAPLAPVKALTPVFTLSPIIIN |
| | | TAPCLFSDGSTSQAAYILWDKHILSQRSFPLPPPHKSAQQAELLGLLHGL |
| | | SSARSWHCLNIFLDSKYLYHYLRTLAWGTFQGKSSQAPFQALLPRLLAHK |
| | | VIYLHHVRSHTNLPDPISKLNALTDALLITPIL |
| HTL32_ | 8,038 | GLEHLPPPPEVSQFPLNPERLQALTDLVSRALEAKHIEPYQGPGNNPIFP |
| Q0R5R2 | | VKKPNGKWRFIHDLRATNSVTRDLASPSPGPPDLTSLPQGLPHLRTIDLT |
| | | DAFFQIPLPTIFQPYFAFTLPQPNNYGPGTRYSWRVLPQGFKNSPTLFEQ |
| | | QLSHILTPVRKTFPNSLIIQYMDDILLASPAPGELAALTDKVTNALTKEG |
| | | LPLSPEKTQATPGPIHFLGQVISQDCITYETLPSINVKSTWSLAELQSML |
| | | GELQWVSKGTPVLRSSLHQLYLALRGHRDPRDTIKLTSIQVQALRTIQKA |
| | | LTLNCRSRLVNQLPILALIMLRPTGTTAVLFQTKQKWPLVWLHTPHPATS |
| | | LRPWGQLLANAVIILDKYSLQHYGQVCKSFHHNISNQALTYYLHTSDQSS |
| | | VAILLQHSHRFHNLGAQPSGPWRSLLQMPQIFQNIDVLRPPFTISPVVIN |
| | | HAPCLFSDGSASKAAFIIWDRQVIHQQVLSLPSTCSAQAGELFGLLAGLQ |
| | | KSQPWVALNIFLDSKFLIGHLRRMALGAFPGPSTQCELHTQLLPLLQGKT |
| | | VYVHHVRSHTLLQDPISRLNEATDALMLAPLLPL |
| HTL32_ | 8,039 | GLEHLPPPPEVSQFPLNPERLQALTDLVSRALEAKHIEPYQGPGNNPIFP |
| Q0R5R2_ | | VKKPNGKWRFIHDLRATNSVTRDLASPSPGPPDLTSLPQGLPHLRTIDLT |
| 2mut | | DAFFQIPLPTIFQPYFAFTLPQPNNYGPGTRYSWRVLPQGFKNSPTLFQQ |
| | | QLSHILTPVRKTFPNSLIIQYMDDILLASPAPGELAALTDKVTNALTKEG |
| | | LPLSPEKTQATPGPIHFLGQVISQDCITYETLPSINVKSTWSLAELQSML |
| | | GELQWVSKGTPVLRSSLHQLYLALRGHRDPRDTIKLTSIQVQALRTIQKA |
| | | LTLNCRSRLVNQLPILALIMLRPTGTTAVLFQTKQKWPLVWLHTPHPATS |
| | | LRPWGQLLANAVIILDKYSLQHYGQVCKSFHHNISNQALTYYLHTSDQSS |
| | | VAILLQHSHRFHNLGAQPSGPWRSLLQMPQIFQNIDVLRPPFTISPWVIN |
| | | HAPCLFSDGSASKAAFIIWDRQVIHQQVLSLPSTCSAQAGELFGLLAGLQ |
| | | KSQPWVALNIFLDSKFLIGHLRRMAWGAFPGPSTQCELHTQLLPLLQGKT |
| | | VYVHHVRSHTLLQDPISRLNEATDALMLAPLLPL |
| HTL32_ | 8,040 | GLEHLPPPPEVSQFPLNPERLQALTDLVSRALEAKHIEPYQGPGNNPIFP |
| Q0R5R2_ | | VKKPNGKWRFIHDLRATNSVTRDLASPSPGPPDLTSPPQGLPHLRTIDLT |
| 2mutB | | DAFFQIPLPTIFQPYFAFTLPQPNNYGPGTRYSWRVLPQGFKNSPTLFQQ |
| | | QLSHILTPVRKTFPNSLIIQYMDDILLASPAPGELAALTDKVTNALTKEG |
| | | LPLSPEKTQATPGPIHFLGQVISQDCITYETLPSINVKSTWSLAELQSML |
| | | GELQWVSKGTPVLRSSLHQLYLALRGHRDPRDTIKLTSIQVQALRTIQKA |
| | | LTLNCRSRLVNQLPILALIMLRPTGTTAVLFQTKQKWPLVWLHTPHPATS |
| | | LRPWGQLLANAVIILDKYSLQHYGQVCKSFHHNISNQALTYYLHTSDQSS |
| | | VAILLQHSHRFHNLGAQPSGPWRSLLQMPQIFQNIDVLRPPFTISPVVIN |
| | | HAPCLFSDGSASKAAFIIWDRQVIHQQVLSLPSTCSAQAGELFGLLAGLQ |
| | | KSQPWVALNIFLDSKFLIGHLRRMAWGAFPGPSTQCELHTQLLPLLQGKT |
| | | VYVHHVRSHTLLQDPISRLNEATDALMLAPLLPL |
| HTL3P_ | 8,041 | GLEHLPPPPEVSQFPLNPERLQALTDLVSRALEAKHIEPYQGPGNNPIFP |
| Q4U0X6 | | VKKPNGKWRFIHDLRATNSLTRDLASPSPGPPDLTSLPQDLPHLRTIDLT |
| | | DAFFQIPLPAVFQPYFAFTLPQPNNHGPGTRYSWRVLPQGFKNSPTLFEQ |
| | | QLSHILAPVRKAFPNSLIIQYMDDILLASPALRELTALTDKVTNALTKEG |
| | | LPMSLEKTQATPGSIHFLGQVISPDCITYETLPSIHVKSIWSLAELQSML |
| | | GELQWVSKGTPVLRSSLHQLYLALRGHRDPRDTIELTSTQVQALKTIQKA |
| | | LALNCRSRLVSQLPILALIILRPTGTTAVLFQTKQKWPLVWLHTPHPATS |
| | | LRPWGQLLANAIITLDKYSLQHYGQICKSFHHNISNQALTYYLHTSDQSS |
| | | VAILLQHSHRFHNLGAQPSGPWRSLLQVPQIFQNIDVLRPPFIISPVVID |
| | | HAPCLFSDGATSKAAFILWDKQVIHQQVLPLPSTCSAQAGELFGLLAGLQ |
| | | KSKPWPALNIFLDSKFLIGHLRRMALGAFLGPSTQCDLHARLFPLLQGKT |
| | | VYVHHVRSHTLLQDPISRLNEATDALMLAPLLPL |
| HTL3P_ | 8,042 | GLEHLPPPPEVSQFPLNPERLQALTDLVSRALEAKHIEPYQGPGNNPIFP |
| Q4U0X6_ | | VKKPNGKWRFIHDLRATNSLTRDLASPSPGPPDLTSLPQDLPHLRTIDLT |
| 2mut | | DAFFQIPLPAVFQPYFAFTLPQPNNHGPGTRYSWRVLPQGFKNSPTLFQQ |
| | | QLSHILAPVRKAFPNSLIIQYMDDILLASPALRELTALTDKVTNALTKEG |
| | | LPMSLEKTQATPGSIHFLGQVISPDCITYETLPSIHVKSIWSLAELQSML |
| | | GELQWVSKGTPVLRSSLHQLYLALRGHRDPRDTIELTSTQVQALKTIQKA |
| | | LALNCRSRLVSQLPILALIILRPTGTTAVLFQTKQKWPLVWLHTPHPATS |
| | | LRPWGQLLANAIITLDKYSLQHYGQICKSFHHNISNQALTYYLHTSDQSS |
| | | VAILLQHSHRFHNLGAQPSGPWRSLLQVPQIFQNIDVLRPPFIISPVVID |
| | | HAPCLFSDGATSKAAFILWDKQVIHQQVLPLPSTCSAQAGELFGLLAGLQ |
| | | KSKPWPALNIFLDSKFLIGHLRRMAWGAFLGPSTQCDLHARLFPLLQGKT |
| | | VYVHHVRSHTLLQDPISRLNEATDALMLAPLLPL |
| HTL3P_ | 8,043 | GLEHLPPPPEVSQFPLNPERLQALTDLVSRALEAKHIEPYQGPGNNPIFP |
| Q4U0X6_ | | VKKPNGKWRFIHDLRATNSLTRDLASPSPGPPDLTSPPQDLPHLRTIDLT |
| 2mutB | | DAFFQIPLPAVFQPYFAFTLPQPNNHGPGTRYSWRVLPQGFKNSPTLFQQ |
| | | QLSHILAPVRKAFPNSLIIQYMDDILLASPALRELTALTDKVTNALTKEG |
| | | LPMSLEKTQATPGSIHFLGQVISPDCITYETLPSIHVKSIWSLAELQSML |
| | | GELQWVSKGTPVLRSSLHQLYLALRGHRDPRDTIELTSTQVQALKTIQKA |
| | | LALNCRSRLVSQLPILALIILRPTGTTAVLFQTKQKWPLVWLHTPHPATS |
| | | LRPWGQLLANAIITLDKYSLQHYGQICKSFHHNISNQALTYYLHTSDQSS |
| | | VAILLQHSHRFHNLGAQPSGPWRSLLQVPQIFQNIDVLRPPFIISPVVID |
| | | HAPCLFSDGATSKAAFILWDKQVIHQQVLPLPSTCSAQAGELFGLLAGLQ |
| | | KSKPWPALNIFLDSKFLIGHLRRMAWGAFLGPSTQCDLHARLFPLLQGKT |
| | | VYVHHVRSHTLLQDPISRLNEATDALMLAPLLPL |
| HTLV2_ | 8,044 | HLPPPPQVDQFPLNLPERLQALNDLVSKALEAGHIEPYSGPGNNPVFPVK |
| P03363_ | | KPNGKWRFIHDLRATNAITTTLTSPSPGPPDLTSLPTALPHLQTIDLTDA |
| 2mut | | FFQIPLPKQYQPYFAFTIPQPCNYGPGTRYAWTVLPQGFKNSPTLFQQQL |
| | | AAVLNPMRKMFPTSTIVQYMDDILLASPTNEELQQLSQLTLQALTTHGLP |
| | | ISQEKTQQTPGQIRFLGQVISPNHITYESTPTIPIKSQWTLTELQVILGE |
| | | IQWVSKGTPILRKHLQSLYSALHPYRDPRACITLTPQQLHALHAIQQALQ |
| | | HNCRGRLNPALPLLGLISLSTSGTTSVIFQPKQNWPLAWLHTPHPPTSLC |
| | | PWGHLLACTILTLDKYTLQHYGQLCQSFHHNMSKQALCDFLRNSPHPSVG |
| | | ILIHHMGRFHNLGSQPSGPWKTLLHLPTLLQEPRLLRPIFTLSPVVLDTA |
| | | PCLFSDGSPQKAAYVLWDQTILQQDITPLPSHETHSAQKGELLALICGLR |
| | | AAKPWPSLNIFLDSKYLIKYLHSLAIGAFLGTSAHQTLQAALPPLLQGKT |
| | | IYLHHVRSHTNLPDPISTFNEYTDSLILAPLVPL |
| JSRV_ | 8,045 | PLGTSDSPVTHADPIDWKSEEPVWVDQWPLTQEKLSAAQQLVQEQLRLGH |
| P31623 | | IEPSTSAWNSPIFVIKKKSGKWRLLQDLRKVNETMMHMGALQPGLPTPSA |
| | | IPDKSYIIVIDLKDCFYTIPLAPQDCKRFAFSLPSVNFKEPMQRYQWRVL |
| | | PQGMTNSPTLCQKFVATAIAPVRQRFPQLYLVHYMDDILLAHTDEHLLYQ |
| | | AFSILKQHLSLNGLVIADEKIQTHFPYNYLGFSLYPRVYNTQLVKLQTDH |
| | | LKTLNDFQKLLGDINWIRPYLKLPTYTLQPLFDILKGDSDPASPRTLSLE |
| | | GRTALQSIEEAIRQQQITYCDYQRSWGLYILPTPRAPTGVLYQDKPLRWI |
| | | YLSATPTKHLLPYYELVAKIIAKGRHEAIQYFGMEPPFICVPYALEQQDW |
| | | LFQFSDNWSIAFANYPGQITHHYPSDKLLQFASSHAFIFPKIVRRQPIPE |
| | | ATLIFTDGSSNGTAALIINHQTYYAQTSFSSAQVVELFAVHQALLTVPTS |
| | | FNLFTDSSYVVGALQMIETVPIIGTTSPEVLNLFTLIQQVLHCRQHPCFF |
| | | GHIRAHSTLPGALVQGNHTADVLTKQVFFQS |
| JSRV_ | 8,046 | PLGTSDSPVTHADPIDWKSEEPVWVDQWPLTQEKLSAAQQLVQEQLRLGH |
| P31623_ | | IEPSTSAWNSPIFVIKKKSGKWRLLQDLRKVNETMMHMGALQPGLPTPSP |
| 2mutB | | IPDKSYIIVIDLKDCFYTIPLAPQDCKRFAFSLPSVNFKEPMQRYQWRVL |
| | | PQGMTNSPTLCQKFVATAIAPVRQRFPQLYLVHYMDDILLAHTDEHLLYQ |
| | | AFSILKQHLSLNGLVIADEKIQTHFPYNYLGFSLYPRVYNTQLVKLQTDH |
| | | LKTLNDFQKLLGDINWIRPYLKLPTYTLQPLFDILKGDSDPASPRTLSLE |
| | | GRTALQSIEEAIRQQQITYCDYQRSWGLYILPTPRAPTGVLYQDKPLRWI |
| | | YLSATPTKHLLPYYELVAKIIAKGRHEAIQYFGMEPPFICVPYALEQQDW |
| | | LFQFSDNWSIAFANYPGQITHHYPSDKLLQFASSHAFIFPKIVRRQPIPE |
| | | ATLIFTDGSSNGTAALIINHQTYYAQTSFSSAQVVELFAVHQALLTVPTS |
| | | FNLFTDSSYVVGALQMIETVPIIGTTSPEVLNLFTLIQQVLHCRQHPCFF |
| | | GHIRAHSTLPGALVQGNHTADVLTKQVFFQS |
| KORV_ | 8,047 | TLGDQGSRGSDPLPEPRVTLTVEGIPTEFLVNTGAEHSVLTKPMGKMGSK |
| Q9TTC1 | | RTVVAGATGSKVYPWTTKRLLKIGQKQVTHSFLVIPECPAPLLGRDLLTK |
| | | LKAQIQFSTEGPQVTWEDRPAMCLVLNLEEEYRLHEKPVPPSIDPSWLQL |
| | | FPMVWAEKAGMGLANQVPPVVVELKSDASPVAVRQYPMSKEAREGIRPHI |
| | | QRFLDLGILVPCQSPWNTPLLPVKKPGTNDYRPVQDLREVNKRVQDIHPT |
| | | VPNPYNLLSSLPPSHTWYSVLDLKDAFFCLKLHPNSQPLFAFEWRDPEKG |
| | | NTGQLTWTRLPQGFKNSPTLFDEALHRDLASFRALNPQVVMLQYVDDLLV |
| | | AAPTYRDCKEGTRRLLQELSKLGYRVSAKKAQLCREEVTYLGYLLKGGKR |
| | | WLTPARKATVMKIPTPTTPRQVREFLGTAGFCRLWIPGFASLAAPLYPLT |
| | | REKVPFTWTEAHQEAFGRIKEALLSAPALALPDLTKPFALYVDEKEGVAR |
| | | GVLTQTLGPWRRPVAYLSKKLDPVASGWPTCLKAIAAVALLLKDADKLTL |
| | | GQNVLVIAPHNLESIVRQPPDRWMTNARMTHYQSLLLNERVSFAPPAILN |
| | | PATLLPVESDDTPIHICSEILAEETGTRPDLRDQPLPGVPAWYTDGSSFI |
| | | MDGRRQAGAAIVDNKRTVWASNLPEGTSAQKAELIALTQALRLAEGKSIN |
| | | IYTDSRYAFATAHVHGAIYKQRGLLTSAGKDIKNKEEILALLEAIHLPKR |
| | | VAIIHCPGHQRGTDPVATGNRKADEAAKQAAQSTRILTETTKN |
| KORV_ | 8,048 | TLGDQGSRGSDPLPEPRVTLTVEGIPTEFLVNTGAEHSVLTKPMGKMGSK |
| Q9TTC1_ | | RTVVAGATGSKVYPWTTKRLLKIGQKQVTHSFLVIPECPAPLLGRDLLTK |
| 3mut | | LKAQIQFSTEGPQVTWEDRPAMCLVLNLEEEYRLHEKPVPPSIDPSWLQL |
| | | FPMVWAEKAGMGLANQVPPVVVELKSDASPVAVRQYPMSKEAREGIRPHI |
| | | QRFLDLGILVPCQSPWNTPLLPVKKPGTNDYRPVQDLREVNKRVQDIHPT |
| | | VPNPYNLLSSLPPSHTWYSVLDLKDAFFCLKLHPNSQPLFAFEWRDPEKG |
| | | NTGQLTWTRLPQGFKNSPTLFNEALHRDLASFRALNPQVVMLQYVDDLLV |
| | | AAPTYRDCKEGTRRLLQELSKLGYRVSAKKAQLCREEVTYLGYLLKGGKR |
| | | WLTPARKATVMKIPTPTTPRQVREFLGTAGFCRLWIPGFASLAAPLYPLT |
| | | RPKVPFTWTEAHQEAFGRIKEALLSAPALALPDLTKPFALYVDEKEGVAR |
| | | GVLTQTLGPWRRPVAYLSKKLDPVASGWPTCLKAIAAVALLLKDADKLTL |
| | | GQNVLVIAPHNLESIVRQPPDRWMTNARMTHYQSLLLNERVSFAPPAILN |
| | | PATLLPVESDDTPIHICSEILAEETGTRPDLRDQPLPGVPAWYTDGSSFI |
| | | MDGRRQAGAAIVDNKRTVWASNLPEGTSAQKAELIALTQALRLAEGKSIN |
| | | IYTDSRYAFATAHVHGAIYKQRGWLTSAGKDIKNKEEILALLEAIHLPKR |
| | | VAIIHCPGHQRGTDPVATGNRKADEAAKQAAQSTRILTETTKN |
| KORV_ | 8,049 | TLGDQGSRGSDPLPEPRVTLTVEGIPTEFLVNTGAEHSVLTKPMGKMGSK |
| Q9TTC1_ | | RTVVAGATGSKVYPWTTKRLLKIGQKQVTHSFLVIPECPAPLLGRDLLTK |
| 3mutA | | LKAQIQFSTEGPQVTWEDRPAMCLVLNLEEEYRLHEKPVPPSIDPSWLQL |
| | | FPMVWAEKAGMGLANQVPPVVVELKSDASPVAVRQYPMSKEAREGIRPHI |
| | | QRFLDLGILVPCQSPWNTPLLPVKKPGTNDYRPVQDLREVNKRVQDIHPT |
| | | VPNPYNLLSSLPPSHTWYSVLDLKDAFFCLKLHPNSQPLFAFEWRDPEKG |
| | | NTGQLTWTRLPQGFKNSPTLFNEALHRDLASFRALNPQVVMLQYVDDLLV |
| | | AAPTYRDCKEGTRRLLQELSKLGYRVSAKKAQLCREEVTYLGYLLKGGKR |
| | | WLTPARKATVMKIPTPTTPRQVREFLGKAGFCRLFIPGFASLAAPLYPLT |
| | | RPKVPFTWTEAHQEAFGRIKEALLSAPALALPDLTKPFALYVDEKEGVAR |
| | | GVLTQTLGPWRRPVAYLSKKLDPVASGWPTCLKAIAAVALLLKDADKLTL |
| | | GQNVLVIAPHNLESIVRQPPDRWMTNARMTHYQSLLLNERVSFAPPAILN |
| | | PATLLPVESDDTPIHICSEILAEETGTRPDLRDQPLPGVPAWYTDGSSFI |
| | | MDGRRQAGAAIVDNKRTVWASNLPEGTSAQKAELIALTQALRLAEGKSIN |
| | | IYTDSRYAFATAHVHGAIYKQRGWLTSAGKDIKNKEEILALLEAIHLPKR |
| | | VAIIHCPGHQRGTDPVATGNRKADEAAKQAAQSTRILTETTKN |
| KORV_ | 8,050 | LLGRDLLTKLKAQIQFSTEGPQVTWEDRPAMCLVLNLEEEYRLHEKPVPP |
| Q9TTC1- | | SIDPSWLQLFPMVWAEKAGMGLANQVPPVVVELKSDASPVAVRQYPMSKE |
| Pro | | AREGIRPHIQRFLDLGILVPCQSPWNTPLLPVKKPGTNDYRPVQDLREVN |
| | | KRVQDIHPTVPNPYNLLSSLPPSHTWYSVLDLKDAFFCLKLHPNSQPLFA |
| | | FEWRDPEKGNTGQLTWTRLPQGFKNSPTLFDEALHRDLASFRALNPQVVM |
| | | LQYVDDLLVAAPTYRDCKEGTRRLLQELSKLGYRVSAKKAQLCREEVTYL |
| | | GYLLKGGKRWLTPARKATVMKIPTPTTPRQVREFLGTAGFCRLWIPGFAS |
| | | LAAPLYPLTREKVPFTWTEAHQEAFGRIKEALLSAPALALPDLTKPFALY |
| | | VDEKEGVARGVLTQTLGPWRRPVAYLSKKLDPVASGWPTCLKAIAAVALL |
| | | LKDADKLTLGQNVLVIAPHNLESIVRQPPDRWMTNARMTHYQSLLLNERV |
| | | SFAPPAILNPATLLPVESDDTPIHICSEILAEETGTRPDLRDQPLPGVPA |
| | | WYTDGSSFIMDGRRQAGAAIVDNKRTVWASNLPEGTSAQKAELIALTQAL |
| | | RLAEGKSINIYTDSRYAFATAHVHGAIYKQRGLLTSAGKDIKNKEEILAL |
| | | LEAIHLPKRVAIIHCPGHQRGTDPVATGNRKADEAAKQAAQSTRILTETT |
| | | KN |
| KORV_ | 8,051 | LLGRDLLTKLKAQIQFSTEGPQVTWEDRPAMCLVLNLEEEYRLHEKPVPP |
| Q9TTC1- | | SIDPSWLQLFPMVWAEKAGMGLANQVPPVVVELKSDASPVAVRQYPMSKE |
| Pro_ | | AREGIRPHIQRFLDLGILVPCQSPWNTPLLPVKKPGTNDYRPVQDLREVN |
| 3mut | | KRVQDIHPTVPNPYNLLSSLPPSHTWYSVLDLKDAFFCLKLHPNSQPLFA |
| | | FEWRDPEKGNTGQLTWTRLPQGFKNSPTLFNEALHRDLASFRALNPQVVM |
| | | LQYVDDLLVAAPTYRDCKEGTRRLLQELSKLGYRVSAKKAQLCREEVTYL |
| | | GYLLKGGKRWLTPARKATVMKIPTPTTPRQVREFLGTAGFCRLWIPGFAS |
| | | LAAPLYPLTRPKVPFTWTEAHQEAFGRIKEALLSAPALALPDLTKPFALY |
| | | VDEKEGVARGVLTQTLGPWRRPVAYLSKKLDPVASGWPTCLKAIAAVALL |
| | | LKDADKLTLGQNVLVIAPHNLESIVRQPPDRWMTNARMTHYQSLLLNERV |
| | | SFAPPAILNPATLLPVESDDTPIHICSEILAEETGTRPDLRDQPLPGVPA |
| | | WYTDGSSFIMDGRRQAGAAIVDNKRTVWASNLPEGTSAQKAELIALTQAL |
| | | RLAEGKSINIYTDSRYAFATAHVHGAIYKQRGWLTSAGKDIKNKEEILAL |
| | | LEAIHLPKRVAIIHCPGHQRGTDPVATGNRKADEAAKQAAQSTRILTETT |
| | | KN |
| KORV_ | 8,052 | LLGRDLLTKLKAQIQFSTEGPQVTWEDRPAMCLVLNLEEEYRLHEKPVPP |
| Q9TTC1- | | SIDPSWLQLFPMVWAEKAGMGLANQVPPVVVELKSDASPVAVRQYPMSKE |
| Pro_ | | AREGIRPHIQRFLDLGILVPCQSPWNTPLLPVKKPGTNDYRPVQDLREVN |
| 3mutA | | KRVQDIHPTVPNPYNLLSSLPPSHTWYSVLDLKDAFFCLKLHPNSQPLFA |
| | | FEWRDPEKGNTGQLTWTRLPQGFKNSPTLFNEALHRDLASFRALNPQVVM |
| | | LQYVDDLLVAAPTYRDCKEGTRRLLQELSKLGYRVSAKKAQLCREEVTYL |
| | | GYLLKGGKRWLTPARKATVMKIPTPTTPRQVREFLGKAGFCRLFIPGFAS |
| | | LAAPLYPLTRPKVPFTWTEAHQEAFGRIKEALLSAPALALPDLTKPFALY |
| | | VDEKEGVARGVLTQTLGPWRRPVAYLSKKLDPVASGWPTCLKAIAAVALL |
| | | LKDADKLTLGQNVLVIAPHNLESIVRQPPDRWMTNARMTHYQSLLLNERV |
| | | SFAPPAILNPATLLPVESDDTPIHICSEILAEETGTRPDLRDQPLPGVPA |
| | | WYTDGSSFIMDGRRQAGAAIVDNKRTVWASNLPEGTSAQKAELIALTQAL |
| | | RLAEGKSINIYTDSRYAFATAHVHGAIYKQRGWLTSAGKDIKNKEEILAL |
| | | LEAIHLPKRVAIIHCPGHQRGTDPVATGNRKADEAAKQAAQSTRILTETT |
| | | KN |
| MLVAV_ | 8,053 | TLNLEDEYRLYETSAEPEVSPGSTWLSDFPQAWAETGGMGLAVRQAPLII |
| P03356 | | PLKATSTPVSIKQYPMSQEAKLGIKPHIQRLLDQGILVPCQSPWNTPLLP |
| | | VKKPGTNDYRPVQDLREVNKRVEDIHPTVPNPYNLLSGLPPSHRWYTVLD |
| | | LKDAFFCLRLHPTSQPLFAFEWRDPGMGISGQLTWTRLPQGFKNSPTLFD |
| | | EALHRDLADFRIQHPDLILLQYVDDILLAATSELDCQQGTRALLLTLGNL |
| | | GYRASAKKAQLCQKQVKYLGYLLKEGQRWLTEARKETVMGQPTPKTPRQL |
| | | REFLGTAGFCRLWIPGFAEMAAPLYPLTKTGTLFNWGPDQQKAYQEIKQA |
| | | LLTAPALGLPDLTKPFELFVDEKQGYAKGVLTQKLGPWRRPVAYLSKKLD |
| | | PVAAGWPPCLRMVAAIAVLRKDAGKLTMGQPLVILAPHAVEALVKQPPDR |
| | | WLSNARMTHYQAMLLDTDRVQFGPVVALNPATLLPLPEEGAPHDCLEILA |
| | | ETHGTRPDLTDQPIPDADHTWYTDGSSFLQEGQRKAGAAVTTETEVIWAR |
| | | ALPAGTSAQRAELIALTQALKMAEGKRLNVYTDSRYAFATAHIHGEIYRR |
| | | RGLLTSEGREIKNKSEILALLKALFLPKRLSIIHCLGHQKGDSAEARGNR |
| | | LADQAAREAAIKTPPDTSTLL |
| MLVAV_ | 8,054 | TLNLEDEYRLYETSAEPEVSPGSTWLSDFPQAWAETGGMGLAVRQAPLII |
| P03356_ | | PLKATSTPVSIKQYPMSQEAKLGIKPHIQRLLDQGILVPCQSPWNTPLLP |
| 3mut | | VKKPGTNDYRPVQDLREVNKRVEDIHPTVPNPYNLLSGLPPSHRWYTVLD |
| | | LKDAFFCLRLHPTSQPLFAFEWRDPGMGISGQLTWTRLPQGFKNSPTLFN |
| | | EALHRDLADFRIQHPDLILLQYVDDILLAATSELDCQQGTRALLLTLGNL |
| | | GYRASAKKAQLCQKQVKYLGYLLKEGQRWLTEARKETVMGQPTPKTPRQL |
| | | REFLGTAGFCRLWIPGFAEMAAPLYPLTKPGTLFNWGPDQQKAYQEIKQA |
| | | LLTAPALGLPDLTKPFELFVDEKQGYAKGVLTQKLGPWRRPVAYLSKKLD |
| | | PVAAGWPPCLRMVAAIAVLRKDAGKLTMGQPLVILAPHAVEALVKQPPDR |
| | | WLSNARMTHYQAMLLDTDRVQFGPWVALNPATLLPLPEEGAPHDCLEILA |
| | | ETHGTRPDLTDQPIPDADHTWYTDGSSFLQEGQRKAGAAVTTETEVIWAR |
| | | ALPAGTSAQRAELIALTQALKMAEGKRLNVYTDSRYAFATAHIHGEIYRR |
| | | RGWLTSEGREIKNKSEILALLKALFLPKRLSIIHCLGHQKGDSAEARGNR |
| | | LADQAAREAAIKTPPDTSTLL |
| MLVAV_ | 8,055 | TLNLEDEYRLYETSAEPEVSPGSTWLSDFPQAWAETGGMGLAVRQAPLII |
| P03356_ | | PLKATSTPVSIKQYPMSQEAKLGIKPHIQRLLDQGILVPCQSPWNTPLLP |
| 3mutA | | VKKPGTNDYRPVQDLREVNKRVEDIHPTVPNPYNLLSGLPPSHRWYTVLD |
| | | LKDAFFCLRLHPTSQPLFAFEWRDPGMGISGQLTWTRLPQGFKNSPTLFN |
| | | EALHRDLADFRIQHPDLILLQYVDDILLAATSELDCQQGTRALLLTLGNL |
| | | GYRASAKKAQLCQKQVKYLGYLLKEGQRWLTEARKETVMGQPTPKTPRQL |
| | | REFLGKAGFCRLFIPGFAEMAAPLYPLTKPGTLFNWGPDQQKAYQEIKQA |
| | | LLTAPALGLPDLTKPFELFVDEKQGYAKGVLTQKLGPWRRPVAYLSKKLD |
| | | PVAAGWPPCLRMVAAIAVLRKDAGKLTMGQPLVILAPHAVEALVKQPPDR |
| | | WLSNARMTHYQAMLLDTDRVQFGPVVALNPATLLPLPEEGAPHDCLEILA |
| | | ETHGTRPDLTDQPIPDADHTWYTDGSSFLQEGQRKAGAAVTTETEVIWAR |
| | | ALPAGTSAQRAELIALTQALKMAEGKRLNVYTDSRYAFATAHIHGEIYRR |
| | | RGWLTSEGREIKNKSEILALLKALFLPKRLSIIHCLGHQKGDSAEARGNR |
| | | LADQAAREAAIKTPPDTSTLL |
| MLVBM_ | 8,056 | TLGIEDEYRLHETSTEPDVSLGSTWLSDFPQAWAETGGMGLAVRQAPLII |
| Q7SVK7 | | PLKATSTPVSIQQYPMSHEARLGIKPHIQRLLDQGILVPCQSPWNTPLLP |
| | | VKKPGTNDYRPVQDLREVNKRVEDIHPTVPNPYNLLSGLPPSHQWYTVLD |
| | | LKDAFFCLRLHPTSQPLFAFEWRDPGMGISGQLTWTRLPQGFKNSPTLFD |
| | | EALHRDLADFRIQHPDLILLQYVDDILLAATSELDCQQGTRALLQTLGDL |
| | | GYRASAKKAQICQKQVKYLGYLLREGQRWLTEARKETVMGQPVPKTPRQL |
| | | REFLGTAGFCRLWIPGFAEMAAPLYPLTKTGTLFSWGPDQQKAYQEIKQA |
| | | LLTAPALGLPDLTKPFELFVDEKQGYAKGVLTQKLGPWRRPVAYLSKKLD |
| | | PVAAGWPPCLRMVAAIAVLTKDAGKLTMGQPLVILAPHAVEALVKQPPDR |
| | | WLSNARMTHYQAMLLDTDRVQFGPVVALNPATLLPLPEEGAPHDCLEILA |
| | | ETHGTRPDLTDQPIPDADHTWYTDGSSFLQEGQRKAGAAVTTETEVIWAG |
| | | ALPAGTSAQRAELIALTQALKMAEGKRLNVYTDSRYAFATAHIHGEIYRR |
| | | RGLLTSEGREIKNKSEILALLKALFLPKRLSIIHCLGHQKGDSAEARGNR |
| | | LADQAAREAAIKTPPDTSTLL |
| MLVBM_ | 8,057 | TLGIEDEYRLHETSTEPDVSLGSTWLSDFPQAWAETGGMGLAVRQAPLII |
| Q7SVK7 | | PLKATSTPVSIQQYPMSHEARLGIKPHIQRLLDQGILVPCQSPWNTPLLP |
| | | VKKPGTNDYRPVQDLREVNKRVEDIHPTVPNPYNLLSGLPPSHQWYTVLD |
| | | LKDAFFCLRLHPTSQPLFAFEWRDPGMGISGQLTWTRLPQGFKNSPTLFD |
| | | EALHRDLADFRIQHPDLILLQYVDDILLAATSELDCQQGTRALLQTLGDL |
| | | GYRASAKKAQICQKQVKYLGYLLREGQRWLTEARKETVMGQPVPKTPRQL |
| | | REFLGTAGFCRLWIPGFAEMAAPLYPLTKTGTLFSWGPDQQKAYQEIKQA |
| | | LLTAPALGLPDLTKPFELFVDEKQGYAKGVLTQKLGPWRRPVAYLSKKLD |
| | | PVAAGWPPCLRMVAAIAVLTKDAGKLTMGQPLVILAPHAVEALVKQPPDR |
| | | WLSNARMTHYQAMLLDTDRVQFGPVVALNPATLLPLPEEGAPHDCLEILA |
| | | ETHGTRPDLTDQPIPDADHTWYTDGSSFLQEGQRKAGAAVTTETEVIWAG |
| | | ALPAGTSAQRAELIALTQALKMAEGKRLNVYTDSRYAFATAHIHGEIYRR |
| | | RGLLTSEGREIKNKSEILALLKALFLPKRLSIIHCLGHQKGDSAEARGNR |
| | | LADQAAREAAIKTPPDTSTLL |
| MLVBM_ | 8,058 | TLGIEDEYRLHETSTEPDVSLGSTWLSDFPQAWAETGGMGLAVRQAPLII |
| Q7SVK7_ | | PLKATSTPVSIQQYPMSHEARLGIKPHIQRLLDQGILVPCQSPWNTPLLP |
| 3mut | | VKKPGTNDYRPVQDLREVNKRVEDIHPTVPNPYNLLSGLPPSHQWYTVLD |
| | | LKDAFFCLRLHPTSQPLFAFEWRDPGMGISGQLTWTRLPQGFKNSPTLFN |
| | | EALHRDLADFRIQHPDLILLQYVDDILLAATSELDCQQGTRALLQTLGDL |
| | | GYRASAKKAQICQKQVKYLGYLLREGQRWLTEARKETVMGQPVPKTPRQL |
| | | REFLGTAGFCRLWIPGFAEMAAPLYPLTKPGTLFSWGPDQQKAYQEIKQA |
| | | LLTAPALGLPDLTKPFELFVDEKQGYAKGVLTQKLGPWRRPVAYLSKKLD |
| | | PVAAGWPPCLRMVAAIAVLTKDAGKLTMGQPLVILAPHAVEALVKQPPDR |
| | | WLSNARMTHYQAMLLDTDRVQFGPWVALNPATLLPLPEEGAPHDCLEILA |
| | | ETHGTRPDLTDQPIPDADHTWYTDGSSFLQEGQRKAGAAVTTETEVIWAG |
| | | ALPAGTSAQRAELIALTQALKMAEGKRLNVYTDSRYAFATAHIHGEIYRR |
| | | RGWLTSEGREIKNKSEILALLKALFLPKRLSIIHCLGHQKGDSAEARGNR |
| | | LADQAAREAAIKTPPDTSTLL |
| MLVBM_ | 8,059 | TLGIEDEYRLHETSTEPDVSLGSTWLSDFPQAWAETGGMGLAVRQAPLII |
| Q7SVK7_ | | PLKATSTPVSIQQYPMSHEARLGIKPHIQRLLDQGILVPCQSPWNTPLLP |
| 3mut | | VKKPGTNDYRPVQDLREVNKRVEDIHPTVPNPYNLLSGLPPSHQWYTVLD |
| | | LKDAFFCLRLHPTSQPLFAFEWRDPGMGISGQLTWTRLPQGFKNSPTLFN |
| | | EALHRDLADFRIQHPDLILLQYVDDILLAATSELDCQQGTRALLQTLGDL |
| | | GYRASAKKAQICQKQVKYLGYLLREGQRWLTEARKETVMGQPVPKTPRQL |
| | | REFLGTAGFCRLWIPGFAEMAAPLYPLTKPGTLFSWGPDQQKAYQEIKQA |
| | | LLTAPALGLPDLTKPFELFVDEKQGYAKGVLTQKLGPWRRPVAYLSKKLD |
| | | PVAAGWPPCLRMVAAIAVLTKDAGKLTMGQPLVILAPHAVEALVKQPPDR |
| | | WLSNARMTHYQAMLLDTDRVQFGPVVALNPATLLPLPEEGAPHDCLEILA |
| | | ETHGTRPDLTDQPIPDADHTWYTDGSSFLQEGQRKAGAAVTTETEVIWAG |
| | | ALPAGTSAQRAELIALTQALKMAEGKRLNVYTDSRYAFATAHIHGEIYRR |
| | | RGWLTSEGREIKNKSEILALLKALFLPKRLSIIHCLGHQKGDSAEARGNR |
| | | LADQAAREAAIKTPPDTSTLL |
| MLVBM_ | 8,060 | LGIEDEYRLHETSTEPDVSLGSTWLSDFPQAWAETGGMGLAVRQAPLIIP |
| Q7SVK7_ | | LKATSTPVSIQQYPMSHEARLGIKPHIQRLLDQGILVPCQSPWNTPLLPV |
| 3mutAWS | | KKPGTNDYRPVQDLREVNKRVEDIHPTVPNPYNLLSGLPPSHQWYTVLDL |
| | | KDAFFCLRLHPTSQPLFAFEWRDPGMGISGQLTWTRLPQGFKNSPTLFNE |
| | | ALHRDLADFRIQHPDLILLQYVDDILLAATSELDCQQGTRALLQTLGDLG |
| | | YRASAKKAQICQKQVKYLGYLLREGQRWLTEARKETVMGQPVPKTPRQLR |
| | | EFLGKAGFCRLFIPGFAEMAAPLYPLTKPGTLFSWGPDQQKAYQEIKQAL |
| | | LTAPALGLPDLTKPFELFVDEKQGYAKGVLTQKLGPWRRPVAYLSKKLDP |
| | | VAAGWPPCLRMVAAIAVLTKDAGKLTMGQPLVILAPHAVEALVKQPPDRW |
| | | LSNARMTHYQAMLLDTDRVQFGPVVALNPATLLPLPEEGAPHDCLEILAE |
| | | THGTRPDLTDQPIPDADHTWYTDGSSFLQEGQRKAGAAVTTETEVIWAGA |
| | | LPAGTSAQRAELIALTQALKMAEGKRLNVYTDSRYAFATAHIHGEIYRRR |
| | | GWLTSEGREIKNKSEILALLKALFLPKRLSIIHCLGHQKGDSAEARGNRL |
| | | ADQAAREAAIKTPPDTSTLLI |
| MLVBM_ | 8,061 | LGIEDEYRLHETSTEPDVSLGSTWLSDFPQAWAETGGMGLAVRQAPLIIP |
| Q7SVK7_ | | LKATSTPVSIQQYPMSHEARLGIKPHIQRLLDQGILVPCQSPWNTPLLPV |
| 3mutAWS | | KKPGTNDYRPVQDLREVNKRVEDIHPTVPNPYNLLSGLPPSHQWYTVLDL |
| | | KDAFFCLRLHPTSQPLFAFEWRDPGMGISGQLTWTRLPQGFKNSPTLFNE |
| | | ALHRDLADFRIQHPDLILLQYVDDILLAATSELDCQQGTRALLQTLGDLG |
| | | YRASAKKAQICQKQVKYLGYLLREGQRWLTEARKETVMGQPVPKTPRQLR |
| | | EFLGKAGFCRLFIPGFAEMAAPLYPLTKPGTLFSWGPDQQKAYQEIKQAL |
| | | LTAPALGLPDLTKPFELFVDEKQGYAKGVLTQKLGPWRRPVAYLSKKLDP |
| | | VAAGWPPCLRMVAAIAVLTKDAGKLTMGQPLVILAPHAVEALVKQPPDRW |
| | | LSNARMTHYQAMLLDTDRVQFGPVVALNPATLLPLPEEGAPHDCLEILAE |
| | | THGTRPDLTDQPIPDADHTWYTDGSSFLQEGQRKAGAAVTTETEVIWAGA |
| | | LPAGTSAQRAELIALTQALKMAEGKRLNVYTDSRYAFATAHIHGEIYRRR |
| | | GWLTSEGREIKNKSEILALLKALFLPKRLSIIHCLGHQKGDSAEARGNRL |
| | | ADQAAREAAIKTPPDTSTLLI |
| MLVCB_ | 8,062 | TLNIEDEYRLHETSKEPDVSLGSTWLSDFPQAWAETGGMGLAVRQAPLII |
| P08361 | | PLKATSTPVSIKQYPMSQEARLGIKPHIQRLLDQGILVPCQSPWNTPLLP |
| | | VKKPGTNDYRPVQDLREVNKRVEDIHPTVPNPYNLLSGLPPSHQWYTVLD |
| | | LKDAFFCLRLHPTSQPLFAFEWRDPEMGISGQLTWTRLPQGFKNSPTLFD |
| | | EALHRDLAGFRIQHPDLILLQYVDDLLLAATSELDCQQGTRALLQTLGDL |
| | | GYRASAKKAQICQKQVKYLGYLLKEGQRWLTEARKETVMGQPIPKTPRQL |
| | | REFLGTAGFCRLWIPGFAEMAAPLYPLTKTGTLFNWGPDQQKAFQEIKQA |
| | | LLTAPALGLPDLTKPFELFVDEKQGYAKGVLTQKLGPWRRPVAYLSKKLD |
| | | PVAAGWPPCLRMVAAIAVLTKDAGKLTMGQPLVILAPHAVEALVKQPPDR |
| | | WLSNARMTHYQALLLDTDRVQFGPVVALNPATLLPLPEEGLQHDCLDILA |
| | | EAHGTRSDLMDQPLPDADHTWYTDGSSFLQEGQRKAGAAVTTETEVIWAR |
| | | ALPAGTSAQRAELIALTQALKMAEGKKLNVYTDSRYAFATAHIHGEIYRR |
| | | RGLLTSEGKEIKNKDEILALLKALFLPKRLSIIHCPGHQKGNSAEARGNR |
| | | MADQAAREVATRETPETSTLL |
| MLVCB_ | 8,063 | TLNIEDEYRLHETSKEPDVSLGSTWLSDFPQAWAETGGMGLAVRQAPLII |
| P08361_ | | PLKATSTPVSIKQYPMSQEARLGIKPHIQRLLDQGILVPCQSPWNTPLLP |
| 3mut | | VKKPGTNDYRPVQDLREVNKRVEDIHPTVPNPYNLLSGLPPSHQWYTVLD |
| | | LKDAFFCLRLHPTSQPLFAFEWRDPEMGISGQLTWTRLPQGFKNSPTLFN |
| | | EALHRDLAGFRIQHPDLILLQYVDDLLLAATSELDCQQGTRALLQTLGDL |
| | | GYRASAKKAQICQKQVKYLGYLLKEGQRWLTEARKETVMGQPIPKTPRQL |
| | | REFLGTAGFCRLWIPGFAEMAAPLYPLTKPGTLFNWGPDQQKAFQEIKQA |
| | | LLTAPALGLPDLTKPFELFVDEKQGYAKGVLTQKLGPWRRPVAYLSKKLD |
| | | PVAAGWPPCLRMVAAIAVLTKDAGKLTMGQPLVILAPHAVEALVKQPPDR |
| | | WLSNARMTHYQALLLDTDRVQFGPWVALNPATLLPLPEEGLQHDCLDILA |
| | | EAHGTRSDLMDQPLPDADHTWYTDGSSFLQEGQRKAGAAVTTETEVIWAR |
| | | ALPAGTSAQRAELIALTQALKMAEGKKLNVYTDSRYAFATAHIHGEIYRR |
| | | RGWLTSEGKEIKNKDEILALLKALFLPKRLSIIHCPGHQKGNSAEARGNR |
| | | MADQAAREVATRETPETSTLL |
| MLVCB_ | 8,064 | TLNIEDEYRLHETSKEPDVSLGSTWLSDFPQAWAETGGMGLAVRQAPLII |
| P08361_ | | PLKATSTPVSIKQYPMSQEARLGIKPHIQRLLDQGILVPCQSPWNTPLLP |
| 3mutA | | VKKPGTNDYRPVQDLREVNKRVEDIHPTVPNPYNLLSGLPPSHQWYTVLD |
| | | LKDAFFCLRLHPTSQPLFAFEWRDPEMGISGQLTWTRLPQGFKNSPTLFN |
| | | EALHRDLAGFRIQHPDLILLQYVDDLLLAATSELDCQQGTRALLQTLGDL |
| | | GYRASAKKAQICQKQVKYLGYLLKEGQRWLTEARKETVMGQPIPKTPRQL |
| | | REFLGKAGFCRLFIPGFAEMAAPLYPLTKPGTLFNWGPDQQKAFQEIKQA |
| | | LLTAPALGLPDLTKPFELFVDEKQGYAKGVLTQKLGPWRRPVAYLSKKLD |
| | | PVAAGWPPCLRMVAAIAVLTKDAGKLTMGQPLVILAPHAVEALVKQPPDR |
| | | WLSNARMTHYQALLLDTDRVQFGPWVALNPATLLPLPEEGLQHDCLDILA |
| | | EAHGTRSDLMDQPLPDADHTWYTDGSSFLQEGQRKAGAAVTTETEVIWAR |
| | | ALPAGTSAQRAELIALTQALKMAEGKKLNVYTDSRYAFATAHIHGEIYRR |
| | | RGWLTSEGKEIKNKDEILALLKALFLPKRLSIIHCPGHQKGNSAEARGNR |
| | | MADQAAREVATRETPETSTLL |
| MLVF5_ | 8,065 | TLNIEDEYRLHETSKGPDVPLGSTWLSDFPQAWAETGGMGLAFRQAPLII |
| P26810 | | SLKATSTPVSIKQYPMSQEARLGIKPHIQRLLDQGILVPCQSPWNTPLLP |
| | | VKKPGTNDYRPVQDLREVNKRVEDIHPTVPNPYNLLSGLPPSHQWYTVLD |
| | | LKDAFFCLRLHPTSQSLFAFEWKDPEMGISGQLTWTRLPQGFKNSPTLFD |
| | | EALHRDLADFRIQHPDLILLQYVDDLLLAATSELDCQQGTRALLQTLGDL |
| | | GYRASAKKAQICQKQVKYLGYLLKEGQRWLTEARKETVMGQPTPKTPRQL |
| | | REFLGTAGLCRLWIPGFAEMAAPLYPLTKTGTLFKWGPDQQKAYQEIKQA |
| | | LLTAPALGLPDLTKPFELFVDEKQGYAKGVLTQKLGPWRRPVAYLSKKLD |
| | | PVAAGWPPCLRMVAAIAVLTKDVGKLTMGQPLVILAPHAVEALVKQPPDR |
| | | WLSNARMTHYQALLLDTDRVQFGPIVALNPATLLPLPEEGLQHDCLDILA |
| | | EAHGTRPDLTDQPLPDADHTWYTDGSSFLQEGQRRAGAAVTTETEVIWAK |
| | | ALPAGTSAQRAELIALTQALKMAAGKKLNVYTDSRYAFATAHIHGEIYRR |
| | | RGLLTSEGKEIKNKDEILALLKALFLPKRLSIIHCPGHQKGNHAEARGNR |
| | | MADQAAREVATRETPETSTLL |
| MLVF5_ | 8,066 | TLNIEDEYRLHETSKGPDVPLGSTWLSDFPQAWAETGGMGLAFRQAPLII |
| P26810_ | | SLKATSTPVSIKQYPMSQEARLGIKPHIQRLLDQGILVPCQSPWNTPLLP |
| 3mut | | VKKPGTNDYRPVQDLREVNKRVEDIHPTVPNPYNLLSGLPPSHQWYTVLD |
| | | LKDAFFCLRLHPTSQSLFAFEWKDPEMGISGQLTWTRLPQGFKNSPTLFN |
| | | EALHRDLADFRIQHPDLILLQYVDDLLLAATSELDCQQGTRALLQTLGDL |
| | | GYRASAKKAQICQKQVKYLGYLLKEGQRWLTEARKETVMGQPTPKTPRQL |
| | | REFLGTAGLCRLWIPGFAEMAAPLYPLTKPGTLFKWGPDQQKAYQEIKQA |
| | | LLTAPALGLPDLTKPFELFVDEKQGYAKGVLTQKLGPWRRPVAYLSKKLD |
| | | PVAAGWPPCLRMVAAIAVLTKDVGKLTMGQPLVILAPHAVEALVKQPPDR |
| | | WLSNARMTHYQALLLDTDRVQFGPIVALNPATLLPLPEEGLQHDCLDILA |
| | | EAHGTRPDLTDQPLPDADHTWYTDGSSFLQEGQRRAGAAVTTETEVIWAK |
| | | ALPAGTSAQRAELIALTQALKMAAGKKLNVYTDSRYAFATAHIHGEIYRR |
| | | RGWLTSEGKEIKNKDEILALLKALFLPKRLSIIHCPGHQKGNHAEARGNR |
| | | MADQAAREVATRETPETSTLL |
| MLVF5_ | 8,067 | TLNIEDEYRLHETSKGPDVPLGSTWLSDFPQAWAETGGMGLAFRQAPLII |
| P26810_ | | SLKATSTPVSIKQYPMSQEARLGIKPHIQRLLDQGILVPCQSPWNTPLLP |
| 3mutA | | VKKPGTNDYRPVQDLREVNKRVEDIHPTVPNPYNLLSGLPPSHQWYTVLD |
| | | LKDAFFCLRLHPTSQSLFAFEWKDPEMGISGQLTWTRLPQGFKNSPTLFN |
| | | EALHRDLADFRIQHPDLILLQYVDDLLLAATSELDCQQGTRALLQTLGDL |
| | | GYRASAKKAQICQKQVKYLGYLLKEGQRWLTEARKETVMGQPTPKTPRQL |
| | | REFLGKAGLCRLFIPGFAEMAAPLYPLTKPGTLFKWGPDQQKAYQEIKQA |
| | | LLTAPALGLPDLTKPFELFVDEKQGYAKGVLTQKLGPWRRPVAYLSKKLD |
| | | PVAAGWPPCLRMVAAIAVLTKDVGKLTMGQPLVILAPHAVEALVKQPPDR |
| | | WLSNARMTHYQALLLDTDRVQFGPIVALNPATLLPLPEEGLQHDCLDILA |
| | | EAHGTRPDLTDQPLPDADHTWYTDGSSFLQEGQRRAGAAVTTETEVIWAK |
| | | ALPAGTSAQRAELIALTQALKMAAGKKLNVYTDSRYAFATAHIHGEIYRR |
| | | RGWLTSEGKEIKNKDEILALLKALFLPKRLSIIHCPGHQKGNHAEARGNR |
| | | MADQAAREVATRETPETSTLL |
| MLVFF_ | 8,068 | TLNIEDEYRLHETSKGPDVPLGSTWLSDFPQAWAETGGMGLAVRQAPLII |
| P26809_ | | PLKATSTPVSIKQYPMSQEARLGIKPHIQRLLDQGILVPCQSPWNTPLLP |
| 3mut | | VKKPGTNDYRPVQDLREVNKRVEDIHPTVPNPYNLLSGLPPSHQWYTVLD |
| | | LKDAFFCLRLHPTSQSLFAFEWRDPEMGISGQLTWTRLPQGFKNSPTLFN |
| | | EALHRDLADFRIQHPDLILLQYVDDLLLAATSELDCQQGTRALLQTLGDL |
| | | GYRASAKKAQICQKQVKYLGYLLKEGQRWLTEARKETVMGQPTPKTPRQL |
| | | REFLGTAGFCRLWIPGFAEMAAPLYPLTKPGTLFEWGPDQQKAYQEIKQA |
| | | LLTAPALGLPDLTKPFELFVDEKQGYAKGVLTQKLGPWRRPVAYLSKKLD |
| | | PVAAGWPPCLRMVAAIAVLTKDAGKLTMGQPLVILAPHAVEALVKQPPDR |
| | | WLSNARMTHYQALLLDTDRVQFGPIVALNPATLLPLPEEGLQHDCLDILA |
| | | EAHGTRPDLTDQPLPDADHTWYTDGSSFLQEGQRKAGAAVTTETEVVWAK |
| | | ALPAGTSAQRAELIALTQALKMAEGKKLNVYTDSRYAFATAHIHGEIYRR |
| | | RGWLTSEGKEIKNKDEILALLKALFLPKRLSIIHCPGHQKGNRAEARGNR |
| | | MADQAAREVATRETPETSTLL |
| MLVFF_ | 8,069 | TLNIEDEYRLHETSKGPDVPLGSTWLSDFPQAWAETGGMGLAVRQAPLII |
| P26809_ | | PLKATSTPVSIKQYPMSQEARLGIKPHIQRLLDQGILVPCQSPWNTPLLP |
| 3mutA | | VKKPGTNDYRPVQDLREVNKRVEDIHPTVPNPYNLLSGLPPSHQWYTVLD |
| | | LKDAFFCLRLHPTSQSLFAFEWRDPEMGISGQLTWTRLPQGFKNSPTLFN |
| | | EALHRDLADFRIQHPDLILLQYVDDLLLAATSELDCQQGTRALLQTLGDL |
| | | GYRASAKKAQICQKQVKYLGYLLKEGQRWLTEARKETVMGQPTPKTPRQL |
| | | REFLGKAGFCRLFIPGFAEMAAPLYPLTKPGTLFEWGPDQQKAYQEIKQA |
| | | LLTAPALGLPDLTKPFELFVDEKQGYAKGVLTQKLGPWRRPVAYLSKKLD |
| | | PVAAGWPPCLRMVAAIAVLTKDAGKLTMGQPLVILAPHAVEALVKQPPDR |
| | | WLSNARMTHYQALLLDTDRVQFGPIVALNPATLLPLPEEGLQHDCLDILA |
| | | EAHGTRPDLTDQPLPDADHTWYTDGSSFLQEGQRKAGAAVTTETEVVWAK |
| | | ALPAGTSAQRAELIALTQALKMAEGKKLNVYTDSRYAFATAHIHGEIYRR |
| | | RGWLTSEGKEIKNKDEILALLKALFLPKRLSIIHCPGHQKGNRAEARGNR |
| | | MADQAAREVATRETPETSTLL |
| MLVMS_ | 8,070 | TLNIEDEHRLHETSKEPDVSLGSTWLSDFPQAWAETGGMGLAVRQAPLII |
| P03355 | | PLKATSTPVSIKQYPMSQEARLGIKPHIQRLLDQGILVPCQSPWNTPLLP |
| | | VKKPGTNDYRPVQDLREVNKRVEDIHPTVPNPYNLLSGLPPSHQWYTVLD |
| | | LKDAFFCLRLHPTSQPLFAFEWRDPEMGISGQLTWTRLPQGFKNSPTLFD |
| | | EALHRDLADFRIQHPDLILLQYVDDLLLAATSELDCQQGTRALLQTLGNL |
| | | GYRASAKKAQICQKQVKYLGYLLKEGQRWLTEARKETVMGQPTPKTPRQL |
| | | REFLGTAGFCRLWIPGFAEMAAPLYPLTKTGTLFNWGPDQQKAYQEIKQA |
| | | LLTAPALGLPDLTKPFELFVDEKQGYAKGVLTQKLGPWRRPVAYLSKKLD |
| | | PVAAGWPPCLRMVAAIAVLTKDAGKLTMGQPLVILAPHAVEALVKQPPDR |
| | | WLSNARMTHYQALLLDTDRVQFGPWVALNPATLLPLPEEGLQHNCLDILA |
| | | EAHGTRPDLTDQPLPDADHTWYTDGSSLLQEGQRKAGAAVTTETEVIWAK |
| | | ALPAGTSAQRAELIALTQALKMAEGKKLNVYTDSRYAFATAHIHGEIYRR |
| | | RGLLTSEGKEIKNKDEILALLKALFLPKRLSIIHCPGHQKGHSAEARGNR |
| | | MADQAARKAAITETPDTSTLL |
| MLVMS_ | 8,137 | TLNIEDEYRLHETSKEPDVSLGSTWLSDFPQAWAETGGMGLAVRQAPLII |
| reference | | PLKATSTPVSIKQYPMSQEARLGIKPHIQRLLDQGILVPCQSPWNTPLLP |
| | | VKKPGTNDYRPVQDLREVNKRVEDIHPTVPNPYNLLSGLPPSHQWYTVLD |
| | | LKDAFFCLRLHPTSQPLFAFEWRDPEMGISGQLTWTRLPQGFKNSPTLFN |
| | | EALHRDLADFRIQHPDLILLQYVDDLLLAATSELDCQQGTRALLQTLGNL |
| | | GYRASAKKAQICQKQVKYLGYLLKEGQRWLTEARKETVMGQPTPKTPRQL |
| | | REFLGKAGFCRLFIPGFAEMAAPLYPLTKPGTLFNWGPDQQKAYQEIKQA |
| | | LLTAPALGLPDLTKPFELFVDEKQGYAKGVLTQKLGPWRRPVAYLSKKLD |
| | | PVAAGWPPCLRMVAAIAVLTKDAGKLTMGQPLVILAPHAVEALVKQPPDR |
| | | WLSNARMTHYQALLLDTDRVQFGPVVALNPATLLPLPEEGLQHNCLDILA |
| | | EAHGTRPDLTDQPLPDADHTWYTDGSSLLQEGQRKAGAAVTTETEVIWAK |
| | | ALPAGTSAQRAELIALTQALKMAEGKKLNVYTDSRYAFATAHIHGEIYRR |
| | | RGWLTSEGKEIKNKDEILALLKALFLPKRLSIIHCPGHQKGHSAEARGNR |
| | | MADQAARKAAITETPDTSTLLIENSSP |
| MLVMS_ | 8,071 | TLNIEDEHRLHETSKEPDVSLGSTWLSDFPQAWAETGGMGLAVRQAPLII |
| P03355 | | PLKATSTPVSIKQYPMSQEARLGIKPHIQRLLDQGILVPCQSPWNTPLLP |
| | | VKKPGTNDYRPVQDLREVNKRVEDIHPTVPNPYNLLSGLPPSHQWYTVLD |
| | | LKDAFFCLRLHPTSQPLFAFEWRDPEMGISGQLTWTRLPQGFKNSPTLFD |
| | | EALHRDLADFRIQHPDLILLQYVDDLLLAATSELDCQQGTRALLQTLGNL |
| | | GYRASAKKAQICQKQVKYLGYLLKEGQRWLTEARKETVMGQPTPKTPRQL |
| | | REFLGTAGFCRLWIPGFAEMAAPLYPLTKTGTLFNWGPDQQKAYQEIKQA |
| | | LLTAPALGLPDLTKPFELFVDEKQGYAKGVLTQKLGPWRRPVAYLSKKLD |
| | | PVAAGWPPCLRMVAAIAVLTKDAGKLTMGQPLVILAPHAVEALVKQPPDR |
| | | WLSNARMTHYQALLLDTDRVQFGPWVALNPATLLPLPEEGLQHNCLDILA |
| | | EAHGTRPDLTDQPLPDADHTWYTDGSSLLQEGQRKAGAAVTTETEVIWAK |
| | | ALPAGTSAQRAELIALTQALKMAEGKKLNVYTDSRYAFATAHIHGEIYRR |
| | | RGLLTSEGKEIKNKDEILALLKALFLPKRLSIIHCPGHQKGHSAEARGNR |
| | | MADQAARKAAITETPDTSTLL |
| MLVMS_ | 8,072 | TLNIEDEHRLHETSKEPDVSLGSTWLSDFPQAWAETGGMGLAVRQAPLII |
| P03355_ | | PLKATSTPVSIKQYPMSQEARLGIKPHIQRLLDQGILVPCQSPWNTPLLP |
| 3mut | | VKKPGTNDYRPVQDLREVNKRVEDIHPTVPNPYNLLSGLPPSHQWYTVLD |
| | | LKDAFFCLRLHPTSQPLFAFEWRDPEMGISGQLTWTRLPQGFKNSPTLFN |
| | | EALHRDLADFRIQHPDLILLQYVDDLLLAATSELDCQQGTRALLQTLGNL |
| | | GYRASAKKAQICQKQVKYLGYLLKEGQRWLTEARKETVMGQPTPKTPRQL |
| | | REFLGTAGFCRLWIPGFAEMAAPLYPLTKPGTLFNWGPDQQKAYQEIKQA |
| | | LLTAPALGLPDLTKPFELFVDEKQGYAKGVLTQKLGPWRRPVAYLSKKLD |
| | | PVAAGWPPCLRMVAAIAVLTKDAGKLTMGQPLVILAPHAVEALVKQPPDR |
| | | WLSNARMTHYQALLLDTDRVQFGPWVALNPATLLPLPEEGLQHNCLDILA |
| | | EAHGTRPDLTDQPLPDADHTWYTDGSSLLQEGQRKAGAAVTTETEVIWAK |
| | | ALPAGTSAQRAELIALTQALKMAEGKKLNVYTDSRYAFATAHIHGEIYRR |
| | | RGWLTSEGKEIKNKDEILALLKALFLPKRLSIIHCPGHQKGHSAEARGNR |
| | | MADQAARKAAITETPDTSTLL |
| MLVMS_ | 8,073 | TLNIEDEHRLHETSKEPDVSLGSTWLSDFPQAWAETGGMGLAVRQAPLII |
| P03355_ | | PLKATSTPVSIKQYPMSQEARLGIKPHIQRLLDQGILVPCQSPWNTPLLP |
| 3mut | | VKKPGTNDYRPVQDLREVNKRVEDIHPTVPNPYNLLSGLPPSHQWYTVLD |
| | | LKDAFFCLRLHPTSQPLFAFEWRDPEMGISGQLTWTRLPQGFKNSPTLFN |
| | | EALHRDLADFRIQHPDLILLQYVDDLLLAATSELDCQQGTRALLQTLGNL |
| | | GYRASAKKAQICQKQVKYLGYLLKEGQRWLTEARKETVMGQPTPKTPRQL |
| | | REFLGTAGFCRLWIPGFAEMAAPLYPLTKPGTLFNWGPDQQKAYQEIKQA |
| | | LLTAPALGLPDLTKPFELFVDEKQGYAKGVLTQKLGPWRRPVAYLSKKLD |
| | | PVAAGWPPCLRMVAAIAVLTKDAGKLTMGQPLVILAPHAVEALVKQPPDR |
| | | WLSNARMTHYQALLLDTDRVQFGPWVALNPATLLPLPEEGLQHNCLDILA |
| | | EAHGTRPDLTDQPLPDADHTWYTDGSSLLQEGQRKAGAAVTTETEVIWAK |
| | | ALPAGTSAQRAELIALTQALKMAEGKKLNVYTDSRYAFATAHIHGEIYRR |
| | | RGWLTSEGKEIKNKDEILALLKALFLPKRLSIIHCPGHQKGHSAEARGNR |
| | | MADQAARKAAITETPDTSTLL |
| MLVMS_ | 8,074 | TLNIEDEHRLHETSKEPDVSLGSTWLSDFPQAWAETGGMGLAVRQAPLII |
| P03355_ | | PLKATSTPVSIKQYPMSQEARLGIKPHIQRLLDQGILVPCQSPWNTPLLP |
| 3mutA_ | | VKKPGTNDYRPVQDLREVNKRVEDIHPTVPNPYNLLSGLPPSHQWYTVLD |
| WS | | LKDAFFCLRLHPTSQPLFAFEWRDPEMGISGQLTWTRLPQGFKNSPTLFN |
| | | EALHRDLADFRIQHPDLILLQYVDDLLLAATSELDCQQGTRALLQTLGNL |
| | | GYRASAKKAQICQKQVKYLGYLLKEGQRWLTEARKETVMGQPTPKTPRQL |
| | | REFLGKAGFCRLFIPGFAEMAAPLYPLTKPGTLFNWGPDQQKAYQEIKQA |
| | | LLTAPALGLPDLTKPFELFVDEKQGYAKGVLTQKLGPWRRPVAY |
| | | LSKKLDPVAAGWPPCLRMVAAIAVLTKDAGKLTMGQPLVILAPHAVEALV |
| | | KQPPDRWLSNARMTHYQALLLDTDRVQFGPWVALNPATLLPLPEEGLQHN |
| | | CLDILAEAHGTRPDLTDQPLPDADHTWYTDGSSLLQEGQRKAGAAVTTET |
| | | EVIWAKALPAGTSAQRAELIALTQALKMAEGKKLNVYTDSRYAFATAHIH |
| | | GEIYRRRGWLTSEGKEIKNKDEILALLKALFLPKRLSIIHCPGHQKGHSA |
| | | EARGNRMADQAARKAAITETPDTSTLL |
| MLVMS_ | 8,075 | TLNIEDEHRLHETSKEPDVSLGSTWLSDFPQAWAETGGMGLAVRQAPLII |
| P03355_ | | PLKATSTPVSIKQYPMSQEARLGIKPHIQRLLDQGILVPCQSPWNTPLLP |
| 3mutA_ | | VKKPGTNDYRPVQDLREVNKRVEDIHPTVPNPYNLLSGLPPSHQWYTVLD |
| WS | | LKDAFFCLRLHPTSQPLFAFEWRDPEMGISGQLTWTRLPQGFKNSPTLFN |
| | | EALHRDLADFRIQHPDLILLQYVDDLLLAATSELDCQQGTRALLQTLGNL |
| | | GYRASAKKAQICQKQVKYLGYLLKEGQRWLTEARKETVMGQPTPKTPRQL |
| | | REFLGKAGFCRLFIPGFAEMAAPLYPLTKPGTLFNWGPDQQKAYQEIKQA |
| | | LLTAPALGLPDLTKPFELFVDEKQGYAKGVLTQKLGPWRRPVAYLSKKLD |
| | | PVAAGWPPCLRMVAAIAVLTKDAGKLTMGQPLVILAPHAVEALVKQPPDR |
| | | WLSNARMTHYQALLLDTDRVQFGPVVALNPATLLPLPEEGLQHNCLDILA |
| | | EAHGTRPDLTDQPLPDADHTWYTDGSSLLQEGQRKAGAAVTTETEVIWAK |
| | | ALPAGTSAQRAELIALTQALKMAEGKKLNVYTDSRYAFATAHIHGEIYRR |
| | | RGWLTSEGKEIKNKDEILALLKALFLPKRLSIIHCPGHQKGHSAEARGNR |
| | | MADQAARKAAITETPDTSTLL |
| MLVMS_ | 8,076 | TLNIEDEYRLHETSKEPDVSLGSTWLSDFPQAWAETGGMGLAVRQAPLII |
| P03355_ | | PLKATSTPVSIKQYPMSQEARLGIKPHIQRLLDQGILVPCQSPWNTPLLP |
| PLV919 | | VKKPGTNDYRPVQDLREVNKRVEDIHPTVPNPYNLLSGLPPSHQWYTVLD |
| | | LKDAFFCLRLHPTSQPLFAFEWRDPEMGISGQLTWTRLPQGFKNSPTLFN |
| | | EALHRDLADFRIQHPDLILLQYVDDLLLAATSELDCQQGTRALLQTLGNL |
| | | GYRASAKKAQICQKQVKYLGYLLKEGQRWLTEARKETVMGQPTPKTPRQL |
| | | REFLGKAGFCRLFIPGFAEMAAPLYPLTKPGTLFNWGPDQQKAYQEIKQA |
| | | LLTAPALGLPDLTKPFELFVDEKQGYAKGVLTQKLGPWRRPVAYLSKKLD |
| | | PVAAGWPPCLRMVAAIAVLTKDAGKLTMGQPLVILAPHAVEALVKQPPDR |
| | | WLSNARMTHYQALLLDTDRVQFGPVVALNPATLLPLPEEGLQHNCLDILA |
| | | EAHGTRPDLTDQPLPDADHTWYTDGSSLLQEGQRKAGAAVTTETEVIWAK |
| | | ALPAGTSAQRAELIALTQALKMAEGKKLNVYTDSRYAFATAHIHGEIYRR |
| | | RGWLTSEGKEIKNKDEILALLKALFLPKRLSIIHCPGHQKGHSAEARGNR |
| | | MADQAARKAAITETPDTSTLLIENSSPSGGSKRTADGSEFE |
| MLVMS_ | 8,077 | TLNIEDEYRLHETSKEPDVSLGSTWLSDFPQAWAETGGMGLAVRQAPLII |
| P03355_ | | PLKATSTPVSIKQYPMSQEARLGIKPHIQRLLDQGILVPCQSPWNTPLLP |
| PLV919 | | VKKPGTNDYRPVQDLREVNKRVEDIHPTVPNPYNLLSGLPPSHQWYTVLD |
| | | LKDAFFCLRLHPTSQPLFAFEWRDPEMGISGQLTWTRLPQGFKNSPTLFN |
| | | EALHRDLADFRIQHPDLILLQYVDDLLLAATSELDCQQGTRALLQTLGNL |
| | | GYRASAKKAQICQKQVKYLGYLLKEGQRWLTEARKETVMGQPTPKTPRQL |
| | | REFLGKAGFCRLFIPGFAEMAAPLYPLTKPGTLFNWGPDQQKAYQEIKQA |
| | | LLTAPALGLPDLTKPFELFVDEKQGYAKGVLTQKLGPWRRPVAYLSKKLD |
| | | PVAAGWPPCLRMVAAIAVLTKDAGKLTMGQPLVILAPHAVEALVKQPPDR |
| | | WLSNARMTHYQALLLDTDRVQFGPVVALNPATLLPLPEEGLQHNCLDILA |
| | | EAHGTRPDLTDQPLPDADHTWYTDGSSLLQEGQRKAGAAVTTETEVIWAK |
| | | ALPAGTSAQRAELIALTQALKMAEGKKLNVYTDSRYAFATAHIHGEIYRR |
| | | RGWLTSEGKEIKNKDEILALLKALFLPKRLSIIHCPGHQKGHSAEARGNR |
| | | MADQAARKAAITETPDTSTLLIENSSPSGGSKRTADGSEFE |
| MLVRD_ | 8,078 | TLNIEDEYRLHEISTEPDVSPGSTWLSDFPQAWAETGGMGLAVRQAPLII |
| P11227 | | PLKATSTPVSIKQYPMSQEAKLGIKPHIQRLLDQGILVPCQSPWNTPLLP |
| | | VKKPGTNDYRPVQGLREVNKRVEDIHPTVPNPYNLLSGLPTSHRWYTVLD |
| | | LKDAFFCLRLHPTSQPLFASEWRDPGMGISGQLTWTRLPQGFKNSPTLFD |
| | | EALHRGLADFRIQHPDLILLQYVDDLLLAATSELDCQQGTRALLKTLGNL |
| | | GYRASAKKAQICQKQVKYLGYLLREGQRWLTEARKETVMGQPTPKTPRQL |
| | | REFLGTAGFCRLWIPRFAEMAAPLYPLTKTGTLFNWGPDQQKAYHEIKQA |
| | | LLTAPALGLPDLTKPFELFVDEKQGYAKGVLTQKLGPWRRPVAYLSKKLD |
| | | PVAAGWPPCLRMVAAIAVLTKDAGKLTMGQPLVILAPHAVEALVKQPPDR |
| | | WLSNARMTHYQAMLLDTDRVQFGPWVALNPATLLPLPEEGAPHDCLEILA |
| | | ETHGTEPDLTDQPIPDADHTWYTDGSSFLQEGQRKAGAAVTTETEVIWAR |
| | | ALPAGTSAQRAELIALTQALKMAEGKRLNVYTDSRYAFATAHIHGEIYKR |
| | | RGLLTSEGREIKNKSEILALLKALFLPKRLSIIHCLGHQKGDSAEARGNR |
| | | LADQAAREAAIKTPPDTSTLL |
| MLVRD_ | 8,079 | TLNIEDEYRLHEISTEPDVSPGSTWLSDFPQAWAETGGMGLAVRQAPLII |
| P11227_ | | PLKATSTPVSIKQYPMSQEAKLGIKPHIQRLLDQGILVPCQSPWNTPLLP |
| 3mut | | VKKPGTNDYRPVQGLREVNKRVEDIHPTVPNPYNLLSGLPTSHRWYTVLD |
| | | LKDAFFCLRLHPTSQPLFASEWRDPGMGISGQLTWTRLPQGFKNSPTLFN |
| | | EALHRGLADFRIQHPDLILLQYVDDLLLAATSELDCQQGTRALLKTLGNL |
| | | GYRASAKKAQICQKQVKYLGYLLREGQRWLTEARKETVMGQPTPKTPRQL |
| | | REFLGTAGFCRLWIPRFAEMAAPLYPLTKPGTLFNWGPDQQKAYHEIKQA |
| | | LLTAPALGLPDLTKPFELFVDEKQGYAKGVLTQKLGPWRRPVAYLSKKLD |
| | | PVAAGWPPCLRMVAAIAVLTKDAGKLTMGQPLVILAPHAVEALVKQPPDR |
| | | WLSNARMTHYQAMLLDTDRVQFGPWVALNPATLLPLPEEGAPHDCLEILA |
| | | ETHGTEPDLTDQPIPDADHTWYTDGSSFLQEGQRKAGAAVTTETEVIWAR |
| | | ALPAGTSAQRAELIALTQALKMAEGKRLNVYTDSRYAFATAHIHGEIYKR |
| | | RGWLTSEGREIKNKSEILALLKALFLPKRLSIIHCLGHQKGDSAEARGNR |
| | | LADQAAREAAIKTPPDTSTLL |
| MMTVB_ | 8,080 | WVQEISDSRPMLHIYLNGRRFLGLLNTGADKTCIAGRDWPANWPIHQTES |
| P03365 | | SLQGLGMACGVARSSQPLRWQHEDKSGIIHPFVIPTLPFTLWGRDIMKDI |
| | | KVRLMTDSPDDSQDLMIGAIESNLFADQISWKSDQPVWLNQWPLKQEKLQ |
| | | ALQQLVTEQLQLGHLEESNSPWNTPVFVIKKKSGKWRLLQDLRAVNATMH |
| | | DMGALQPGLPSPVAVPKGWEIIIIDLQDCFFNIKLHPEDCKRFAFSVPSP |
| | | NFKRPYQRFQWKVLPQGMKNSPTLCQKFVDKAILTVRDKYQDSYIVHYMD |
| | | DILLAHPSRSIVDEILTSMIQALNKHGLVVSTEKIQKYDNLKYLGTHIQG |
| | | DSVSYQKLQIRTDKLRTLNDFQKLLGNINWIRPFLKLTTGELKPLFEILN |
| | | GDSNPISTRKLTPEACKALQLMNERLSTARVKRLDLSQPWSLCILKTEYT |
| | | PTACLWQDGVVEWIHLPHISPKVITPYDIFCTQLIIKGRHRSKELFSKDP |
| | | DYIVVPYTKVQFDLLLQEKEDWPISLLGFLGEVHFHLPKDPLLTFTLQTA |
| | | IIFPHMTSTTPLEKGIVIFTDGSANGRSVTYIQGREPIIKENTQNTAQQA |
| | | EIVAVITAFEEVSQPFNLYTDSKYVTGLFPEIETATLSPRTKIYTELKHL |
| | | QRLIHKRQEKFYIGHIRGHTGLPGPLAQGNAYADSLTRILT |
| MMTVB_ | 8,081 | WVQEISDSRPMLHIYLNGRRFLGLLNTGADKTCIAGRDWPANWPIHQTES |
| P03365 | | SLQGLGMACGVARSSQPLRWQHEDKSGIIHPFVIPTLPFTLWGRDIMKDI |
| | | KVRLMTDSPDDSQDLMIGAIESNLFADQISWKSDQPVWLNQWPLKQEKLQ |
| | | ALQQLVTEQLQLGHLEESNSPWNTPVFVIKKKSGKWRLLQDLRAVNATMH |
| | | DMGALQPGLPSPVAVPKGWEIIIIDLQDCFFNIKLHPEDCKRFAFSVPSP |
| | | NFKRPYQRFQWKVLPQGMKNSPTLCQKFVDKAILTVRDKYQDSYIVHYMD |
| | | DILLAHPSRSIVDEILTSMIQALNKHGLVVSTEKIQKYDNLKYLGTHIQG |
| | | DSVSYQKLQIRTDKLRTLNDFQKLLGNINWIRPFLKLTTGELKPLFEILN |
| | | GDSNPISTRKLTPEACKALQLMNERLSTARVKRLDLSQPWSLCILKTEYT |
| | | PTACLWQDGVVEWIHLPHISPKVITPYDIFCTQLIIKGRHRSKELFSKDP |
| | | DYIVVPYTKVQFDLLLQEKEDWPISLLGFLGEVHFHLPKDPLLTFTLQTA |
| | | IIFPHMTSTTPLEKGIVIFTDGSANGRSVTYIQGREPIIKENTQNTAQQA |
| | | EIVAVITAFEEVSQPFNLYTDSKYVTGLFPEIETATLSPRTKIYTELKHL |
| | | QRLIHKRQEKFYIGHIRGHTGLPGPLAQGNAYADSLTRILT |
| MMTVB_ | 8,082 | WVQEISDSRPMLHIYLNGRRFLGLLNTGADKTCIAGRDWPANWPIHQTES |
| P03365_ | | SLQGLGMACGVARSSQPLRWQHEDKSGIIHPFVIPTLPFTLWGRDIMKDI |
| 2mut | | KVRLMTDSPDDSQDLMIGAIESNLFADQISWKSDQPVWLNQWPLKQEKLQ |
| | | ALQQLVTEQLQLGHLEESNSPWNTPVFVIKKKSGKWRLLQDLRAVNATMH |
| | | DMGALQPGLPSPVAVPKGWEIIIIDLQDCFFNIKLHPEDCKRFAFSVPSP |
| | | NFKRPYQRFQWKVLPQGMKNSPTLCQKFVDKAILTVRDKYQDSYIVHYMD |
| | | DILLAHPSRSIVDEILTSMIQALNKHGLVVSTEKIQKYDNLKYLGTHIQG |
| | | DSVSYQKLQIRTDKLRTLNDFQKLLGNINWIRPFLKLTTGELKPLFEILN |
| | | PDSNPISTRKLTPEACKALQLMNERLSTARVKRLDLSQPWSLCILKTEYT |
| | | PTACLWQDGVVEWIHLPHISPKVITPYDIFCTQLIIKGRHRSKELFSKDP |
| | | DYIVVPYTKVQFDLLLQEKEDWPISLLGFLGEVHFHLPKDPLLTFTLQTA |
| | | IIFPHMTSTTPLEKGIVIFTDGSANGRSVTYIQGREPIIKENTQNTAQQA |
| | | EIVAVITAFEEVSQPFNLYTDSKYVTGLFPEIETATLSPRTKIYTELKHL |
| | | QRLIHKRQEKFYIGHIRGHTGLPGPLAQGNAYADSLTRILT |
| MMTVB_ | 8,083 | VQEISDSRPMLHIYLNGRRFLGLLDTGADKTCIAGRDWPANWPIHQTESS |
| P03365_ | | LQGLGMACGVARSSQPLRWQHEDKSGIIHPFVIPTLPFTLWGRDIMKDIK |
| 2mut_ | | VRLMTDSPDDSQDLMIGAIESNLFADQISWKSDQPVWLNQWPLKQEKLQA |
| WS | | LQQLVTEQLQLGHLEESNSPWNTPVFVIKKKSGKWRLLQDLRAVNATMHD |
| | | MGALQPGLPSPVAVPKGWEIIIIDLQDCFFNIKLHPEDCKRFAFSVPSPN |
| | | FKRPYQRFQWKVLPQGMKNSPTLCQKFVDKAILTVRDKYQDSYIVHYMDD |
| | | ILLAHPSRSIVDEILTSMIQALNKHGLVVSTEKIQKYDNLKYLGTHIQGD |
| | | SVSYQKLQIRTDKLRTLNDFQKLLGNINWIRPFLKLTTGELKPLFEILNP |
| | | DSNPISTRKLTPEACKALQLMNERLSTARVKRLDLSQPWSLCILKTEYTP |
| | | TACLWQDGWVEWIHLPHISPKVITPYDIFCTQLIIKGRHRSKELFSKDPD |
| | | YIVVPYTKVQFDLLLQEKEDWPISLLGFLGEVHFHLPKDPLLTFTLQTAI |
| | | IFPHMTSTTPLEKGIVIFTDGSANGRSVTYIQGREPIIKENTQNTAQQAE |
| | | IVAVITAFEEVSQPFNLYTDSKYVTGLFPEIETATLSPRTKIYTELKHLQ |
| | | RLIHKRQEKFYIGHIRGHTGLPGPLAQGNAYADSLTRILTA |
| MMTVB_ | 8,084 | VQEISDSRPMLHIYLNGRRFLGLLDTGADKTCIAGRDWPANWPIHQTESS |
| P03365_ | | LQGLGMACGVARSSQPLRWQHEDKSGIIHPFVIPTLPFTLWGRDIMKDIK |
| 2mut_ | | VRLMTDSPDDSQDLMIGAIESNLFADQISWKSDQPVWLNQWPLKQEKLQA |
| WS | | LQQLVTEQLQLGHLEESNSPWNTPVFVIKKKSGKWRLLQDLRAVNATMHD |
| | | MGALQPGLPSPVAVPKGWEIIIIDLQDCFFNIKLHPEDCKRFAFSVPSPN |
| | | FKRPYQRFQWKVLPQGMKNSPTLCQKFVDKAILTVRDKYQDSYIVHYMDD |
| | | ILLAHPSRSIVDEILTSMIQALNKHGLVVSTEKIQKYDNLKYLGTHIQGD |
| | | SVSYQKLQIRTDKLRTLNDFQKLLGNINWIRPFLKLTTGELKPLFEILNP |
| | | DSNPISTRKLTPEACKALQLMNERLSTARVKRLDLSQPWSLCILKTEYTP |
| | | TACLWQDGVVEWIHLPHISPKVITPYDIFCTQLIIKGRHRSKELFSKDPD |
| | | YIVVPYTKVQFDLLLQEKEDWPISLLGFLGEVHFHLPKDPLLTFTLQTAI |
| | | IFPHMTSTTPLEKGIVIFTDGSANGRSVTYIQGREPIIKENTQNTAQQAE |
| | | IVAVITAFEEVSQPFNLYTDSKYVTGLFPEIETATLSPRTKIYTELKHLQ |
| | | RLIHKRQEKFYIGHIRGHTGLPGPLAQGNAYADSLTRILTA |
| MMTVB_ | 8,085 | WVQEISDSRPMLHIYLNGRRFLGLLNTGADKTCIAGRDWPANWPIHQTES |
| P03365_ | | SLQGLGMACGVARSSQPLRWQHEDKSGIIHPFVIPTLPFTLWGRDIMKDI |
| 2mutB | | KVRLMTDSPDDSQDLMIGAIESNLFADQISWKSDQPVWLNQWPLKQEKLQ |
| | | ALQQLVTEQLQLGHLEESNSPWNTPVFVIKKKSGKWRLLQDLRAVNATMH |
| | | DMGALQPGLPSPVAPPKGWEIIIIDLQDCFFNIKLHPEDCKRFAFSVPSP |
| | | NFKRPYQRFQWKVLPQGMKNSPTLCQKFVDKAILTVRDKYQDSYIVHYMD |
| | | DILLAHPSRSIVDEILTSMIQALNKHGLVVSTEKIQKYDNLKYLGTHIQG |
| | | DSVSYQKLQIRTDKLRTLNDFQKLLGNINWIRPFLKLTTGELKPLFEILN |
| | | PDSNPISTRKLTPEACKALQLMNERLSTARVKRLDLSQPWSLCILKTEYT |
| | | PTACLWQDGVVEWIHLPHISPKVITPYDIFCTQLIIKGRHRSKELFSKDP |
| | | DYIVVPYTKVQFDLLLQEKEDWPISLLGFLGEVHFHLPKDPLLTFTLQTA |
| | | IIFPHMTSTTPLEKGIVIFTDGSANGRSVTYIQGREPIIKENTQNTAQQA |
| | | EIVAVITAFEEVSQPFNLYTDSKYVTGLFPEIETATLSPRTKIYTELKHL |
| | | QRLIHKRQEKFYIGHIRGHTGLPGPLAQGNAYADSLTRILT |
| MMTVB_ | 8,086 | WVQEISDSRPMLHIYLNGRRFLGLLNTGADKTCIAGRDWPANWPIHQTES |
| P03365_ | | SLQGLGMACGVARSSQPLRWQHEDKSGIIHPFVIPTLPFTLWGRDIMKDI |
| 2mutB | | KVRLMTDSPDDSQDLMIGAIESNLFADQISWKSDQPVWLNQWPLKQEKLQ |
| | | ALQQLVTEQLQLGHLEESNSPWNTPVFVIKKKSGKWRLLQDLRAVNATMH |
| | | DMGALQPGLPSPVAPPKGWEIIIIDLQDCFFNIKLHPEDCKRFAFSVPSP |
| | | NFKRPYQRFQWKVLPQGMKNSPTLCQKFVDKAILTVRDKYQDSYIVHYMD |
| | | DILLAHPSRSIVDEILTSMIQALNKHGLVVSTEKIQKYDNLKYLGTHIQG |
| | | DSVSYQKLQIRTDKLRTLNDFQKLLGNINWIRPFLKLTTGELKPLFEILN |
| | | PDSNPISTRKLTPEACKALQLMNERLSTARVKRLDLSQPWSLCILKTEYT |
| | | PTACLWQDGVVEWIHLPHISPKVITPYDIFCTQLIIKGRHRSKELFSKDP |
| | | DYIVVPYTKVQFDLLLQEKEDWPISLLGFLGEVHFHLPKDPLLTFTLQTA |
| | | IIFPHMTSTTPLEKGIVIFTDGSANGRSVTYIQGREPIIKENTQNTAQQA |
| | | EIVAVITAFEEVSQPFNLYTDSKYVTGLFPEIETATLSPRTKIYTELKHL |
| | | QRLIHKRQEKFYIGHIRGHTGLPGPLAQGNAYADSLTRILT |
| MMTVB_ | 8,087 | VQEISDSRPMLHIYLNGRRFLGLLDTGADKTCIAGRDWPANWPIHQTESS |
| P03365_ | | LQGLGMACGVARSSQPLRWQHEDKSGIIHPFVIPTLPFTLWGRDIMKDIK |
| 2mutB_ | | VRLMTDSPDDSQDLMIGAIESNLFADQISWKSDQPVWLNQWPLKQEKLQA |
| WS | | LQQLVTEQLQLGHLEESNSPWNTPVFVIKKKSGKWRLLQDLRAVNATMHD |
| | | MGALQPGLPSPPAVPKGWEIIIIDLQDCFFNIKLHPEDCKRFAFSVPSPN |
| | | FKRPYQRFQWKVLPQGMKNSPTLCQKFVDKAILTVRDKYQDSYIVHYMDD |
| | | ILLAHPSRSIVDEILTSMIQALNKHGLVVSTEKIQKYDNLKYLGTHIQGD |
| | | SVSYQKLQIRTDKLRTLNDFQKLLGNINWIRPFLKLTTGELKPLFEILNP |
| | | DSNPISTRKLTPEACKALQLMNERLSTARVKRLDLSQPWSLCILKTEYTP |
| | | TACLWQDGVVEWIHLPHISPKVITPYDIFCTQLIIKGRHRSKELFSKDPD |
| | | YIVVPYTKVQFDLLLQEKEDWPISLLGFLGEVHFHLPKDPLLTFTLQTAI |
| | | IFPHMTSTTPLEKGIVIFTDGSANGRSVTYIQGREPIIKENTQNTAQQAE |
| | | IVAVITAFEEVSQPFNLYTDSKYVTGLFPEIETATLSPRTKIYTELKHLQ |
| | | RLIHKRQEKFYIGHIRGHTGLPGPLAQGNAYADSLTRILTA |
| MMTVB_ | 8,088 | VQEISDSRPMLHIYLNGRRFLGLLDTGADKTCIAGRDWPANWPIHQTESS |
| P03365_ | | LQGLGMACGVARSSQPLRWQHEDKSGIIHPFVIPTLPFTLWGRDIMKDIK |
| 2mutB_ | | VRLMTDSPDDSQDLMIGAIESNLFADQISWKSDQPVWLNQWPLKQEKLQA |
| WS | | LQQLVTEQLQLGHLEESNSPWNTPVFVIKKKSGKWRLLQDLRAVNATMHD |
| | | MGALQPGLPSPPAVPKGWEIIIIDLQDCFFNIKLHPEDCKRFAFSVPSPN |
| | | FKRPYQRFQWKVLPQGMKNSPTLCQKFVDKAILTVRDKYQDSYIVHYMDD |
| | | ILLAHPSRSIVDEILTSMIQALNKHGLVVSTEKIQKYDNLKYLGTHIQGD |
| | | SVSYQKLQIRTDKLRTLNDFQKLLGNINWIRPFLKLTTGELKPLFEILNP |
| | | DSNPISTRKLTPEACKALQLMNERLSTARVKRLDLSQPWSLCILKTEYTP |
| | | TACLWQDGWVEWIHLPHISPKVITPYDIFCTQLIIKGRHRSKELFSKDPD |
| | | YIVVPYTKVQFDLLLQEKEDWPISLLGFLGEVHFHLPKDPLLTFTLQTAI |
| | | IFPHMTSTTPLEKGIVIFTDGSANGRSVTYIQGREPIIKENTQNTAQQAE |
| | | IVAVITAFEEVSQPFNLYTDSKYVTGLFPEIETATLSPRTKIYTELKHLQ |
| | | RLIHKRQEKFYIGHIRGHTGLPGPLAQGNAYADSLTRILTA |
| MMTVB_ | 8,089 | VQEISDSRPMLHIYLNGRRFLGLLDTGADKTCIAGRDWPANWPIHQTESS |
| P03365_ | | LQGLGMACGVARSSQPLRWQHEDKSGIIHPFVIPTLPFTLWGRDIMKDIK |
| WS | | VRLMTDSPDDSQDLMIGAIESNLFADQISWKSDQPVWLNQWPLKQEKLQA |
| | | LQQLVTEQLQLGHLEESNSPWNTPVFVIKKKSGKWRLLQDLRAVNATMHD |
| | | MGALQPGLPSPVAVPKGWEIIIIDLQDCFFNIKLHPEDCKRFAFSVPSPN |
| | | FKRPYQRFQWKVLPQGMKNSPTLCQKFVDKAILTVRDKYQDSYIVHYMDD |
| | | ILLAHPSRSIVDEILTSMIQALNKHGLVVSTEKIQKYDNLKYLGTHIQGD |
| | | SVSYQKLQIRTDKLRTLNDFQKLLGNINWIRPFLKLTTGELKPLFEILNG |
| | | DSNPISTRKLTPEACKALQLMNERLSTARVKRLDLSQPWSLCILKTEYTP |
| | | TACLWQDGVVEWIHLPHISPKVITPYDIFCTQLIIKGRHRSKELFSKDPD |
| | | YIVVPYTKVQFDLLLQEKEDWPISLLGFLGEVHFHLPKDPLLTFTLQTAI |
| | | IFPHMTSTTPLEKGIVIFTDGSANGRSVTYIQGREPIIKENTQNTAQQAE |
| | | IVAVITAFEEVSQPFNLYTDSKYVTGLFPEIETATLSPRTKIYTELKHLQ |
| | | RLIHKRQEKFYIGHIRGHTGLPGPLAQGNAYADSLTRILTA |
| MMTVB_ | 8,090 | VQEISDSRPMLHIYLNGRRFLGLLDTGADKTCIAGRDWPANWPIHQTESS |
| P03365_ | | LQGLGMACGVARSSQPLRWQHEDKSGIIHPFVIPTLPFTLWGRDIMKDIK |
| WS | | VRLMTDSPDDSQDLMIGAIESNLFADQISWKSDQPVWLNQWPLKQEKLQA |
| | | LQQLVTEQLQLGHLEESNSPWNTPVFVIKKKSGKWRLLQDLRAVNATMHD |
| | | MGALQPGLPSPVAVPKGWEIIIIDLQDCFFNIKLHPEDCKRFAFSVPSPN |
| | | FKRPYQRFQWKVLPQGMKNSPTLCQKFVDKAILTVRDKYQDSYIVHYMDD |
| | | ILLAHPSRSIVDEILTSMIQALNKHGLVVSTEKIQKYDNLKYLGTHIQGD |
| | | SVSYQKLQIRTDKLRTLNDFQKLLGNINWIRPFLKLTTGELKPLFEILNG |
| | | DSNPISTRKLTPEACKALQLMNERLSTARVKRLDLSQPWSLCILKTEYTP |
| | | TACLWQDGWVEWIHLPHISPKVITPYDIFCTQLIIKGRHRSKELFSKDPD |
| | | YIVVPYTKVQFDLLLQEKEDWPISLLGFLGEVHFHLPKDPLLTFTLQTAI |
| | | IFPHMTSTTPLEKGIVIFTDGSANGRSVTYIQGREPIIKENTQNTAQQAE |
| | | IVAVITAFEEVSQPFNLYTDSKYVTGLFPEIETATLSPRTKIYTELKHLQ |
| | | RLIHKRQEKFYIGHIRGHTGLPGPLAQGNAYADSLTRILTA |
| MMTVB_ | 8,091 | GRDIMKDIKVRLMTDSPDDSQDLMIGAIESNLFADQISWKSDQPVWLNQW |
| P03365- | | PLKQEKLQALQQLVTEQLQLGHLEESNSPWNTPVFVIKKKSGKWRLLQDL |
| Pro | | RAVNATMHDMGALQPGLPSPVAVPKGWEIIIIDLQDCFFNIKLHPEDCKR |
| | | FAFSVPSPNFKRPYQRFQWKVLPQGMKNSPTLCQKFVDKAILTVRDKYQD |
| | | SYIVHYMDDILLAHPSRSIVDEILTSMIQALNKHGLVVSTEKIQKYDNLK |
| | | YLGTHIQGDSVSYQKLQIRTDKLRTLNDFQKLLGNINWIRPFLKLTTGEL |
| | | KPLFEILNGDSNPISTRKLTPEACKALQLMNERLSTARVKRLDLSQPWSL |
| | | CILKTEYTPTACLWQDGVVEWIHLPHISPKVITPYDIFCTQLIIKGRHRS |
| | | KELFSKDPDYIVVPYTKVQFDLLLQEKEDWPISLLGFLGEVHFHLPKDPL |
| | | LTFTLQTAIIFPHMTSTTPLEKGIVIFTDGSANGRSVTYIQGREPIIKEN |
| | | TQNTAQQAEIVAVITAFEEVSQPFNLYTDSKYVTGLFPEIETATLSPRTK |
| | | IYTELKHLQRLIHKRQEKFYIGHIRGHTGLPGPLAQGNAYADSLTRILT |
| MMTVB_ | 8,092 | GRDIMKDIKVRLMTDSPDDSQDLMIGAIESNLFADQISWKSDQPVWLNQW |
| P03365- | | PLKQEKLQALQQLVTEQLQLGHLEESNSPWNTPVFVIKKKSGKWRLLQDL |
| Pro | | RAVNATMHDMGALQPGLPSPVAVPKGWEIIIIDLQDCFFNIKLHPEDCKR |
| | | FAFSVPSPNFKRPYQRFQWKVLPQGMKNSPTLCQKFVDKAILTVRDKYQD |
| | | SYIVHYMDDILLAHPSRSIVDEILTSMIQALNKHGLVVSTEKIQKYDNLK |
| | | YLGTHIQGDSVSYQKLQIRTDKLRTLNDFQKLLGNINWIRPFLKLTTGEL |
| | | KPLFEILNGDSNPISTRKLTPEACKALQLMNERLSTARVKRLDLSQPWSL |
| | | CILKTEYTPTACLWQDGVVEWIHLPHISPKVITPYDIFCTQLIIKGRHRS |
| | | KELFSKDPDYIVVPYTKVQFDLLLQEKEDWPISLLGFLGEVHFHLPKDPL |
| | | LTFTLQTAIIFPHMTSTTPLEKGIVIFTDGSANGRSVTYIQGREPIIKEN |
| | | TQNTAQQAEIVAVITAFEEVSQPFNLYTDSKYVTGLFPEIETATLSPRTK |
| | | IYTELKHLQRLIHKRQEKFYIGHIRGHTGLPGPLAQGNAYADSLTRILT |
| MMTVB_ | 8,093 | GRDIMKDIKVRLMTDSPDDSQDLMIGAIESNLFADQISWKSDQPVWLNQW |
| P03365- | | PLKQEKLQALQQLVTEQLQLGHLEESNSPWNTPVFVIKKKSGKWRLLQDL |
| | | RAVNATMHDMGALQPGLPSPVAVPKGWEIIIIDLQDCFFNIKLHPEDCKR |
| | | FAFSVPSPNFKRPYQRFQWKVLPQGMKNSPTLCQKFVDKAILTVRDKYQD |
| | | SYIVHYMDDILLAHPSRSIVDEILTSMIQALNKHGLVVSTEKIQKYDNLK |
| | | YLGTHIQGDSVSYQKLQIRTDKLRTLNDFQKLLGNINWIRPFLKLTTGEL |
| | | KPLFEILNPDSNPISTRKLTPEACKALQLMNERLSTARVKRLDLSQPWSL |
| | | CILKTEYTPTACLWQDGVVEWIHLPHISPKVITPYDIFCTQLIIKGRHRS |
| | | KELFSKDPDYIVVPYTKVQFDLLLQEKEDWPISLLGFLGEVHFHLPKDPL |
| | | LTFTLQTAIIFPHMTSTTPLEKGIVIFTDGSANGRSVTYIQGREPIIKEN |
| | | TQNTAQQAEIVAVITAFEEVSQPFNLYTDSKYVTGLFPEIETATLSPRTK |
| | | IYTELKHLQRLIHKRQEKFYIGHIRGHTGLPGPLAQGNAYADSLTRILT |
| MMTVB_ | 8,094 | GRDIMKDIKVRLMTDSPDDSQDLMIGAIESNLFADQISWKSDQPVWLNQW |
| P03365- | | PLKQEKLQALQQLVTEQLQLGHLEESNSPWNTPVFVIKKKSGKWRLLQDL |
| Pro_ | | RAVNATMHDMGALQPGLPSPVAVPKGWEIIIIDLQDCFFNIKLHPEDCKR |
| 2mut | | FAFSVPSPNFKRPYQRFQWKVLPQGMKNSPTLCQKFVDKAILTVRDKYQD |
| | | SYIVHYMDDILLAHPSRSIVDEILTSMIQALNKHGLVVSTEKIQKYDNLK |
| | | YLGTHIQGDSVSYQKLQIRTDKLRTLNDFQKLLGNINWIRPFLKLTTGEL |
| | | KPLFEILNPDSNPISTRKLTPEACKALQLMNERLSTARVKRLDLSQPWSL |
| | | CILKTEYTPTACLWQDGVVEWIHLPHISPKVITPYDIFCTQLIIKGRHRS |
| | | KELFSKDPDYIVVPYTKVQFDLLLQEKEDWPISLLGFLGEVHFHLPKDPL |
| | | LTFTLQTAIIFPHMTSTTPLEKGIVIFTDGSANGRSVTYIQGREPIIKEN |
| | | TQNTAQQAEIVAVITAFEEVSQPFNLYTDSKYVTGLFPEIETATLSPRTK |
| | | IYTELKHLQRLIHKRQEKFYIGHIRGHTGLPGPLAQGNAYADSLTRILT |
| MMTVB_ | 8,095 | GRDIMKDIKVRLMTDSPDDSQDLMIGAIESNLFADQISWKSDQPVWLNQW |
| P03365- | | PLKQEKLQALQQLVTEQLQLGHLEESNSPWNTPVFVIKKKSGKWRLLQDL |
| Pro_ | | RAVNATMHDMGALQPGLPSPVAPPKGWEIIIIDLQDCFFNIKLHPEDCKR |
| 2mutB | | FAFSVPSPNFKRPYQRFQWKVLPQGMKNSPTLCQKFVDKAILTVRDKYQD |
| | | SYIVHYMDDILLAHPSRSIVDEILTSMIQALNKHGLVVSTEKIQKYDNLK |
| | | YLGTHIQGDSVSYQKLQIRTDKLRTLNDFQKLLGNINWIRPFLKLTTGEL |
| | | KPLFEILNPDSNPISTRKLTPEACKALQLMNERLSTARVKRLDLSQPWSL |
| | | CILKTEYTPTACLWQDGVVEWIHLPHISPKVITPYDIFCTQLIIKGRHRS |
| | | KELFSKDPDYIVVPYTKVQFDLLLQEKEDWPISLLGFLGEVHFHLPKDPL |
| | | LTFTLQTAIIFPHMTSTTPLEKGIVIFTDGSANGRSVTYIQGREPIIKEN |
| | | TQNTAQQAEIVAVITAFEEVSQPFNLYTDSKYVTGLFPEIETATLSPRTK |
| | | IYTELKHLQRLIHKRQEKFYIGHIRGHTGLPGPLAQGNAYADSLTRILT |
| MMTVB_ | 8,096 | GRDIMKDIKVRLMTDSPDDSQDLMIGAIESNLFADQISWKSDQPVWLNQW |
| P03365- | | PLKQEKLQALQQLVTEQLQLGHLEESNSPWNTPVFVIKKKSGKWRLLQDL |
| Pro_ | | RAVNATMHDMGALQPGLPSPVAPPKGWEIIIIDLQDCFFNIKLHPEDCKR |
| 2mutB | | FAFSVPSPNFKRPYQRFQWKVLPQGMKNSPTLCQKFVDKAILTVRDKYQD |
| | | SYIVHYMDDILLAHPSRSIVDEILTSMIQALNKHGLVVSTEKIQKYDNLK |
| | | YLGTHIQGDSVSYQKLQIRTDKLRTLNDFQKLLGNINWIRPFLKLTTGEL |
| | | KPLFEILNPDSNPISTRKLTPEACKALQLMNERLSTARVKRLDLSQPWSL |
| | | CILKTEYTPTACLWQDGVVEWIHLPHISPKVITPYDIFCTQLIIKGRHRS |
| | | KELFSKDPDYIVVPYTKVQFDLLLQEKEDWPISLLGFLGEVHFHLPKDPL |
| | | LTFTLQTAIIFPHMTSTTPLEKGIVIFTDGSANGRSVTYIQGREPIIKEN |
| | | TQNTAQQAEIVAVITAFEEVSQPFNLYTDSKYVTGLFPEIETATLSPRTK |
| | | IYTELKHLQRLIHKRQEKFYIGHIRGHTGLPGPLAQGNAYADSLTRILT |
| MPMV_ | 8,097 | LTAAIDILAPQQCAEPITWKSDEPVWVDQWPLTNDKLAAAQQLVQEQLEA |
| P07572 | | GHITESSSPWNTPIFVIKKKSGKWRLLQDLRAVNATMVLMGALQPGLPSP |
| | | VAIPQGYLKIIIDLKDCFFSIPLHPSDQKRFAFSLPSTNFKEPMQRFQWK |
| | | VLPQGMANSPTLCQKYVATAIHKVRHAWKQMYIIHYMDDILIAGKDGQQV |
| | | LQCFDQLKQELTAAGLHIAPEKVQLQDPYTYLGFELNGPKITNQKAVIRK |
| | | DKLQTLNDFQKLLGDINWLRPYLKLTTGDLKPLFDTLKGDSDPNSHRSLS |
| | | KEALASLEKVETAIAEQFVTHINYSLPLIFLIFNTALTPTGLFWQDNPIM |
| | | WIHLPASPKKVLLPYYDAIADLIILGRDHSKKYFGIEPSTIIQPYSKSQI |
| | | DWLMQNTEMWPIACASFVGILDNHYPPNKLIQFCKLHTFVFPQIISKTPL |
| | | NNALLVFTDGSSTGMAAYTLTDTTIKFQTNLNSAQLVELQALIAVLSAFP |
| | | NQPLNIYTDSAYLAHSIPLLETVAQIKHISETAKLFLQCQQLIYNRSIPF |
| | | YIGHVRAHSGLPGPIAQGNQRADLATKIVASNINT |
| MPMV_ | 8,098 | LTAAIDILAPQQCAEPITWKSDEPVWVDQWPLTNDKLAAAQQLVQEQLEA |
| P07572_ | | GHITESSSPWNTPIFVIKKKSGKWRLLQDLRAVNATMVLMGALQPGLPSP |
| 2mutB | | VAPPQGYLKIIIDLKDCFFSIPLHPSDQKRFAFSLPSTNFKEPMQRFQWK |
| | | VLPQGMANSPTLCQKYVATAIHKVRHAWKQMYIIHYMDDILIAGKDGQQV |
| | | LQCFDQLKQELTAAGLHIAPEKVQLQDPYTYLGFELNGPKITNQKAVIRK |
| | | DKLQTLNDFQKLLGDINWLRPYLKLTTGDLKPLFDTLKPDSDPNSHRSLS |
| | | KEALASLEKVETAIAEQFVTHINYSLPLIFLIFNTALTPTGLFWQDNPIM |
| | | WIHLPASPKKVLLPYYDAIADLIILGRDHSKKYFGIEPSTIIQPYSKSQI |
| | | DWLMQNTEMWPIACASFVGILDNHYPPNKLIQFCKLHTFVFPQIISKTPL |
| | | NNALLVFTDGSSTGMAAYTLTDTTIKFQTNLNSAQLVELQALIAVLSAFP |
| | | NQPLNIYTDSAYLAHSIPLLETVAQIKHISETAKLFLQCQQLIYNRSIPF |
| | | YIGHVRAHSGLPGPIAQGNQRADLATKIVASNINT |
| PERV_ | 8,099 | TLQLDDEYRLYSPLVKPDQNIQFWLEQFPQAWAETAGMGLAKQVPPQVIQ |
| Q4VFZ2 | | LKASATPVSVRQYPLSKEAQEGIRPHVQRLIQQGILVPVQSPWNTPLLPV |
| | | RKPGTNDYRPVQDLREVNKRVQDIHPTVPNPYNLLCALPPQRSWYTVLDL |
| | | KDAFFCLRLHPTSQPLFAFEWRDPGTGRTGQLTWTRLPQGFKNSPTIFDE |
| | | ALHRDLANFRIQHPQVTLLQYVDDLLLAGATKQDCLEGTKALLLELSDLG |
| | | YRASAKKAQICRREVTYLGYSLRDGQRWLTEARKKTVVQIPAPTTAKQVR |
| | | EFLGTAGFCRLWIPGFATLAAPLYPLTKEKGEFSWAPEHQKAFDAIKKAL |
| | | LSAPALALPDVTKPFTLYVDERKGVARGVLTQTLGPWRRPVAYLSKKLDP |
| | | VASGWPVCLKAIAAVAILVKDADKLTLGQNITVIAPHALENIVRQPPDRW |
| | | MTNARMTHYQSLLLTERVTFAPPAALNPATLLPEETDEPVTHDCHQLLIE |
| | | ETGVRKDLTDIPLTGEVLTWFTDGSSYVVEGKRMAGAAVVDGTRTIWASS |
| | | LPEGTSAQKAELMALTQALRLAEGKSINIYTDSRYAFATAHVHGAIYKQR |
| | | GLLTSAGREIKNKEEILSLLEALHLPKRLAIIHCPGHQKAKDPISRGNQM |
| | | ADRVAKQAAQGVNLL |
| PERV_ | 8,100 | TLQLDDEYRLYSPLVKPDQNIQFWLEQFPQAWAETAGMGLAKQVPPQVIQ |
| Q4VFZ2 | | LKASATPVSVRQYPLSKEAQEGIRPHVQRLIQQGILVPVQSPWNTPLLPV |
| | | RKPGTNDYRPVQDLREVNKRVQDIHPTVPNPYNLLCALPPQRSWYTVLDL |
| | | KDAFFCLRLHPTSQPLFAFEWRDPGTGRTGQLTWTRLPQGFKNSPTIFDE |
| | | ALHRDLANFRIQHPQVTLLQYVDDLLLAGATKQDCLEGTKALLLELSDLG |
| | | YRASAKKAQICRREVTYLGYSLRDGQRWLTEARKKTVQIPAPTTAKQVRE |
| | | FLGTAGFCRLWIPGFATLAAPLYPLTKEKGEFSWAPEHQKAFDAIKKALL |
| | | SAPALALPDVTKPFTLYVDERKGVARGVLTQTLGPWRRPVAYLSKKLDPV |
| | | ASGWPVCLKAIAAVAILVKDADKLTLGQNITVIAPHALENIVRQPPDRWM |
| | | TNARMTHYQSLLLTERVTFAPPAALNPATLLPEETDEPVTHDCHQLLIEE |
| | | TGVRKDLTDIPLTGEVLTWFTDGSSYVVEGKRMAGAAVVDGTRTIWASSL |
| | | PEGTSAQKAELMALTQALRLAEGKSINIYTDSRYAFATAHVHGAIYKQRG |
| | | LLTSAGREIKNKEEILSLLEALHLPKRLAIIHCPGHQKAKDPISRGNQMA |
| | | DRVAKQAAQGVNLL |
| PERV_ | 8,101 | TLQLDDEYRLYSPLVKPDQNIQFWLEQFPQAWAETAGMGLAKQVPPQVIQ |
| Q4VFZ2_ | | LKASATPVSVRQYPLSKEAQEGIRPHVQRLIQQGILVPVQSPWNTPLLPV |
| 3mut | | RKPGTNDYRPVQDLREVNKRVQDIHPTVPNPYNLLCALPPQRSWYTVLDL |
| | | KDAFFCLRLHPTSQPLFAFEWRDPGTGRTGQLTWTRLPQGFKNSPTIFNE |
| | | ALHRDLANFRIQHPQVTLLQYVDDLLLAGATKQDCLEGTKALLLELSDLG |
| | | YRASAKKAQICRREVTYLGYSLRDGQRWLTEARKKTVQIPAPTTAKQVRE |
| | | FLGTAGFCRLWIPGFATLAAPLYPLTKPKGEFSWAPEHQKAFDAIKKALL |
| | | SAPALALPDVTKPFTLYVDERKGVARGVLTQTLGPWRRPVAYLSKKLDPV |
| | | ASGWPVCLKAIAAVAILVKDADKLTLGQNITVIAPHALENIVRQPPDRWM |
| | | TNARMTHYQSLLLTERVTFAPPAALNPATLLPEETDEPVTHDCHQLLIEE |
| | | TGVRKDLTDIPLTGEVLTWFTDGSSYVVEGKRMAGAAVVDGTRTIWASSL |
| | | PEGTSAQKAELMALTQALRLAEGKSINIYTDSRYAFATAHVHGAIYKQRG |
| | | WLTSAGREIKNKEEILSLLEALHLPKRLAIIHCPGHQKAKDPISRGNQMA |
| | | DRVAKQAAQGVNLL |
| PERV_ | 8,102 | TLQLDDEYRLYSPLVKPDQNIQFWLEQFPQAWAETAGMGLAKQVPPQVIQ |
| Q4VFZ2_ | | LKASATPVSVRQYPLSKEAQEGIRPHVQRLIQQGILVPVQSPWNTPLLPV |
| 3mut | | RKPGTNDYRPVQDLREVNKRVQDIHPTVPNPYNLLCALPPQRSWYTVLDL |
| | | KDAFFCLRLHPTSQPLFAFEWRDPGTGRTGQLTWTRLPQGFKNSPTIFNE |
| | | ALHRDLANFRIQHPQVTLLQYVDDLLLAGATKQDCLEGTKALLLELSDLG |
| | | YRASAKKAQICRREVTYLGYSLRDGQRWLTEARKKTVVQIPAPTTAKQVR |
| | | EFLGTAGFCRLWIPGFATLAAPLYPLTKPKGEFSWAPEHQKAFDAIKKAL |
| | | LSAPALALPDVTKPFTLYVDERKGVARGVLTQTLGPWRRPVAYLSKKLDP |
| | | VASGWPVCLKAIAAVAILVKDADKLTLGQNITVIAPHALENIVRQPPDRW |
| | | MTNARMTHYQSLLLTERVTFAPPAALNPATLLPEETDEPVTHDCHQLLIE |
| | | ETGVRKDLTDIPLTGEVLTWFTDGSSYVVEGKRMAGAAVVDGTRTIWASS |
| | | LPEGTSAQKAELMALTQALRLAEGKSINIYTDSRYAFATAHVHGAIYKQR |
| | | GWLTSAGREIKNKEEILSLLEALHLPKRLAIIHCPGHQKAKDPISRGNQM |
| | | ADRVAKQAAQGVNLL |
| PERV_ | 8,103 | LDDEYRLYSPLVKPDQNIQFWLEQFPQAWAETAGMGLAKQVPPQVIQLKA |
| Q4VFZ2_ | | SATPVSVRQYPLSKEAQEGIRPHVQRLIQQGILVPVQSPWNTPLLPVRKP |
| 3mutA_ | | GTNDYRPVQDLREVNKRVQDIHPTVPNPYNLLCALPPQRSWYTVLDLKDA |
| WS | | FFCLRLHPTSQPLFAFEWRDPGTGRTGQLTWTRLPQGFKNSPTIFNEALH |
| | | RDLANFRIQHPQVTLLQYVDDLLLAGATKQDCLEGTKALLLELSDLGYRA |
| | | SAKKAQICRREVTYLGYSLRDGQRWLTEARKKTVVQIPAPTTAKQVREFL |
| | | GKAGFCRLFIPGFATLAAPLYPLTKPKGEFSWAPEHQKAFDAIKKALLSA |
| | | PALALPDVTKPFTLYVDERKGVARGVLTQTLGPWRRPVAYLSKKLDPVAS |
| | | GWPVCLKAIAAVAILVKDADKLTLGQNITVIAPHALENIVRQPPDRWMTN |
| | | ARMTHYQSLLLTERVTFAPPAALNPATLLPEETDEPVTHDCHQLLIEETG |
| | | VRKDLTDIPLTGEVLTWFTDGSSYVVEGKRMAGAAVVDGTRTIWASSLPE |
| | | GTSAQKAELMALTQALRLAEGKSINIYTDSRYAFATAHVHGAIYKQRGWL |
| | | TSAGREIKNKEEILSLLEALHLPKRLAIIHCPGHQKAKDPISRGNQMADR |
| | | VAKQAAQGVNLLP |
| PERV_ | 8,104 | LDDEYRLYSPLVKPDQNIQFWLEQFPQAWAETAGMGLAKQVPPQVIQLKA |
| Q4VFZ2_ | | SATPVSVRQYPLSKEAQEGIRPHVQRLIQQGILVPVQSPWNTPLLPVRKP |
| 3mutA_ | | GTNDYRPVQDLREVNKRVQDIHPTVPNPYNLLCALPPQRSWYTVLDLKDA |
| WS | | FFCLRLHPTSQPLFAFEWRDPGTGRTGQLTWTRLPQGFKNSPTIFNEALH |
| | | RDLANFRIQHPQVTLLQYVDDLLLAGATKQDCLEGTKALLLELSDLGYRA |
| | | SAKKAQICRREVTYLGYSLRDGQRWLTEARKKTVVQIPAPTTAKQVREFL |
| | | GKAGFCRLFIPGFATLAAPLYPLTKPKGEFSWAPEHQKAFDAIKKALLSA |
| | | PALALPDVTKPFTLYVDERKGVARGVLTQTLGPWRRPVAYLSKKLDPVAS |
| | | GWPVCLKAIAAVAILVKDADKLTLGQNITVIAPHALENIVRQPPDRWMTN |
| | | ARMTHYQSLLLTERVTFAPPAALNPATLLPEETDEPVTHDCHQLLIEETG |
| | | VRKDLTDIPLTGEVLTWFTDGSSYVVEGKRMAGAAVVDGTRTIWASSLPE |
| | | GTSAQKAELMALTQALRLAEGKSINIYTDSRYAFATAHVHGAIYKQRGWL |
| | | TSAGREIKNKEEILSLLEALHLPKRLAIIHCPGHQKAKDPISRGNQMADR |
| | | VAKQAAQGVNLLP |
| SFV1_ | 8,105 | MDPLQLLQPLEAEIKGTKLKAHWNSGATITCVPEAFLEDERPIQTMLIKT |
| P23074 | | IHGEKQQDVYYLTFKVQGRKVEAEVLASPYDYILLNPSDVPWLMKKPLQL |
| | | TVLVPLHEYQERLLQQTALPKEQKELLQKLFLKYDALWQHWENQVGHRRI |
| | | KPHNIATGTLAPRPQKQYPINPKAKPSIQIVIDDLLKQGVLIQQNSTMNT |
| | | PVYPVPKPDGKWRMVLDYREVNKTIPLIAAQNQHSAGILSSIYRGKYKTT |
| | | LDLTNGFWAHPITPESYWLTAFTWQGKQYCWTRLPQGFLNSPALFTADWV |
| | | DLLKEIPNVQAYVDDIYISHDDPQEHLEQLEKIFSILLNAGYVVSLKKSE |
| | | IAQREVEFLGFNITKEGRGLTDTFKQKLLNITPPKDLKQLQSILGLLNFA |
| | | RNFIPNYSELVKPLYTIVANANGKFISWTEDNSNQLQHIISVLNQADNLE |
| | | ERNPETRLIIKVNSSPSAGYIRYYNEGSKRPIMYVNYIFSKAEAKFTQTE |
| | | KLLTTMHKGLIKAMDLAMGQEILVYSPIVSMTKIQRTPLPERKALPVRWI |
| | | TWMTYLEDPRIQFHYDKSLPELQQIPNVTEDVIAKTKHPSEFAMVFYTDG |
| | | SAIKHPDVNKSHSAGMGIAQVQFIPEYKIVHQWSIPLGDHTAQLAEIAAV |
| | | EFACKKALKISGPVLIVTDSFYVAESANKELPYWKSNGFLNNKKKPLRHV |
| | | SKWKSIAECLQLKPDIIIMHEKGHQQPMTTLHTEGNNLADKLATQGSYVV |
| | | H |
| SFV1_ | 8,106 | MDPLQLLQPLEAEIKGTKLKAHWNSGATITCVPEAFLEDERPIQTMLIKT |
| P23074_ | | IHGEKQQDVYYLTFKVQGRKVEAEVLASPYDYILLNPSDVPWLMKKPLQL |
| 2mut | | TVLVPLHEYQERLLQQTALPKEQKELLQKLFLKYDALWQHWENQVGHRRI |
| | | KPHNIATGTLAPRPQKQYPINPKAKPSIQIVIDDLLKQGVLIQQNSTMNT |
| | | PVYPVPKPDGKWRMVLDYREVNKTIPLIAAQNQHSAGILSSIYRGKYKTT |
| | | LDLTNGFWAHPITPESYWLTAFTWQGKQYCWTRLPQGFLNSPALFNADWD |
| | | LLKEIPNVQAYVDDIYISHDDPQEHLEQLEKIFSILLNAGYVVSLKKSEI |
| | | AQREVEFLGFNITKEGRGLTDTFKQKLLNITPPKDLKQLQSILGLLNFAR |
| | | NFIPNYSELVKPLYTIVAPANGKFISWTEDNSNQLQHIISVLNQADNLEE |
| | | RNPETRLIIKVNSSPSAGYIRYYNEGSKRPIMYVNYIFSKAEAKFTQTEK |
| | | LLTTMHKGLIKAMDLAMGQEILVYSPIVSMTKIQRTPLPERKALPVRWIT |
| | | WMTYLEDPRIQFHYDKSLPELQQIPNVTEDVIAKTKHPSEFAMVFYTDGS |
| | | AIKHPDVNKSHSAGMGIAQVQFIPEYKIVHQWSIPLGDHTAQLAEIAAVE |
| | | FACKKALKISGPVLIVTDSFYVAESANKELPYWKSNGFLNNKKKPLRHVS |
| | | KWKSIAECLQLKPDIIIMHEKGHQQPMTTLHTEGNNLADKLATQGSYVVH |
| SFV1_ | 8,107 | MDPLQLLQPLEAEIKGTKLKAHWNSGATITCVPEAFLEDERPIQTMLIKT |
| P23074_ | | IHGEKQQDVYYLTFKVQGRKVEAEVLASPYDYILLNPSDVPWLMKKPLQL |
| 2mutA | | TVLVPLHEYQERLLQQTALPKEQKELLQKLFLKYDALWQHWENQVGHRRI |
| | | KPHNIATGTLAPRPQKQYPINPKAKPSIQIVIDDLLKQGVLIQQNSTMNT |
| | | PVYPVPKPDGKWRMVLDYREVNKTIPLIAAQNQHSAGILSSIYRGKYKTT |
| | | LDLTNGFWAHPITPESYWLTAFTWQGKQYCWTRLPQGFLNSPALFNADWV |
| | | DLLKEIPNVQAYVDDIYISHDDPQEHLEQLEKIFSILLNAGYVVSLKKSE |
| | | IAQREVEFLGFNITKEGRGLTDTFKQKLLNITPPKDLKQLQSILGKLNFA |
| | | RNFIPNYSELVKPLYTIVAPANGKFISWTEDNSNQLQHIISVLNQADNLE |
| | | ERNPETRLIIKVNSSPSAGYIRYYNEGSKRPIMYVNYIFSKAEAKFTQTE |
| | | KLLTTMHKGLIKAMDLAMGQEILVYSPIVSMTKIQRTPLPERKALPVRWI |
| | | TWMTYLEDPRIQFHYDKSLPELQQIPNVTEDVIAKTKHPSEFAMVFYTDG |
| | | SAIKHPDVNKSHSAGMGIAQVQFIPEYKIVHQWSIPLGDHTAQLAEIAAV |
| | | EFACKKALKISGPVLIVTDSFYVAESANKELPYWKSNGFLNNKKKPLRHV |
| | | SKWKSIAECLQLKPDIIIMHEKGHQQPMTTLHTEGNNLADKLATQGSYVV |
| | | H |
| SFV1_ | 8,108 | VPWLMKKPLQLTVLVPLHEYQERLLQQTALPKEQKELLQKLFLKYDALWQ |
| P23074- | | HWENQVGHRRIKPHNIATGTLAPRPQKQYPINPKAKPSIQIVIDDLLKQG |
| Pro | | VLIQQNSTMNTPVYPVPKPDGKWRMVLDYREVNKTIPLIAAQNQHSAGIL |
| | | SSIYRGKYKTTLDLTNGFWAHPITPESYWLTAFTWQGKQYCWTRLPQGFL |
| | | NSPALFTADVVDLLKEIPNVQAYVDDIYISHDDPQEHLEQLEKIFSILLN |
| | | AGYVVSLKKSEIAQREVEFLGFNITKEGRGLTDTFKQKLLNITPPKDLKQ |
| | | LQSILGLLNFARNFIPNYSELVKPLYTIVANANGKFISWTEDNSNQLQHI |
| | | ISVLNQADNLEERNPETRLIIKVNSSPSAGYIRYYNEGSKRPIMYVNYIF |
| | | SKAEAKFTQTEKLLTTMHKGLIKAMDLAMGQEILVYSPIVSMTKIQRTPL |
| | | PERKALPVRWITWMTYLEDPRIQFHYDKSLPELQQIPNVTEDVIAKTKHP |
| | | SEFAMVFYTDGSAIKHPDVNKSHSAGMGIAQVQFIPEYKIVHQWSIPLGD |
| | | HTAQLAEIAAVEFACKKALKISGPVLIVTDSFYVAESANKELPYWKSNGF |
| | | LNNKKKPLRHVSKWKSIAECLQLKPDIIIMHEKGHQQPMTTLHTEGNNLA |
| | | DKLATQGSYVVH |
| SFV1_ | 8,109 | VPWLMKKPLQLTVLVPLHEYQERLLQQTALPKEQKELLQKLFLKYDALWQ |
| P23074_ | | HWENQVGHRRIKPHNIATGTLAPRPQKQYPINPKAKPSIQIVIDDLLKQG |
| Pro_ | | VLIQQNSTMNTPVYPVPKPDGKWRMVLDYREVNKTIPLIAAQNQHSAGIL |
| 2mut | | SSIYRGKYKTTLDLTNGFWAHPITPESYWLTAFTWQGKQYCWTRLPQGFL |
| | | NSPALFNADVVDLLKEIPNVQAYVDDIYISHDDPQEHLEQLEKIFSILLN |
| | | AGYVVSLKKSEIAQREVEFLGFNITKEGRGLTDTFKQKLLNITPPKDLKQ |
| | | LQSILGLLNFARNFIPNYSELVKPLYTIVAPANGKFISWTEDNSNQLQHI |
| | | ISVLNQADNLEERNPETRLIIKVNSSPSAGYIRYYNEGSKRPIMYVNYIF |
| | | SKAEAKFTQTEKLLTTMHKGLIKAMDLAMGQEILVYSPIVSMTKIQRTPL |
| | | PERKALPVRWITWMTYLEDPRIQFHYDKSLPELQQIPNVTEDVIAKTKHP |
| | | SEFAMVFYTDGSAIKHPDVNKSHSAGMGIAQVQFIPEYKIVHQWSIPLGD |
| | | HTAQLAEIAAVEFACKKALKISGPVLIVTDSFYVAESANKELPYWKSNGF |
| | | LNNKKKPLRHVSKWKSIAECLQLKPDIIIMHEKGHQQPMTTLHTEGNNLA |
| | | DKLATQGSYVVH |
| SFV1_ | 8,110 | VPWLMKKPLQLTVLVPLHEYQERLLQQTALPKEQKELLQKLFLKYDALWQ |
| P23074_ | | HWENQVGHRRIKPHNIATGTLAPRPQKQYPINPKAKPSIQIVIDDLLKQG |
| Pro_ | | VLIQQNSTMNTPVYPVPKPDGKWRMVLDYREVNKTIPLIAAQNQHSAGIL |
| 2mutA | | SSIYRGKYKTTLDLTNGFWAHPITPESYWLTAFTWQGKQYCWTRLPQGFL |
| | | NSPALFNADVVDLLKEIPNVQAYVDDIYISHDDPQEHLEQLEKIFSILLN |
| | | AGYVVSLKKSEIAQREVEFLGFNITKEGRGLTDTFKQKLLNITPPKDLKQ |
| | | LQSILGKLNFARNFIPNYSELVKPLYTIVAPANGKFISWTEDNSNQLQHI |
| | | ISVLNQADNLEERNPETRLIIKVNSSPSAGYIRYYNEGSKRPIMYVNYIF |
| | | SKAEAKFTQTEKLLTTMHKGLIKAMDLAMGQEILVYSPIVSMTKIQRTPL |
| | | PERKALPVRWITWMTYLEDPRIQFHYDKSLPELQQIPNVTEDVIAKTKHP |
| | | SEFAMVFYTDGSAIKHPDVNKSHSAGMGIAQVQFIPEYKIVHQWSIPLGD |
| | | HTAQLAEIAAVEFACKKALKISGPVLIVTDSFYVAESANKELPYWKSNGF |
| | | LNNKKKPLRHVSKWKSIAECLQLKPDIIIMHEKGHQQPMTTLHTEGNNLA |
| | | DKLATQGSYVVH |
| SFV3L_ | 8,111 | MDPLQLLQPLEAEIKGTKLKAHWNSGATITCVPQAFLEEEVPIKNIWIKT |
| P27401 | | IHGEKEQPVYYLTFKIQGRKVEAEVISSPYDYILVSPSDIPWLMKKPLQL |
| | | TTLVPLQEYEERLLKQTMLTGSYKEKLQSLFLKYDALWQHWENQVGHRRI |
| | | KPHHIATGTVNPRPQKQYPINPKAKASIQTVINDLLKQGVLIQQNSIMNT |
| | | PVYPVPKPDGKWRMVLDYREVNKTIPLIAAQNQHSAGILSSIFRGKYKTT |
| | | LDLSNGFWAHSITPESYWLTAFTWLGQQYCWTRLPQGFLNSPALFTADVV |
| | | DLLKEVPNVQVYVDDIYISHDDPREHLEQLEKVFSLLLNAGYVVSLKKSE |
| | | IAQHEVEFLGFNITKEGRGLTETFKQKLLNITPPRDLKQLQSILGLLNFA |
| | | RNFIPNFSELVKPLYNIIATANGKYITWTTDNSQQLQNIISMLNSAENLE |
| | | ERNPEVRLIMKVNTSPSAGYIRFYNEFAKRPIMYLNYVYTKAEVKFTNTE |
| | | KLLTTIHKGLIKALDLGMGQEILVYSPIVSMTKIQKTPLPERKALPIRWI |
| | | TWMSYLEDPRIQFHYDKTLPELQQVPTVTDDIIAKIKHPSEFSMVFYTDG |
| | | SAIKHPNVNKSHNAGMGIAQVQFKPEFTVINTWSIPLGDHTAQLAEVAAV |
| | | EFACKKALKIDGPVLIVTDSFYVAESVNKELPYWQSNGFFNNKKKPLKHV |
| | | SKWKSIADCIQLKPDIIIIHEKGHQPTASTFHTEGNNLADKLATQGSYVV |
| | | N |
| SFV3L_ | 8,112 | MDPLQLLQPLEAEIKGTKLKAHWNSGATITCVPQAFLEEEVPIKNIWIKT |
| P27401_ | | IHGEKEQPVYYLTFKIQGRKVEAEVISSPYDYILVSPSDIPWLMKKPLQL |
| 2mut | | TTLVPLQEYEERLLKQTMLTGSYKEKLQSLFLKYDALWQHWENQVGHRRI |
| | | KPHHIATGTVNPRPQKQYPINPKAKASIQTVINDLLKQGVLIQQNSIMNT |
| | | PVYPVPKPDGKWRMVLDYREVNKTIPLIAAQNQHSAGILSSIFRGKYKTT |
| | | LDLSNGFWAHSITPESYWLTAFTWLGQQYCWTRLPQGFLNSPALFNADVV |
| | | DLLKEVPNVQVYVDDIYISHDDPREHLEQLEKVFSLLLNAGYVVSLKKSE |
| | | IAQHEVEFLGFNITKEGRGLTETFKQKLLNITPPRDLKQLQSILGLLNFA |
| | | RNFIPNFSELVKPLYNIIATAPGKYITWTTDNSQQLQNIISMLNSAENLE |
| | | ERNPEVRLIMKVNTSPSAGYIRFYNEFAKRPIMYLNYVYTKAEVKFTNTE |
| | | KLLTTIHKGLIKALDLGMGQEILVYSPIVSMTKIQKTPLPERKALPIRWI |
| | | TWMSYLEDPRIQFHYDKTLPELQQVPTVTDDIIAKIKHPSEFSMVFYTDG |
| | | SAIKHPNVNKSHNAGMGIAQVQFKPEFTVINTWSIPLGDHTAQLAEVAAV |
| | | EFACKKALKIDGPVLIVTDSFYVAESVNKELPYWQSNGFFNNKKKPLKHV |
| | | SKWKSIADCIQLKPDIIIIHEKGHQPTASTFHTEGNNLADKLATQGSYVV |
| | | N |
| SFV3L_ | 8,113 | MDPLQLLQPLEAEIKGTKLKAHWNSGATITCVPQAFLEEEVPIKNIWIKT |
| P27401_ | | IHGEKEQPVYYLTFKIQGRKVEAEVISSPYDYILVSPSDIPWLMKKPLQL |
| 2mutA | | TTLVPLQEYEERLLKQTMLTGSYKEKLQSLFLKYDALWQHWENQVGHRRI |
| | | KPHHIATGTVNPRPQKQYPINPKAKASIQTVINDLLKQGVLIQQNSIMNT |
| | | PVYPVPKPDGKWRMVLDYREVNKTIPLIAAQNQHSAGILSSIFRGKYKTT |
| | | LDLSNGFWAHSITPESYWLTAFTWLGQQYCWTRLPQGFLNSPALFNADVV |
| | | DLLKEVPNVQVYVDDIYISHDDPREHLEQLEKVFSLLLNAGYVVSLKKSE |
| | | IAQHEVEFLGFNITKEGRGLTETFKQKLLNITPPRDLKQLQSILGKLNFA |
| | | RNFIPNFSELVKPLYNIIATAPGKYITWTTDNSQQLQNIISMLNSAENLE |
| | | ERNPEVRLIMKVNTSPSAGYIRFYNEFAKRPIMYLNYVYTKAEVKFTNTE |
| | | KLLTTIHKGLIKALDLGMGQEILVYSPIVSMTKIQKTPLPERKALPIRWI |
| | | TWMSYLEDPRIQFHYDKTLPELQQVPTVTDDIIAKIKHPSEFSMVFYTDG |
| | | SAIKHPNVNKSHNAGMGIAQVQFKPEFTVINTWSIPLGDHTAQLAEVAAV |
| | | EFACKKALKIDGPVLIVTDSFYVAESVNKELPYWQSNGFFNNKKKPLKHV |
| | | SKWKSIADCIQLKPDIIIIHEKGHQPTASTFHTEGNNLADKLATQGSYVV |
| | | N |
| SFV3L_ | 8,114 | IPWLMKKPLQLTTLVPLQEYEERLLKQTMLTGSYKEKLQSLFLKYDALWQ |
| P27401- | | HWENQVGHRRIKPHHIATGTVNPRPQKQYPINPKAKASIQTVINDLLKQG |
| Pro | | VLIQQNSIMNTPVYPVPKPDGKWRMVLDYREVNKTIPLIAAQNQHSAGIL |
| | | SSIFRGKYKTTLDLSNGFWAHSITPESYWLTAFTWLGQQYCWTRLPQGFL |
| | | NSPALFTADVVDLLKEVPNVQVYVDDIYISHDDPREHLEQLEKVFSLLLN |
| | | AGYVVSLKKSEIAQHEVEFLGFNITKEGRGLTETFKQKLLNITPPRDLKQ |
| | | LQSILGLLNFARNFIPNFSELVKPLYNIIATANGKYITWTTDNSQQLQNI |
| | | ISMLNSAENLEERNPEVRLIMKVNTSPSAGYIRFYNEFAKRPIMYLNYVY |
| | | TKAEVKFTNTEKLLTTIHKGLIKALDLGMGQEILVYSPIVSMTKIQKTPL |
| | | PERKALPIRWITWMSYLEDPRIQFHYDKTLPELQQVPTVTDDIIAKIKHP |
| | | SEFSMVFYTDGSAIKHPNVNKSHNAGMGIAQVQFKPEFTVINTWSIPLGD |
| | | HTAQLAEVAAVEFACKKALKIDGPVLIVTDSFYVAESVNKELPYWQSNGF |
| | | FNNKKKPLKHVSKWKSIADCIQLKPDIIIIHEKGHQPTASTFHTEGNNLA |
| | | DKLATQGSYVVN |
| SFV3L_ | 8,115 | IPWLMKKPLQLTTLVPLQEYEERLLKQTMLTGSYKEKLQSLFLKYDALWQ |
| P27401- | | HWENQVGHRRIKPHHIATGTVNPRPQKQYPINPKAKASIQTVINDLLKQG |
| Pro_ | | VLIQQNSIMNTPVYPVPKPDGKWRMVLDYREVNKTIPLIAAQNQHSAGIL |
| 2mut | | SSIFRGKYKTTLDLSNGFWAHSITPESYWLTAFTWLGQQYCWTRLPQGFL |
| | | NSPALFNADVVDLLKEVPNVQVYVDDIYISHDDPREHLEQLEKVFSLLLN |
| | | AGYVVSLKKSEIAQHEVEFLGFNITKEGRGLTETFKQKLLNITPPRDLKQ |
| | | LQSILGLLNFARNFIPNFSELVKPLYNIIATAPGKYITWTTDNSQQLQNI |
| | | ISMLNSAENLEERNPEVRLIMKVNTSPSAGYIRFYNEFAKRPIMYLNYVY |
| | | TKAEVKFTNTEKLLTTIHKGLIKALDLGMGQEILVYSPIVSMTKIQKTPL |
| | | PERKALPIRWITWMSYLEDPRIQFHYDKTLPELQQVPTVTDDIIAKIKHP |
| | | SEFSMVFYTDGSAIKHPNVNKSHNAGMGIAQVQFKPEFTVINTWSIPLGD |
| | | HTAQLAEVAAVEFACKKALKIDGPVLIVTDSFYVAESVNKELPYWQSNGF |
| | | FNNKKKPLKHVSKWKSIADCIQLKPDIIIIHEKGHQPTASTFHTEGNNLA |
| | | DKLATQGSYVVN |
| SFV3L_ | 8,116 | IPWLMKKPLQLTTLVPLQEYEERLLKQTMLTGSYKEKLQSLFLKYDALWQ |
| P27401- | | HWENQVGHRRIKPHHIATGTVNPRPQKQYPINPKAKASIQTVINDLLKQG |
| Pro_ | | VLIQQNSIMNTPVYPVPKPDGKWRMVLDYREVNKTIPLIAAQNQHSAGIL |
| 2mutA | | SSIFRGKYKTTLDLSNGFWAHSITPESYWLTAFTWLGQQYCWTRLPQGFL |
| | | NSPALFNADVVDLLKEVPNVQVYVDDIYISHDDPREHLEQLEKVFSLLLN |
| | | AGYVVSLKKSEIAQHEVEFLGFNITKEGRGLTETFKQKLLNITPPRDLKQ |
| | | LQSILGKLNFARNFIPNFSELVKPLYNIIATAPGKYITWTTDNSQQLQNI |
| | | ISMLNSAENLEERNPEVRLIMKVNTSPSAGYIRFYNEFAKRPIMYLNYVY |
| | | TKAEVKFTNTEKLLTTIHKGLIKALDLGMGQEILVYSPIVSMTKIQKTPL |
| | | PERKALPIRWITWMSYLEDPRIQFHYDKTLPELQQVPTVTDDIIAKIKHP |
| | | SEFSMVFYTDGSAIKHPNVNKSHNAGMGIAQVQFKPEFTVINTWSIPLGD |
| | | HTAQLAEVAAVEFACKKALKIDGPVLIVTDSFYVAESVNKELPYWQSNGF |
| | | FNNKKKPLKHVSKWKSIADCIQLKPDIIIIHEKGHQPTASTFHTEGNNLA |
| | | DKLATQGSYVVN |
| SFVCP_ | 8,117 | MNPLQLLQPLPAEVKGTKLLAHWNSGATITCIPESFLEDEQPIKQTLIKT |
| Q87040 | | IHGEKQQNVYYLTFKVKGRKVEAEVIASPYEYILLSPTDVPWLTQQPLQL |
| | | TILVPLQEYQDRINKTALPEEQKQQLKALFTKYDNLWQHWENQVGHRKIR |
| | | PHNIATGDYPPRPQKQYPINPKAKPSIQIVIDDLLKQGVLTPQNSTMNTP |
| | | VYPVPKPDGRWRMVLDYREVNKTIPLTAAQNQHSAGILATIVRQKYKTTL |
| | | DLANGFWAHPITPDSYWLTAFTWQGKQYCWTRLPQGFLNSPALFTADAVD |
| | | LLKEVPNVQVYVDDIYLSHDNPHEHIQQLEKVFQILLQAGYVVSLKKSEI |
| | | GQRTVEFLGFNITKEGRGLTDTFKTKLLNVTPPKDLKQLQSILGLLNFAR |
| | | NFIPNFAELVQTLYNLIASSKGKYIEWTEDNTKQLNKVIEALNTASNLEE |
| | | RLPDQRLVIKVNTSPSAGYVRYYNESGKKPIMYLNYVFSKAELKFSMLEK |
| | | LLTTMHKALIKAMDLAMGQEILVYSPIVSMTKIQKTPLPERKALPIRWIT |
| | | WMTYLEDPRIQFHYDKTLPELKHIPDVYTSSIPPLKHPSQYEGVFCTDGS |
| | | AIKSPDPTKSNNAGMGIVHAIYNPEYKILNQWSIPLGHHTAQMAEIAAVE |
| | | FACKKALKVPGPVLVITDSFYVAESANKELPYWKSNGFVNNKKEPLKHIS |
| | | KWKSIAECLSIKPDITIQHEKGHQPINTSIHTEGNALADKLATQGSYVVN |
| SFVCP_ | 8,118 | MNPLQLLQPLPAEVKGTKLLAHWNSGATITCIPESFLEDEQPIKQTLIKT |
| Q87040_ | | IHGEKQQNVYYLTFKVKGRKVEAEVIASPYEYILLSPTDVPWLTQQPLQL |
| 2mut | | TILVPLQEYQDRILNKTALPEEQKQQLKALFTKYDNLWQHWENQVGHRKI |
| | | RPHNIATGDYPPRPQKQYPINPKAKPSIQIVIDDLLKQGVLTPQNSTMNT |
| | | PVYPVPKPDGRWRMVLDYREVNKTIPLTAAQNQHSAGILATIVRQKYKTT |
| | | LDLANGFWAHPITPDSYWLTAFTWQGKQYCWTRLPQGFLNSPALFNADAV |
| | | DLLKEVPNVQVYVDDIYLSHDNPHEHIQQLEKVFQILLQAGYVVSLKKSE |
| | | IGQRTVEFLGFNITKEGRGLTDTFKTKLLNVTPPKDLKQLQSILGLLNFA |
| | | RNFIPNFAELVQTLYNLIASSPGKYIEWTEDNTKQLNKVIEALNTASNLE |
| | | ERLPDQRLVIKVNTSPSAGYVRYYNESGKKPIMYLNYVFSKAELKFSMLE |
| | | KLLTTMHKALIKAMDLAMGQEILVYSPIVSMTKIQKTPLPERKALPIRWI |
| | | TWMTYLEDPRIQFHYDKTLPELKHIPDVYTSSIPPLKHPSQYEGVFCTDG |
| | | SAIKSPDPTKSNNAGMGIVHAIYNPEYKILNQWSIPLGHHTAQMAEIAAV |
| | | EFACKKALKVPGPVLVITDSFYVAESANKELPYWKSNGFVNNKKEPLKHI |
| | | SKWKSIAECLSIKPDITIQHEKGHQPINTSIHTEGNALADKLATQGSYVV |
| | | N |
| SFVCP_ | 8,119 | MNPLQLLQPLPAEVKGTKLLAHWNSGATITCIPESFLEDEQPIKQTLIKT |
| Q87040_ | | IHGEKQQNVYYLTFKVKGRKVEAEVIASPYEYILLSPTDVPWLTQQPLQL |
| 2mutA | | TILVPLQEYQDRINKTALPEEQKQQLKALFTKYDNLWQHWENQVGHRKIR |
| | | PHNIATGDYPPRPQKQYPINPKAKPSIQIVIDDLLKQGVLTPQNSTMNTP |
| | | VYPVPKPDGRWRMVLDYREVNKTIPLTAAQNQHSAGILATIVRQKYKTTL |
| | | DLANGFWAHPITPDSYWLTAFTWQGKQYCWTRLPQGFLNSPALFNADAVD |
| | | LLKEVPNVQVYVDDIYLSHDNPHEHIQQLEKVFQILLQAGYVVSLKKSEI |
| | | GQRTVEFLGFNITKEGRGLTDTFKTKLLNVTPPKDLKQLQSILGKLNFAR |
| | | NFIPNFAELVQTLYNLIASSPGKYIEWTEDNTKQLNKVIEALNTASNLEE |
| | | RLPDQRLVIKVNTSPSAGYVRYYNESGKKPIMYLNYVFSKAELKFSMLEK |
| | | LLTTMHKALIKAMDLAMGQEILVYSPIVSMTKIQKTPLPERKALPIRWIT |
| | | WMTYLEDPRIQFHYDKTLPELKHIPDVYTSSIPPLKHPSQYEGVFCTDGS |
| | | AIKSPDPTKSNNAGMGIVHAIYNPEYKILNQWSIPLGHHTAQMAEIAAVE |
| | | FACKKALKVPGPVLVITDSFYVAESANKELPYWKSNGFVNNKKEPLKHIS |
| | | KWKSIAECLSIKPDITIQHEKGHQPINTSIHTEGNALADKLATQGSYVVN |
| SFVCP_ | 8,120 | VPWLTQQPLQLTILVPLQEYQDRILNKTALPEEQKQQLKALFTKYDNLWQ |
| Q87040- | | HWENQVGHRKIRPHNIATGDYPPRPQKQYPINPKAKPSIQIVIDDLLKQG |
| Pro | | VLTPQNSTMNTPVYPVPKPDGRWRMVLDYREVNKTIPLTAAQNQHSAGIL |
| | | ATIVRQKYKTTLDLANGFWAHPITPDSYWLTAFTWQGKQYCWTRLPQGFL |
| | | NSPALFTADAVDLLKEVPNVQVYVDDIYLSHDNPHEHIQQLEKVFQILLQ |
| | | AGYVVSLKKSEIGQRTVEFLGFNITKEGRGLTDTFKTKLLNVTPPKDLKQ |
| | | LQSILGLLNFARNFIPNFAELVQTLYNLIASSKGKYIEWTEDNTKQLNKV |
| | | IEALNTASNLEERLPDQRLVIKVNTSPSAGYVRYYNESGKKPIMYLNYVF |
| | | SKAELKFSMLEKLLTTMHKALIKAMDLAMGQEILVYSPIVSMTKIQKTPL |
| | | PERKALPIRWITWMTYLEDPRIQFHYDKTLPELKHIPDVYTSSIPPLKHP |
| | | SQYEGVFCTDGSAIKSPDPTKSNNAGMGIVHAIYNPEYKILNQWSIPLGH |
| | | HTAQMAEIAAVEFACKKALKVPGPVLVITDSFYVAESANKELPYWKSNGF |
| | | VNNKKEPLKHISKWKSIAECLSIKPDITIQHEKGHQPINTSIHTEGNALA |
| | | DKLATQGSYVVN |
| SFVCP_ | 8,121 | VPWLTQQPLQLTILVPLQEYQDRILNKTALPEEQKQQLKALFTKYDNLWQ |
| Q87040- | | HWENQVGHRKIRPHNIATGDYPPRPQKQYPINPKAKPSIQIVIDDLLKQG |
| Pro_ | | VLTPQNSTMNTPVYPVPKPDGRWRMVLDYREVNKTIPLTAAQNQHSAGIL |
| 2mut | | ATIVRQKYKTTLDLANGFWAHPITPDSYWLTAFTWQGKQYCWTRLPQGFL |
| | | NSPALFNADAVDLLKEVPNVQVYVDDIYLSHDNPHEHIQQLEKVFQILLQ |
| | | AGYVVSLKKSEIGQRTVEFLGFNITKEGRGLTDTFKTKLLNVTPPKDLKQ |
| | | LQSILGLLNFARNFIPNFAELVQTLYNLIASSPGKYIEWTEDNTKQLNKV |
| | | IEALNTASNLEERLPDQRLVIKVNTSPSAGYVRYYNESGKKPIMYLNYVF |
| | | SKAELKFSMLEKLLTTMHKALIKAMDLAMGQEILVYSPIVSMTKIQKTPL |
| | | PERKALPIRWITWMTYLEDPRIQFHYDKTLPELKHIPDVYTSSIPPLKHP |
| | | SQYEGVFCTDGSAIKSPDPTKSNNAGMGIVHAIYNPEYKILNQWSIPLGH |
| | | HTAQMAEIAAVEFACKKALKVPGPVLVITDSFYVAESANKELPYWKSNGF |
| | | VNNKKEPLKHISKWKSIAECLSIKPDITIQHEKGHQPINTSIHTEGNALA |
| | | DKLATQGSYVVN |
| SFVCP_ | 8,122 | VPWLTQQPLQLTILVPLQEYQDRINKTALPEEQKQQLKALFTKYDNLWQH |
| Q87040- | | WENQVGHRKIRPHNIATGDYPPRPQKQYPINPKAKPSIQIVIDDLLKQGV |
| Pro_ | | LTPQNSTMNTPVYPVPKPDGRWRMVLDYREVNKTIPLTAAQNQHSAGILA |
| 2mutA | | TIVRQKYKTTLDLANGFWAHPITPDSYWLTAFTWQGKQYCWTRLPQGFLN |
| | | SPALFNADAVDLLKEVPNVQVYVDDIYLSHDNPHEHIQQLEKVFQILLQA |
| | | GYVVSLKKSEIGQRTVEFLGFNITKEGRGLTDTFKTKLLNVTPPKDLKQL |
| | | QSILGKLNFARNFIPNFAELVQTLYNLIASSPGKYIEWTEDNTKQLNKVI |
| | | EALNTASNLEERLPDQRLVIKVNTSPSAGYVRYYNESGKKPIMYLNYVFS |
| | | KAELKFSMLEKLLTTMHKALIKAMDLAMGQEILVYSPIVSMTKIQKTPLP |
| | | ERKALPIRWITWMTYLEDPRIQFHYDKTLPELKHIPDVYTSSIPPLKHPS |
| | | QYEGVFCTDGSAIKSPDPTKSNNAGMGIVHAIYNPEYKILNQWSIPLGHH |
| | | TAQMAEIAAVEFACKKALKVPGPVLVITDSFYVAESANKELPYWKSNGFV |
| | | NNKKEPLKHISKWKSIAECLSIKPDITIQHEKGHQPINTSIHTEGNALAD |
| | | KLATQGSYVVN |
| SMRVH_ | 8,123 | PRSRAIDIPVPHADKISWKITDPVWVDQWPLTYEKTLAAIALVQEQLAAG |
| P03364 | | HIEPTNSPWNTPIFIIKKKSGSWRLLQDLRAVNKVMVPMGALQPGLPSPV |
| | | AIPLNYHKIVIDLKDCFFTIPLHPEDRPYFAFSVPQINFQSPMPRYQWKV |
| | | LPQGMANSPTLCQKFVAAAIAPVRSQWPEAYILHYMDDILLACDSAEAAK |
| | | ACYAHIISCLTSYGLKIAPDKVQVSEPFSYLGFELHHQQVFTPRVCLKTD |
| | | HLKTLNDFQKLLGDIQWLRPYLKLPTSALVPLNNILKGDPNPLSVRALTP |
| | | EAKQSLALINKAIQNQSVQQISYNLPLVLLLLPTPHTPTAVFWQPNGTDP |
| | | TKNGSPLLWLHLPASPSKVLLTYPSLLAMLIIKGRYTGRQLFGRDPHSII |
| | | IPYTQDQLTWLLQTSDEWAIALSSFTGDIDNHYPSDPVIQFAKLHQFIFP |
| | | KITKCAPIPQATLVFTDGSSNGIAAYVIDNQPISIKSPYLSAQLVELYAI |
| | | LQVFTVLAHQPFNLYTDSAYIAQSVPLLETVPFIKSSTNATPLFSKLQQL |
| | | ILNRQHPFFIGHLRAHLNLPGPLAEGNALADAATQIFPIISD |
| SMRVH_ | 8,124 | PRSRAIDIPVPHADKISWKITDPVWVDQWPLTYEKTLAAIALVQEQLAAG |
| P03364_ | | HIEPTNSPWNTPIFIIKKKSGSWRLLQDLRAVNKVMVPMGALQPGLPSPV |
| 2mut | | AIPLNYHKIVIDLKDCFFTIPLHPEDRPYFAFSVPQINFQSPMPRYQWKV |
| | | LPQGMANSPTLCQKFVAAAIAPVRSQWPEAYILHYMDDILLACDSAEAAK |
| | | ACYAHIISCLTSYGLKIAPDKVQVSEPFSYLGFELHHQQVFTPRVCLKTD |
| | | HLKTLNDFQKLLGDIQWLRPYLKLPTSALVPLNNILKPDPNPLSVRALTP |
| | | EAKQSLALINKAIQNQSVQQISYNLPLVLLLLPTPHTPTAVFWQPNGTDP |
| | | TKNGSPLLWLHLPASPSKVLLTYPSLLAMLIIKGRYTGRQLFGRDPHSII |
| | | IPYTQDQLTWLLQTSDEWAIALSSFTGDIDNHYPSDPVIQFAKLHQFIFP |
| | | KITKCAPIPQATLVFTDGSSNGIAAYVIDNQPISIKSPYLSAQLVELYAI |
| | | LQVFTVLAHQPFNLYTDSAYIAQSVPLLETVPFIKSSTNATPLFSKLQQL |
| | | ILNRQHPFFIGHLRAHLNLPGPLAEGNALADAATQIFPIISD |
| SMRVH_ | 8,125 | PRSRAIDIPVPHADKISWKITDPVWVDQWPLTYEKTLAAIALVQEQLAAG |
| P03364_ | | HIEPTNSPWNTPIFIIKKKSGSWRLLQDLRAVNKVMVPMGALQPGLPSPV |
| 2mutB | | APPLNYHKIVIDLKDCFFTIPLHPEDRPYFAFSVPQINFQSPMPRYQWKV |
| | | LPQGMANSPTLCQKFVAAAIAPVRSQWPEAYILHYMDDILLACDSAEAAK |
| | | ACYAHIISCLTSYGLKIAPDKVQVSEPFSYLGFELHHQQVFTPRVCLKTD |
| | | HLKTLNDFQKLLGDIQWLRPYLKLPTSALVPLNNILKPDPNPLSVRALTP |
| | | EAKQSLALINKAIQNQSVQQISYNLPLVLLLLPTPHTPTAVFWQPNGTDP |
| | | TKNGSPLLWLHLPASPSKVLLTYPSLLAMLIIKGRYTGRQLFGRDPHSII |
| | | IPYTQDQLTWLLQTSDEWAIALSSFTGDIDNHYPSDPVIQFAKLHQFIFP |
| | | KITKCAPIPQATLVFTDGSSNGIAAYVIDNQPISIKSPYLSAQLVELYAI |
| | | LQVFTVLAHQPFNLYTDSAYIAQSVPLLETVPFIKSSTNATPLFSKLQQL |
| | | ILNRQHPFFIGHLRAHLNLPGPLAEGNALADAATQIFPIISD |
| SRV2_ | 8,126 | LATAVDILAPQRYADPITWKSDEPVWVDQWPLTQEKLAAAQQLVQEQLQA |
| P51517 | | GHIIESNSPWNTPIFVIKKKSGKWRLLQDLRAVNATMVLMGALQPGLPSP |
| | | VAIPQGYFKIVIDLKDCFFTIPLQPVDQKRFAFSLPSTNFKQPMKRYQWK |
| | | VLPQGMANSPTLCQKYVAAAIEPVRKSWAQMYIIHYMDDILIAGKLGEQV |
| | | LQCFAQLKQALTTTGLQIAPEKVQLQDPYTYLGFQINGPKITNQKAVIRR |
| | | DKLQTLNDFQKLLGDINWLRPYLHLTTGDLKPLFDILKGDSNPNSPRSLS |
| | | EAALASLQKVETAIAEQFVTQIDYTQPLTFLIFNTTLTPTGLFWQNNPVM |
| | | WVHLPASPKKVLLPYYDAIADLIILGRDNSKKYFGLEPSTIIQPYSKSQI |
| | | HWLMQNTETWPIACASYAGNIDNHYPPNKLIQFCKLHAVVFPRIISKTPL |
| | | DNALLVFTDGSSTGIAAYTFEKTTVRFKTSHTSAQLVELQALIAVLSAFP |
| | | HRALNVYTDSAYLAHSIPLLETVSHIKHISDTAKFFLQCQQLIYNRSIPF |
| | | YLGHIRAHSGLPGPLSQGNHITDLATKVVATTLTT |
| SRV2_ | 8,127 | LATAVDILAPQRYADPITWKSDEPVWVDQWPLTQEKLAAAQQLVQEQLQA |
| P51517_ | | GHIIESNSPWNTPIFVIKKKSGKWRLLQDLRAVNATMVLMGALQPGLPSP |
| 2mutB | | VAPPQGYFKIVIDLKDCFFTIPLQPVDQKRFAFSLPSTNFKQPMKRYQWK |
| | | VLPQGMANSPTLCQKYVAAAIEPVRKSWAQMYIIHYMDDILIAGKLGEQV |
| | | LQCFAQLKQALTTTGLQIAPEKVQLQDPYTYLGFQINGPKITNQKAVIRR |
| | | DKLQTLNDFQKLLGDINWLRPYLHLTTGDLKPLFDILKGDSNPNSPRSLS |
| | | EAALASLQKVETAIAEQFVTQIDYTQPLTFLIFNTTLTPTGLFWQNNPVM |
| | | WVHLPASPKKVLLPYYDAIADLIILGRDNSKKYFGLEPSTIIQPYSKSQI |
| | | HWLMQNTETWPIACASYAGNIDNHYPPNKLIQFCKLHAVVFPRIISKTPL |
| | | DNALLVFTDGSSTGIAAYTFEKTTVRFKTSHTSAQLVELQALIAVLSAFP |
| | | HRALNVYTDSAYLAHSIPLLETVSHIKHISDTAKFFLQCQQLIYNRSIPF |
| | | YLGHIRAHSGLPGPLSQGNHITDLATKVVATTLTT |
| WDSV_ | 8,128 | SCQTKNTLNIDEYLLQFPDQLWASLPTDIGRMLVPPITIKIKDNASLPSI |
| O92815 | | RQYPLPKDKTEGLRPLISSLENQGILIKCHSPCNTPIFPIKKAGRDEYRM |
| | | IHDLRAINNIVAPLTAVVASPTTVLSNLAPSLHWFTVIDLSNAFFSVPIH |
| | | KDSQYLFAFTFEGHQYTWTVLPQGFIHSPTLFSQALYQSLHKIKFKISSE |
| | | ICIYMDDVLIASKDRDTNLKDTAVMLQHLASEGHKVSKKKLQLCQQEVVY |
| | | LGQLLTPEGRKILPDRKVTVSQFQQPTTIRQIRAFLGLVGYCRHWIPEFS |
| | | IHSKFLEKQLKKDTAEPFQLDDQQVEAFNKLKHAITTAPVLVVPDPAKPF |
| | | QLYTSHSEHASIAVLTQKHAGRTRPIAFLSSKFDAIESGLPPCLKACASI |
| | | HRSLTQADSFILGAPLIIYTTHAICTLLQRDRSQLVTASRFSKWEADLLR |
| | | PELTFVACSAVSPAHLYMQSCENNIPPHDCVLLTHTISRPRPDLSDLPIP |
| | | DPDMTLFSDGSYTTGRGGAAVVMHRPVTDDFIIIHQQPGGASAQTAELLA |
| | | LAAACHLATDKTVNIYTDSRYAYGWHDFGHLWMHRGFVTSAGTPIKNHKE |
| | | IEYLLKQIMKPKQVSVIKIEAHTKGVSMEVRGNAAADEAAKNAVFLVQR |
| WDSV_ | 8,129 | SCQTKNTLNIDEYLLQFPDQLWASLPTDIGRMLVPPITIKIKDNASLPSI |
| O92815_ | | RQYPLPKDKTEGLRPLISSLENQGILIKCHSPCNTPIFPIKKAGRDEYRM |
| 2mut | | IHDLRAINNIVAPLTAVVASPTTVLSNLAPSLHWFTVIDLSNAFFSVPIH |
| | | KDSQYLFAFTFEGHQYTWTVLPQGFIHSPTLFNQALYQSLHKIKFKISSE |
| | | ICIYMDDVLIASKDRDTNLKDTAVMLQHLASEGHKVSKKKLQLCQQEVVY |
| | | LGQLLTPEGRKILPDRKVTVSQFQQPTTIRQIRAFLGLVGYCRHWIPEFS |
| | | IHSKFLEKQLKPDTAEPFQLDDQQVEAFNKLKHAITTAPVLWPDPAKPFQ |
| | | LYTSHSEHASIAVLTQKHAGRTRPIAFLSSKFDAIESGLPPCLKACASIH |
| | | RSLTQADSFILGAPLIIYTTHAICTLLQRDRSQLVTASRFSKWEADLLRP |
| | | ELTFVACSAVSPAHLYMQSCENNIPPHDCVLLTHTISRPRPDLSDLPIPD |
| | | PDMTLFSDGSYTTGRGGAAVVMHRPVTDDFIIIHQQPGGASAQTAELLAL |
| | | AAACHLATDKTVNIYTDSRYAYGVVHDFGHLWMHRGFVTSAGTPIKNHKE |
| | | IEYLLKQIMKPKQVSVIKIEAHTKGVSMEVRGNAAADEAAKNAVFLVQR |
| WDSV_ | 8,130 | SCQTKNTLNIDEYLLQFPDQLWASLPTDIGRMLVPPITIKIKDNASLPSI |
| O92815_ | | RQYPLPKDKTEGLRPLISSLENQGILIKCHSPCNTPIFPIKKAGRDEYRM |
| 2mutA | | IHDLRAINNIVAPLTAVVASPTTVLSNLAPSLHWFTVIDLSNAFFSVPIH |
| | | KDSQYLFAFTFEGHQYTWTVLPQGFIHSPTLFNQALYQSLHKIKFKISSE |
| | | ICIYMDDVLIASKDRDTNLKDTAVMLQHLASEGHKVSKKKLQLCQQEVVY |
| | | LGQLLTPEGRKILPDRKVTVSQFQQPTTIRQIRAFLGKVGYCRHFIPEFS |
| | | IHSKFLEKQLKPDTAEPFQLDDQQVEAFNKLKHAITTAPVLVVPDPAKPF |
| | | QLYTSHSEHASIAVLTQKHAGRTRPIAFLSSKFDAIESGLPPCLKACASI |
| | | HRSLTQADSFILGAPLIIYTTHAICTLLQRDRSQLVTASRFSKWEADLLR |
| | | PELTFVACSAVSPAHLYMQSCENNIPPHDCVLLTHTISRPRPDLSDLPIP |
| | | DPDMTLFSDGSYTTGRGGAAVVMHRPVTDDFIIIHQQPGGASAQTAELLA |
| | | LAAACHLATDKTVNIYTDSRYAYGVHDFGHLWMHRGFVTSAGTPIKNHKE |
| | | IEYLLKQIMKPKQVSVIKIEAHTKGVSMEVRGNAAADEAAKNAVFLVQR |
| WMSV_ | 8,131 | VLNLEEEYRLHEKPVPSSIDPSWLQLFPTVWAERAGMGLANQVPPVVVEL |
| P03359 | | RSGASPVAVRQYPMSKEAREGIRPHIQRFLDLGVLVPCQSPWNTPLLPVK |
| | | KPGTNDYRPVQDLREINKRVQDIHPTVPNPYNLLSSLPPSHTWYSVLDLK |
| | | DAFFCLKLHPNSQPLFAFEWRDPEKGNTGQLTWTRLPQGFKNSPTLFDEA |
| | | LHRDLAPFRALNPQVVLLQYVDDLLVAAPTYRDCKEGTQKLLQELSKLGY |
| | | RVSAKKAQLCQKEVTYLGYLLKEGKRWLTPARKATVMKIPPPTTPRQVRE |
| | | FLGTAGFCRLWIPGFASLAAPLYPLTKESIPFIWTEEHQKAFDRIKEALL |
| | | SAPALALPDLTKPFTLYVDERAGVARGVLTQTLGPWRRPVAYLSKKLDPV |
| | | ASGWPTCLKAVAAVALLLKDADKLTLGQNVTVIASHSLESIVRQPPDRWM |
| | | TNARMTHYQSLLLNERVSFAPPAVLNPATLLPVESEATPVHRCSEILAEE |
| | | TGTRRDLKDQPLPGVPAWYTDGSSFIAEGKRRAGAAIVDGKRTVWASSLP |
| | | EGTSAQKAELVALTQALRLAEGKDINIYTDSRYAFATAHIHGAIYKQRGL |
| | | LTSAGKDIKNKEEILALLEAIHLPKRVAIIHCPGHQKGNDPVATGNRRAD |
| | | EAAKQAALSTRVLAETTKP |
| WMSV_ | 8,132 | VLNLEEEYRLHEKPVPSSIDPSWLQLFPTVWAERAGMGLANQVPPVVVEL |
| P03359_ | | RSGASPVAVRQYPMSKEAREGIRPHIQRFLDLGVLVPCQSPWNTPLLPVK |
| 3mut | | KPGTNDYRPVQDLREINKRVQDIHPTVPNPYNLLSSLPPSHTWYSVLDLK |
| | | DAFFCLKLHPNSQPLFAFEWRDPEKGNTGQLTWTRLPQGFKNSPTLFNEA |
| | | LHRDLAPFRALNPQWVLLQYVDDLLVAAPTYRDCKEGTQKLLQELSKLGY |
| | | RVSAKKAQLCQKEVTYLGYLLKEGKRWLTPARKATVMKIPPPTTPRQVRE |
| | | FLGTAGFCRLWIPGFASLAAPLYPLTKPSIPFIWTEEHQKAFDRIKEALL |
| | | SAPALALPDLTKPFTLYVDERAGVARGVLTQTLGPWRRPVAYLSKKLDPV |
| | | ASGWPTCLKAVAAVALLLKDADKLTLGQNVTVIASHSLESIVRQPPDRWM |
| | | TNARMTHYQSLLLNERVSFAPPAVLNPATLLPVESEATPVHRCSEILAEE |
| | | TGTRRDLKDQPLPGVPAWYTDGSSFIAEGKRRAGAAIVDGKRTVWASSLP |
| | | EGTSAQKAELVALTQALRLAEGKDINIYTDSRYAFATAHIHGAIYKQRGW |
| | | LTSAGKDIKNKEEILALLEAIHLPKRVAIIHCPGHQKGNDPVATGNRRAD |
| | | EAAKQAALSTRVLAETTKP |
| WMSV_ | 8,133 | VLNLEEEYRLHEKPVPSSIDPSWLQLFPTVWAERAGMGLANQVPPVVVEL |
| P03359_ | | RSGASPVAVRQYPMSKEAREGIRPHIQRFLDLGVLVPCQSPWNTPLLPVK |
| 3mutA | | KPGTNDYRPVQDLREINKRVQDIHPTVPNPYNLLSSLPPSHTWYSVLDLK |
| | | DAFFCLKLHPNSQPLFAFEWRDPEKGNTGQLTWTRLPQGFKNSPTLFNEA |
| | | LHRDLAPFRALNPQVVLLQYVDDLLVAAPTYRDCKEGTQKLLQELSKLGY |
| | | RVSAKKAQLCQKEVTYLGYLLKEGKRWLTPARKATVMKIPPPTTPRQVRE |
| | | FLGKAGFCRLFIPGFASLAAPLYPLTKPSIPFIWTEEHQKAFDRIKEALL |
| | | SAPALALPDLTKPFTLYVDERAGVARGVLTQTLGPWRRPVAYLSKKLDPV |
| | | ASGWPTCLKAVAAVALLLKDADKLTLGQNVTVIASHSLESIVRQPPDRWM |
| | | TNARMTHYQSLLLNERVSFAPPAVLNPATLLPVESEATPVHRCSEILAEE |
| | | TGTRRDLKDQPLPGVPAWYTDGSSFIAEGKRRAGAAIVDGKRTVWASSLP |
| | | EGTSAQKAELVALTQALRLAEGKDINIYTDSRYAFATAHIHGAIYKQRGW |
| | | LTSAGKDIKNKEEILALLEAIHLPKRVAIIHCPGHQKGNDPVATGNRRAD |
| | | EAAKQAALSTRVLAETTKP |
| XMRV6_ | 8,134 | TLNIEDEYRLHETSKEPDVPLGSTWLSDFPQAWAETGGMGLAVRQAPLII |
| A1Z651 | | PLKATSTPVSIKQYPMSQEARLGIKPHIQRLLDQGILVPCQSPWNTPLLP |
| | | VKKPGTNDYRPVQDLREVNKRVEDIHPTVPNPYNLLSGLPPSHQWYTVLD |
| | | LKDAFFCLRLHPTSQPLFAFEWRDPEMGISGQLTWTRLPQGFKNSPTLFD |
| | | EALHRDLADFRIQHPDLILLQYVDDLLLAATSEQDCQRGTRALLQTLGNL |
| | | GYRASAKKAQICQKQVKYLGYLLKEGQRWLTEARKETVMGQPTPKTPRQL |
| | | REFLGTAGFCRLWIPGFAEMAAPLYPLTKTGTLFNWGPDQQKAYQEIKQA |
| | | LLTAPALGLPDLTKPFELFVDEKQGYAKGVLTQKLGPWRRPVAYLSKKLD |
| | | PVAAGWPPCLRMVAAIAVLTKDAGKLTMGQPLVILAPHAVEALVKQPPDR |
| | | WLSNARMTHYQAMLLDTDRVQFGPVVALNPATLLPLPEKEAPHDCLEILA |
| | | ETHGTRPDLTDQPIPDADYTWYTDGSSFLQEGQRRAGAAVTTETEVIWAR |
| | | ALPAGTSAQRAELIALTQALKMAEGKKLNVYTDSRYAFATAHVHGEIYRR |
| | | RGLLTSEGREIKNKNEILALLKALFLPKRLSIIHCPGHQKGNSAEARGNR |
| | | MADQAAREAAMKAVLETSTLL |
| XMRV6_ | 8,135 | TLNIEDEYRLHETSKEPDVPLGSTWLSDFPQAWAETGGMGLAVRQAPLII |
| A1Z651_ | | PLKATSTPVSIKQYPMSQEARLGIKPHIQRLLDQGILVPCQSPWNTPLLP |
| 3mut | | VKKPGTNDYRPVQDLREVNKRVEDIHPTVPNPYNLLSGLPPSHQWYTVLD |
| | | LKDAFFCLRLHPTSQPLFAFEWRDPEMGISGQLTWTRLPQGFKNSPTLFN |
| | | EALHRDLADFRIQHPDLILLQYVDDLLLAATSEQDCQRGTRALLQTLGNL |
| | | GYRASAKKAQICQKQVKYLGYLLKEGQRWLTEARKETVMGQPTPKTPRQL |
| | | REFLGTAGFCRLWIPGFAEMAAPLYPLTKPGTLFNWGPDQQKAYQEIKQA |
| | | LLTAPALGLPDLTKPFELFVDEKQGYAKGVLTQKLGPWRRPVAYLSKKLD |
| | | PVAAGWPPCLRMVAAIAVLTKDAGKLTMGQPLVILAPHAVEALVKQPPDR |
| | | WLSNARMTHYQAMLLDTDRVQFGPVVALNPATLLPLPEKEAPHDCLEILA |
| | | ETHGTRPDLTDQPIPDADYTWYTDGSSFLQEGQRRAGAAVTTETEVIWAR |
| | | ALPAGTSAQRAELIALTQALKMAEGKKLNVYTDSRYAFATAHVHGEIYRR |
| | | RGWLTSEGREIKNKNEILALLKALFLPKRLSIIHCPGHQKGNSAEARGNR |
| | | MADQAAREAAMKAVLETSTLL |
| XMRV6_ | 8,136 | TLNIEDEYRLHETSKEPDVPLGSTWLSDFPQAWAETGGMGLAVRQAPLII |
| A1Z651_ | | PLKATSTPVSIKQYPMSQEARLGIKPHIQRLLDQGILVPCQSPWNTPLLP |
| 3mutA | | VKKPGTNDYRPVQDLREVNKRVEDIHPTVPNPYNLLSGLPPSHQWYTVLD |
| | | LKDAFFCLRLHPTSQPLFAFEWRDPEMGISGQLTWTRLPQGFKNSPTLFN |
| | | EALHRDLADFRIQHPDLILLQYVDDLLLAATSEQDCQRGTRALLQTLGNL |
| | | GYRASAKKAQICQKQVKYLGYLLKEGQRWLTEARKETVMGQPTPKTPRQL |
| | | REFLGKAGFCRLFIPGFAEMAAPLYPLTKPGTLFNWGPDQQKAYQEIKQA |
| | | LLTAPALGLPDLTKPFELFVDEKQGYAKGVLTQKLGPWRRPVAYLSKKLD |
| | | PVAAGWPPCLRMVAAIAVLTKDAGKLTMGQPLVILAPHAVEALVKQPPDR |
| | | WLSNARMTHYQAMLLDTDRVQFGPVVALNPATLLPLPEKEAPHDCLEILA |
| | | ETHGTRPDLTDQPIPDADYTWYTDGSSFLQEGQRRAGAAVTTETEVIWAR |
| | | ALPAGTSAQRAELIALTQALKMAEGKKLNVYTDSRYAFATAHVHGEIYRR |
| | | RGWLTSEGREIKNKNEILALLKALFLPKRLSIIHCPGHQKGNSAEARGNR |
| | | MADQAAREAAMKAVLETSTLL |

[0284] In some embodiments, reverse transcriptase domains are modified, for example by site-specific mutation. In some embodiments, reverse transcriptase domains are engineered to have improved properties, e.g. SuperScript IV (SSIV) reverse transcriptase derived from the MMLV RT. In some embodiments, the reverse transcriptase domain may be engineered to have lower error rates, e.g., as described in WO2001068895, incorporated herein by reference. In some embodiments, the reverse transcriptase domain may be engineered to be more thermostable. In some embodiments, the reverse transcriptase domain may be engineered to be more processive. In some embodiments, the reverse transcriptase domain may be engineered to have tolerance to inhibitors. In some embodiments, the reverse transcriptase domain may be engineered to be faster. In some embodiments, the reverse transcriptase domain may be engineered to better tolerate modified nucleotides in the RNA template. In some embodiments, the reverse transcriptase domain may be engineered to insert modified DNA nucleotides. In some embodiments, the reverse transcriptase domain is engineered to bind a template RNA. In some embodiments, one or more mutations are chosen from D200N, L603W, T330P, D524G, E562Q, D583N, P51L, S67R, E67K, T197A, H204R, E302K, F309N, W313F, L435G, N454K, H594Q, L671P, E69K, H8Y, T306K, or D653N in the RT domain of murine leukemia virus reverse transcriptase or a corresponding mutation at a corresponding position of another RT domain.

[0285] In some embodiments, a gene modifying polypeptide comprises the RT domain from a retroviral reverse transcriptase, e.g., a wild-type M-MLV RT, e.g., comprising the following sequence:

M-MLV (WT):
(SEQ ID NO: 5002)
TLNIEDEYRLHETSKEPDVSLGSTWLSDFPQAWAETGGMG
LAVRQAPLIIPLKATSTPVSIKQYPMSQEARLGIKPHIQR
LLDQGILVPCQSPWNTPLLPVKKPGTNDYRPVQDLREVNK
RVEDIHPTVPNPYNLLSGLPPSHQWYTVLDLKDAFFCLRL
HPTSQPLFAFEWRDPEMGISGQLTWTRLPQGFKNSPTLFD
EALHRDLADFRIQHPDLILLQYVDDLLLAATSELDCQQGT
RALLQTLGNLGYRASAKKAQICQKQVKYLGYLLKEGQRWL
TEARKETVMGQPTPKTPRQLREFLGTAGFCRLWIPGFAEM
AAPLYPLTKTGTLFNWGPDQQKAYQEIKQALLTAPALGLP
DLTKPFELFVDEKQGYAKGVLTQKLGPWRRPVAYLSKKLD
PVAAGWPPCLRMVAAIAVLTKDAGKLTMGQPLVILAPHAV
EALVKQPPDRWLSNARMTHYQALLLDTDRVQFGPVVALNP
ATLLPLPEEGLQHNCLDILAEAHGTRPDLTDQPLPDADHT
WYTDGSSLLQEGQRKAGAAVTTETEVIWAKALPAGTSAQR
AELIALTQALKMAEGKKLNVYTDSRYAFATAHIHGEIYRR
RGLLTSEGKEIKNKDEILALLKALFLPKRLSIIHCPGHQK
GHSAEARGNRMADQAARKAAITETPDTSTLLI

[0286] In some embodiments, a gene modifying polypeptide comprises the RT domain from a retroviral reverse transcriptase, e.g., an M-MLV RT, e.g., comprising the following sequence:

(SEQ ID NO: 5003)
TLNIEDEHRLHETSKEPDVSLGSTWLSDFPQAWAETGGMG
LAVRQAPLIIPLKATSTPVSIKQYPMSQEARLGIKPHIQR
LLDQGILVPCQSPWNTPLLPVKKPGTNDYRPVQDLREVNK
RVEDIHPTVPNPYNLLSGLPPSHQWYTVLDLKDAFFCLRL
HPTSQPLFAFEWRDPEMGISGQLTWTRLPQGFKNSPTLFD
EALHRDLADFRIQHPDLILLQYVDDLLLAATSELDCQQGT
RALLQTLGNLGYRASAKKAQICQKQVKYLGYLLKEGQRWL
TEARKETVMGQPTPKTPRQLREFLGTAGFCRLWIPGFAEM
AAPLYPLTKTGTLFNWGPDQQKAYQEIKQALLTAPALGLP
DLTKPFELFVDEKQGYAKGVLTQKLGPWRRPVAYLSKKLD
PVAAGWPPCLRMVAAIAVLTKDAGKLTMGQPLVILAPHAV
EALVKQPPDRWLSNARMTHYQALLLDTDRVQFGPVVALNP
ATLLPLPEEGLQHNCLDILAEAHGTRPDLTDQPLPDADHT
WYTDGSSLLQEGQRKAGAAVTTETEVIWAKALPAGTSAQR
AELIALTQALKMAEGKKLNVYTDSRYAFATAHIHGEIYRR
RGLLTSEGKEIKNKDEILALLKALFLPKRLSIIHCPGHQK
GHSAEARGNRMADQAARKAAITETPDTSTLL

[0287] In some embodiments, a gene modifying polypeptide comprises the RT domain from a retroviral reverse transcriptase comprising the sequence of amino acids 659-1329 of NP 057933. In embodiments, the gene modifying polypeptide further comprises one additional amino acid at the N-terminus of the sequence of amino acids 659-1329 of NP 057933, e.g., as shown below:

(SEQ ID NO: 5004)
TLNIEDEHRLHETSKEPDVSLGSTWLSDFPQAWAETGGMG
LAVRQAPLIIPLKATSTPVSIKQYPMSQEARLGIKPHIQR
LLDQGILVPCQSPWNTPLLPVKKPGTNDYRPVQDLREVNK
RVEDIHPTVPNPYNLLSGLPPSHQWYTVLDLKDAFFCLRL
HPTSQPLFAFEWRDPEMGISGQLTWTRLPQGFKNSPTLFD
EALHRDLADFRIQHPDLILLQYVDDLLLAATSELDCQQGT
RALLQTLGNLGYRASAKKAQICQKQVKYLGYLLKEGQRWL
TEARKETVMGQPTPKTPRQLREFLGTAGFCRLWIPGFAEM
AAPLYPLTKTGTLFNWGPDQQKAYQEIKQALLTAPALGLP
DLTKPFELFVDEKQGYAKGVLTQKLGPWRRPVAYLSKKLD
PVAAGWPPCLRMVAAIAVLTKDAGKLTMGQPLVILAPHAV
EALVKQPPDRWLSNARMTHYQALLLDTDRVQFGPVVALNP
ATLLPLPEEGLQHNCLDILAEAHGTRPDLTDQPLPDADHT
WYTDGSSLLQEGQRKAGAAVTTETEVIWAKALPAGTSAQR
AELIALTQALKMAEGKKLNVYTDSRYAFATAHIHGEIYRR
RGLLTSEGKEIKNKDEILALLKALFLPKRLSIIHCPGHQK
GHSAEARGNRMADQAARKAA

Core RT (bold), annotated per above
RNAseH (underlined), annotated per above

[0288] In embodiments, the gene modifying polypeptide further comprises one additional amino acid at the C-terminus of the sequence of amino acids 659-1329 of NP 057933. In embodiments, the gene modifying polypeptide comprises an RNaseH1 domain (e.g., amino acids 1178-1318 of NP_057933).

[0289] In some embodiments, a retroviral reverse transcriptase domain, e.g., M-MLV RT, may comprise one or more mutations from a wild-type sequence that may improve features of the RT, e.g., thermostability, processivity, and/or template binding. In some embodiments, an M-MLV RT domain comprises, relative to the M-MLV (WT) sequence above, one or more mutations, e.g., selected from D200N, L603W, T330P, T306K, W313F, D524G, E562Q, D583N, P51L, S67R, E67K, T197A, H204R, E302K, F309N, L435G, N454K, H594Q, D653N, R110S, K103L, e.g., a combination of mutations, such as D200N, L603W, and T330P, optionally further including T306K and W313F. In some embodiments, an M-MLV RT used herein comprises the mutations D200N, L603W, T330P, T306K and W313F. In embodiments, the mutant M-MLV RT comprises the following amino acid sequence:

M-MLV (PE2):
(SEQ ID NO: 5005)
TLNIEDEYRLHETSKEPDVSLGSTWLSDFPQAWAETGGMG
LAVRQAPLIIPLKATSTPVSIKQYPMSQEARLGIKPHIQR
LLDQGILVPCQSPWNTPLLPVKKPGTNDYRPVQDLREVNK
RVEDIHPTVPNPYNLLSGLPPSHQWYTVLDLKDAFFCLRL
HPTSQPLFAFEWRDPEMGISGQLTWTRLPQGFKNSPTLFN
EALHRDLADFRIQHPDLILLQYVDDLLLAATSELDCQQGT
RALLQTLGNLGYRASAKKAQICQKQVKYLGYLLKEGQRWL
TEARKETVMGQPTPKTPRQLREFLGKAGFCRLFIPGFAEM
AAPLYPLTKPGTLFNWGPDQQKAYQEIKQALLTAPALGLP
DLTKPFELFVDEKQGYAKGVLTQKLGPWRRPVAYLSKKLD
PVAAGWPPCLRMVAAIAVLTKDAGKLTMGQPLVILAPHAV
EALVKQPPDRWLSNARMTHYQALLLDTDRVQFGPVVALNP
ATLLPLPEEGLQHNCLDILAEAHGTRPDLTDQPLPDADHT
WYTDGSSLLQEGQRKAGAAVTTETEVIWAKALPAGTSAQR
AELIALTQALKMAEGKKLNVYTDSRYAFATAHIHGEIYRR
RGWLTSEGKEIKNKDEILALLKALFLPKRLSIIHCPGHQK
GHSAEARGNRMADQAARKAAITETPDTSTLLI

[0290] In some embodiments, a writing domain (e.g., RT domain) comprises an RNA-binding domain, e.g., that specifically binds to an RNA sequence. In some embodiments, a template RNA comprises an RNA sequence that is specifically bound by the RNA-binding domain of the writing domain.

[0291] In some embodiments, the reverse transcription domain only recognizes and reverse transcribes a specific template, e.g., a template RNA of the system. In some embodiments, the template comprises a sequence or structure that enables recognition and reverse transcription by a reverse transcription domain. In some embodiments, the template comprises a sequence or structure that enables association with an RNA-binding domain of a polypeptide component of a genome engineering system described herein. In some embodiments, the genome engineering system reverse preferably transcribes a template comprising an association sequence over a template lacking an association sequence.

[0292] The writing domain may also comprise DNA-dependent DNA polymerase activity, e.g., comprise enzymatic activity capable of writing DNA into the genome from a template DNA sequence. In some embodiments, DNA-dependent DNA polymerization is employed to complete second-strand synthesis of a target site edit. In some embodiments, the DNA-dependent DNA polymerase activity is provided by a DNA polymerase domain in the polypeptide. In some embodiments, the DNA-dependent DNA polymerase activity is provided by a reverse transcriptase domain that is also capable of DNA-dependent DNA polymerization, e.g., second-strand synthesis. In some embodiments, the DNA-dependent DNA polymerase activity is provided by a second polypeptide of the system. In some embodiments, the DNA-dependent DNA polymerase activity is provided by an endogenous host cell polymerase that is optionally recruited to the target site by a component of the genome engineering system.

[0293] In some embodiments, the reverse transcriptase domain has a lower probability of premature termination rate (Par) in vitro relative to a reference reverse transcriptase domain. In some embodiments, the reference reverse transcriptase domain is a viral reverse transcriptase domain, e.g., the RT domain from M-MLV.

[0294] In some embodiments, the reverse transcriptase domain has a lower probability of premature termination rate (Par) in vitro of less than about 5×10⁻³/nt, 5×10⁻⁴/nt, or 5×10⁻⁶/nt, e.g., as measured on a 1094 nt RNA. In embodiments, the in vitro premature termination rate is determined as described in Bibillo and Eickbush (2002) J Biol Chem 277(38):34836-34845 (incorporated by reference herein its entirety).

[0295] In some embodiments, the reverse transcriptase domain is able to complete at least about 30% or 50% of integrations in cells. The percent of complete integrations can be measured by dividing the number of substantially full-length integration events (e.g., genomic sites that comprise at least 98% of the expected integrated sequence) by the number of total (including substantially full-length and partial) integration events in a population of cells. In embodiments, the integrations in cells is determined (e.g., across the integration site) using long-read amplicon sequencing, e.g., as described in Karst et al. (2020) bioRxiv doi.org/10.1101/645903 (incorporated by reference herein in its entirety).

[0296] In embodiments, quantifying integrations in cells comprises counting the fraction of integrations that contain at least about 75%, 80%, 85%, 90%, 95%, 96%, 97%, 98%, 99%, or 100% of the DNA sequence corresponding to the template RNA (e.g., a template RNA having a length of at least 0.05, 0.1, 0.5, 0.6, 0.7, 0.8, 0.9, 1, 1.5, 2, 3, 4, or 5 kb, e.g., a length between 0.5-0.6, 0.6-0.7, 0.7-0.8, 0.8-0.9, 1.0-1.2, 1.2-1.4, 1.4-1.6, 1.6-1.8, 1.8-2.0, 2-3, 3-4, or 4-5 kb).

[0297] In some embodiments, the reverse transcriptase domain is capable of polymerizing dNTPs in vitro. In embodiments, the reverse transcriptase domain is capable of polymerizing dNTPs in vitro at a rate between 0.1-50 nt/sec (e.g., between 0.1-1, 1-10, or 10-50 nt/sec). In embodiments, polymerization of dNTPs by the reverse transcriptase domain is measured by a single-molecule assay, e.g., as described in Schwartz and Quake (2009) PNAS 106(48):20294-20299 (incorporated by reference in its entirety).

[0298] In some embodiments, the reverse transcriptase domain has an in vitro error rate (e.g., misincorporation of nucleotides) of between 1×10⁻³-1×10⁻⁴ or 1×10⁻⁴-1×10⁻⁵ substitutions/nt, e.g., as described in Yasukawa et al. (2017) Biochem Biophys Res Commun 492(2):147-153 (incorporated herein by reference in its entirety). In some embodiments, the reverse transcriptase domain has an error rate (e.g., misincorporation of nucleotides) in cells (e.g., HEK293T cells) of between 1×10⁻³-1×10⁻⁴ or 1×10⁻⁴-1×10⁻⁵ substitutions/nt, e.g., by long-read amplicon sequencing, e.g., as described in Karst et al. (2020) bioRxiv doi.org/10.1101/645903 (incorporated by reference herein in its entirety).

[0299] In some embodiments, the reverse transcriptase domain is capable of performing reverse transcription of a target RNA in vitro. In some embodiments, the reverse transcriptase requires a primer of at least 3 nucleotides to initiate reverse transcription of a template. In some embodiments, reverse transcription of the target RNA is determined by detection of cDNA from the target RNA (e.g., when provided with a ssDNA primer, e.g., which anneals to the target with at least 3, 4, 5, 6, 7, 8, 9, or 10 nt at the 3′ end), e.g., as described in Bibillo and Eickbush (2002) J Blot Chem 277(38):34836-34845 (incorporated herein by reference in its entirety).

[0300] In some embodiments, the reverse transcriptase domain performs reverse transcription at least 5 or 10 times more efficiently (e.g., by cDNA production), e.g., when converting its RNA template to cDNA, for example, as compared to an RNA template lacking the protein binding motif (e.g., a 3′ UTR). In embodiments, efficiency of reverse transcription is measured as described in Yasukawa et al. (2017) Biochem Biophys Res Commun 492(2):147-153 (incorporated by reference herein in its entirety).

[0301] In some embodiments, the reverse transcriptase domain specifically binds a specific RNA template with higher frequency (e.g., about 5 or 10-fold higher frequency) than any endogenous cellular RNA, e.g., when expressed in cells (e.g., HEK293T cells). In embodiments, frequency of specific binding between the reverse transcriptase domain and the template RNA are measured by CLIP-seq, e.g., as described in Lin and Miles (2019) Nucleic Acids Res 47(11):5490-5501 (incorporated herein by reference in its entirety).

### Template Nucleic Acid Binding Domain

[0302] The gene modifying polypeptide typically contains regions capable of associating with the template nucleic acid (e.g., template RNA). In some embodiments, the template nucleic acid binding domain is an RNA binding domain. In some embodiments, the RNA binding domain is a modular domain that can associate with RNA molecules containing specific signatures, e.g., structural motifs. In other embodiments, the template nucleic acid binding domain (e.g., RNA binding domain) is contained within the reverse transcription domain, e.g., the reverse transcriptase-derived component has a known signature for RNA preference.

[0303] In other embodiments, the template nucleic acid binding domain (e.g., RNA binding domain) is contained within the target DNA binding domain. For example, in some embodiments, the DNA binding domain is a CRISPR-associated protein that recognizes the structure of a template nucleic acid (e.g., template RNA) comprising a gRNA. In some embodiments, a gene modifying polypeptide comprises a DNA-binding domain comprising a CRISPR-associated protein that associates with a gRNA scaffold that allows the DNA-binding domain to bind a target genomic DNA sequence. In some embodiments, the gRNA scaffold and gRNA spacer is comprised within the template nucleic acid (e.g., template RNA), thus the DNA-binding domain is also the template nucleic acid binding domain. In some embodiments, the polypeptide possesses RNA binding function in multiple domains, e.g., can bind a gRNA structure in a CRISPR-associated DNA binding domain and an additional sequence or structure in a reverse transcriptase domain.

[0304] In some embodiments, the RNA binding domain is capable of binding to a template RNA with greater affinity than a reference RNA binding domain. In some embodiments, the reference RNA binding domain is an RNA binding domain from Cas9 of S. pyogenes. In some embodiments, the RNA binding domain is capable of binding to a template RNA with an affinity between 100 pM-10 nM (e.g., between 100 pM-1 nM or 1 nM-10 nM). In some embodiments, the affinity of a RNA binding domain for its template RNA is measured in vitro, e.g., by thermophoresis, e.g., as described in Asmari et al. Methods 146:107-119 (2018) (incorporated by reference herein in its entirety). In some embodiments, the affinity of a RNA binding domain for its template RNA is measured in cells (e.g., by FRET or CLIP-Seq).

[0305] In some embodiments, the RNA binding domain is associated with the template RNA in vitro at a frequency at least about 5-fold or 10-fold higher than with a scrambled RNA. In some embodiments, the frequency of association between the RNA binding domain and the template RNA or scrambled RNA is measured by CLIP-seq, e.g., as described in Lin and Miles (2019) Nucleic Acids Res 47(11):5490-5501 (incorporated by reference herein in its entirety). In some embodiments, the RNA binding domain is associated with the template RNA in cells (e.g., in HEK293T cells) at a frequency at least about 5-fold or 10-fold higher than with a scrambled RNA. In some embodiments, the frequency of association between the RNA binding domain and the template RNA or scrambled RNA is measured by CLIP-seq, e.g., as described in Lin and Miles (2019), supra.

[0306] In some embodiments, an RT domain (e.g., as listed in Table 6) comprises one or more mutations as listed in Table 2A below. In some embodiment, an RT domain as listed in Table 6 comprises one, two, three, four, five, or six of the mutations listed in the corresponding row of Table 2A below.

TABLE 2A
Exemplary RT domain mutations (relative to corresponding wild-type
sequences as listed in the corresponding row of Table 6)

| RT Domain Name | Mutation(s) | | | | | |
|---|---|---|---|---|---|---|
| AVIRE_P03360 | | | | | | |
| AVIRE_P03360_3mut | D200N | G330P | L605W | | | |
| AVIRE_P03360_3mutA | D200N | G330P | L605W | T306K | W313F | |
| BAEVM_P10272 | | | | | | |
| BAEVM_P10272_3mut | D198N | E328P | L602W | | | |
| BAEVM_P10272_3mutA | D198N | E328P | L602W | T304K | W311F | |
| BLVAU_P25059 | | | | | | |
| BLVAU_P25059_2mut | E159Q | G286P | | | | |
| BLVJ_P03361 | | | | | | |
| BLVJ_P03361_2mut | E159Q | L524W | | | | |
| BLVJ_P03361_2mutB | E159Q | L524W | 197P | | | |
| FFV_O93209 | D21N | | | | | |
| FFV_O93209_2mut | D21N | T293N | T419P | | | |
| FFV_O93209_2mutA | D21N | T293N | T419P | L393K | | |
| FFV_O93209-Pro | | | | | | |
| FFV_O93209-Pro_2mut | T207N | T333P | | | | |
| FFV_O93209-Pro_2mutA | T207N | T333P | L307K | | | |
| FLV_P10273 | | | | | | |
| FLV_P10273_3mut | D199N | L602W | | | | |
| FLV_P10273_3mutA | D199N | L602W | T305K | W312F | | |
| FOAMV_P14350 | D24N | | | | | |
| FOAMV_P14350_2mut | D24N | T296N | S420P | | | |
| FOAMV_P14350_2mutA | D24N | T296N | S420P | L396K | | |
| FOAMV_P14350-Pro | | | | | | |
| FOAMV_P14350-Pro_2mut | T207N | S331P | | | | |
| FOAMV_P14350-Pro_2mutA | T207N | S331P | L307K | | | |
| GALV_P21414 | | | | | | |
| GALV_P21414_3mut | D198N | E328P | L600W | | | |
| GALV_P21414_3mutA | D198N | E328P | L600W | T304K | W311F | |
| HTL1A_P03362 | | | | | | |
| HTL1A_P03362_2mut | E152Q | R279P | | | | |
| HTL1A_P03362_2mutB | E152Q | R279P | L90P | | | |
| HTL1C_P14078 | | | | | | |
| HTL1C_P14078_2mut | E152Q | R279P | | | | |
| HTL1L_P0C211 | | | | | | |
| HTL1L_P0C211_2mut | E149Q | L527W | | | | |
| HTL1L_P0C211_2mutB | E149Q | L527W | L87P | | | |
| HTL32_Q0R5R2 | | | | | | |
| HTL32_Q0R5R2_2mut | E149Q | L526W | | | | |
| HTL32_Q0R5R2_2mutB | E149Q | L526W | L87P | | | |
| HTL3P_Q4U0X6 | | | | | | |
| HTL3P_Q4U0X6_2mut | E149Q | L526W | | | | |
| HTL3P_Q4U0X6_2mutB | E149Q | L526W | L87P | | | |
| HTLV2_P03363_2mut | E147Q | G274P | | | | |
| JSRV_P31623 | | | | | | |
| JSRV_P31623_2mutB | A100P | | | | | |
| KORV_Q9TTC1 | D32N | | | | | |
| KORV_Q9TTC1_3mut | D32N | D322N | E452P | L724W | | |
| KORV_Q9TTC1_3mutA | D32N | D322N | E452P | L724W | T428K | W435F |
| KORV_Q9TTC1-Pro | | | | | | |
| KORV_Q9TTC1-Pro_3mut | D231N | E361P | L633W | | | |
| KORV_Q9TTC1-Pro_3mutA | D231N | E361P | L633W | T337K | W344F | |
| MLVAV_P03356 | | | | | | |
| MLVAV_P03356_3mut | D200N | T330P | L603W | | | |
| MLVAV_P03356_3mutA | D200N | T330P | L603W | T306K | W313F | |
| MLVBM_Q7SVK7 | | | | | | |
| MLVBM_Q7SVK7 | | | | | | |
| MLVBM_Q7SVK7_3mut | D200N | T330P | L603W | | | |
| MLVBM_Q7SVK7_3mut | D200N | T330P | L603W | | | |
| MLVBM_Q7SVK7_3mutA_WS | D199N | T329P | L602W | T305K | W312F | |
| MLVBM_Q7SVK7_3mutA_WS | D199N | T329P | L602W | T305K | W312F | |
| MLVCB_P08361 | | | | | | |
| MLVCB_P08361_3mut | D200N | T330P | L603W | | | |
| MLVCB_P08361_3mutA | D200N | T330P | L603W | T306K | W313F | |
| MLVF5_P26810 | | | | | | |
| MLVF5_P26810_3mut | D200N | T330P | L603W | | | |
| MLVF5_P26810_3mutA | D200N | T330P | L603W | T306K | W313F | |
| MLVFF_P26809_3mut | D200N | T330P | L603W | | | |
| MLVFF_P26809_3mutA | D200N | T330P | L603W | T306K | W313F | |
| MLVMS_P03355 | | | | | | |
| MLVMS_P03355 | | | | | | |
| MLVMS_P03355_3mut | D200N | T330P | L603W | | | |
| MLVMS_P03355_3mut | D200N | T330P | L603W | | | |
| MLVMS_P03355_3mutA_WS | D200N | T330P | L603W | T306K | W313F | |
| MLVMS_P03355_3mutA_WS | D200N | T330P | L603W | T306K | W313F | |
| MLVMS_P03355_PLV919 | D200N | T330P | L603W | T306K | W313F | H8Y |
| MLVMS_P03355_PLV919 | D200N | T330P | L603W | T306K | W313F | H8Y |
| MLVRD_P11227 | | | | | | |
| MLVRD_P11227_3mut | D200N | T330P | L603W | | | |
| MMTVB_P03365 | D26N | | | | | |
| MMTVB_P03365 | D26N | | | | | |
| MMTVB_P03365_2mut | D26N | G401P | | | | |
| MMTVB_P03365_2mut_WS | G400P | | | | | |
| MMTVB_P03365_2mut_WS | G400P | | | | | |
| MMTVB_P03365_2mutB | D26N | G401P | V215P | | | |
| MMTVB_P03365_2mutB | D26N | G401P | V215P | | | |
| MMTVB_P03365_2mutB_WS | G400P | V212P | | | | |
| MMTVB_P03365_2mutB_WS | G400P | V212P | | | | |
| MMTVB_P03365_WS | | | | | | |
| MMTVB_P03365_WS | | | | | | |
| MMTVB_P03365-Pro | | | | | | |
| MMTVB_P03365-Pro | | | | | | |
| MMTVB_P03365-Pro_2mut | G309P | | | | | |
| MMTVB_P03365-Pro_2mut | G309P | | | | | |
| MMTVB_P03365-Pro_2mutB | G309P | V123P | | | | |
| MMTVB_P03365-Pro_2mutB | G309P | V123P | | | | |
| MPMV_P07572 | | | | | | |
| MPMV_P07572_2mutB | G289P | I103P | | | | |
| PERV_Q4VFZ2 | | | | | | |
| PERV_Q4VFZ2 | | | | | | |
| PERV_Q4VFZ2_3mut | D199N | E329P | L602W | | | |
| PERV_Q4VFZ2_3mut | D199N | E329P | L602W | | | |
| PERV_Q4VFZ2_3mutA_WS | D196N | E326P | L599W | T302K | W309F | |
| PERV_Q4VFZ2_3mutA_WS | D196N | E326P | L599W | T302K | W309F | |
| SFV1_P23074 | D24N | | | | | |
| SFV1_P23074_2mut | D24N | T296N | N420P | | | |
| SFV1_P23074_2mutA | D24N | T296N | N420P | L396K | | |
| SFV1_P23074-Pro | | | | | | |
| SFV1_P23074-Pro_2mut | T207N | N331P | | | | |
| SFV1_P23074-Pro_2mutA | T207N | N331P | L307K | | | |
| SFV3L_P27401 | D24N | | | | | |
| SFV3L_P27401_2mut | D24N | T296N | N422P | | | |
| SFV3L_P27401_2mutA | D24N | T296N | N422P | L396K | | |
| SFV3L_P27401-Pro | | | | | | |
| SFV3L_P27401-Pro_2mut | T307N | N333P | | | | |
| SFV3L_P27401-Pro_2mutA | T307N | N333P | L307K | | | |
| SFVCP_Q87040 | D24N | | | | | |
| SFVCP_Q87040_2mut | D24N | T296N | K422P | | | |
| SFVCP_Q87040_2mutA | D24N | T296N | K422P | L396K | | |
| SFVCP_Q87040-Pro | | | | | | |
| SFVCP_Q87040-Pro_2mut | T207N | K333P | | | | |
| SFVCP_Q87040-Pro_2mutA | T207N | K333P | L307K | | | |
| SMRVH_P03364 | | | | | | |
| SMRVH_P03364_2mut | G288P | | | | | |
| SMRVH_P03364_2mutB | G288P | I102P | | | | |
| SRV2_P51517 | | | | | | |
| SRV2_P51517_2mutB | I103P | | | | | |
| WDSV_O92815 | | | | | | |
| WDSV_O92815_2mut | S183N | K312P | | | | |
| WDSV_O92815_2mutA | S183N | K312P | L288K | W295F | | |
| WMSV_P03359 | | | | | | |
| WMSV_P03359_3mut | D198N | E328P | L600W | | | |
| WMSV_P03359_3mutA | D198N | E328P | L600W | T304K | W311F | |
| XMRV6_A1Z651 | | | | | | |
| XMRV6_A1Z651_3mut | D200N | T330P | L603W | | | |
| XMRV6_A1Z651_3mutA | D200N | T330P | L603W | T306K | W313F | |

[0307] Endonuclease Domains and DNA Binding Domains

[0308] In some embodiments, a gene modifying polypeptide possesses the function of DNA target site cleavage via an endonuclease domain. In some embodiments, a gene modifying polypeptide comprises a DNA binding domain, e.g., for binding to a target nucleic acid. In some embodiments, a domain (e.g., a Cas domain) of the gene modifying polypeptide comprises two or more smaller domains, e.g., a DNA binding domain and an endonuclease domain. It is understood that when a DNA binding domain (e.g., a Cas domain) is said to bind to a target nucleic acid sequence, in some embodiments, the binding is mediated by a gRNA.

[0309] In some embodiments, a domain has two functions. For example, in some embodiments, the endonuclease domain is also a DNA-binding domain. In some embodiments, the endonuclease domain is also a template nucleic acid (e.g., template RNA) binding domain. For example, in some embodiments, a polypeptide comprises a CRISPR-associated endonuclease domain that binds a template RNA comprising a gRNA, binds a target DNA sequence (e.g., with complementarity to a portion of the gRNA), and cuts the target DNA sequence. In some embodiments, an endonuclease domain or endonuclease/DNA-binding domain from a heterologous source can be used or can be modified (e.g., by insertion, deletion, or substitution of one or more residues) in a gene modifying system described herein.

[0310] In some embodiments, a nucleic acid encoding the endonuclease domain or endonuclease/DNA binding domain is altered from its natural sequence to have altered codon usage, e.g. improved for human cells. In some embodiments, the endonuclease element is a heterologous endonuclease element, such as a Cas endonuclease (e.g., Cas9), a type-II restriction endonuclease (e.g., FokI), a meganuclease (e.g., I-SceI), or other endonuclease domain.

[0311] In certain aspects, the DNA-binding domain of a gene modifying polypeptide described herein is selected, designed, or constructed for binding to a desired host DNA target sequence. In certain embodiments, the DNA-binding domain of the polypeptide is a heterologous DNA-binding element. In some embodiments the heterologous DNA binding element is a zinc-finger element or a TAL effector element, e.g., a zinc-finger or TAL polypeptide or functional fragment thereof. In some embodiments the heterologous DNA binding element is a sequence-guided DNA binding element, such as Cas9, Cpf1, or other CRISPR-related protein that has been altered to have no endonuclease activity. In some embodiments the heterologous DNA binding element retains endonuclease activity. In some embodiments, the heterologous DNA binding element retains partial endonuclease activity to cleave ssDNA, e.g., possesses nickase activity. In specific embodiments, the heterologous DNA-binding domain can be any one or more of Cas9, TAL domain, ZF domain, Myb domain, combinations thereof, or multiples thereof.

[0312] In some embodiments, DNA-binding domains are modified, for example by site-specific mutation, increasing or decreasing DNA-binding elements (for example, number and/or specificity of zinc fingers), etc., to alter DNA-binding specificity and affinity. In some embodiments a nucleic acid sequence encoding the DNA binding domain is altered from its natural sequence to have altered codon usage, e.g. improved for human cells. In embodiments, the DNA binding domain comprises one or more modifications relative to a wild-type DNA binding domain, e.g., a modification via directed evolution, e.g., phage-assisted continuous evolution (PACE).

[0313] In some embodiments, the DNA binding domain comprises a meganuclease domain (e.g., as described herein, e.g., in the endonuclease domain section), or a functional fragment thereof. In some embodiments, the meganuclease domain possesses endonuclease activity, e.g., double-strand cleavage and/or nickase activity. In other embodiments, the meganuclease domain has reduced activity, e.g., lacks endonuclease activity, e.g., the meganuclease is catalytically inactive. In some embodiments, a catalytically inactive meganuclease is used as a DNA binding domain, e.g., as described in Fonfara et al. Nucleic Acids Res 40(2):847-860 (2012), incorporated herein by reference in its entirety.

[0314] In some embodiments, a gene modifying polypeptide comprises a modification to a DNA-binding domain, e.g., relative to the wild-type polypeptide. In some embodiments, the DNA-binding domain comprises an addition, deletion, replacement, or modification to the amino acid sequence of the original DNA-binding domain. In some embodiments, the DNA-binding domain is modified to include a heterologous functional domain that binds specifically to a target nucleic acid (e.g., DNA) sequence of interest. In some embodiments, the functional domain replaces at least a portion (e.g., the entirety of) the prior DNA-binding domain of the polypeptide. In some embodiments, the functional domain comprises a zinc finger (e.g., a zinc finger that specifically binds to the target nucleic acid (e.g., DNA) sequence of interest. In some embodiments, the functional domain comprises a Cas domain (e.g., a Cas domain that specifically binds to the target nucleic acid (e.g., DNA) sequence of interest. In some embodiments, the Cas domain comprises a Cas9 or a mutant or variant thereof (e.g., as described herein). In embodiments, the Cas domain is associated with a guide RNA (gRNA), e.g., as described herein. In embodiments, the Cas domain is directed to a target nucleic acid (e.g., DNA) sequence of interest by the gRNA. In embodiments, the Cas domain is encoded in the same nucleic acid (e.g., RNA) molecule as the gRNA. In embodiments, the Cas domain is encoded in a different nucleic acid (e.g., RNA) molecule from the gRNA.

[0315] In some embodiments, the DNA binding domain is capable of binding to a target sequence (e.g., a dsDNA target sequence) with greater affinity than a reference DNA binding domain. In some embodiments, the reference DNA binding domain is a DNA binding domain from Cas9 of S. pyogenes. In some embodiments, the DNA binding domain is capable of binding to a target sequence (e.g., a dsDNA target sequence) with an affinity between 100 pM 10 nM (e.g., between 100 pM-1 nM or 1 nM-10 nM).

[0316] In some embodiments, the affinity of a DNA binding domain for its target sequence (e.g., dsDNA target sequence) is measured in vitro, e.g., by thermophoresis, e.g., as described in Asmari et al. Methods 146:107-119 (2018) (incorporated by reference herein in its entirety).

[0317] In embodiments, the DNA binding domain is capable of binding to its target sequence (e.g., dsDNA target sequence), e.g., with an affinity between 100 pM-10 nM (e.g., between 100 pM-1 nM or 1 nM-10 nM) in the presence of a molar excess of scrambled sequence competitor dsDNA, e.g., of about 100-fold molar excess.

[0318] In some embodiments, the DNA binding domain is found associated with its target sequence (e.g., dsDNA target sequence) more frequently than any other sequence in the genome of a target cell, e.g., human target cell, e.g., as measured by ChIP-seq (e.g., in HEK293T cells), e.g., as described in He and Pu (2010) Curr. Protoc Mol Biol Chapter 21 (incorporated herein by reference in its entirety). In some embodiments, the DNA binding domain is found associated with its target sequence (e.g., dsDNA target sequence) at least about 5-fold or 10-fold, more frequently than any other sequence in the genome of a target cell, e.g., as measured by ChIP-seq (e.g., in HEK293T cells), e.g., as described in He and Pu (2010), supra.

[0319] In some embodiments, the endonuclease domain has nickase activity and cleaves one strand of a target DNA. In some embodiments, nickase activity reduces the formation of double-stranded breaks at the target site. In some embodiments, the endonuclease domain creates a staggered nick structure in the first and second strands of a target DNA. In some embodiments, a staggered nick structure generates free 3′ overhangs at the target site. In some embodiments, free 3′ overhangs at the target site improve editing efficiency, e.g., by enhancing access and annealing of a 3′ homology region of a template nucleic acid. In some embodiments, a staggered nick structure reduces the formation of double-stranded breaks at the target site.

[0320] In some embodiments, the endonuclease domain cleaves both strands of a target DNA, e.g., results in blunt-end cleavage of a target with no ssDNA overhangs on either side of the cut-site. The amino acid sequence of an endonuclease domain of a gene modifying system described herein may be at least about 50%, at least about 60%, at least about 70%, at least about 80%, at least about 85%, at least about 90%, at least about 95%, at least about 96%, at least about 97%, at least about 98%, at least about 99% identical to the amino acid sequence of an endonuclease domain described herein, e.g., an endonuclease domain from Table 8.

[0321] In certain embodiments, the heterologous endonuclease is FokI or a functional fragment thereof. In certain embodiments, the heterologous endonuclease is a Holliday junction resolvase or homolog thereof, such as the Holliday junction resolving enzyme from Sulfolobus solfataricus—Ssol Hje (Govindaraju et al., Nucleic Acids Research 44:7, 2016). In certain embodiments, the heterologous endonuclease is the endonuclease of the large fragment of a spliceosomal protein, such as Prp8 (Mahbub et al., Mobile DNA 8:16, 2017). In certain embodiments, the heterologous endonuclease is derived from a CRISPR-associated protein, e.g., Cas9. In certain embodiments, the heterologous endonuclease is engineered to have only ssDNA cleavage activity, e.g., only nickase activity, e.g., be a Cas9 nickase, e.g., SpCas9 with D10A, H840A, or N863A mutations. Table 8 provides exemplary Cas proteins and mutations associated with nickase activity. In still other embodiments, homologous endonuclease domains are modified, for example by site-specific mutation, to alter DNA endonuclease activity. In still other embodiments, endonuclease domains are modified to reduce DNA-sequence specificity, e.g., by truncation to remove domains that confer DNA-sequence specificity or mutation to inactivate regions conferring DNA-sequence specificity.

[0322] In some embodiments, the endonuclease domain has nickase activity and does not form double-stranded breaks. In some embodiments, the endonuclease domain forms single-stranded breaks at a higher frequency than double-stranded breaks, e.g., at least 90%, 95%, 96%, 97%, 98%, or 99% of the breaks are single-stranded breaks, or less than 10%, 5%, 4%, 3%, 2%, or 1% of the breaks are double-stranded breaks. In some embodiments, the endonuclease forms substantially no double-stranded breaks. In some embodiments, the endonuclease does not form detectable levels of double-stranded breaks.

[0323] In some embodiments, the endonuclease domain has nickase activity that nicks the target site DNA of the first strand; e.g., in some embodiments, the endonuclease domain cuts the genomic DNA of the target site near to the site of alteration on the strand that will be extended by the writing domain. In some embodiments, the endonuclease domain has nickase activity that nicks the target site DNA of the first strand and does not nick the target site DNA of the second strand. For example, when a polypeptide comprises a CRISPR-associated endonuclease domain having nickase activity, in some embodiments, said CRISPR-associated endonuclease domain nicks the target site DNA strand containing the PAM site (e.g., and does not nick the target site DNA strand that does not contain the PAM site). As a further example, when a polypeptide comprises a CRISPR-associated endonuclease domain having nickase activity, in some embodiments, said CRISPR-associated endonuclease domain nicks the target site DNA strand not containing the PAM site (e.g., and does not nick the target site DNA strand that contains the PAM site).

[0324] In some other embodiments, the endonuclease domain has nickase activity that nicks the target site DNA of the first strand and the second strand. Without wishing to be bound by theory, after a writing domain (e.g., RT domain) of a polypeptide described herein polymerizes (e.g., reverse transcribes) from the heterologous object sequence of a template nucleic acid (e.g., template RNA), the cellular DNA repair machinery must repair the nick on the first DNA strand. The target site DNA now contains two different sequences for the first DNA strand: one corresponding to the original genomic DNA (e.g., having a free 5′ end) and a second corresponding to that polymerized from the heterologous object sequence (e.g., having a free 3′ end). It is thought that the two different sequences equilibrate with one another, first one hybridizing the second strand, then the other, and which sequence the cellular DNA repair apparatus incorporates into its repaired target site may be a stochastic process. Without wishing to be bound by theory, it is thought that introducing an additional nick to the second-strand may bias the cellular DNA repair machinery to adopt the heterologous object sequence-based sequence more frequently than the original genomic sequence (Anzalone et al. Nature 576:149-157 (2019)). In some embodiments, the additional nick is positioned at least 10, 15, 20, 25, 30, 35, 40, 45, 50, 55, 60, 65, 70, 75, 80, 85, 90, 95, 100, 105, 110, 115, 120, 125, 130, 135, 140, 145, or 150 nucleotides 5′ or 3′ of the target site modification (e.g., the insertion, deletion, or substitution) or to the nick on the first strand.

[0325] Alternatively or additionally, without wishing to be bound by theory, it is thought that an additional nick to the second strand may promote second-strand synthesis. In some embodiments, where the gene modifying system has inserted or substituted a portion of the first strand, synthesis of a new sequence corresponding to the insertion/substitution in the second strand is necessary.

[0326] In some embodiments, the polypeptide comprises a single domain having endonuclease activity (e.g., a single endonuclease domain) and said domain nicks both the first strand and the second strand. For example, in such an embodiment the endonuclease domain may be a CRISPR-associated endonuclease domain, and the template nucleic acid (e.g., template RNA) comprises a gRNA spacer that directs nicking of the first strand and an additional gRNA spacer that directs nicking of the second strand. In some embodiments, the polypeptide comprises a plurality of domains having endonuclease activity, and a first endonuclease domain nicks the first strand and a second endonuclease domain nicks the second strand (optionally, the first endonuclease domain does not (e.g., cannot) nick the second strand and the second endonuclease domain does not (e.g., cannot) nick the first strand).

[0327] In some embodiments, the endonuclease domain is capable of nicking a first strand and a second strand. In some embodiments, the first and second strand nicks occur at the same position in the target site but on opposite strands. In some embodiments, the second strand nick occurs in a staggered location, e.g., upstream or downstream, from the first nick. In some embodiments, the endonuclease domain generates a target site deletion if the second strand nick is upstream of the first strand nick. In some embodiments, the endonuclease domain generates a target site duplication if the second strand nick is downstream of the first strand nick. In some embodiments, the endonuclease domain generates no duplication and/or deletion if the first and second strand nicks occur in the same position of the target site. In some embodiments, the endonuclease domain has altered activity depending on protein conformation or RNA-binding status, e.g., which promotes the nicking of the first or second strand (e.g., as described in Christensen et al. PNAS 2006; incorporated by reference herein in its entirety).

[0328] In some embodiments, the endonuclease domain comprises a meganuclease, or a functional fragment thereof. In some embodiments, the endonuclease domain comprises a homing endonuclease, or a functional fragment thereof. In some embodiments, the endonuclease domain comprises a meganuclease from the LAGLIDADG (SEQ ID NO: 25693), GIY-YIG, HNH, His-Cys Box, or PD-(D/E) XK families, or a functional fragment or variant thereof, e.g., which possess conserved amino acid motifs, e.g., as indicated in the family names. In some embodiments, the endonuclease domain comprises a meganuclease, or fragment thereof, chosen from, e.g., I-SmaMI (Uniprot F7WD42), I-Seel (Uniprot P03882), I-Anil (Uniprot P03880), I-Dmol (Uniprot P21505), I-CreI (Uniprot P05725), I-Teel (Uniprot P13299), I-OnuI (Uniprot Q4VWW5), or I-Bmol (Uniprot Q9ANR6). In some embodiments, the meganuclease is naturally monomeric, e.g., I-Seel, I-Teel, or dimeric, e.g., I-CreI, in its functional form. For example, the LAGLIDADG (SEQ ID NO: 25693) meganucleases with a single copy of the LAGLIDADG (SEQ ID NO: 25693) motif generally form homodimers, whereas members with two copies of the LAGLIDADG (SEQ ID NO: 25693) motif are generally found as monomers. In some embodiments, a meganuclease that normally forms as a dimer is expressed as a fusion, e.g., the two subunits are expressed as a single ORF and, optionally, connected by a linker, e.g., an I-CreI dimer fusion (Rodriguez-Fornes et al. Gene Therapy 2020; incorporated by reference herein in its entirety). In some embodiments, a meganuclease, or a functional fragment thereof, is altered to favor nickase activity for one strand of a double-stranded DNA molecule, e.g., I-Scel (K1221 and/or K223I) (Niu et al. J Mol Biol 2008), I-Anil (K227M) (McConnell Smith et al. PNAS 2009), I-Dmol (Q42A and/or K120M) (Molina et al. J Biol Chem 2015). In some embodiments, a meganuclease or functional fragment thereof possessing this preference for single-strand cleavage is used as an endonuclease domain, e.g., with nickase activity. In some embodiments, an endonuclease domain comprises a meganuclease, or a functional fragment thereof, which naturally targets or is engineered to target a safe harbor site, e.g., an I-CreI targeting SH6 site (Rodriguez-Fomes et al., supra). In some embodiments, an endonuclease domain comprises a meganuclease, or a functional fragment thereof, with a sequence tolerant catalytic domain, e.g., I-Teel recognizing the minimal motif CNNNG (Kleinstiver et al. PNAS 2012). In some embodiments, a target sequence tolerant catalytic domain is fused to a DNA binding domain, e.g., to direct activity, e.g., by fusing I-Teel to: (i) zinc fingers to create Tev-ZFEs (Kleinstiver et al. PNAS 2012), (ii) other meganucleases to create MegaTevs (Wolfs et al. Nucleic Acids Res 2014), and/or (iii) Cas9 to create TevCas9 (Wolfs et al. PNAS 2016).

[0329] In some embodiments, the endonuclease domain comprises a restriction enzyme, e.g., a Type IIS or Type TIP restriction enzyme. In some embodiments, the endonuclease domain comprises a Type IIS restriction enzyme, e.g., FokI, or a fragment or variant thereof. In some embodiments, the endonuclease domain comprises a Type TIP restriction enzyme, e.g., PvuII, or a fragment or variant thereof. In some embodiments, a dimeric restriction enzyme is expressed as a fusion such that it functions as a single chain, e.g., a FokI dimer fusion (Minczuk et al. Nucleic Acids Res 36(12):3926-3938 (2008)).

[0330] The use of additional endonuclease domains is described, for example, in Guha and Edgell Int J Mol Sci 18(22):2565 (2017), which is incorporated herein by reference in its entirety.

[0331] In some embodiments, a gene modifying polypeptide comprises a modification to an endonuclease domain, e.g., relative to a wild-type Cas protein. In some embodiments, the endonuclease domain comprises an addition, deletion, replacement, or modification to the amino acid sequence of the wild-type Cas protein. In some embodiments, the endonuclease domain is modified to include a heterologous functional domain that binds specifically to and/or induces endonuclease cleavage of a target nucleic acid (e.g., DNA) sequence of interest. In some embodiments, the endonuclease domain comprises a zinc finger. In embodiments, the endonuclease domain comprising the Cas domain is associated with a guide RNA (gRNA), e.g., as described herein. In some embodiments, the endonuclease domain is modified to include a functional domain that does not target a specific target nucleic acid (e.g., DNA) sequence. In embodiments, the endonuclease domain comprises a FokI domain.

[0332] In some embodiments, the endonuclease domain is associated with the target dsDNA in vitro at a frequency at least about 5-fold or 10-fold higher than with a scrambled dsDNA. In some embodiments, the endonuclease domain is associated with the target dsDNA in vitro at a frequency at least about 5-fold or 10-fold higher than with a scrambled dsDNA, e.g., in a cell (e.g., a HEK293T cell). In some embodiments, the frequency of association between the endonuclease domain and the target DNA or scrambled DNA is measured by ChIP-seq, e.g., as described in He and Pu (2010) Curr. Protoc Mol Biol Chapter 21 (incorporated by reference herein in its entirety).

[0333] In some embodiments, the endonuclease domain can catalyze the formation of a nick at a target sequence, e.g., to an increase of at least about 5-fold or 10-fold relative to a non-target sequence (e.g., relative to any other genomic sequence in the genome of the target cell). In some embodiments, the level of nick formation is determined using NickSeq, e.g., as described in Elacqua et al. (2019) bioRxiv doi.org/10.1101/867937 (incorporated herein by reference in its entirety).

[0334] In some embodiments, the endonuclease domain is capable of nicking DNA in vitro. In embodiments, the nick results in an exposed base. In embodiments, the exposed base can be detected using a nuclease sensitivity assay, e.g., as described in Chaudhry and Weinfeld (1995) Nucleic Acids Res 23(19):3805-3809 (incorporated by reference herein in its entirety). In embodiments, the level of exposed bases (e.g., detected by the nuclease sensitivity assay) is increased by at least 10%, 50%, or more relative to a reference endonuclease domain. In some embodiments, the reference endonuclease domain is an endonuclease domain from Cas9 of S. pyogenes.

[0335] In some embodiments, the endonuclease domain is capable of nicking DNA in a cell. In embodiments, the endonuclease domain is capable of nicking DNA in a HEK293T cell. In embodiments, an unrepaired nick that undergoes replication in the absence of Rad51 results in increased NHEJ rates at the site of the nick, which can be detected, e.g., by using a Rad51 inhibition assay, e.g., as described in Bothmer et al. (2017) Nat Commun 8:13905 (incorporated by reference herein in its entirety). In embodiments, NHEJ rates are increased above 0-5%. In embodiments, NHEJ rates are increased to 20-70% (e.g., between 30%-60% or 40-50%), e.g., upon Rad51 inhibition.

[0336] In some embodiments, the endonuclease domain releases the target after cleavage. In some embodiments, release of the target is indicated indirectly by assessing for multiple turnovers by the enzyme, e.g., as described in Yourik at al. RNA 25(1):35-44 (2019) (incorporated herein by reference in its entirety) and shown in FIG. 2. In some embodiments, the kₑₓₚ of an endonuclease domain is 1×10⁻³−1×10⁻⁵ min-1 as measured by such methods.

[0337] In some embodiments, the endonuclease domain has a catalytic efficiency (k_{cat}/Kₘ) greater than about 1×10⁸ s⁻¹ M⁻¹ in vitro. In embodiments, the endonuclease domain has a catalytic efficiency greater than about 1×10⁵, 1×10⁶, 1×10⁷, or 1×10⁸, s⁻¹ M⁻¹ in vitro. In embodiments, catalytic efficiency is determined as described in Chen et al. (2018) Science 360(6387):436-439 (incorporated herein by reference in its entirety). In some embodiments, the endonuclease domain has a catalytic efficiency (k_{cat}/Kₘ) greater than about 1×10⁸ s⁻¹ M⁻¹ in cells. In embodiments, the endonuclease domain has a catalytic efficiency greater than about 1×10⁵, 1×10⁶, 1×10⁷, or 1×10⁸ s⁻¹ M⁻¹ in cells.

[0338] Gene modifying polypeptides comprising Cas domains In some embodiments, a gene modifying polypeptide described herein comprises a Cas domain. In some embodiments, the Cas domain can direct the gene modifying polypeptide to a target site specified by a gRNA spacer, thereby modifying a target nucleic acid sequence in “cis”. In some embodiments, a gene modifying polypeptide is fused to a Cas domain. In some embodiments, a gene modifying polypeptide comprises a CRISPR/Cas domain (also referred to herein as a CRISPR-associated protein). In some embodiments, a CRISPR/Cas domain comprises a protein involved in the clustered regulatory interspaced short palindromic repeat (CRISPR) system, e.g., a Cas protein, and optionally binds a guide RNA, e.g., single guide RNA (sgRNA).

[0339] CRISPR systems are adaptive defense systems originally discovered in bacteria and archaea. CRISPR systems use RNA-guided nucleases termed CRISPR-associated or “Cas” endonucleases (e.g., Cas9 or Cpf1) to cleave foreign DNA. For example, in a typical CRISPR-Cas system, an endonuclease is directed to a target nucleotide sequence (e.g., a site in the genome that is to be sequence-edited) by sequence-specific, non-coding “guide RNAs” that target single- or double-stranded DNA sequences. Three classes (I-III) of CRISPR systems have been identified. The class II CRISPR systems use a single Cas endonuclease (rather than multiple Cas proteins). One class II CRISPR system includes a type II Cas endonuclease such as Cas9, a CRISPR RNA (“crRNA”), and a trans-activating crRNA (“tracrRNA”). The crRNA contains a “spacer” sequence, a typically about 20-nucleotide RNA sequence that corresponds to a target DNA sequence (“protospacer”). In the wild-type system, and in some engineered systems, crRNA also contains a region that binds to the tracrRNA to form a partially double-stranded structure that is cleaved by RNase III, resulting in a crRNA/tracrRNA hybrid molecule. A crRNA/tracrRNA hybrid then directs the Cas endonuclease to recognize and cleave a target DNA sequence. A target DNA sequence is generally adjacent to a “protospacer adjacent motif” (“PAM”) that is specific for a given Cas endonuclease and required for cleavage activity at a target site matching the spacer of the crRNA. CRISPR endonucleases identified from various prokaryotic species have unique PAM sequence requirements, e.g., as listed for exemplary Cas enzymes in Table 7; examples of PAM sequences include 5′-NGG (Streptococcus pyogenes), 5′-NNAGAA (Streptococcus thermophilus CRISPR1), 5′-NGGNG (Streptococcus thermophilus CRISPR3), and 5″-NNNGATT (Neisseria meningiditis). Some endonucleases, e.g., Cas9 endonucleases, are associated with G-rich PAM sites, e.g., 5′-NGG, and perform blunt-end cleaving of the target DNA at a location 3 nucleotides upstream from (5′ from) the PAM site. Another class II CRISPR system includes the type V endonuclease Cpf1, which is smaller than Cas9; examples include AsCpfl (from Acidaminococcus sp.) and LbCpfl (from Lachnospiraceae sp.). Cpf1-associated CRISPR arrays are processed into mature crRNAs without the requirement of a tracrRNA; in other words, a Cpf1 system, in some embodiments, comprises only Cpf1 nuclease and a crRNA to cleave a target DNA sequence. Cpf1 endonucleases, are typically associated with T-rich PAM sites, e.g., 5′-TTN. Cpf1 can also recognize a 5″-CTA PAM motif. Cpf1 typically cleaves a target DNA by introducing an offset or staggered double-strand break with a 4- or 5-nucleotide 5′ overhang, for example, cleaving a target DNA with a 5-nucleotide offset or staggered cut located 18 nucleotides downstream from (3′ from) from a PAM site on the coding strand and 23 nucleotides downstream from the PAM site on the complimentary strand; the 5-nucleotide overhang that results from such offset cleavage allows more precise genome editing by DNA insertion by homologous recombination than by insertion at blunt-end cleaved DNA. See, e.g., Zetsche et al. (2015) Cell, 163:759-771.

[0340] A variety of CRISPR associated (Cas) genes or proteins can be used in the technologies provided by the present disclosure and the choice of Cas protein will depend upon the particular conditions of the method. Specific examples of Cas proteins include class II systems including Cas1, Cas2, Cas3, Cas4, Cas5, Cash, Cas7, Cas8, Cas9, Cas10, Cpf1, C2C1, or C2C3. In some embodiments, a Cas protein, e.g., a Cas9 protein, may be from any of a variety of prokaryotic species. In some embodiments a particular Cas protein, e.g., a particular Cas9 protein, is selected to recognize a particular protospacer-adjacent motif (PAM) sequence. In some embodiments, a DNA-binding domain or endonuclease domain includes a sequence targeting polypeptide, such as a Cas protein, e.g., Cas9. In certain embodiments a Cas protein, e.g., a Cas9 protein, may be obtained from a bacteria or archaea or synthesized using known methods. In certain embodiments, a Cas protein may be from a gram-positive bacteria or a gram-negative bacteria. In certain embodiments, a Cas protein may be from a Streptococcus (e.g., a S. pyogenes, or a S. thermophilus), a Francisella (e.g., an F. novicida), a Staphylococcus (e.g., an S. aureus), an Acidaminococcus (e.g., an Acidaminococcus sp. BV3L6), a Neisseria (e.g., an N. meningitidis), a Cryptococcus, a Corynebacterium, a Haemophilus, a Eubacterium, a Pasteurella, a Prevotella, a Veillonella, or a Marinobacter.

[0341] In some embodiments, a gene modifying polypeptide may comprise the amino acid sequence of SEQ ID NO: 4000 below, or a sequence having at least 70%, 75%, 80%, 85%, 90%, 95%, 96%, 97%, 98%, 99% identity thereto. In embodiments, the amino acid sequence of SEQ ID NO: 4000 below, or the sequence having at least 70%, 75%, 80%, 85%, 90%, 95%, 96%, 97%, 98%, 99% identity thereto, is positioned at the N-terminal end of the gene modifying polypeptide. In embodiments, the amino acid sequence of SEQ ID NO: 4000 below, or the sequence having at least 70%, 75%, 80%, 85%, 90%, 95%, 96%, 97%, 98%, 99% identity thereto, is positioned within 1, 2, 3, 4, 5, 6, 7, 8, 9, 10, 15, 20, 25, or 30 amino acids of the N-terminal end of the gene modifying polypeptide.

Exemplary N-terminal NLS-Cas9 domain
(SEQ ID NO: 4000)
MPAAKRVKLDGGDKKYSIGLDIGTNSVGWAVITDEYKVPSKKFKVLGNTD
RHSIKKNLIGALLFDSGETAEATRLKRTARRRYTRRKNRICYLQEIFSNE
MAKVDDSFFHRLEESFLVEEDKKHERHPIFGNIVDEVAYHEKYPTIYHLR
KKLVDSTDKADLRLIYLALAHMIKFRGHFLIEGDLNPDNSDVDKLFIQLV
QTYNQLFEENPINASGVDAKAILSARLSKSRRLENLIAQLPGEKKNGLFG
NLIALSLGLTPNFKSNFDLAEDAKLQLSKDTYDDDLDNLLAQIGDQYADL
FLAAKNLSDAILLSDILRVNTEITKAPLSASMIKRYDEHHQDLTLLKALV
RQQLPEKYKEIFFDQSKNGYAGYIDGGASQEEFYKFIKPILEKMDGTEEL
LVKLNREDLLRKQRTFDNGSIPHQIHLGELHAILRRQEDFYPFLKDNREK
IEKILTFRIPYYVGPLARGNSRFAWMTRKSEETITPWNFEEVVDKGASAQ
SFIERMTNFDKNLPNEKVLPKHSLLYEYFTVYNELTKVKYVTEGMRKPAF
LSGEQKKAIVDLLFKTNRKVTVKQLKEDYFKKIECFDSVEISGVEDRFNA
SLGTYHDLLKIIKDKDFLDNEENEDILEDIVLTLTLFEDREMIEERLKTY
AHLFDDKVMKQLKRRRYTGWGRLSRKLINGIRDKQSGKTILDFLKSDGFA
NRNFMQLIHDDSLTFKEDIQKAQVSGQGDSLHEHIANLAGSPAIKKGILQ
TVKVVDELVKVMGRHKPENIVIEMARENQTTQKGQKNSRERMKRIEEGIK
ELGSQILKEHPVENTQLQNEKLYLYYLQNGRDMYVDQELDINRLSDYDVD
HIVPQSFLKDDSIDNKVLTRSDKARGKSDNVPSEEVVKKMKNYWRQLLNA
KLITQRKFDNLTKAERGGLSELDKAGFIKRQLVETRQITKHVAQILDSRM
NTKYDENDKLIREVKVITLKSKLVSDFRKDFQFYKVREINNYHHAHDAYL
NAVVGTALIKKYPKLESEFVYGDYKVYDVRKMIAKSEQEIGKATAKYFFY
SNIMNFFKTEITLANGEIRKRPLIETNGETGEIVWDKGRDFATVRKVLSM
PQVNIVKKTEVQTGGFSKESILPKRNSDKLIARKKDWDPKKYGGFDSPTV
AYSVLVVAKVEKGKSKKLKSVKELLGITIMERSSFEKNPIDFLEAKGYKE
VKKDLIIKLPKYSLFELENGRKRMLASAGELQKGNELALPSKYVNFLYLA
SHYEKLKGSPEDNEQKQLFVEQHKHYLDEIIEQISEFSKRVILADANLDK
VLSAYNKHRDKPIREQAENIIHLFTLTNLGAPAAFKYFDTTIDRKRYTST
KEVLDATLIHQSITGLYETRIDLSQLGGDGG

[0342] In some embodiments, a gene modifying polypeptide may comprise the amino acid sequence of SEQ ID NO: 4001 below, or a sequence having at least 70%, 75%, 80%, 85%, 90%, 95%, 96%, 97%, 98%, 99% identity thereto. In embodiments, the amino acid sequence of SEQ ID NO: 4001 below, or the sequence having at least 70%, 75%, 80%, 85%, 90%, 95%, 96%, 97%, 98%, 99% identity thereto, is positioned at the C-terminal end of the gene modifying polypeptide. In embodiments, the amino acid sequence of SEQ ID NO: 4001 below, or the sequence having at least 70%, 75%, 80%, 85%, 90%, 95%, 96%, 97%, 98%, 99% identity thereto, is positioned within 1, 2, 3, 4, 5, 6, 7, 8, 9, 10, 15, 20, 25, or 30 amino acids of the C-terminal end of the gene modifying polypeptide.

Exemplary C-terminal sequence comprising an NLS
(SEQ ID NO: 4001)
AGKRTADGSEFEKRTADGSEFESPKKKAKVE
Exemplary benchmarking sequence
(SEQ ID NO: 4002)
MPAAKRVKLDGGDKKYSIGLDIGTNSVGWAVITDEYKVPSKKFKVLGNTD
RHSIKKNLIGALLFDSGETAEATRLKRTARRRYTRRKNRICYLQEIFSNE
MAKVDDSFFHRLEESFLVEEDKKHERHPIFGNIVDEVAYHEKYPTIYHLR
KKLVDSTDKADLRLIYLALAHMIKFRGHFLIEGDLNPDNSDVDKLFIQLV
QTYNQLFEENPINASGVDAKAILSARLSKSRRLENLIAQLPGEKKNGLFG
NLIALSLGLTPNFKSNFDLAEDAKLQLSKDTYDDDLDNLLAQIGDQYADL
FLAAKNLSDAILLSDILRVNTEITKAPLSASMIKRYDEHHQDLTLLKALV
RQQLPEKYKEIFFDQSKNGYAGYIDGGASQEEFYKFIKPILEKMDGTEEL
LVKLNREDLLRKQRTFDNGSIPHQIHLGELHAILRRQEDFYPFLKDNREK
IEKILTFRIPYYVGPLARGNSRFAWMTRKSEETITPWNFEEVVDKGASAQ
SFIERMTNFDKNLPNEKVLPKHSLLYEYFTVYNELTKVKYVTEGMRKPAF
LSGEQKKAIVDLLFKTNRKVTVKQLKEDYFKKIECFDSVEISGVEDRFNA
SLGTYHDLLKIIKDKDFLDNEENEDILEDIVLTLTLFEDREMIEERLKTY
AHLFDDKVMKQLKRRRYTGWGRLSRKLINGIRDKQSGKTILDFLKSDGFA
NRNFMQLIHDDSLTFKEDIQKAQVSGQGDSLHEHIANLAGSPAIKKGILQ
TVKVVDELVKVMGRHKPENIVIEMARENQTTQKGQKNSRERMKRIEEGIK
ELGSQILKEHPVENTQLQNEKLYLYYLQNGRDMYVDQELDINRLSDYDVD
HIVPQSFLKDDSIDNKVLTRSDKARGKSDNVPSEEVVKKMKNYWRQLLNA
KLITQRKFDNLTKAERGGLSELDKAGFIKRQLVETRQITKHVAQILDSRM
NTKYDENDKLIREVKVITLKSKLVSDFRKDFQFYKVREINNYHHAHDAYL
NAVVGTALIKKYPKLESEFVYGDYKVYDVRKMIAKSEQEIGKATAKYFFY
SNIMNFFKTEITLANGEIRKRPLIETNGETGEIVWDKGRDFATVRKVLSM
PQVNIVKKTEVQTGGFSKESILPKRNSDKLIARKKDWDPKKYGGFDSPTV
AYSVLVVAKVEKGKSKKLKSVKELLGITIMERSSFEKNPIDFLEAKGYKE
VKKDLIIKLPKYSLFELENGRKRMLASAGELQKGNELALPSKYVNFLYLA
SHYEKLKGSPEDNEQKQLFVEQHKHYLDEIIEQISEFSKRVILADANLDK
VLSAYNKHRDKPIREQAENIIHLFTLTNLGAPAAFKYFDTTIDRKRYTST
KEVLDATLIHQSITGLYETRIDLSQLGGDGGSGGSSGGSSGSETPGTSES
ATPESSGGSSGGSSGGTLNIEDEYRLHETSKEPDVSLGSTWLSDFPQAWA
ETGGMGLAVRQAPLIIPLKATSTPVSIKQYPMSQEARLGIKPHIQRLLDQ
GILVPCQSPWNTPLLPVKKPGTNDYRPVQDLREVNKRVEDIHPTVPNPYN
LLSGLPPSHQWYTVLDLKDAFFCLRLHPTSQPLFAFEWRDPEMGISGQLT
WTRLPQGFKNSPTLFNEALHRDLADFRIQHPDLILLQYVDDLLLAATSEL
DCQQGTRALLQTLGNLGYRASAKKAQICQKQVKYLGYLLKEGQRWLTEAR
KETVMGQPTPKTPRQLREFLGKAGFCRLFIPGFAEMAAPLYPLTKPGTLF
NWGPDQQKAYQEIKQALLTAPALGLPDLTKPFELFVDEKQGYAKGVLTQK
LGPWRRPVAYLSKKLDPVAAGWPPCLRMVAAIAVLTKDAGKLTMGQPLVI
LAPHAVEALVKQPPDRWLSNARMTHYQALLLDTDRVQFGPVVALNPATLL
PLPEEGLQHNCLDILAEAHGTRPDLTDQPLPDADHTWYTDGSSLLQEGQR
KAGAAVTTETEVIWAKALPAGTSAQRAELIALTQALKMAEGKKLNVYTDS
RYAFATAHIHGEIYRRRGWLTSEGKEIKNKDEILALLKALFLPKRLSIIH
CPGHQKGHSAEARGNRMADQAARKAAITETPDTSTLLIENSSPSGGSKRT
ADGSEFEAGKRTADGSEFEKRTADGSEFESPKKKAKVE

[0343] In some embodiments, a gene modifying polypeptide may comprise a Cas domain as listed in Table 7 or 8, or a functional fragment thereof, or a sequence having at least 70%, 75%, 80%, 85%, 90%, 95%, 96%, 97%, 98%, 99% identity thereto.

TABLE 7
CRISPR/Cas Proteins, Species, and Mutations

| | | | | | | Muta- |
|---|---|---|---|---|---|---|
| | | | | | Muta- | tions |
| | | | | | tions | to |
| | | | | | to | make |
| | | | | | alter | cata- |
| | | | # | | PAM | lyti- |
| | En- | | of | | recog- | cally |
| Name | zyme | Species | AAs | PAM | nition | dead |
| FnCas9 | Cas9 | Franci- | 1629 | 5′- | Wt | D11A/ |
| | | sella | | NGG-3′ | | H969A/ |
| | | novicida | | | | N995A |
| FnCas9 | Cas9 | Franci- | 1629 | 5′- | E1369R/ | D11A/ |
| RHA | | sella | | YG-3′ | E1449H/ | H969A/ |
| | | novicida | | | R1556A | N995A |
| SaCas9 | Cas9 | Staphylo- | 1053 | 5′- | Wt | D10A/ |
| | | coccus | | NNGRRT- | | H557A |
| | | aureus | | 3′ | | |
| SaCas9 | Cas9 | Staphylo- | 1053 | 5′- | E782K/ | D10A/ |
| KKH | | coccus | | NNNRRT- | N968K/ | H557A |
| | | aureus | | 3′ | R1015H | |
| SpCas9 | Cas9 | Strepto- | 1368 | 5′- | Wt | D10A/ |
| | | coccus | | NGG-3′ | | D839A/ |
| | | pyogenes | | | | H840A/ |
| | | | | | | N863A |
| SpCas9 | Cas9 | Strepto- | 1368 | 5′- | D1135V/ | D10A/ |
| VQR | | coccus | | NGA-3′ | R1335Q/ | D839A/ |
| | | pyogenes | | | T1337R | H840A/ |
| | | | | | | N863A |
| AsCpf1 | Cpf1 | Acidamin- | 1307 | 5′- | S542R/ | E993A |
| RR | | ococcus | | TYCV-3′ | K607R | |
| | | sp. BV3L6 | | | | |
| AsCpf1 | Cpf1 | Acidamin- | 1307 | 5′- | S542R/ | E993A |
| RVR | | ococcus | | TATV-3′ | K548V/ | |
| | | sp. BV3L6 | | | N552R | |
| FnCpf1 | Cpf1 | Franci- | 1300 | 5′- | Wt | D917A/ |
| | | sella | | NTTN-3′ | | E1006A/ |
| | | novicida | | | | D1255A |
| NmCas9 | Cas9 | Neisseria | 1082 | 5′- | Wt | D16A/ |
| | | meningi- | | NNNGATT- | | D587A/ |
| | | tidis | | 3′ | | H588A/ |
| | | | | | | N611A |

TABLE 8
Amino Acid Sequences of CRISPR/Cas Proteins, Species, and Mutations

| | | | SEQ | Nick- | Nick- | Nick- |
|---|---|---|---|---|---|---|
| | Parental | | ID | ase | ase | ase |
| Variant | Host(s) | Protein Sequence | NO: | (HNH) | (HNH) | (RuvC) |
| Nme2Cas9 | Neisseria | MAAFKPNPINYILGLDIGIASVGWAMVEIDEEENPIRLIDLGVRVFERAEVPK | 9,001 | N611A | H588A | D16A |
| | meningitidis | TGDSLAMARRLARSVRRLTRRRAHRLLRARRLLKREGVLQAADFDENGLIKS | | | | |
| | | LPNTPWQLRAAALDRKLTPLEWSAVLLHLIKHRGYLSQRKNEGETADKELG | | | | |
| | | ALLKGVANNAHALQTGDFRTPAELALNKFEKESGHIRNQRGDYSHTFSRKD | | | | |
| | | LQAELILLFEKQKEFGNPHVSGGLKEGIETLLMTQRPALSGDAVQKMLGHCT | | | | |
| | | FEPAEPKAAKNTYTAERFIWLTKLNNLRILEQGSERPLTDTERATLMDEPYRK | | | | |
| | | SKLTYAQARKLLGLEDTAFFKGLRYGKDNAEASTLMEMKAYHAISRALEKEG | | | | |
| | | LKDKKSPLNLSSELQDEIGTAFSLFKTDEDITGRLKDRVQPEILEALLKHISFDKF | | | | |
| | | VQISLKALRRIVPLMEQGKRYDEACAEIYGDHYGKKNTEEKIYLPPIPADEIRN | | | | |
| | | PVVLRALSQARKVINGVVRRYGSPARIHIETAREVGKSFKDRKEIEKRQEENR | | | | |
| | | KDREKAAAKFREYFPNFVGEPKSKDILKLRLYEQQHGKCLYSGKEINLVRLNE | | | | |
| | | KGYVEIDHALPFSRTWDDSFNNKVLVLGSENQNKGNQTPYEYFNGKDNSR | | | | |
| | | EWQEFKARVETSRFPRSKKQRILLQKFDEDGFKECNLNDTRYVNRFLCQFVA | | | | |
| | | DHILLTGKGKRRVFASNGQITNLLRGFWGLRKVRAENDRHHALDAVVVACS | | | | |
| | | TVAMQQKITRFVRYKEMNAFDGKTIDKETGKVLHQKTHFPQPWEFFAQEV | | | | |
| | | MIRVFGKPDGKPEFEEADTPEKLRTLLAEKLSSRPEAVHEYVTPLFVSRAPNR | | | | |
| | | KMSGAHKDTLRSAKRFVKHNEKISVKRVWLTEIKLADLENMVNYKNGREIEL | | | | |
| | | YEALKARLEAYGGNAKQAFDPKDNPFYKKGGQLVKAVRVEKTQESGVLLNK | | | | |
| | | KNAYTIADNGDMVRVDVFCKVDKKGKNQYFIVPIYAWQVAENILPDIDCKG | | | | |
| | | YRIDDSYTFCFSLHKYDLIAFQKDEKSKVEFAYYINCDSSNGRFYLAWHDKGS | | | | |
| | | KEQQFRISTQNLVLIQKYQVNELGKEIRPCRLKKRPPVR | | | | |
| PpnCas9 | Pasteurella | MQNNPLNYILGLDLGIASIGWAVVEIDEESSPIRLIDVGVRTFERAEVAKTGE | 9,002 | N605A | H582A | D13A |
| | pneumotropica | SLALSRRLARSSRRLIKRRAERLKKAKRLLKAEKILHSIDEKLPINVWQLRVKGL | | | | |
| | | KEKLERQEWAAVLLHLSKHRGYLSQRKNEGKSDNKELGALLSGIASNHQML | | | | |
| | | QSSEYRTPAEIAVKKFQVEEGHIRNQRGSYTHTFSRLDLLAEMELLFQRQAEL | | | | |
| | | GNSYTSTTLLENLTALLMWQKPALAGDAILKMLGKCTFEPSEYKAAKNSYSA | | | | |
| | | ERFVWLTKLNNLRILENGTERALNDNERFALLEQPYEKSKLTYAQVRAMLAL | | | | |
| | | SDNAIFKGVRYLGEDKKTVESKTTLIEMKFYHQIRKTLGSAELKKEWNELKGN | | | | |
| | | SDLLDEIGTAFSLYKTDDDICRYLEGKLPERVLNALLENLNFDKFIQLSLKALHQ | | | | |
| | | ILPLMLQGQRYDEAVSAIYGDHYGKKSTETTRLLPTIPADEIRNPVVLRTLTQA | | | | |
| | | RKVINAVVRLYGSPARIHIETAREVGKSYQDRKKLEKQQEDNRKQRESAVKK | | | | |
| | | FKEMFPHFVGEPKGKDILKMRLYELQQAKCLYSGKSLELHRLLEKGYVEVDH | | | | |
| | | ALPFSRTWDDSFNNKVLVLANENQNKGNLTPYEWLDGKNNSERWQHFVV | | | | |
| | | RVQTSGFSYAKKQRILNHKLDEKGFIERNLNDTRYVARFLCNFIADNMLLVG | | | | |
| | | KGKRNVFASNGQITALLRHRWGLQKVREQNDRHHALDAVVVACSTVAMQ | | | | |
| | | QKITRFVRYNEGNVFSGERIDRETGEIIPLHFPSPWAFFKENVEIRIFSENPKLE | | | | |
| | | LENRLPDYPQYNHEWVQPLFVSRMPTRKMTGQGHMETVKSAKRLNEGLS | | | | |
| | | VLKVPLTQLKLSDLERMVNRDREIALYESLKARLEQFGNDPAKAFAEPFYKKG | | | | |
| | | GALVKAVRLEQTQKSGVLVRDGNGVADNASMVRVDVFTKGGKYFLVPIYT | | | | |
| | | WQVAKGILPNRAATQGKDENDWDIMDEMATFQFSLCQNDLIKLVTKKKTI | | | | |
| | | FGYFNGLNRATSNINIKEHDLDKSKGKLGIYLEVGVKLAISLEKYQVDELGKNI | | | | |
| | | RPCRPTKRQHVR | | | | |
| SauCas9 | Staphylococcus | MKRNYILGLDIGITSVGYGIIDYETRDVIDAGVRLFKEANVENNEGRRSKRGA | 9,003 | N580A | H557A | D10A |
| | aureus | RRLKRRRRHRIQRVKKLLFDYNLLTDHSELSGINPYEARVKGLSQKLSEEEFSA | | | | |
| | | ALLHLAKRRGVHNVNEVEEDTGNELSTKEQISRNSKALEEKYVAELQLERLKK | | | | |
| | | DGEVRGSINRFKTSDYVKEAKQLLKVQKAYHQLDQSFIDTYIDLLETRRTYYE | | | | |
| | | GPGEGSPFGWKDIKEWYEMLMGHCTYFPEELRSVKYAYNADLYNALNDLN | | | | |
| | | NLVITRDENEKLEYYEKFQIIENVFKQKKKPTLKQIAKEILVNEEDIKGYRVTST | | | | |
| | | GKPEFTNLKVYHDIKDITARKEIIENAELLDQIAKILTIYQSSEDIQEELTNLNSE | | | | |
| | | LTQEEIEQISNLKGYTGTHNLSLKAINLILDELWHTNDNQIAIFNRLKLVPKKV | | | | |
| | | DLSQQKEIPTTLVDDFILSPVVKRSFIQSIKVINAIIKKYGLPNDIIIELAREKNS | | | | |
| | | KDAQKMINEMQKRNRQTNERIEEIIRTTGKENAKYLIEKIKLHDMQEGKCLYS | | | | |
| | | LEAIPLEDLLNNPFNYEVDHIIPRSVSFDNSFNNKVLVKQEENSKKGNRTPFQ | | | | |
| | | YLSSSDSKISYETFKKHILNLAKGKGRISKTKKEYLLEERDINRFSVQKDFINRNL | | | | |
| | | VDTRYATRGLMNLLRSYFRVNNLDVKVKSINGGFTSFLRRKWKFKKERNKG | | | | |
| | | YKHHAEDALIIANADFIFKEWKKLDKAKKVMENQMFEEKQAESMPEIETEQ | | | | |
| | | EYKEIFITPHQIKHIKDFKDYKYSHRVDKKPNRELINDTLYSTRKDDKGNTLIVN | | | | |
| | | NLNGLYDKDNDKLKKLINKSPEKLLMYHHDPQTYQKLKLIMEQYGDEKNPL | | | | |
| | | YKYYEETGNYLTKYSKKDNGPVIKKIKYYGNKLNAHLDITDDYPNSRNKVVKL | | | | |
| | | SLKPYRFDVYLDNGVYKFVTVKNLDVIKKENYYEVNSKCYEEAKKLKKISNQA | | | | |
| | | EFIASFYNNDLIKINGELYRVIGVNNDLLNRIEVNMIDITYREYLENMNDKRPP | | | | |
| | | RIIKTIASKTQSIKKYSTDILGNLYEVKSKKHPQIIKKG | | | | |
| SauCas9- | Staphylococcus | MKRNYILGLDIGITSVGYGIIDYETRDVIDAGVRLFKEANVENNEGRRSKRGA | 9,004 | N580A | H557A | D10A |
| KKH | aureus | RRLKRRRRHRIQRVKKLLFDYNLLTDHSELSGINPYEARVKGLSQKLSEEEFSA | | | | |
| | | ALLHLAKRRGVHNVNEVEEDTGNELSTKEQISRNSKALEEKYVAELQLERLKK | | | | |
| | | DGEVRGSINRFKTSDYVKEAKQLLKVQKAYHQLDQSFIDTYIDLLETRRTYYE | | | | |
| | | GPGEGSPFGWKDIKEWYEMLMGHCTYFPEELRSVKYAYNADLYNALNDLN | | | | |
| | | NLVITRDENEKLEYYEKFQIIENVFKQKKKPTLKQIAKEILVNEEDIKGYRVTST | | | | |
| | | GKPEFTNLKVYHDIKDITARKEIIENAELLDQIAKILTIYQSSEDIQEELTNLNSE | | | | |
| | | LTQEEIEQISNLKGYTGTHNLSLKAINLILDELWHTNDNQIAIFNRLKLVPKKV | | | | |
| | | DLSQQKEIPTTLVDDFILSPVVKRSFIQSIKVINAIIKKYGLPNDIIIELAREKNS | | | | |
| | | KDAQKMINEMQKRNRQTNERIEEIIRTTGKENAKYLIEKIKLHDMQEGKCLYS | | | | |
| | | LEAIPLEDLLNNPFNYEVDHIIPRSVSFDNSFNNKVLVKQEENSKKGNRTPFQ | | | | |
| | | YLSSSDSKISYETFKKHILNLAKGKGRISKTKKEYLLEERDINRFSVQKDFINRNL | | | | |
| | | VDTRYATRGLMNLLRSYFRVNNLDVKVKSINGGFTSFLRRKWKFKKERNKG | | | | |
| | | YKHHAEDALIIANADFIFKEWKKLDKAKKVMENQMFEEKQAESMPEIETEQ | | | | |
| | | EYKEIFITPHQIKHIKDFKDYKYSHRVDKKPNRKLINDTLYSTRKDDKGNTLIV | | | | |
| | | NNLNGLYDKDNDKLKKLINKSPEKLLMYHHDPQTYQKLKLIMEQYGDEKNP | | | | |
| | | LYKYYEETGNYLTKYSKKDNGPVIKKIKYYGNKLNAHLDITDDYPNSRNKVVK | | | | |
| | | LSLKPYRFDVYLDNGVYKFVTVKNLDVIKKENYYEVNSKCYEEAKKLKKISNQ | | | | |
| | | AEFIASFYKNDLIKINGELYRVIGVNNDLLNRIEVNMIDITYREYLENMNDKRP | | | | |
| | | PHIIKTIASKTQSIKKYSTDILGNLYEVKSKKHPQIIKKG | | | | |
| SauriCas9 | Staphylococcus | MQENQQKQNYILGLDIGITSVGYGLIDSKTREVIDAGVRLFPEADSENNSNR | 9,005 | N588A | H565A | D15A |
| | auricularis | RSKRGARRLKRRRIHRLNRVKDLLADYQMIDLNNVPKSTDPYTIRVKGLREPL | | | | |
| | | TKEEFAIALLHIAKRRGLHNISVSMGDEEQDNELSTKQQLQKNAQQLQDKY | | | | |
| | | VCELQLERLTNINKVRGEKNRFKTEDFVKEVKQLCETQRQYHNIDDQFIQQY | | | | |
| | | IDLVSTRREYFEGPGNGSPYGWDGDLLKWYEKLMGRCTYFPEELRSVKYAYS | | | | |
| | | ADLFNALNDLNNLVVTRDDNPKLEYYEKYHIIENVFKQKKNPTLKQIAKEIGV | | | | |
| | | QDYDIRGYRITKSGKPQFTSFKLYHDLKNIFEQAKYLEDVEMLDEIAKILTIYQ | | | | |
| | | DEISIKKALDQLPELLTESEKSQIAQLTGYTGTHRLSLKCIHIVIDELWESPENQ | | | | |
| | | MEIFTRLNLKPKKVEMSEIDSIPTTLVDEFILSPVVKRAFIQSIKVINAVINRFGL | | | | |
| | | PEDIIIELAREKNSKDRRKFINKLQKQNEATRKKIEQLLAKYGNTNAKYMIEKI | | | | |
| | | KLHDMQEGKCLYSLEAIPLEDLLSNPTHYEVDHIIPRSVSFDNSLNNKVLVKQ | | | | |
| | | SENSKKGNRTPYQYLSSNESKISYNQFKQHILNLSKAKDRISKKKRDMLLEER | | | | |
| | | DINKFEVQKEFINRNLVDTRYATRELSNLLKTYFSTHDYAVKVKTINGGFTNH | | | | |
| | | LRKVWDFKKHRNHGYKHHAEDALVIANADFLFKTHKALRRTDKILEQPGLE | | | | |
| | | VNDTTVKVDTEEKYQELFETPKQVKNIKQFRDFKYSHRVDKKPNRQLINDTL | | | | |
| | | YSTREIDGETYVVQTLKDLYAKDNEKVKKLFTERPQKILMYQHDPKTFEKLM | | | | |
| | | TILNQYAEAKNPLAAYYEDKGEYVTKYAKKGNGPAIHKIKYIDKKLGSYLDVS | | | | |
| | | NKYPETQNKLVKLSLKSFRFDIYKCEQGYKMVSIGYLDVLKKDNYYYIPKDKYE | | | | |
| | | AEKQKKKIKESDLFVGSFYYNDLIMYEDELFRVIGVNSDINNLVELNMVDITY | | | | |
| | | KDFCEVNNVTGEKRIKKTIGKRVVLIEKYTTDILGNLYKTPLPKKPQLIFKRGEL | | | | |
| SauriCas9- | Staphylococcus | MQENQQKQNYILGLDIGITSVGYGLIDSKTREVIDAGVRLFPEADSENNSNR | 9,006 | N588A | H565A | D15A |
| KKH | auricularis | RSKRGARRLKRRRIHRLNRVKDLLADYQMIDLNNVPKSTDPYTIRVKGLREPL | | | | |
| | | TKEEFAIALLHIAKRRGLHNISVSMGDEEQDNELSTKQQLQKNAQQLQDKY | | | | |
| | | VCELQLERLTNINKVRGEKNRFKTEDFVKEVKQLCETQRQYHNIDDQFIQQY | | | | |
| | | IDLVSTRREYFEGPGNGSPYGWDGDLLKWYEKLMGRCTYFPEELRSVKYAYS | | | | |
| | | ADLFNALNDLNNLVVTRDDNPKLEYYEKYHIIENVFKQKKNPTLKQIAKEIGV | | | | |
| | | QDYDIRGYRITKSGKPQFTSFKLYHDLKNIFEQAKYLEDVEMLDEIAKILTIYQ | | | | |
| | | DEISIKKALDQLPELLTESEKSQIAQLTGYTGTHRLSLKCIHIVIDELWESPENQ | | | | |
| | | MEIFTRLNLKPKKVEMSEIDSIPTTLVDEFILSPVVKRAFIQSIKVINAVINRFGL | | | | |
| | | PEDIIIELAREKNSKDRRKFINKLQKQNEATRKKIEQLLAKYGNTNAKYMIEKI | | | | |
| | | KLHDMQEGKCLYSLEAIPLEDLLSNPTHYEVDHIIPRSVSFDNSLNNKVLVKQ | | | | |
| | | SENSKKGNRTPYQYLSSNESKISYNQFKQHILNLSKAKDRISKKKRDMLLEER | | | | |
| | | DINKFEVQKEFINRNLVDTRYATRELSNLLKTYFSTHDYAVKVKTINGGFTNH | | | | |
| | | LRKVWDFKKHRNHGYKHHAEDALVIANADFLFKTHKALRRTDKILEQPGLE | | | | |
| | | VNDTTVKVDTEEKYQELFETPKQVKNIKQFRDFKYSHRVDKKPNRKLINDTL | | | | |
| | | YSTREIDGETYVVQTLKDLYAKDNEKVKKLFTERPQKILMYQHDPKTFEKLM | | | | |
| | | TILNQYAEAKNPLAAYYEDKGEYVTKYAKKGNGPAIHKIKYIDKKLGSYLDVS | | | | |
| | | NKYPETQNKLVKLSLKSFRFDIYKCEQGYKMVSIGYLDVLKKDNYYYIPKDKYE | | | | |
| | | AEKQKKKIKESDLFVGSFYKNDLIMYEDELFRVIGVNSDINNLVELNMVDITY | | | | |
| | | KDFCEVNNVTGEKHIKKTIGKRVVLIEKYTTDILGNLYKTPLPKKPQLIFKRGEL | | | | |
| ScaCas9- | Streptococcus | MEKKYSIGLDIGTNSVGWAVITDDYKVPSKKFKVLGNTNRKSIKKNLMGALL | 9,007 | N872A | H849A | D10A |
| Sc++ | canis | FDSGETAEATRLKRTARRRYTRRKNRIRYLQEIFANEMAKLDDSFFQRLEESF | | | | |
| | | LVEEDKKNERHPIFGNLADEVAYHRNYPTIYHLRKKLADSPEKADLRLIYLALA | | | | |
| | | HIIKFRGHFLIEGKLNAENSDVAKLFYQLIQTYNQLFEESPLDEIEVDAKGILSA | | | | |
| | | RLSKSKRLEKLIAVFPNEKKNGLFGNIIALALGLTPNFKSNFDLTEDAKLQLSKD | | | | |
| | | TYDDDLDELLGQIGDQYADLFSAAKNLSDAILLSDILRSNSEVTKAPLSASMV | | | | |
| | | KRYDEHHQDLALLKTLVRQQFPEKYAEIFKDDTKNGYAGYVGADKKLRKRS | | | | |
| | | GKLATEEEFYKFIKPILEKMDGAEELLAKLNRDDLLRKQRTFDNGSIPHQIHLK | | | | |
| | | ELHAILRRQEEFYPFLKENREKIEKILTFRIPYYVGPLARGNSRFAWLTRKSEEA | | | | |
| | | ITPWNFEEVVDKGASAQSFIERMTNFDEQLPNKKVLPKHSLLYEYFTVYNEL | | | | |
| | | TKVKYVTERMRKPEFLSGEQKKAIVDLLFKTNRKVTVKQLKEDYFKKIECFDS | | | | |
| | | VEIIGVEDRFNASLGTYHDLLKIIKDKDFLDNEENEDILEDIVLTLTLFEDREMIE | | | | |
| | | ERLKTYAHLFDDKVMKQLKRRHYTGWGRLSRKMINGIRDKQSGKTILDFLKS | | | | |
| | | DGFSNRNFMQLIHDDSLTFKEEIEKAQVSGQGDSLHEQIADLAGSPAIKKGIL | | | | |
| | | QTVKIVDELVKVMGHKPENIVIEMARENQTTTKGLQQSRERKKRIEEGIKELE | | | | |
| | | SQILKENPVENTQLQNEKLYLYYLQNGRDMYVDQELDINRLSDYDVDHIVP | | | | |
| | | QSFIKDDSIDNKVLTRSVENRGKSDNVPSEEVVKKMKNYWRQLLNAKLITQ | | | | |
| | | RKFDNLTKAERGGLSEADKAGFIKRQLVETRQITKHVARILDSRMNTKRDKN | | | | |
| | | DKPIREVKVITLKSKLVSDFRKDFQLYKVRDINNYHHAHDAYLNAVVGTALIK | | | | |
| | | KYPKLESEFVYGDYKVYDVRKMIAKSEQEIGKATAKRFFYSNIMNFFKTEVKL | | | | |
| | | ANGEIRKRPLIETNGETGEVVWNKEKDFATVRKVLAMPQVNIVKKTEVQTG | | | | |
| | | GFSKESILSKRESAKLIPRKKGWDTRKYGGFGSPTVAYSILVVAKVEKGKAKKL | | | | |
| | | KSVKVLVGITIMEKGSYEKDPIGFLEAKGYKDIKKELIFKLPKYSLFELENGRRR | | | | |
| | | MLASAKELQKANELVLPQHLVRLLYYTQNISATTGSNNLGYIEQHREEFKEIF | | | | |
| | | EKIIDFSEKYILKNKVNSNLKSSFDEQFAVSDSILLSNSFVSLLKYTSFGASGGFT | | | | |
| | | FLDLDVKQGRLRYQTVTEVLDATLIYQSITGLYETRTDLSQLGGD | | | | |
| SpyCas9 | Streptococcus | MDKKYSIGLDIGTNSVGWAVITDEYKVPSKKFKVLGNTDRHSIKKNLIGALLF | 9,008 | N863A | H840A | D10A |
| | pyogenes | DSGETAEATRLKRTARRRYTRRKNRICYLQEIFSNEMAKVDDSFFHRLEESFL | | | | |
| | | VEEDKKHERHPIFGNIVDEVAYHEKYPTIYHLRKKLVDSTDKADLRLIYLALAH | | | | |
| | | MIKFRGHFLIEGDLNPDNSDVDKLFIQLVQTYNQLFEENPINASGVDAKAILS | | | | |
| | | ARLSKSRRLENLIAQLPGEKKNGLFGNLIALSLGLTPNFKSNFDLAEDAKLQLS | | | | |
| | | KDTYDDDLDNLLAQIGDQYADLFLAAKNLSDAILLSDILRVNTEITKAPLSAS | | | | |
| | | MIKRYDEHHQDLTLLKALVRQQLPEKYKEIFFDQSKNGYAGYIDGGASQEEF | | | | |
| | | YKFIKPILEKMDGTEELLVKLNREDLLRKQRTFDNGSIPHQIHLGELHAILRRQ | | | | |
| | | EDFYPFLKDNREKIEKILTFRIPYYVGPLARGNSRFAWMTRKSEETITPWNFE | | | | |
| | | EVVDKGASAQSFIERMTNFDKNLPNEKVLPKHSLLYEYFTVYNELTKVKYVTE | | | | |
| | | GMRKPAFLSGEQKKAIVDLLFKTNRKVTVKQLKEDYFKKIECFDSVEISGVED | | | | |
| | | RFNASLGTYHDLLKIIKDKDFLDNEENEDILEDIVLTLTLFEDREMIEERLKTYA | | | | |
| | | HLFDDKVMKQLKRRRYTGWGRLSRKLINGIRDKQSGKTILDFLKSDGFANR | | | | |
| | | NFMQLIHDDSLTFKEDIQKAQVSGQGDSLHEHIANLAGSPAIKKGILQTVKV | | | | |
| | | VDELVKVMGRHKPENIVIEMARENQTTQKGQKNSRERMKRIEEGIKELGSQ | | | | |
| | | ILKEHPVENTQLQNEKLYLYYLQNGRDMYVDQELDINRLSDYDVDHIVPQSF | | | | |
| | | LKDDSIDNKVLTRSDKNRGKSDNVPSEEVVKKMKNYWRQLLNAKLITQRKF | | | | |
| | | DNLTKAERGGLSELDKAGFIKRQLVETRQITKHVAQILDSRMNTKYDENDKLI | | | | |
| | | REVKVITLKSKLVSDFRKDFQFYKVREINNYHHAHDAYLNAVVGTALIKKYPK | | | | |
| | | LESEFVYGDYKVYDVRKMIAKSEQEIGKATAKYFFYSNIMNFFKTEITLANGEI | | | | |
| | | RKRPLIETNGETGEIVWDKGRDFATVRKVLSMPQVNIVKKTEVQTGGFSKES | | | | |
| | | ILPKRNSDKLIARKKDWDPKKYGGFDSPTVAYSVLVVAKVEKGKSKKLKSVKE | | | | |
| | | LLGITIMERSSFEKNPIDFLEAKGYKEVKKDLIIKLPKYSLFELENGRKRMLASA | | | | |
| | | GELQKGNELALPSKYVNFLYLASHYEKLKGSPEDNEQKQLFVEQHKHYLDEII | | | | |
| | | EQISEFSKRVILADANLDKVLSAYNKHRDKPIREQAENIIHLFTLTNLGAPAAF | | | | |
| | | KYFDTTIDRKRYTSTKEVLDATLIHQSITGLYETRIDLSQLGGD | | | | |
| SpyCas9- | Streptococcus | MDKKYSIGLDIGTNSVGWAVITDEYKVPSKKFKVLGNTDRHSIKKNLIGALLF | 9,009 | N863A | H840A | D10A |
| NG | pyogenes | DSGETAEATRLKRTARRRYTRRKNRICYLQEIFSNEMAKVDDSFFHRLEESFL | | | | |
| | | VEEDKKHERHPIFGNIVDEVAYHEKYPTIYHLRKKLVDSTDKADLRLIYLALAH | | | | |
| | | MIKFRGHFLIEGDLNPDNSDVDKLFIQLVQTYNQLFEENPINASGVDAKAILS | | | | |
| | | ARLSKSRRLENLIAQLPGEKKNGLFGNLIALSLGLTPNFKSNFDLAEDAKLQLS | | | | |
| | | KDTYDDDLDNLLAQIGDQYADLFLAAKNLSDAILLSDILRVNTEITKAPLSAS | | | | |
| | | MIKRYDEHHQDLTLLKALVRQQLPEKYKEIFFDQSKNGYAGYIDGGASQEEF | | | | |
| | | YKFIKPILEKMDGTEELLVKLNREDLLRKQRTFDNGSIPHQIHLGELHAILRRQ | | | | |
| | | EDFYPFLKDNREKIEKILTFRIPYYVGPLARGNSRFAWMTRKSEETITPWNFE | | | | |
| | | EVVDKGASAQSFIERMTNFDKNLPNEKVLPKHSLLYEYFTVYNELTKVKYVTE | | | | |
| | | GMRKPAFLSGEQKKAIVDLLFKTNRKVTVKQLKEDYFKKIECFDSVEISGVED | | | | |
| | | RFNASLGTYHDLLKIIKDKDFLDNEENEDILEDIVLTLTLFEDREMIEERLKTYA | | | | |
| | | HLFDDKVMKQLKRRRYTGWGRLSRKLINGIRDKQSGKTILDFLKSDGFANR | | | | |
| | | NFMQLIHDDSLTFKEDIQKAQVSGQGDSLHEHIANLAGSPAIKKGILQTVKV | | | | |
| | | VDELVKVMGRHKPENIVIEMARENQTTQKGQKNSRERMKRIEEGIKELGSQ | | | | |
| | | ILKEHPVENTQLQNEKLYLYYLQNGRDMYVDQELDINRLSDYDVDHIVPQSF | | | | |
| | | LKDDSIDNKVLTRSDKNRGKSDNVPSEEVVKKMKNYWRQLLNAKLITQRKF | | | | |
| | | DNLTKAERGGLSELDKAGFIKRQLVETRQITKHVAQILDSRMNTKYDENDKLI | | | | |
| | | REVKVITLKSKLVSDFRKDFQFYKVREINNYHHAHDAYLNAVVGTALIKKYPK | | | | |
| | | LESEFVYGDYKVYDVRKMIAKSEQEIGKATAKYFFYSNIMNFFKTEITLANGEI | | | | |
| | | RKRPLIETNGETGEIVWDKGRDFATVRKVLSMPQVNIVKKTEVQTGGFSKES | | | | |
| | | IRPKRNSDKLIARKKDWDPKKYGGFVSPTVAYSVLVVAKVEKGKSKKLKSVKE | | | | |
| | | LLGITIMERSSFEKNPIDFLEAKGYKEVKKDLIIKLPKYSLFELENGRKRMLASA | | | | |
| | | RFLQKGNELALPSKYVNFLYLASHYEKLKGSPEDNEQKQLFVEQHKHYLDEII | | | | |
| | | EQISEFSKRVILADANLDKVLSAYNKHRDKPIREQAENIIHLFTLTNLGAPRAF | | | | |
| | | KYFDTTIDRKVYRSTKEVLDATLIHQSITGLYETRIDLSQLGGD | | | | |
| SpyCas9- | Streptococcus | MDKKYSIGLDIGTNSVGWAVITDEYKVPSKKFKVLGNTDRHSIKKNLIGALLF | 9,010 | N863A | H840A | D10A |
| SpRY | pyogenes | DSGETAERTRLKRTARRRYTRRKNRICYLQEIFSNEMAKVDDSFFHRLEESFL | | | | |
| | | VEEDKKHERHPIFGNIVDEVAYHEKYPTIYHLRKKLVDSTDKADLRLIYLALAH | | | | |
| | | MIKFRGHFLIEGDLNPDNSDVDKLFIQLVQTYNQLFEENPINASGVDAKAILS | | | | |
| | | ARLSKSRRLENLIAQLPGEKKNGLFGNLIALSLGLTPNFKSNFDLAEDAKLQLS | | | | |
| | | KDTYDDDLDNLLAQIGDQYADLFLAAKNLSDAILLSDILRVNTEITKAPLSAS | | | | |
| | | MIKRYDEHHQDLTLLKALVRQQLPEKYKEIFFDQSKNGYAGYIDGGASQEEF | | | | |
| | | YKFIKPILEKMDGTEELLVKLNREDLLRKQRTFDNGSIPHQIHLGELHAILRRQ | | | | |
| | | EDFYPFLKDNREKIEKILTFRIPYYVGPLARGNSRFAWMTRKSEETITPWNFE | | | | |
| | | EVVDKGASAQSFIERMTNFDKNLPNEKVLPKHSLLYEYFTVYNELTKVKYVTE | | | | |
| | | GMRKPAFLSGEQKKAIVDLLFKTNRKVTVKQLKEDYFKKIECFDSVEISGVED | | | | |
| | | RFNASLGTYHDLLKIIKDKDFLDNEENEDILEDIVLTLTLFEDREMIEERLKTYA | | | | |
| | | HLFDDKVMKQLKRRRYTGWGRLSRKLINGIRDKQSGKTILDFLKSDGFANR | | | | |
| | | NFMQLIHDDSLTFKEDIQKAQVSGQGDSLHEHIANLAGSPAIKKGILQTVKV | | | | |
| | | VDELVKVMGRHKPENIVIEMARENQTTQKGQKNSRERMKRIEEGIKELGSQ | | | | |
| | | ILKEHPVENTQLQNEKLYLYYLQNGRDMYVDQELDINRLSDYDVDHIVPQSF | | | | |
| | | LKDDSIDNKVLTRSDKNRGKSDNVPSEEVVKKMKNYWRQLLNAKLITQRKF | | | | |
| | | DNLTKAERGGLSELDKAGFIKRQLVETRQITKHVAQILDSRMNTKYDENDKLI | | | | |
| | | REVKVITLKSKLVSDFRKDFQFYKVREINNYHHAHDAYLNAVVGTALIKKYPK | | | | |
| | | LESEFVYGDYKVYDVRKMIAKSEQEIGKATAKYFFYSNIMNFFKTEITLANGEI | | | | |
| | | RKRPLIETNGETGEIVWDKGRDFATVRKVLSMPQVNIVKKTEVQTGGFSKES | | | | |
| | | IRPKRNSDKLIARKKDWDPKKYGGFLWPTVAYSVLVVAKVEKGKSKKLKSVK | | | | |
| | | ELLGITIMERSSFEKNPIDFLEAKGYKEVKKDLIIKLPKYSLFELENGRKRMLAS | | | | |
| | | AKQLQKGNELALPSKYVNFLYLASHYEKLKGSPEDNEQKQLFVEQHKHYLDE | | | | |
| | | IIEQISEFSKRVILADANLDKVLSAYNKHRDKPIREQAENIIHLFTLTRLGAPRAF | | | | |
| | | KYFDTTIDPKQYRSTKEVLDATLIHQSITGLYETRIDLSQLGGD | | | | |
| St1Cas9 | Streptococcus | MSDLVLGLDIGIGSVGVGILNKVTGEIIHKNSRIFPAAQAENNLVRRTNRQG | 9,011 | N622A | H599A | D9A |
| | thermophilus | RRLARRKKHRRVRLNRLFEESGLITDFTKISINLNPYQLRVKGLTDELSNEELFI | | | | |
| | | ALKNMVKHRGISYLDDASDDGNSSVGDYAQIVKENSKQLETKTPGQIQLER | | | | |
| | | YQTYGQLRGDFTVEKDGKKHRLINVFPTSAYRSEALRILQTQQEFNPQITDEF | | | | |
| | | INRYLEILTGKRKYYHGPGNEKSRTDYGRYRTSGETLDNIFGILIGKCTFYPDEF | | | | |
| | | RAAKASYTAQEFNLLNDLNNLTVPTETKKLSKEQKNQIINYVKNEKAMGPAK | | | | |
| | | LFKYIAKLLSCDVADIKGYRIDKSGKAEIHTFEAYRKMKTLETLDIEQMDRETL | | | | |
| | | DKLAYVLTLNTEREGIQEALEHEFADGSFSQKQVDELVQFRKANSSIFGKGW | | | | |
| | | HNFSVKLMMELIPELYETSEEQMTILTRLGKQKTTSSSNKTKYIDEKLLTEEIY | | | | |
| | | NPVVAKSVRQAIKIVNAAIKEYGDFDNIVIEMARETNEDDEKKAIQKIQKAN | | | | |
| | | KDEKDAAMLKAANQYNGKAELPHSVFHGHKQLATKIRLWHQQGERCLYT | | | | |
| | | GKTISIHDLINNSNQFEVDHILPLSITFDDSLANKVLVYATANQEKGQRTPYQ | | | | |
| | | ALDSMDDAWSFRELKAFVRESKTLSNKKKEYLLTEEDISKFDVRKKFIERNLV | | | | |
| | | DTRYASRVVLNALQEHFRAHKIDTKVSVVRGQFTSQLRRHWGIEKTRDTYH | | | | |
| | | HHAVDALIIAASSQLNLWKKQKNTLVSYSEDQLLDIETGELISDDEYKESVFK | | | | |
| | | APYQHFVDTLKSKEFEDSILFSYQVDSKFNRKISDATIYATRQAKVGKDKADE | | | | |
| | | TYVLGKIKDIYTQDGYDAFMKIYKKDKSKFLMYRHDPQTFEKVIEPILENYPN | | | | |
| | | KQINEKGKEVPCNPFLKYKEEHGYIRKYSKKGNGPEIKSLKYYDSKLGNHIDIT | | | | |
| | | PKDSNNKVVLQSVSPWRADVYFNKTTGKYEILGLKYADLQFEKGTGTYKISQ | | | | |
| | | EKYNDIKKKEGVDSDSEFKFTLYKNDLLLVKDTETKEQQLFRFLSRTMPKQKH | | | | |
| | | YVELKPYDKQKFEGGEALIKVLGNVANSGQCKKGLGKSNISIYKVRTDVLGN | | | | |
| | | QHIIKNEGDKPKLDF | | | | |
| BlatCas9 | Brevibacillus | MAYTMGIDVGIASCGWAIVDLERQRIIDIGVRTFEKAENPKNGEALAVPRRE | 9,012 | N607A | H584A | D8A |
| | laterosporus | ARSSRRRLRRKKHRIERLKHMFVRNGLAVDIQHLEQTLRSQNEIDVWQLRV | | | | |
| | | DGLDRMLTQKEWLRVLIHLAQRRGFQSNRKTDGSSEDGQVLVNVTENDRL | | | | |
| | | MEEKDYRTVAEMMVKDEKFSDHKRNKNGNYHGVVSRSSLLVEIHTLFETQ | | | | |
| | | RQHHNSLASKDFELEYVNIWSAQRPVATKDQIEKMIGTCTFLPKEKRAPKAS | | | | |
| | | WHFQYFMLLQTINHIRITNVQGTRSLNKEEIEQVVNMALTKSKVSYHDTRKI | | | | |
| | | LDLSEEYQFVGLDYGKEDEKKKVESKETIIKLDDYHKLNKIFNEVELAKGETWE | | | | |
| | | ADDYDTVAYALTFFKDDEDIRDYLQNKYKDSKNRLVKNLANKEYTNELIGKV | | | | |
| | | STLSFRKVGHLSLKALRKIIPFLEQGMTYDKACQAAGFDFQGISKKKRSVVLP | | | | |
| | | VIDQISNPVVNRALTQTRKVINALIKKYGSPETIHIETARELSKTFDERKNITKD | | | | |
| | | YKENRDKNEHAKKHLSELGIINPTGLDIVKYKLWCEQQGRCMYSNQPISFER | | | | |
| | | LKESGYTEVDHIIPYSRSMNDSYNNRVLVMTRENREKGNQTPFEYMGNDT | | | | |
| | | QRWYEFEQRVTTNPQIKKEKRQNLLLKGFTNRRELEMLERNLNDTRYITKYL | | | | |
| | | SHFISTNLEFSPSDKKKKVVNTSGRITSHLRSRWGLEKNRGQNDLHHAMDAI | | | | |
| | | VIAVTSDSFIQQVTNYYKRKERRELNGDDKFPLPWKFFREEVIARLSPNPKEQ | | | | |
| | | IEALPNHFYSEDELADLQPIFVSRMPKRSITGEAHQAQFRRVVGKTKEGKNIT | | | | |
| | | AKKTALVDISYDKNGDFNMYGRETDPATYEAIKERYLEFGGNVKKAFSTDLH | | | | |
| | | KPKKDGTKGPLIKSVRIMENKTLVHPVNKGKGVVYNSSIVRTDVFQRKEKYY | | | | |
| | | LLPVYVTDVTKGKLPNKVIVAKKGYHDWIEVDDSFTFLFSLYPNDLIFIRQNPK | | | | |
| | | KKISLKKRIESHSISDSKEVQEIHAYYKGVDSSTAAIEFIIHDGSYYAKGVGVQN | | | | |
| | | LDCFEKYQVDILGNYFKVKGEKRLELETSDSNHKGKDVNSIKSTSR | | | | |
| cCas9-v16 | Staphylococcus | MKRNYILGLDIGITSVGYGIIDYETRDVIDAGVRLFKEANVENNEGRRSKRGA | 9,013 | N580A | H557A | D10A |
| | aureus | RRLKRRRRHRIQRVKKLLFDYNLLTDHSELSGINPYEARVKGLSQKLSEEEFSA | | | | |
| | | ALLHLAKRRGVHNVNEVEEDTGNELSTKEQISRNSKALEEKYVAELQLERLKK | | | | |
| | | DGEVRGSINRFKTSDYVKEAKQLLKVQKAYHQLDQSFIDTYIDLLETRRTYYE | | | | |
| | | GPGEGSPFGWKDIKEWYEMLMGHCTYFPEELRSVKYAYNADLYNALNDLN | | | | |
| | | NLVITRDENEKLEYYEKFQIIENVFKQKKKPTLKQIAKEILVNEEDIKGYRVTST | | | | |
| | | GKPEFTNLKVYHDIKDITARKEIIENAELLDQIAKILTIYQSSEDIQEELTNLNSE | | | | |
| | | LTQEEIEQISNLKGYTGTHNLSLKAINLILDELWHTNDNQIAIFNRLKLVPKKV | | | | |
| | | DLSQQKEIPTTLVDDFILSPVVKRSFIQSIKVINAIIKKYGLPNDIIIELAREKNS | | | | |
| | | KDAQKMINEMQKRNRQTNERIEEIIRTTGKENAKYLIEKIKLHDMQEGKCLYS | | | | |
| | | LEAIPLEDLLNNPFNYEVDHIIPRSVSFDNSFNNKVLVKQEENSKKGNRTPFQ | | | | |
| | | YLSSSDSKISYETFKKHILNLAKGKGRISKTKKEYLLEERDINRFSVQKDFINRNL | | | | |
| | | VDTRYATRGLMNLLRSYFRVNNLDVKVKSINGGFTSFLRRKWKFKKERNKG | | | | |
| | | YKHHAEDALIIANADFIFKEWKKLDKAKKVMENQMFEEKQAESMPEIETEQ | | | | |
| | | EYKEIFITPHQIKHIKDFKDYKYSHRVDKKPNRKLINDTLYSTRKDDKGNTLIV | | | | |
| | | NNLNGLYDKDNDKLKKLINKSPEKLLMYHHDPQTYQKLKLIMEQYGDEKNP | | | | |
| | | LYKYYEETGNYLTKYSKKDNGPVIKKIKYYGNKLNAHLDITDDYPNSRNKVVK | | | | |
| | | LSLKPYRFDVYLDNGVYKFVTVKNLDVIKKENYYEVNSKCYEEAKKLKKISNQ | | | | |
| | | AEFIASFYKNDLIKINGELYRVIGVNSDKNNLIEVNMIDITYREYLENMNDKRP | | | | |
| | | PHIIKTIASKTQSIKKYSTDILGNLYEVKSKKHPQIIKKG | | | | |
| cCas9-v17 | Staphylococcus | MKRNYILGLDIGITSVGYGIIDYETRDVIDAGVRLFKEANVENNEGRRSKRGA | 9,014 | N580A | H557A | D10A |
| | aureus | RRLKRRRRHRIQRVKKLLFDYNLLTDHSELSGINPYEARVKGLSQKLSEEEFSA | | | | |
| | | ALLHLAKRRGVHNVNEVEEDTGNELSTKEQISRNSKALEEKYVAELQLERLKK | | | | |
| | | DGEVRGSINRFKTSDYVKEAKQLLKVQKAYHQLDQSFIDTYIDLLETRRTYYE | | | | |
| | | GPGEGSPFGWKDIKEWYEMLMGHCTYFPEELRSVKYAYNADLYNALNDLN | | | | |
| | | NLVITRDENEKLEYYEKFQIIENVFKQKKKPTLKQIAKEILVNEEDIKGYRVTST | | | | |
| | | GKPEFTNLKVYHDIKDITARKEIIENAELLDQIAKILTIYQSSEDIQEELTNLNSE | | | | |
| | | LTQEEIEQISNLKGYTGTHNLSLKAINLILDELWHTNDNQIAIFNRLKLVPKKV | | | | |
| | | DLSQQKEIPTTLVDDFILSPVVKRSFIQSIKVINAIIKKYGLPNDIIIELAREKNS | | | | |
| | | KDAQKMINEMQKRNRQTNERIEEIIRTTGKENAKYLIEKIKLHDMQEGKCLYS | | | | |
| | | LEAIPLEDLLNNPFNYEVDHIIPRSVSFDNSFNNKVLVKQEENSKKGNRTPFQ | | | | |
| | | YLSSSDSKISYETFKKHILNLAKGKGRISKTKKEYLLEERDINRFSVQKDFINRNL | | | | |
| | | VDTRYATRGLMNLLRSYFRVNNLDVKVKSINGGFTSFLRRKWKFKKERNKG | | | | |
| | | YKHHAEDALIIANADFIFKEWKKLDKAKKVMENQMFEEKQAESMPEIETEQ | | | | |
| | | EYKEIFITPHQIKHIKDFKDYKYSHRVDKKPNRKLINDTLYSTRKDDKGNTLIV | | | | |
| | | NNLNGLYDKDNDKLKKLINKSPEKLLMYHHDPQTYQKLKLIMEQYGDEKNP | | | | |
| | | LYKYYEETGNYLTKYSKKDNGPVIKKIKYYGNKLNAHLDITDDYPNSRNKVVK | | | | |
| | | LSLKPYRFDVYLDNGVYKFVTVKNLDVIKKENYYEVNSKCYEEAKKLKKISNQ | | | | |
| | | AEFIASFYKNDLIKINGELYRVIGVNNSTRNIVELNMIDITYREYLENMNDKRP | | | | |
| | | PHIIKTIASKTQSIKKYSTDILGNLYEVKSKKHPQIIKKG | | | | |
| cCas9-v21 | Staphylococcus | MKRNYILGLDIGITSVGYGIIDYETRDVIDAGVRLFKEANVENNEGRRSKRGA | 9,015 | N580A | H557A | D10A |
| | aureus | RRLKRRRRHRIQRVKKLLFDYNLLTDHSELSGINPYEARVKGLSQKLSEEEFSA | | | | |
| | | ALLHLAKRRGVHNVNEVEEDTGNELSTKEQISRNSKALEEKYVAELQLERLKK | | | | |
| | | DGEVRGSINRFKTSDYVKEAKQLLKVQKAYHQLDQSFIDTYIDLLETRRTYYE | | | | |
| | | GPGEGSPFGWKDIKEWYEMLMGHCTYFPEELRSVKYAYNADLYNALNDLN | | | | |
| | | NLVITRDENEKLEYYEKFQIIENVFKQKKKPTLKQIAKEILVNEEDIKGYRVTST | | | | |
| | | GKPEFTNLKVYHDIKDITARKEIIENAELLDQIAKILTIYQSSEDIQEELTNLNSE | | | | |
| | | LTQEEIEQISNLKGYTGTHNLSLKAINLILDELWHTNDNQIAIFNRLKLVPKKV | | | | |
| | | DLSQQKEIPTTLVDDFILSPVVKRSFIQSIKVINAIIKKYGLPNDIIIELAREKNS | | | | |
| | | KDAQKMINEMQKRNRQTNERIEEIIRTTGKENAKYLIEKIKLHDMQEGKCLYS | | | | |
| | | LEAIPLEDLLNNPFNYEVDHIIPRSVSFDNSFNNKVLVKQEENSKKGNRTPFQ | | | | |
| | | YLSSSDSKISYETFKKHILNLAKGKGRISKTKKEYLLEERDINRFSVQKDFINRNL | | | | |
| | | VDTRYATRGLMNLLRSYFRVNNLDVKVKSINGGFTSFLRRKWKFKKERNKG | | | | |
| | | YKHHAEDALIIANADFIFKEWKKLDKAKKVMENQMFEEKQAESMPEIETEQ | | | | |
| | | EYKEIFITPHQIKHIKDFKDYKYSHRVDKKPNRKLINDTLYSTRKDDKGNTLIV | | | | |
| | | NNLNGLYDKDNDKLKKLINKSPEKLLMYHHDPQTYQKLKLIMEQYGDEKNP | | | | |
| | | LYKYYEETGNYLTKYSKKDNGPVIKKIKYYGNKLNAHLDITDDYPNSRNKVVK | | | | |
| | | LSLKPYRFDVYLDNGVYKFVTVKNLDVIKKENYYEVNSKCYEEAKKLKKISNQ | | | | |
| | | AEFIASFYKNDLIKINGELYRVIGVNSDDRNIIELNMIDITYREYLENMNDKRP | | | | |
| | | PHIIKTIASKTQSIKKYSTDILGNLYEVKSKKHPQIIKKG | | | | |
| cCas9-v42 | Staphylococcus | MKRNYILGLDIGITSVGYGIIDYETRDVIDAGVRLFKEANVENNEGRRSKRGA | 9,016 | N580A | H557A | D10A |
| | aureus | RRLKRRRRHRIQRVKKLLFDYNLLTDHSELSGINPYEARVKGLSQKLSEEEFSA | | | | |
| | | ALLHLAKRRGVHNVNEVEEDTGNELSTKEQISRNSKALEEKYVAELQLERLKK | | | | |
| | | DGEVRGSINRFKTSDYVKEAKQLLKVQKAYHQLDQSFIDTYIDLLETRRTYYE | | | | |
| | | GPGEGSPFGWKDIKEWYEMLMGHCTYFPEELRSVKYAYNADLYNALNDLN | | | | |
| | | NLVITRDENEKLEYYEKFQIIENVFKQKKKPTLKQIAKEILVNEEDIKGYRVTST | | | | |
| | | GKPEFTNLKVYHDIKDITARKEIIENAELLDQIAKILTIYQSSEDIQEELTNLNSE | | | | |
| | | LTQEEIEQISNLKGYTGTHNLSLKAINLILDELWHTNDNQIAIFNRLKLVPKKV | | | | |
| | | DLSQQKEIPTTLVDDFILSPVVKRSFIQSIKVINAIIKKYGLPNDIIIELAREKNS | | | | |
| | | KDAQKMINEMQKRNRQTNERIEEIIRTTGKENAKYLIEKIKLHDMQEGKCLYS | | | | |
| | | LEAIPLEDLLNNPFNYEVDHIIPRSVSFDNSFNNKVLVKQEENSKKGNRTPFQ | | | | |
| | | YLSSSDSKISYETFKKHILNLAKGKGRISKTKKEYLLEERDINRFSVQKDFINRNL | | | | |
| | | VDTRYATRGLMNLLRSYFRVNNLDVKVKSINGGFTSFLRRKWKFKKERNKG | | | | |
| | | YKHHAEDALIIANADFIFKEWKKLDKAKKVMENQMFEEKQAESMPEIETEQ | | | | |
| | | EYKEIFITPHQIKHIKDFKDYKYSHRVDKKPNRKLINDTLYSTRKDDKGNTLIV | | | | |
| | | NNLNGLYDKDNDKLKKLINKSPEKLLMYHHDPQTYQKLKLIMEQYGDEKNP | | | | |
| | | LYKYYEETGNYLTKYSKKDNGPVIKKIKYYGNKLNAHLDITDDYPNSRNKVVK | | | | |
| | | LSLKPYRFDVYLDNGVYKFVTVKNLDVIKKENYYEVNSKCYEEAKKLKKISNQ | | | | |
| | | AEFIASFYKNDLIKINGELYRVIGVNNNRLNKIELNMIDITYREYLENMNDKRP | | | | |
| | | PHIIKTIASKTQSIKKYSTDILGNLYEVKSKKHPQIIKKG | | | | |
| CdiCas9 | Corynebac- | MKYHVGIDVGTFSVGLAAIEVDDAGMPIKTLSLVSHIHDSGLDPDEIKSAVT | 9,017 | N597A | H573A | D8A |
| | terium | RLASSGIARRTRRLYRRKRRRLQQLDKFIQRQGWPVIELEDYSDPLYPWKVR | | | | |
| | diphtheriae | AELAASYIADEKERGEKLSVALRHIARHRGWRNPYAKVSSLYLPDGPSDAFK | | | | |
| | | AIREEIKRASGQPVPETATVGQMVTLCELGTLKLRGEGGVLSARLQQSDYAR | | | | |
| | | EIQEICRMQEIGQELYRKIIDVVFAAESPKGSASSRVGKDPLQPGKNRALKAS | | | | |
| | | DAFQRYRIAALIGNLRVRVDGEKRILSVEEKNLVFDHLVNLTPKKEPEWVTIA | | | | |
| | | EILGIDRGQLIGTATMTDDGERAGARPPTHDTNRSIVNSRIAPLVDWWKTA | | | | |
| | | SALEQHAMVKALSNAEVDDFDSPEGAKVQAFFADLDDDVHAKLDSLHLPV | | | | |
| | | GRAAYSEDTLVRLTRRMLSDGVDLYTARLQEFGIEPSWTPPTPRIGEPVGNP | | | | |
| | | AVDRVLKTVSRWLESATKTWGAPERVIIEHVREGFVTEKRAREMDGDMRR | | | | |
| | | RAARNAKLFQEMQEKLNVQGKPSRADLWRYQSVQRQNCQCAYCGSPITF | | | | |
| | | SNSEMDHIVPRAGQGSTNTRENLVAVCHRCNQSKGNTPFAIWAKNTSIEG | | | | |
| | | VSVKEAVERTRHWVTDTGMRSTDFKKFTKAVVERFQRATMDEEIDARSME | | | | |
| | | SVAWMANELRSRVAQHFASHGTTVRVYRGSLTAEARRASGISGKLKFFDGV | | | | |
| | | GKSRLDRRHHAIDAAVIAFTSDYVAETLAVRSNLKQSQAHRQEAPQWREFT | | | | |
| | | GKDAEHRAAWRVWCQKMEKLSALLTEDLRDDRVVVMSNVRLRLGNGSA | | | | |
| | | HKETIGKLSKVKLSSQLSVSDIDKASSEALWCALTREPGFDPKEGLPANPERHI | | | | |
| | | RVNGTHVYAGDNIGLFPVSAGSIALRGGYAELGSSFHHARVYKITSGKKPAF | | | | |
| | | AMLRVYTIDLLPYRNQDLFSVELKPQTMSMRQAEKKLRDALATGNAEYLG | | | | |
| | | WLVVDDELVVDTSKIATDQVKAVEAELGTIRRWRVDGFFSPSKLRLRPLQM | | | | |
| | | SKEGIKKESAPELSKIIDRPGWLPAVNKLFSDGNVTVVRRDSLGRVRLESTAH | | | | |
| | | LPVTWKVQ | | | | |
| CjeCas9 | Campylobacter | MARILAFDIGISSIGWAFSENDELKDCGVRIFTKVENPKTGESLALPRRLARSA | 9,018 | N582A | H559A | D8A |
| | jejuni | RKRLARRKARLNHLKHLIANEFKLNYEDYQSFDESLAKAYKGSLISPYELRFRA | | | | |
| | | LNELLSKQDFARVILHIAKRRGYDDIKNSDDKEKGAILKAIKQNEEKLANYQS | | | | |
| | | VGEYLYKEYFQKFKENSKEFTNVRNKKESYERCIAQSFLKDELKLIFKKQREFG | | | | |
| | | FSFSKKFEEEVLSVAFYKRALKDFSHLVGNCSFFTDEKRAPKNSPLAFMFVAL | | | | |
| | | TRIINLLNNLKNTEGILYTKDDLNALLNEVLKNGTLTYKQTKKLLGLSDDYEFK | | | | |
| | | GEKGTYFIEFKKYKEFIKALGEHNLSQDDLNEIAKDITLIKDEIKLKKALAKYDLN | | | | |
| | | QNQIDSLSKLEFKDHLNISFKALKLVTPLMLEGKKYDEACNELNLKVAINEDK | | | | |
| | | KDFLPAFNETYYKDEVTNPVVLRAIKEYRKVLNALLKKYGKVHKINIELAREVG | | | | |
| | | KNHSQRAKIEKEQNENYKAKKDAELECEKLGLKINSKNILKLRLFKEQKEFCAY | | | | |
| | | SGEKIKISDLQDEKMLEIDHIYPYSRSFDDSYMNKVLVFTKQNQEKLNQTPFE | | | | |
| | | AFGNDSAKWQKIEVLAKNLPTKKQKRILDKNYKDKEQKNFKDRNLNDTRYI | | | | |
| | | ARLVLNYTKDYLDFLPLSDDENTKLNDTQKGSKVHVEAKSGMLTSALRHTW | | | | |
| | | GFSAKDRNNHLHHAIDAVIIAYANNSIVKAFSDFKKEQESNSAELYAKKISELD | | | | |
| | | YKNKRKFFEPFSGFRQKVLDKIDEIFVSKPERKKPSGALHEETFRKEEEFYQSY | | | | |
| | | GGKEGVLKALELGKIRKVNGKIVKNGDMFRVDIFKHKKTNKFYAVPIYTMDF | | | | |
| | | ALKVLPNKAVARSKKGEIKDWILMDENYEFCFSLYKDSLILIQTKDMQEPEFV | | | | |
| | | YYNAFTSSTVSLIVSKHDNKFETLSKNQKILFKNANEKEVIAKSIGIQNLKVFEK | | | | |
| | | YIVSALGEVTKAEFRQREDFKK | | | | |
| GeoCas9 | Geobacillus | MRYKIGLDIGITSVGWAVMNLDIPRIEDLGVRIFDRAENPQTGESLALPRRLA | 9,019 | N605A | H582A | D8A |
| | stearothermo- | RSARRRLRRRKHRLERIRRLVIREGILTKEELDKLFEEKHEIDVWQLRVEALDR | | | | |
| | philus | KLNNDELARVLLHLAKRRGFKSNRKSERSNKENSTMLKHIEENRAILSSYRTV | | | | |
| | | GEMIVKDPKFALHKRNKGENYTNTIARDDLEREIRLIFSKQREFGNMSCTEEF | | | | |
| | | ENEYITIWASQRPVASKDDIEKKVGFCTFEPKEKRAPKATYTFQSFIAWEHIN | | | | |
| | | KLRLISPSGARGLTDEERRLLYEQAFQKNKITYHDIRTLLHLPDDTYFKGIVYDR | | | | |
| | | GESRKQNENIRFLELDAYHQIRKAVDKVYGKGKSSSFLPIDFDTFGYALTLFKD | | | | |
| | | DADIHSYLRNEYEQNGKRMPNLANKVYDNELIEELLNLSFTKFGHLSLKALRS | | | | |
| | | ILPYMEQGEVYSSACERAGYTFTGPKKKQKTMLLPNIPPIANPVVMRALTQA | | | | |
| | | RKVVNAIIKKYGSPVSIHIELARDLSQTFDERRKTKKEQDENRKKNETAIRQL | | | | |
| | | MEYGLTLNPTGHDIVKFKLWSEQNGRCAYSLQPIEIERLLEPGYVEVDHVIPY | | | | |
| | | SRSLDDSYTNKVLVLTRENREKGNRIPAEYLGVGTERWQQFETFVLTNKQFS | | | | |
| | | KKKRDRLLRLHYDENEETEFKNRNLNDTRYISRFFANFIREHLKFAESDDKQK | | | | |
| | | VYTVNGRVTAHLRSRWEFNKNREESDLHHAVDAVIVACTTPSDIAKVTAFY | | | | |
| | | QRREQNKELAKKTEPHFPQPWPHFADELRARLSKHPKESIKALNLGNYDDQ | | | | |
| | | KLESLQPVFVSRMPKRSVTGAAHQETLRRYVGIDERSGKIQTVVKTKLSEIKL | | | | |
| | | DASGHFPMYGKESDPRTYEAIRQRLLEHNNDPKKAFQEPLYKPKKNGEPGP | | | | |
| | | VIRTVKIIDTKNQVIPLNDGKTVAYNSNIVRVDVFEKDGKYYCVPVYTMDIM | | | | |
| | | KGILPNKAIEPNKPYSEWKEMTEDYTFRFSLYPNDLIRIELPREKTVKTAAGEE | | | | |
| | | INVKDVFVYYKTIDSANGGLELISHDHRFSLRGVGSRTLKRFEKYQVDVLGNI | | | | |
| | | YKVRGEKRVGLASSAHSKPGKTIRPLQSTRD | | | | |
| iSpyMac | Streptococcus | MDKKYSIGLDIGTNSVGWAVITDEYKVPSKKFKVLGNTDRHSIKKNLIGALLF | 9,020 | N863A | H840A | D10A |
| Cas9 | spp. | DSGETAEATRLKRTARRRYTRRKNRICYLQEIFSNEMAKVDDSFFHRLEESFL | | | | |
| | | VEEDKKHERHPIFGNIVDEVAYHEKYPTIYHLRKKLVDSTDKADLRLIYLALAH | | | | |
| | | MIKFRGHFLIEGDLNPDNSDVDKLFIQLVQTYNQLFEENPINASGVDAKAILS | | | | |
| | | ARLSKSRKLENLIAQLPGEKKNGLFGNLIALSLGLTPNFKSNFDLAEDAKLQLS | | | | |
| | | KDTYDDDLDNLLAQIGDQYADLFLAAKNLSDAILLSDILRVNTEITKAPLSAS | | | | |
| | | MIKRYDEHHQDLTLLKALVRQQLPEKYKEIFFDQSKNGYAGYIDGGASQEEF | | | | |
| | | YKFIKPILEKMDGTEELLVKLKREDLLRKQRTFDNGSIPHQIHLGELHAILRRQ | | | | |
| | | EDFYPFLKDNREKIEKILTFRIPYYVGPLARGNSRFAWMTRKSEETITPWNFE | | | | |
| | | EVVDKGASAQSFIERMTNFDKNLPNEKVLPKHSLLYEYFTVYNELTKVKYVTE | | | | |
| | | GMRKPAFLSGEQKKAIVDLLFKTNRKVTVKQLKEDYFKKIECFDSVEISGVED | | | | |
| | | RFNASLGTYHDLLKIIKDKDFLDNEENEDILEDIVLTLTLFEDREMIEERLKTYA | | | | |
| | | HLFDDKVMKQLKRRRYTGWGRLSRKLINGIRDKQSGKTILDFLKSDGFANR | | | | |
| | | NFMQLIHDDSLTFKEDIQKAQVSGQGDSLHEHIANLAGSPAIKKGILQTVKV | | | | |
| | | VDELVKVMGRHKPENIVIEMARENQTTQKGQKNSRERMKRIEEGIKELGSQ | | | | |
| | | ILKEHPVENTQLQNEKLYLYYLQNGRDMYVDQELDINRLSDYDVDHIVPQSF | | | | |
| | | LKDDSIDNKVLTRSDKNRGKSDNVPSEEVVKKMKNYWRQLLNAKLITQRKF | | | | |
| | | DNLTKAERGGLSELDKAGFIKRQLVETRQITKHVAQILDSRMNTKYDENDKLI | | | | |
| | | REVKVITLKSKLVSDFRKDFQFYKVREINNYHHAHDAYLNAVVGTALIKKYPK | | | | |
| | | LESEFVYGDYKVYDVRKMIAKSEQEIGKATAKYFFYSNIMNFFKTEITLANGEI | | | | |
| | | RKRPLIETNGETGEIVWDKGRDFATVRKVLSMPQVNIVKKTEIQTVGQNGG | | | | |
| | | LFDDNPKSPLEVTPSKLVPLKKELNPKKYGGYQKPTTAYPVLLITDTKQLIPISV | | | | |
| | | MNKKQFEQNPVKFLRDRGYQQVGKNDFIKLPKYTLVDIGDGIKRLWASSKEI | | | | |
| | | HKGNQLVVSKKSQILLYHAHHLDSDLSNDYLQNHNQQFDVLFNEIISFSKKC | | | | |
| | | KLGKEHIQKIENVYSNKKNSASIEELAESFIKLLGFTQLGATSPFNFLGVKLNQ | | | | |
| | | KQYKGKKDYILPCTEGTLIRQSITGLYETRVDLSKIGEDSGGSGGSKRTADGSE | | | | |
| | | FES | | | | |
| NmeCas9 | Neisseria | MAAFKPNSINYILGLDIGIASVGWAMVEIDEEENPIRLIDLGVRVFERAEVPK | 9,021 | N611A | H588A | D16A |
| | meningitidis | TGDSLAMARRLARSVRRLTRRRAHRLLRTRRLLKREGVLQAANFDENGLIKS | | | | |
| | | LPNTPWQLRAAALDRKLTPLEWSAVLLHLIKHRGYLSQRKNEGETADKELG | | | | |
| | | ALLKGVAGNAHALQTGDFRTPAELALNKFEKESGHIRNQRSDYSHTFSRKDL | | | | |
| | | QAELILLFEKQKEFGNPHVSGGLKEGIETLLMTQRPALSGDAVQKMLGHCTF | | | | |
| | | EPAEPKAAKNTYTAERFIWLTKLNNLRILEQGSERPLTDTERATLMDEPYRKS | | | | |
| | | KLTYAQARKLLGLEDTAFFKGLRYGKDNAEASTLMEMKAYHAISRALEKEGL | | | | |
| | | KDKKSPLNLSPELQDEIGTAFSLFKTDEDITGRLKDRIQPEILEALLKHISFDKFV | | | | |
| | | QISLKALRRIVPLMEQGKRYDEACAEIYGDHYGKKNTEEKIYLPPIPADEIRNP | | | | |
| | | VVLRALSQARKVINGVVRRYGSPARIHIETAREVGKSFKDRKEIEKRQEENRK | | | | |
| | | DREKAAAKFREYFPNFVGEPKSKDILKLRLYEQQHGKCLYSGKEINLGRLNEK | | | | |
| | | GYVEIDHALPFSRTWDDSFNNKVLVLGSENQNKGNQTPYEYFNGKDNSRE | | | | |
| | | WQEFKARVETSRFPRSKKQRILLQKFDEDGFKERNLNDTRYVNRFLCQFVA | | | | |
| | | DRMRLTGKGKKRVFASNGQITNLLRGFWGLRKVRAENDRHHALDAVVVA | | | | |
| | | CSTVAMQQKITRFVRYKEMNAFDGKTIDKETGEVLHQKTHFPQPWEFFAQ | | | | |
| | | EVMIRVFGKPDGKPEFEEADTLEKLRTLLAEKLSSRPEAVHEYVTPLFVSRAP | | | | |
| | | NRKMSGQGHMETVKSAKRLDEGVSVLRVPLTQLKLKDLEKMVNREREPKL | | | | |
| | | YEALKARLEAHKDDPAKAFAEPFYKYDKAGNRTQQVKAVRVEQVQKTGVW | | | | |
| | | VRNHNGIADNATMVRVDVFEKGDKYYLVPIYSWQVAKGILPDRAVVQGKD | | | | |
| | | EEDWQLIDDSFNFKFSLHPNDLVEVITKKARMFGYFASCHRGTGNINIRIHD | | | | |
| | | LDHKIGKNGILEGIGVKTALSFQKYQIDELGKEIRPCRLKKRPPVR | | | | |
| ScaCas9 | Streptococcus | MEKKYSIGLDIGTNSVGWAVITDDYKVPSKKFKVLGNTNRKSIKKNLMGALL | 9,022 | N872A | H849A | D10A |
| | canis | FDSGETAEATRLKRTARRRYTRRKNRIRYLQEIFANEMAKLDDSFFQRLEESF | | | | |
| | | LVEEDKKNERHPIFGNLADEVAYHRNYPTIYHLRKKLADSPEKADLRLIYLALA | | | | |
| | | HIIKFRGHFLIEGKLNAENSDVAKLFYQLIQTYNQLFEESPLDEIEVDAKGILSA | | | | |
| | | RLSKSKRLEKLIAVFPNEKKNGLFGNIIALALGLTPNFKSNFDLTEDAKLQLSKD | | | | |
| | | TYDDDLDELLGQIGDQYADLFSAAKNLSDAILLSDILRSNSEVTKAPLSASMV | | | | |
| | | KRYDEHHQDLALLKTLVRQQFPEKYAEIFKDDTKNGYAGYVGIGIKHRKRTT | | | | |
| | | KLATQEEFYKFIKPILEKMDGAEELLAKLNRDDLLRKQRTFDNGSIPHQIHLKE | | | | |
| | | LHAILRRQEEFYPFLKENREKIEKILTFRIPYYVGPLARGNSRFAWLTRKSEEAI | | | | |
| | | TPWNFEEVVDKGASAQSFIERMTNFDEQLPNKKVLPKHSLLYEYFTVYNELT | | | | |
| | | KVKYVTERMRKPEFLSGEQKKAIVDLLFKTNRKVTVKQLKEDYFKKIECFDSV | | | | |
| | | EIIGVEDRFNASLGTYHDLLKIIKDKDFLDNEENEDILEDIVLTLTLFEDREMIEE | | | | |
| | | RLKTYAHLFDDKVMKQLKRRHYTGWGRLSRKMINGIRDKQSGKTILDFLKS | | | | |
| | | DGFSNRNFMQLIHDDSLTFKEEIEKAQVSGQGDSLHEQIADLAGSPAIKKGIL | | | | |
| | | QTVKIVDELVKVMGHKPENIVIEMARENQTTTKGLQQSRERKKRIEEGIKELE | | | | |
| | | SQILKENPVENTQLQNEKLYLYYLQNGRDMYVDQELDINRLSDYDVDHIVP | | | | |
| | | QSFIKDDSIDNKVLTRSVENRGKSDNVPSEEVVKKMKNYWRQLLNAKLITQ | | | | |
| | | RKFDNLTKAERGGLSEADKAGFIKRQLVETRQITKHVARILDSRMNTKRDKN | | | | |
| | | DKPIREVKVITLKSKLVSDFRKDFQLYKVRDINNYHHAHDAYLNAVVGTALIK | | | | |
| | | KYPKLESEFVYGDYKVYDVRKMIAKSEQEIGKATAKRFFYSNIMNFFKTEVKL | | | | |
| | | ANGEIRKRPLIETNGETGEVVWNKEKDFATVRKVLAMPQVNIVKKTEVQTG | | | | |
| | | GFSKESILSKRESAKLIPRKKGWDTRKYGGFGSPTVAYSILVVAKVEKGKAKKL | | | | |
| | | KSVKVLVGITIMEKGSYEKDPIGFLEAKGYKDIKKELIFKLPKYSLFELENGRRR | | | | |
| | | MLASATELQKANELVLPQHLVRLLYYTQNISATTGSNNLGYIEQHREEFKEIF | | | | |
| | | EKIIDFSEKYILKNKVNSNLKSSFDEQFAVSDSILLSNSFVSLLKYTSFGASGGFT | | | | |
| | | FLDLDVKQGRLRYQTVTEVLDATLIYQSITGLYETRTDLSQLGGD | | | | |
| ScaCas9- | Streptococcus | MEKKYSIGLDIGTNSVGWAVITDDYKVPSKKFKVLGNTNRKSIKKNLMGALL | 9,023 | N872A | H849A | D10A |
| HiFi-Sc++ | canis | FDSGETAEATRLKRTARRRYTRRKNRIRYLQEIFANEMAKLDDSFFQRLEESF | | | | |
| | | LVEEDKKNERHPIFGNLADEVAYHRNYPTIYHLRKKLADSPEKADLRLIYLALA | | | | |
| | | HIIKFRGHFLIEGKLNAENSDVAKLFYQLIQTYNQLFEESPLDEIEVDAKGILSA | | | | |
| | | RLSKSKRLEKLIAVFPNEKKNGLFGNIIALALGLTPNFKSNFDLTEDAKLQLSKD | | | | |
| | | TYDDDLDELLGQIGDQYADLFSAAKNLSDAILLSDILRSNSEVTKAPLSASMV | | | | |
| | | KRYDEHHQDLALLKTLVRQQFPEKYAEIFKDDTKNGYAGYVGADKKLRKRS | | | | |
| | | GKLATEEEFYKFIKPILEKMDGAEELLAKLNRDDLLRKQRTFDNGSIPHQIHLK | | | | |
| | | ELHAILRRQEEFYPFLKENREKIEKILTFRIPYYVGPLARGNSRFAWLTRKSEEA | | | | |
| | | ITPWNFEEVVDKGASAQSFIERMTNFDEQLPNKKVLPKHSLLYEYFTVYNEL | | | | |
| | | TKVKYVTERMRKPEFLSGEQKKAIVDLLFKTNRKVTVKQLKEDYFKKIECFDS | | | | |
| | | VEIIGVEDRFNASLGTYHDLLKIIKDKDFLDNEENEDILEDIVLTLTLFEDREMIE | | | | |
| | | ERLKTYAHLFDDKVMKQLKRRHYTGWGRLSRKMINGIRDKQSGKTILDFLKS | | | | |
| | | DGFSNANFMQLIHDDSLTFKEEIEKAQVSGQGDSLHEQIADLAGSPAIKKGIL | | | | |
| | | QTVKIVDELVKVMGHKPENIVIEMARENQTTTKGLQQSRERKKRIEEGIKELE | | | | |
| | | SQILKENPVENTQLQNEKLYLYYLQNGRDMYVDQELDINRLSDYDVDHIVP | | | | |
| | | QSFIKDDSIDNKVLTRSVENRGKSDNVPSEEVVKKMKNYWRQLLNAKLITQ | | | | |
| | | RKFDNLTKAERGGLSEADKAGFIKRQLVETRQITKHVARILDSRMNTKRDKN | | | | |
| | | DKPIREVKVITLKSKLVSDFRKDFQLYKVRDINNYHHAHDAYLNAVVGTALIK | | | | |
| | | KYPKLESEFVYGDYKVYDVRKMIAKSEQEIGKATAKRFFYSNIMNFFKTEVKL | | | | |
| | | ANGEIRKRPLIETNGETGEVVWNKEKDFATVRKVLAMPQVNIVKKTEVQTG | | | | |
| | | GFSKESILSKRESAKLIPRKKGWDTRKYGGFGSPTVAYSILVVAKVEKGKAKKL | | | | |
| | | KSVKVLVGITIMEKGSYEKDPIGFLEAKGYKDIKKELIFKLPKYSLFELENGRRR | | | | |
| | | MLASAKELQKANELVLPQHLVRLLYYTQNISATTGSNNLGYIEQHREEFKEIF | | | | |
| | | EKIIDFSEKYILKNKVNSNLKSSFDEQFAVSDSILLSNSFVSLLKYTSFGASGGFT | | | | |
| | | FLDLDVKQGRLRYQTVTEVLDATLIYQSITGLYETRTDLSQLGGD | | | | |
| SpyCas9- | Streptococcus | MDKKYSIGLDIGTNSVGWAVITDEYKVPSKKFKVLGNTDRHSIKKNLIGALLF | 9,024 | N863A | H840A | D10A |
| 3var-NRRH | pyogenes | DSGETAEATRLKRTARRRYTRRKNRICYLQEIFSNEMAKVDDSFFHRLEESFL | | | | |
| | | VEEDKKHERHPIFGNIVDEVAYHEKYPTIYHLRKKLVDSTDKADLRLIYLALAH | | | | |
| | | MIKFRGHFLIEGDLNPDNSDVDKLFIQLVQTYNQLFEENPINASGVDAKAILS | | | | |
| | | ARLSKSRRLENLIAQLPGEKKNGLFGNLIALSLGLTPNFKSNFDLAEDAKLQLS | | | | |
| | | KDTYDDDLDNLLAQIGDQYADLFLAAKNLSDAILLSDILRVNTEITKAPLSAS | | | | |
| | | MVKRYDEHHQDLTLLKALVRQQLPEKYKEIFFDQSKNGYAGYIDGGASQEE | | | | |
| | | FYKFIKPILEKMDGTEELLVKLNREDLLRKQRTFDNGIIPHQIHLGELHAILRRQ | | | | |
| | | GDFYPFLKDNREKIEKILTFRIPYYVGPLARGNSRFAWMTRKSEETITPWNFE | | | | |
| | | EVVDKGASAQSFIERMTNFDKNLPNEKVLPKHSLLYEYFTVYNELTKVKYVTE | | | | |
| | | GMRKPAFLSGEQKKAIVDLLFKTNRKVTVKQLKEDYFKKIECFDSVEISGVED | | | | |
| | | RFNASLGTYHDLLKIIKDKDFLDNEENEDILEDIVLTLTLFEDREMIEERLKTYA | | | | |
| | | HLFDDKVMKQLKRLRYTGWGRLSRKLINGIRDKQSGKTILDFLKSDGFANRN | | | | |
| | | FMQLIHDDSLTFKEDIQKAQVSGQGDSLHEHIANLAGSPAIKKGILQTVKVV | | | | |
| | | DELVKVMGGHKPENIVIEMARENQTTQKGQKNSRERMKRIEEGIKELGSQI | | | | |
| | | LKEHPVENTQLQNEKLYLYYLQNGRDMYVDQELDINRLSDYDVDHIVPQSF | | | | |
| | | LKDDSIDNKVLTRSDKNRGKSDNVPSEEVVKKMKNYWRQLLNAKLITQRKF | | | | |
| | | DNLTKAERGGLSELDKAGFIKRQLVETRQITKHVAQILDSRMNTKYDENDKLI | | | | |
| | | REVKVITLKSKLVSDFRKDFQFYKVREINNYHHAHDAYLNAVVGTALIKKYPK | | | | |
| | | LESEFVYGDYKVYDVRKMIAKSEQEIGKATAKYFFYSNIMNFFKTEITLANGEI | | | | |
| | | RKRPLIETNGETGEIVWDKGRDFATVRKVLSMPQVNIVKKTEVQTGGFSKES | | | | |
| | | ILPKGNSDKLIARKKDWDPKKYGGFNSPTAAYSVLVVAKVEKGKSKKLKSVK | | | | |
| | | ELLGITIMERSSFEKNPIGFLEAKGYKEVKKDLIIKLPKYSLFELENGRKRMLAS | | | | |
| | | AGVLHKGNELALPSKYVNFLYLASHYEKLKGSPEDNEQKQLFVEQHKHYLDE | | | | |
| | | IIEQISEFSKRVILADANLDKVLSAYNKHRDKPIREQAENIIHLFTLTNLGVPAA | | | | |
| | | FKYFDTTIDKKRYTSTKEVLDATLIHQSITGLYETRIDLSQLGGD | | | | |
| SpyCas9- | Streptococcus | MDKKYSIGLDIGTNSVGWAVITDEYKVPSKKFKVLGNTDRHSIKKNLIGALLF | 9,025 | N863A | H840A | D10A |
| 3var-NRTH | pyogenes | DSGETAEATRLKRTARRRYTRRKNRICYLQEIFSNEMAKVDDSFFHRLEESFL | | | | |
| | | VEEDKKHERHPIFGNIVDEVAYHEKYPTIYHLRKKLVDSTDKADLRLIYLALAH | | | | |
| | | MIKFRGHFLIEGDLNPDNSDVDKLFIQLVQTYNQLFEENPINASGVDAKAILS | | | | |
| | | ARLSKSRRLENLIAQLPGEKKNGLFGNLIALSLGLTPNFKSNFDLAEDAKLQLS | | | | |
| | | KDTYDDDLDNLLAQIGDQYADLFLAAKNLSDAILLSDILRVNTEITKAPLSAS | | | | |
| | | MVKRYDEHHQDLTLLKALVRQQLPEKYKEIFFDQSKNGYAGYIDGGASQEE | | | | |
| | | FYKFIKPILEKMDGTEELLVKLNREDLLRKQRTFDNGIIPHQIHLGELHAILRRQ | | | | |
| | | GDFYPFLKDNREKIEKILTFRIPYYVGPLARGNSRFAWMTRKSEETITPWNFE | | | | |
| | | EVVDKGASAQSFIERMTNFDKNLPNEKVLPKHSLLYEYFTVYNELTKVKYVTE | | | | |
| | | GMRKPAFLSGEQKKAIVDLLFKTNRKVTVKQLKEDYFKKIECFDSVEISGVED | | | | |
| | | RFNASLGTYHDLLKIIKDKDFLDNEENEDILEDIVLTLTLFEDREMIEERLKTYA | | | | |
| | | HLFDDKVMKQLKRLRYTGWGRLSRKLINGIRDKQSGKTILDFLKSDGFANRN | | | | |
| | | FMQLIHDDSLTFKEDIQKAQVSGQGDSLHEHIANLAGSPAIKKGILQTVKVV | | | | |
| | | DELVKVMGGHKPENIVIEMARENQTTQKGQKNSRERMKRIEEGIKELGSQI | | | | |
| | | LKEHPVENTQLQNEKLYLYYLQNGRDMYVDQELDINRLSDYDVDHIVPQSF | | | | |
| | | LKDDSIDNKVLTRSDKNRGKSDNVPSEEVVKKMKNYWRQLLNAKLITQRKF | | | | |
| | | DNLTKAERGGLSELDKAGFIKRQLVETRQITKHVAQILDSRMNTKYDENDKLI | | | | |
| | | REVKVITLKSKLVSDFRKDFQFYKVREINNYHHAHDAYLNAVVGTALIKKYPK | | | | |
| | | LESEFVYGDYKVYDVRKMIAKSEQEIGKATAKYFFYSNIMNFFKTEITLANGEI | | | | |
| | | RKRPLIETNGETGEIVWDKGRDFATVRKVLSMPQVNIVKKTEVQTGGFSKES | | | | |
| | | ILPKGNSDKLIARKKDWDPKKYGGFNSPTVAYSVLVVAKVEKGKSKKLKSVK | | | | |
| | | ELLGITIMERSSFEKNPIGFLEAKGYKEVKKDLIIKLPKYSLFELENGRKRMLAS | | | | |
| | | ASVLHKGNELALPSKYVNFLYLASHYEKLKGSSEDNKQKQLFVEQHKHYLDEI | | | | |
| | | IEQISEFSKRVILADANLDKVLSAYNKHRDKPIREQAENIIHLFTLTNLGASAAF | | | | |
| | | KYFDTTIGRKLYTSTKEVLDATLIHQSITGLYETRIDLSQLGGD | | | | |
| SpyCas9- | Streptococcus | MDKKYSIGLDIGTNSVGWAVITDEYKVPSKKFKVLGNTDRHSIKKNLIGALLF | 9,026 | N863A | H840A | D10A |
| 3var-NRCH | pyogenes | DSGETAEATRLKRTARRRYTRRKNRICYLQEIFSNEMAKVDDSFFHRLEESFL | | | | |
| | | VEEDKKHERHPIFGNIVDEVAYHEKYPTIYHLRKKLVDSTDKADLRLIYLALAH | | | | |
| | | MIKFRGHFLIEGDLNPDNSDVDKLFIQLVQTYNQLFEENPINASGVDAKAILS | | | | |
| | | ARLSKSRRLENLIAQLPGEKKNGLFGNLIALSLGLTPNFKSNFDLAEDAKLQLS | | | | |
| | | KDTYDDDLDNLLAQIGDQYADLFLAAKNLSDAILLSDILRVNTEITKAPLSAS | | | | |
| | | MVKRYDEHHQDLTLLKALVRQQLPEKYKEIFFDQSKNGYAGYIDGGASQEE | | | | |
| | | FYKFIKPILEKMDGTEELLVKLNREDLLRKQRTFDNGIIPHQIHLGELHAILRRQ | | | | |
| | | GDFYPFLKDNREKIEKILTFRIPYYVGPLARGNSRFAWMTRKSEETITPWNFE | | | | |
| | | EVVDKGASAQSFIERMTNFDKNLPNEKVLPKHSLLYEYFTVYNELTKVKYVTE | | | | |
| | | GMRKPAFLSGEQKKAIVDLLFKTNRKVTVKQLKEDYFKKIECFDSVEISGVED | | | | |
| | | RFNASLGTYHDLLKIIKDKDFLDNEENEDILEDIVLTLTLFEDREMIEERLKTYA | | | | |
| | | HLFDDKVMKQLKRLRYTGWGRLSRKLINGIRDKQSGKTILDFLKSDGFANRN | | | | |
| | | FMQLIHDDSLTFKEDIQKAQVSGQGDSLHEHIANLAGSPAIKKGILQTVKVV | | | | |
| | | DELVKVMGGHKPENIVIEMARENQTTQKGQKNSRERMKRIEEGIKELGSQI | | | | |
| | | LKEHPVENTQLQNEKLYLYYLQNGRDMYVDQELDINRLSDYDVDHIVPQSF | | | | |
| | | LKDDSIDNKVLTRSDKNRGKSDNVPSEEVVKKMKNYWRQLLNAKLITQRKF | | | | |
| | | DNLTKAERGGLSELDKAGFIKRQLVETRQITKHVAQILDSRMNTKYDENDKLI | | | | |
| | | REVKVITLKSKLVSDFRKDFQFYKVREINNYHHAHDAYLNAVVGTALIKKYPK | | | | |
| | | LESEFVYGDYKVYDVRKMIAKSEQEIGKATAKYFFYSNIMNFFKTEITLANGEI | | | | |
| | | RKRPLIETNGETGEIVWDKGRDFATVRKVLSMPQVNIVKKTEVQTGGFSKES | | | | |
| | | ILPKGNSDKLIARKKDWDPKKYGGFNSPTVAYSVLVVAKVEKGKSKKLKSVK | | | | |
| | | ELLGITIMERSSFEKNPIDFLEAKGYKEVKKDLIIKLPKYSLFELENGRKRMLAS | | | | |
| | | AGVLQKGNELALPSKYVNFLYLASHYEKLKGSPEDNEQKQLFVEQHKHYLDE | | | | |
| | | IIEQISEFSKRVILADANLDKVLSAYNKHRDKPIREQAENIIHLFTLTNLGAPAA | | | | |
| | | FKYFDTTINRKQYNTTKEVLDATLIRQSITGLYETRIDLSQLGGD | | | | |
| SpyCas9- | Streptococcus | MDKKYSIGLDIGTNSVGWAVITDEYKVPSKKFKVLGNTDRHSIKKNLIGALLF | 9,027 | N863A | H840A | D10A |
| HF1 | pyogenes | DSGETAEATRLKRTARRRYTRRKNRICYLQEIFSNEMAKVDDSFFHRLEESFL | | | | |
| | | VEEDKKHERHPIFGNIVDEVAYHEKYPTIYHLRKKLVDSTDKADLRLIYLALAH | | | | |
| | | MIKFRGHFLIEGDLNPDNSDVDKLFIQLVQTYNQLFEENPINASGVDAKAILS | | | | |
| | | ARLSKSRRLENLIAQLPGEKKNGLFGNLIALSLGLTPNFKSNFDLAEDAKLQLS | | | | |
| | | KDTYDDDLDNLLAQIGDQYADLFLAAKNLSDAILLSDILRVNTEITKAPLSAS | | | | |
| | | MIKRYDEHHQDLTLLKALVRQQLPEKYKEIFFDQSKNGYAGYIDGGASQEEF | | | | |
| | | YKFIKPILEKMDGTEELLVKLNREDLLRKQRTFDNGSIPHQIHLGELHAILRRQ | | | | |
| | | EDFYPFLKDNREKIEKILTFRIPYYVGPLARGNSRFAWMTRKSEETITPWNFE | | | | |
| | | EVVDKGASAQSFIERMTNFDKNLPNEKVLPKHSLLYEYFTVYNELTKVKYVTE | | | | |
| | | GMRKPAFLSGEQKKAIVDLLFKTNRKVTVKQLKEDYFKKIECFDSVEISGVED | | | | |
| | | RFNASLGTYHDLLKIIKDKDFLDNEENEDILEDIVLTLTLFEDREMIEERLKTYA | | | | |
| | | HLFDDKVMKQLKRRRYTGWGRLSRKLINGIRDKQSGKTILDFLKSDGFANR | | | | |
| | | NFMQLIHDDSLTFKEDIQKAQVSGQGDSLHEHIANLAGSPAIKKGILQTVKV | | | | |
| | | VDELVKVMGRHKPENIVIEMARENQTTQKGQKNSRERMKRIEEGIKELGSQ | | | | |
| | | ILKEHPVENTQLQNEKLYLYYLQNGRDMYVDQELDINRLSDYDVDHIVPQSF | | | | |
| | | LKDDSIDNKVLTRSDKNRGKSDNVPSEEVVKKMKNYWRQLLNAKLITQRKF | | | | |
| | | DNLTKAERGGLSELDKAGFIKRQLVETRQITKHVAQILDSRMNTKYDENDKLI | | | | |
| | | REVKVITLKSKLVSDFRKDFQFYKVREINNYHHAHDAYLNAVVGTALIKKYPK | | | | |
| | | LESEFVYGDYKVYDVRKMIAKSEQEIGKATAKYFFYSNIMNFFKTEITLANGEI | | | | |
| | | RKRPLIETNGETGEIVWDKGRDFATVRKVLSMPQVNIVKKTEVQTGGFSKES | | | | |
| | | ILPKRNSDKLIARKKDWDPKKYGGFDSPTVAYSVLVVAKVEKGKSKKLKSVKE | | | | |
| | | LLGITIMERSSFEKNPIDFLEAKGYKEVKKDLIIKLPKYSLFELENGRKRMLASA | | | | |
| | | GELQKGNELALPSKYVNFLYLASHYEKLKGSPEDNEQKQLFVEQHKHYLDEII | | | | |
| | | EQISEFSKRVILADANLDKVLSAYNKHRDKPIREQAENIIHLFTLTNLGAPAAF | | | | |
| | | KYFDTTIDRKRYTSTKEVLDATLIHQSITGLYETRIDLSQLGGD | | | | |
| SpyCas9- | Streptococcus | MDKKYSIGLDIGTNSVGWAVITDEYKVPSKKFKVLGNTDRHSIKKNLIGALLF | 9,028 | N863A | H840A | D10A |
| QQR1 | pyogenes | DSGETAEATRLKRTARRRYTRRKNRICYLQEIFSNEMAKVDDSFFHRLEESFL | | | | |
| | | VEEDKKHERHPIFGNIVDEVAYHEKYPTIYHLRKKLVDSTDKADLRLIYLALAH | | | | |
| | | MIKFRGHFLIEGDLNPDNSDVDKLFIQLVQTYNQLFEENPINASGVDAKAILS | | | | |
| | | ARLSKSRRLENLIAQLPGEKKNGLFGNLIALSLGLTPNFKSNFDLAEDAKLQLS | | | | |
| | | KDTYDDDLDNLLAQIGDQYADLFLAAKNLSDAILLSDILRVNTEITKAPLSAS | | | | |
| | | MIKRYDEHHQDLTLLKALVRQQLPEKYKEIFFDQSKNGYAGYIDGGASQEEF | | | | |
| | | YKFIKPILEKMDGTEELLVKLNREDLLRKQRTFDNGSIPHQIHLGELHAILRRQ | | | | |
| | | EDFYPFLKDNREKIEKILTFRIPYYVGPLARGNSRFAWMTRKSEETITPWNFE | | | | |
| | | EVVDKGASAQSFIERMTNFDKNLPNEKVLPKHSLLYEYFTVYNELTKVKYVTE | | | | |
| | | GMRKPAFLSGEQKKAIVDLLFKTNRKVTVKQLKEDYFKKIECFDSVEISGVED | | | | |
| | | RFNASLGTYHDLLKIIKDKDFLDNEENEDILEDIVLTLTLFEDREMIEERLKTYA | | | | |
| | | HLFDDKVMKQLKRRRYTGWGRLSRKLINGIRDKQSGKTILDFLKSDGFANR | | | | |
| | | NFMQLIHDDSLTFKEDIQKAQVSGQGDSLHEHIANLAGSPAIKKGILQTVKV | | | | |
| | | VDELVKVMGRHKPENIVIEMARENQTTQKGQKNSRERMKRIEEGIKELGSQ | | | | |
| | | ILKEHPVENTQLQNEKLYLYYLQNGRDMYVDQELDINRLSDYDVDHIVPQSF | | | | |
| | | LKDDSIDNKVLTRSDKNRGKSDNVPSEEVVKKMKNYWRQLLNAKLITQRKF | | | | |
| | | DNLTKAERGGLSELDKAGFIKRQLVETRQITKHVAQILDSRMNTKYDENDKLI | | | | |
| | | REVKVITLKSKLVSDFRKDFQFYKVREINNYHHAHDAYLNAVVGTALIKKYPK | | | | |
| | | LESEFVYGDYKVYDVRKMIAKSEQEIGKATAKYFFYSNIMNFFKTEITLANGEI | | | | |
| | | RKRPLIETNGETGEIVWDKGRDFATVRKVLSMPQVNIVKKTEVQTGGFSKES | | | | |
| | | ILPKRNSDKLIARKKDWDPKKYGGFDSPTVAYSVLVVAKVEKGKSKKLKSVKE | | | | |
| | | LLGITIMERSSFEKNPIDFLEAKGYKEVKKDLIIKLPKYSLFELENGRKRMLASA | | | | |
| | | RELQKGNELALPSKYVNFLYLASHYEKLKGSPEDNEQKQLFVEQHKHYLDEII | | | | |
| | | EQISEFSKRVILADAQLDKVLSAYNKHRDKPIREQAENIIHLFTLTNLGAPAAF | | | | |
| | | KYFDTTFKQKQYRSTKEVLDATLIHQSITGLYETRIDLSQLGGD | | | | |
| SpyCas9- | Streptococcus | MDKKYSIGLDIGTNSVGWAVITDEYKVPSKKFKVLGNTDRHSIKKNLIGALLF | 9,029 | N863A | H840A | D10A |
| SpG | pyogenes | DSGETAEATRLKRTARRRYTRRKNRICYLQEIFSNEMAKVDDSFFHRLEESFL | | | | |
| | | VEEDKKHERHPIFGNIVDEVAYHEKYPTIYHLRKKLVDSTDKADLRLIYLALAH | | | | |
| | | MIKFRGHFLIEGDLNPDNSDVDKLFIQLVQTYNQLFEENPINASGVDAKAILS | | | | |
| | | ARLSKSRRLENLIAQLPGEKKNGLFGNLIALSLGLTPNFKSNFDLAEDAKLQLS | | | | |
| | | KDTYDDDLDNLLAQIGDQYADLFLAAKNLSDAILLSDILRVNTEITKAPLSAS | | | | |
| | | MIKRYDEHHQDLTLLKALVRQQLPEKYKEIFFDQSKNGYAGYIDGGASQEEF | | | | |
| | | YKFIKPILEKMDGTEELLVKLNREDLLRKQRTFDNGSIPHQIHLGELHAILRRQ | | | | |
| | | EDFYPFLKDNREKIEKILTFRIPYYVGPLARGNSRFAWMTRKSEETITPWNFE | | | | |
| | | EVVDKGASAQSFIERMTNFDKNLPNEKVLPKHSLLYEYFTVYNELTKVKYVTE | | | | |
| | | GMRKPAFLSGEQKKAIVDLLFKTNRKVTVKQLKEDYFKKIECFDSVEISGVED | | | | |
| | | RFNASLGTYHDLLKIIKDKDFLDNEENEDILEDIVLTLTLFEDREMIEERLKTYA | | | | |
| | | HLFDDKVMKQLKRRRYTGWGRLSRKLINGIRDKQSGKTILDFLKSDGFANR | | | | |
| | | NFMQLIHDDSLTFKEDIQKAQVSGQGDSLHEHIANLAGSPAIKKGILQTVKV | | | | |
| | | VDELVKVMGRHKPENIVIEMARENQTTQKGQKNSRERMKRIEEGIKELGSQ | | | | |
| | | ILKEHPVENTQLQNEKLYLYYLQNGRDMYVDQELDINRLSDYDVDHIVPQSF | | | | |
| | | LKDDSIDNKVLTRSDKNRGKSDNVPSEEVVKKMKNYWRQLLNAKLITQRKF | | | | |
| | | DNLTKAERGGLSELDKAGFIKRQLVETRQITKHVAQILDSRMNTKYDENDKLI | | | | |
| | | REVKVITLKSKLVSDFRKDFQFYKVREINNYHHAHDAYLNAVVGTALIKKYPK | | | | |
| | | LESEFVYGDYKVYDVRKMIAKSEQEIGKATAKYFFYSNIMNFFKTEITLANGEI | | | | |
| | | RKRPLIETNGETGEIVWDKGRDFATVRKVLSMPQVNIVKKTEVQTGGFSKES | | | | |
| | | ILPKRNSDKLIARKKDWDPKKYGGFLWPTVAYSVLVVAKVEKGKSKKLKSVK | | | | |
| | | ELLGITIMERSSFEKNPIDFLEAKGYKEVKKDLIIKLPKYSLFELENGRKRMLAS | | | | |
| | | AKQLQKGNELALPSKYVNFLYLASHYEKLKGSPEDNEQKQLFVEQHKHYLDE | | | | |
| | | IIEQISEFSKRVILADANLDKVLSAYNKHRDKPIREQAENIIHLFTLTNLGAPAA | | | | |
| | | FKYFDTTIDRKQYRSTKEVLDATLIHQSITGLYETRIDLSQLGGD | | | | |
| SpyCas9- | Streptococcus | MDKKYSIGLDIGTNSVGWAVITDEYKVPSKKFKVLGNTDRHSIKKNLIGALLF | 9,030 | N863A | H840A | D10A |
| VQR | pyogenes | DSGETAEATRLKRTARRRYTRRKNRICYLQEIFSNEMAKVDDSFFHRLEESFL | | | | |
| | | VEEDKKHERHPIFGNIVDEVAYHEKYPTIYHLRKKLVDSTDKADLRLIYLALAH | | | | |
| | | MIKFRGHFLIEGDLNPDNSDVDKLFIQLVQTYNQLFEENPINASGVDAKAILS | | | | |
| | | ARLSKSRRLENLIAQLPGEKKNGLFGNLIALSLGLTPNFKSNFDLAEDAKLQLS | | | | |
| | | KDTYDDDLDNLLAQIGDQYADLFLAAKNLSDAILLSDILRVNTEITKAPLSAS | | | | |
| | | MIKRYDEHHQDLTLLKALVRQQLPEKYKEIFFDQSKNGYAGYIDGGASQEEF | | | | |
| | | YKFIKPILEKMDGTEELLVKLNREDLLRKQRTFDNGSIPHQIHLGELHAILRRQ | | | | |
| | | EDFYPFLKDNREKIEKILTFRIPYYVGPLARGNSRFAWMTRKSEETITPWNFE | | | | |
| | | EVVDKGASAQSFIERMTNFDKNLPNEKVLPKHSLLYEYFTVYNELTKVKYVTE | | | | |
| | | GMRKPAFLSGEQKKAIVDLLFKTNRKVTVKQLKEDYFKKIECFDSVEISGVED | | | | |
| | | RFNASLGTYHDLLKIIKDKDFLDNEENEDILEDIVLTLTLFEDREMIEERLKTYA | | | | |
| | | HLFDDKVMKQLKRRRYTGWGRLSRKLINGIRDKQSGKTILDFLKSDGFANR | | | | |
| | | NFMQLIHDDSLTFKEDIQKAQVSGQGDSLHEHIANLAGSPAIKKGILQTVKV | | | | |
| | | VDELVKVMGRHKPENIVIEMARENQTTQKGQKNSRERMKRIEEGIKELGSQ | | | | |
| | | ILKEHPVENTQLQNEKLYLYYLQNGRDMYVDQELDINRLSDYDVDHIVPQSF | | | | |
| | | LKDDSIDNKVLTRSDKNRGKSDNVPSEEVVKKMKNYWRQLLNAKLITQRKF | | | | |
| | | DNLTKAERGGLSELDKAGFIKRQLVETRQITKHVAQILDSRMNTKYDENDKLI | | | | |
| | | REVKVITLKSKLVSDFRKDFQFYKVREINNYHHAHDAYLNAVVGTALIKKYPK | | | | |
| | | LESEFVYGDYKVYDVRKMIAKSEQEIGKATAKYFFYSNIMNFFKTEITLANGEI | | | | |
| | | RKRPLIETNGETGEIVWDKGRDFATVRKVLSMPQVNIVKKTEVQTGGFSKES | | | | |
| | | ILPKRNSDKLIARKKDWDPKKYGGFVSPTVAYSVLVVAKVEKGKSKKLKSVKE | | | | |
| | | LLGITIMERSSFEKNPIDFLEAKGYKEVKKDLIIKLPKYSLFELENGRKRMLASA | | | | |
| | | GELQKGNELALPSKYVNFLYLASHYEKLKGSPEDNEQKQLFVEQHKHYLDEII | | | | |
| | | EQISEFSKRVILADANLDKVLSAYNKHRDKPIREQAENIIHLFTLTNLGAPAAF | | | | |
| | | KYFDTTIDRKQYRSTKEVLDATLIHQSITGLYETRIDLSQLGGD | | | | |
| SpyCas9- | Streptococcus | MDKKYSIGLDIGTNSVGWAVITDEYKVPSKKFKVLGNTDRHSIKKNLIGALLF | 9,031 | N863A | H840A | 10A |
| VRER | pyogenes | DSGETAEATRLKRTARRRYTRRKNRICYLQEIFSNEMAKVDDSFFHRLEESFL | | | | |
| | | VEEDKKHERHPIFGNIVDEVAYHEKYPTIYHLRKKLVDSTDKADLRLIYLALAH | | | | |
| | | MIKFRGHFLIEGDLNPDNSDVDKLFIQLVQTYNQLFEENPINASGVDAKAILS | | | | |
| | | ARLSKSRRLENLIAQLPGEKKNGLFGNLIALSLGLTPNFKSNFDLAEDAKLQLS | | | | |
| | | KDTYDDDLDNLLAQIGDQYADLFLAAKNLSDAILLSDILRVNTEITKAPLSAS | | | | |
| | | MIKRYDEHHQDLTLLKALVRQQLPEKYKEIFFDQSKNGYAGYIDGGASQEEF | | | | |
| | | YKFIKPILEKMDGTEELLVKLNREDLLRKQRTFDNGSIPHQIHLGELHAILRRQ | | | | |
| | | EDFYPFLKDNREKIEKILTFRIPYYVGPLARGNSRFAWMTRKSEETITPWNFE | | | | |
| | | EVVDKGASAQSFIERMTNFDKNLPNEKVLPKHSLLYEYFTVYNELTKVKYVTE | | | | |
| | | GMRKPAFLSGEQKKAIVDLLFKTNRKVTVKQLKEDYFKKIECFDSVEISGVED | | | | |
| | | RFNASLGTYHDLLKIIKDKDFLDNEENEDILEDIVLTLTLFEDREMIEERLKTYA | | | | |
| | | HLFDDKVMKQLKRRRYTGWGRLSRKLINGIRDKQSGKTILDFLKSDGFANR | | | | |
| | | NFMQLIHDDSLTFKEDIQKAQVSGQGDSLHEHIANLAGSPAIKKGILQTVKV | | | | |
| | | VDELVKVMGRHKPENIVIEMARENQTTQKGQKNSRERMKRIEEGIKELGSQ | | | | |
| | | ILKEHPVENTQLQNEKLYLYYLQNGRDMYVDQELDINRLSDYDVDHIVPQSF | | | | |
| | | LKDDSIDNKVLTRSDKNRGKSDNVPSEEVVKKMKNYWRQLLNAKLITQRKF | | | | |
| | | DNLTKAERGGLSELDKAGFIKRQLVETRQITKHVAQILDSRMNTKYDENDKLI | | | | |
| | | REVKVITLKSKLVSDFRKDFQFYKVREINNYHHAHDAYLNAVVGTALIKKYPK | | | | |
| | | LESEFVYGDYKVYDVRKMIAKSEQEIGKATAKYFFYSNIMNFFKTEITLANGEI | | | | |
| | | RKRPLIETNGETGEIVWDKGRDFATVRKVLSMPQVNIVKKTEVQTGGFSKES | | | | |
| | | ILPKRNSDKLIARKKDWDPKKYGGFVSPTVAYSVLVVAKVEKGKSKKLKSVKE | | | | |
| | | LLGITIMERSSFEKNPIDFLEAKGYKEVKKDLIIKLPKYSLFELENGRKRMLASA | | | | |
| | | RELQKGNELALPSKYVNFLYLASHYEKLKGSPEDNEQKQLFVEQHKHYLDEII | | | | |
| | | EQISEFSKRVILADANLDKVLSAYNKHRDKPIREQAENIIHLFTLTNLGAPAAF | | | | |
| | | KYFDTTIDRKEYRSTKEVLDATLIHQSITGLYETRIDLSQLGGD | | | | |
| SpyCas9- | Streptococcus | MDKKYSIGLDIGTNSVGWAVITDEYKVPSKKFKVLGNTDRHSIKKNLIGALLF | 9,032 | N863A | H840A | D10A |
| xCas | pyogenes | DSGETAEATRLKRTARRRYTRRKNRICYLQEIFSNEMAKVDDSFFHRLEESFL | | | | |
| | | VEEDKKHERHPIFGNIVDEVAYHEKYPTIYHLRKKLVDSTDKADLRLIYLALAH | | | | |
| | | MIKFRGHFLIEGDLNPDNSDVDKLFIQLVQTYNQLFEENPINASGVDAKAILS | | | | |
| | | ARLSKSRRLENLIAQLPGEKKNGLFGNLIALSLGLTPNFKSNFDLAEDTKLQLS | | | | |
| | | KDTYDDDLDNLLAQIGDQYADLFLAAKNLSDAILLSDILRVNTEITKAPLSAS | | | | |
| | | MIKLYDEHHQDLTLLKALVRQQLPEKYKEIFFDQSKNGYAGYIDGGASQEEF | | | | |
| | | YKFIKPILEKMDGTEELLVKLNREDLLRKQRTFDNGIIPHQIHLGELHAILRRQE | | | | |
| | | DFYPFLKDNREKIEKILTFRIPYYVGPLARGNSRFAWMTRKSEETITPWNFEK | | | | |
| | | VVDKGASAQSFIERMTNFDKNLPNEKVLPKHSLLYEYFTVYNELTKVKYVTE | | | | |
| | | GMRKPAFLSGDQKKAIVDLLFKTNRKVTVKQLKEDYFKKIECFDSVEISGVED | | | | |
| | | RFNASLGTYHDLLKIIKDKDFLDNEENEDILEDIVLTLTLFEDREMIEERLKTYA | | | | |
| | | HLFDDKVMKQLKRRRYTGWGRLSRKLINGIRDKQSGKTILDFLKSDGFANR | | | | |
| | | NFIQLIHDDSLTFKEDIQKAQVSGQGDSLHEHIANLAGSPAIKKGILQTVKVV | | | | |
| | | DELVKVMGRHKPENIVIEMARENQTTQKGQKNSRERMKRIEEGIKELGSQI | | | | |
| | | LKEHPVENTQLQNEKLYLYYLQNGRDMYVDQELDINRLSDYDVDHIVPQSF | | | | |
| | | LKDDSIDNKVLTRSDKNRGKSDNVPSEEVVKKMKNYWRQLLNAKLITQRKF | | | | |
| | | DNLTKAERGGLSELDKAGFIKRQLVETRQITKHVAQILDSRMNTKYDENDKLI | | | | |
| | | REVKVITLKSKLVSDFRKDFQFYKVREINNYHHAHDAYLNAVVGTALIKKYPK | | | | |
| | | LESEFVYGDYKVYDVRKMIAKSEQEIGKATAKYFFYSNIMNFFKTEITLANGEI | | | | |
| | | RKRPLIETNGETGEIVWDKGRDFATVRKVLSMPQVNIVKKTEVQTGGFSKES | | | | |
| | | ILPKRNSDKLIARKKDWDPKKYGGFDSPTVAYSVLVVAKVEKGKSKKLKSVKE | | | | |
| | | LLGITIMERSSFEKNPIDFLEAKGYKEVKKDLIIKLPKYSLFELENGRKRMLASA | | | | |
| | | GVLQKGNELALPSKYVNFLYLASHYEKLKGSPEDNEQKQLFVEQHKHYLDEII | | | | |
| | | EQISEFSKRVILADANLDKVLSAYNKHRDKPIREQAENIIHLFTLTNLGAPAAF | | | | |
| | | KYFDTTIDRKRYTSTKEVLDATLIHQSITGLYETRIDLSQLGGD | | | | |
| SpyCas9- | Streptococcus | MDKKYSIGLDIGTNSVGWAVITDEYKVPSKKFKVLGNTDRHSIKKNLIGALLF | 9,033 | N863A | H840A | D10A |
| xCas-NG | pyogenes | DSGETAEATRLKRTARRRYTRRKNRICYLQEIFSNEMAKVDDSFFHRLEESFL | | | | |
| | | VEEDKKHERHPIFGNIVDEVAYHEKYPTIYHLRKKLVDSTDKADLRLIYLALAH | | | | |
| | | MIKFRGHFLIEGDLNPDNSDVDKLFIQLVQTYNQLFEENPINASGVDAKAILS | | | | |
| | | ARLSKSRRLENLIAQLPGEKKNGLFGNLIALSLGLTPNFKSNFDLAEDTKLQLS | | | | |
| | | KDTYDDDLDNLLAQIGDQYADLFLAAKNLSDAILLSDILRVNTEITKAPLSAS | | | | |
| | | MIKLYDEHHQDLTLLKALVRQQLPEKYKEIFFDQSKNGYAGYIDGGASQEEF | | | | |
| | | YKFIKPILEKMDGTEELLVKLNREDLLRKQRTFDNGIIPHQIHLGELHAILRRQE | | | | |
| | | DFYPFLKDNREKIEKILTFRIPYYVGPLARGNSRFAWMTRKSEETITPWNFEK | | | | |
| | | VVDKGASAQSFIERMTNFDKNLPNEKVLPKHSLLYEYFTVYNELTKVKYVTE | | | | |
| | | GMRKPAFLSGDQKKAIVDLLFKTNRKVTVKQLKEDYFKKIECFDSVEISGVED | | | | |
| | | RFNASLGTYHDLLKIIKDKDFLDNEENEDILEDIVLTLTLFEDREMIEERLKTYA | | | | |
| | | HLFDDKVMKQLKRRRYTGWGRLSRKLINGIRDKQSGKTILDFLKSDGFANR | | | | |
| | | NFIQLIHDDSLTFKEDIQKAQVSGQGDSLHEHIANLAGSPAIKKGILQTVKVV | | | | |
| | | DELVKVMGRHKPENIVIEMARENQTTQKGQKNSRERMKRIEEGIKELGSQI | | | | |
| | | LKEHPVENTQLQNEKLYLYYLQNGRDMYVDQELDINRLSDYDVDHIVPQSF | | | | |
| | | LKDDSIDNKVLTRSDKNRGKSDNVPSEEVVKKMKNYWRQLLNAKLITQRKF | | | | |
| | | DNLTKAERGGLSELDKAGFIKRQLVETRQITKHVAQILDSRMNTKYDENDKLI | | | | |
| | | REVKVITLKSKLVSDFRKDFQFYKVREINNYHHAHDAYLNAVVGTALIKKYPK | | | | |
| | | LESEFVYGDYKVYDVRKMIAKSEQEIGKATAKYFFYSNIMNFFKTEITLANGEI | | | | |
| | | RKRPLIETNGETGEIVWDKGRDFATVRKVLSMPQVNIVKKTEVQTGGFSKES | | | | |
| | | IRPKRNSDKLIARKKDWDPKKYGGFVSPTVAYSVLVVAKVEKGKSKKLKSVKE | | | | |
| | | LLGITIMERSSFEKNPIDFLEAKGYKEVKKDLIIKLPKYSLFELENGRKRMLASA | | | | |
| | | RFLQKGNELALPSKYVNFLYLASHYEKLKGSPEDNEQKQLFVEQHKHYLDEII | | | | |
| | | EQISEFSKRVILADANLDKVLSAYNKHRDKPIREQAENIIHLFTLTNLGAPRAF | | | | |
| | | KYFDTTIDRKVYRSTKEVLDATLIHQSITGLYETRIDLSQLGGD | | | | |
| St1Cas9- | Streptococcus | MSDLVLGLDIGIGSVGVGILNKVTGEIIHKNSRIFPAAQAENNLVRRTNRQG | 9,034 | N622A | H599A | D9A |
| CNRZ1066 | thermophilus | RRLARRKKHRRVRLNRLFEESGLITDFTKISINLNPYQLRVKGLTDELSNEELFI | | | | |
| | | ALKNMVKHRGISYLDDASDDGNSSVGDYAQIVKENSKQLETKTPGQIQLER | | | | |
| | | YQTYGQLRGDFTVEKDGKKHRLINVFPTSAYRSEALRILQTQQEFNPQITDEF | | | | |
| | | INRYLEILTGKRKYYHGPGNEKSRTDYGRYRTSGETLDNIFGILIGKCTFYPDEF | | | | |
| | | RAAKASYTAQEFNLLNDLNNLTVPTETKKLSKEQKNQIINYVKNEKAMGPAK | | | | |
| | | LFKYIAKLLSCDVADIKGYRIDKSGKAEIHTFEAYRKMKTLETLDIEQMDRETL | | | | |
| | | DKLAYVLTLNTEREGIQEALEHEFADGSFSQKQVDELVQFRKANSSIFGKGW | | | | |
| | | HNFSVKLMMELIPELYETSEEQMTILTRLGKQKTTSSSNKTKYIDEKLLTEEIY | | | | |
| | | NPVVAKSVRQAIKIVNAAIKEYGDFDNIVIEMARETNEDDEKKAIQKIQKAN | | | | |
| | | KDEKDAAMLKAANQYNGKAELPHSVFHGHKQLATKIRLWHQQGERCLYT | | | | |
| | | GKTISIHDLINNSNQFEVDHILPLSITFDDSLANKVLVYATANQEKGQRTPYQ | | | | |
| | | ALDSMDDAWSFRELKAFVRESKTLSNKKKEYLLTEEDISKFDVRKKFIERNLV | | | | |
| | | DTRYASRVVLNALQEHFRAHKIDTKVSVVRGQFTSQLRRHWGIEKTRDTYH | | | | |
| | | HHAVDALIIAASSQLNLWKKQKNTLVSYSEEQLLDIETGELISDDEYKESVFKA | | | | |
| | | PYQHFVDTLKSKEFEDSILFSYQVDSKFNRKISDATIYATRQAKVGKDKKDET | | | | |
| | | YVLGKIKDIYTQDGYDAFMKIYKKDKSKFLMYRHDPQTFEKVIEPILENYPNK | | | | |
| | | QMNEKGKEVPCNPFLKYKEEHGYIRKYSKKGNGPEIKSLKYYDSKLLGNPIDI | | | | |
| | | TPENSKNKVVLQSLKPWRTDVYFNKATGKYEILGLKYADLQFEKGTGTYKIS | | | | |
| | | QEKYNDIKKKEGVDSDSEFKFTLYKNDLLLVKDTETKEQQLFRFLSRTLPKQK | | | | |
| | | HYVELKPYDKQKFEGGEALIKVLGNVANGGQCIKGLAKSNISIYKVRTDVLG | | | | |
| | | NQHIIKNEGDKPKLDF | | | | |
| St1Cas9- | Streptococcus | MSDLVLGLDIGIGSVGVGILNKVTGEIIHKNSRIFPAAQAENNLVRRTNRQG | 9,035 | N622A | H599A | D9A |
| LMG1831 | thermophilus | RRLARRKKHRRVRLNRLFEESGLITDFTKISINLNPYQLRVKGLTDELSNEELFI | | | | |
| | | ALKNMVKHRGISYLDDASDDGNSSVGDYAQIVKENSKQLETKTPGQIQLER | | | | |
| | | YQTYGQLRGDFTVEKDGKKHRLINVFPTSAYRSEALRILQTQQEFNPQITDEF | | | | |
| | | INRYLEILTGKRKYYHGPGNEKSRTDYGRYRTSGETLDNIFGILIGKCTFYPDEF | | | | |
| | | RAAKASYTAQEFNLLNDLNNLTVPTETKKLSKEQKNQIINYVKNEKAMGPAK | | | | |
| | | LFKYIAKLLSCDVADIKGYRIDKSGKAEIHTFEAYRKMKTLETLDIEQMDRETL | | | | |
| | | DKLAYVLTLNTEREGIQEALEHEFADGSFSQKQVDELVQFRKANSSIFGKGW | | | | |
| | | HNFSVKLMMELIPELYETSEEQMTILTRLGKQKTTSSSNKTKYIDEKLLTEEIY | | | | |
| | | NPVVAKSVRQAIKIVNAAIKEYGDFDNIVIEMARETNEDDEKKAIQKIQKAN | | | | |
| | | KDEKDAAMLKAANQYNGKAELPHSVFHGHKQLATKIRLWHQQGERCLYT | | | | |
| | | GKTISIHDLINNSNQFEVDHILPLSITFDDSLANKVLVYATANQEKGQRTPYQ | | | | |
| | | ALDSMDDAWSFRELKAFVRESKTLSNKKKEYLLTEEDISKFDVRKKFIERNLV | | | | |
| | | DTRYASRVVLNALQEHFRAHKIDTKVSVVRGQFTSQLRRHWGIEKTRDTYH | | | | |
| | | HHAVDALIIAASSQLNLWKKQKNTLVSYSEEQLLDIETGELISDDEYKESVFKA | | | | |
| | | PYQHFVDTLKSKEFEDSILFSYQVDSKFNRKISDATIYATRQAKVGKDKKDET | | | | |
| | | YVLGKIKDIYTQDGYDAFMKIYKKDKSKFLMYRHDPQTFEKVIEPILENYPNK | | | | |
| | | QMNEKGKEVPCNPFLKYKEEHGYIRKYSKKGNGPEIKSLKYYDSKLLGNPIDI | | | | |
| | | TPENSKNKVVLQSLKPWRTDVYFNKNTGKYEILGLKYADLQFEKKTGTYKISQ | | | | |
| | | EKYNGIMKEEGVDSDSEFKFTLYKNDLLLVKDTETKEQQLFRFLSRTMPNVK | | | | |
| | | YYVELKPYSKDKFEKNESLIEILGSADKSGRCIKGLGKSNISIYKVRTDVLGNQH | | | | |
| | | IIKNEGDKPKLDF | | | | |
| St1Cas9- | Streptococcus | MSDLVLGLDIGIGSVGVGILNKVTGEIIHKNSRIFPAAQAENNLVRRTNRQG | 9,036 | N622A | H599A | D9A |
| MTH17CL3 | thermophilus | RRLARRKKHRRVRLNRLFEESGLITDFTKISINLNPYQLRVKGLTDELSNEELFI | | | | |
| 96 | | ALKNMVKHRGISYLDDASDDGNSSVGDYAQIVKENSKQLETKTPGQIQLER | | | | |
| | | YQTYGQLRGDFTVEKDGKKHRLINVFPTSAYRSEALRILQTQQEFNPQITDEF | | | | |
| | | INRYLEILTGKRKYYHGPGNEKSRTDYGRYRTSGETLDNIFGILIGKCTFYPDEF | | | | |
| | | RAAKASYTAQEFNLLNDLNNLTVPTETKKLSKEQKNQIINYVKNEKAMGPAK | | | | |
| | | LFKYIAKLLSCDVADIKGYRIDKSGKAEIHTFEAYRKMKTLETLDIEQMDRETL | | | | |
| | | DKLAYVLTLNTEREGIQEALEHEFADGSFSQKQVDELVQFRKANSSIFGKGW | | | | |
| | | HNFSVKLMMELIPELYETSEEQMTILTRLGKQKTTSSSNKTKYIDEKLLTEEIY | | | | |
| | | NPVVAKSVRQAIKIVNAAIKEYGDFDNIVIEMARETNEDDEKKAIQKIQKAN | | | | |
| | | KDEKDAAMLKAANQYNGKAELPHSVFHGHKQLATKIRLWHQQGERCLYT | | | | |
| | | GKTISIHDLINNSNQFEVDHILPLSITFDDSLANKVLVYATANQEKGQRTPYQ | | | | |
| | | ALDSMDDAWSFRELKAFVRESKTLSNKKKEYLLTEEDISKFDVRKKFIERNLV | | | | |
| | | DTRYASRVVLNALQEHFRAHKIDTKVSVVRGQFTSQLRRHWGIEKTRDTYH | | | | |
| | | HHAVDALIIAASSQLNLWKKQKNTLVSYSEDQLLDIETGELISDDEYKESVFK | | | | |
| | | APYQHFVDTLKSKEFEDSILFSYQVDSKFNRKISDATIYATRQAKVGKDKADE | | | | |
| | | TYVLGKIKDIYTQDGYDAFMKIYKKDKSKFLMYRHDPQTFEKVIEPILENYPN | | | | |
| | | KQINEKGKEVPCNPFLKYKEEHGYIRKYSKKGNGPEIKSLKYYDSKLGNHIDIT | | | | |
| | | PKDSNNKVVLQSLKPWRTDVYFNKNTGKYEILGLKYSDMQFEKGTGKYSISK | | | | |
| | | EQYENIKVREGVDENSEFKFTLYKNDLLLLKDSENGEQILLRFTSRNDTSKHYV | | | | |
| | | ELKPYNRQKFEGSEYLIKSLGTVAKGGQCIKGLGKSNISIYKVRTDVLGNQHII | | | | |
| | | KNEGDKPKLDF | | | | |
| St1Cas9- | Streptococcus | MSDLVLGLDIGIGSVGVGILNKVTGEIIHKNSRIFPAAQAENNLVRRTNRQG | 9,037 | N622A | H599A | D9A |
| TH1477 | thermophilus | RRLARRKKHRRVRLNRLFEESGLITDFTKISINLNPYQLRVKGLTDELSNEELFI | | | | |
| | | ALKNMVKHRGISYLDDASDDGNSSVGDYAQIVKENSKQLETKTPGQIQLER | | | | |
| | | YQTYGQLRGDFTVEKDGKKHRLINVFPTSAYRSEALRILQTQQEFNPQITDEF | | | | |
| | | INRYLEILTGKRKYYHGPGNEKSRTDYGRYRTSGETLDNIFGILIGKCTFYPDEF | | | | |
| | | RAAKASYTAQEFNLLNDLNNLTVPTETKKLSKEQKNQIINYVKNEKAMGPAK | | | | |
| | | LFKYIAKLLSCDVADIKGYRIDKSGKAEIHTFEAYRKMKTLETLDIEQMDRETL | | | | |
| | | DKLAYVLTLNTEREGIQEALEHEFADGSFSQKQVDELVQFRKANSSIFGKGW | | | | |
| | | HNFSVKLMMELIPELYETSEEQMTILTRLGKQKTTSSSNKTKYIDEKLLTEEIY | | | | |
| | | NPVVAKSVRQAIKIVNAAIKEYGDFDNIVIEMARETNEDDEKKAIQKIQKAN | | | | |
| | | KDEKDAAMLKAANQYNGKAELPHSVFHGHKQLATKIRLWHQQGERCLYT | | | | |
| | | GKTISIHDLINNSNQFEVDHILPLSITFDDSLANKVLVYATANQEKGQRTPYQ | | | | |
| | | ALDSMDDAWSFRELKAFVRESKTLSNKKKEYLLTEEDISKFDVRKKFIERNLV | | | | |
| | | DTRYASRVVLNALQEHFRAHKIDTKVSVVRGQFTSQLRRHWGIEKTRDTYH | | | | |
| | | HHAVDALIIAASSQLNLWKKQKNTLVSYSEDQLLDIETGELISDDEYKESVFK | | | | |
| | | APYQHFVDTLKSKEFEDSILFSYQVDSKFNRKISDATIYATRQAKVGKDKADE | | | | |
| | | TYVLGKIKDIYTQDGYDAFMKIYKKDKSKFLMYRHDPQTFEKVIEPILENYPN | | | | |
| | | KQINEKGKEVPCNPFLKYKEEHGYIRKYSKKGNGPEIKSLKYYDSKLGNHIDIT | | | | |
| | | PKDSNNKVVLQSLKPWRTDVYFNKNTGKYEILGLKYSDMQFEKGTGKYSISK | | | | |
| | | EQYENIKVREGVDENSEFKFTLYKNDLLLLKDSENGEQILLRFTSRNDTSKHYV | | | | |
| | | ELKPYNRQKFEGSEYLIKSLGTVVKGGRCIKGLGKSNISIYKVRTDVLGNQHIIK | | | | |
| | | NEGDKPKLDF | | | | |
| SRGN3.1 | Staphylococcus | MNQKFILGLDIGITSVGYGLIDYETKNIIDAGVRLFPEANVENNEGRRSKRGS | 9,038 | N585A | H562A | D10A |
| | spp. | RRLKRRRIHRLERVKLLLTEYDLINKEQIPTSNNPYQIRVKGLSEILSKDELAIAL | | | | |
| | | LHLAKRRGIHNVDVAADKEETASDSLSTKDQINKNAKFLESRYVCELQKERLE | | | | |
| | | NEGHVRGVENRFLTKDIVREAKKIIDTQMQYYPEIDETFKEKYISLVETRREYF | | | | |
| | | EGPGQGSPFGWNGDLKKWYEMLMGHCTYFPQELRSVKYAYSADLFNALN | | | | |
| | | DLNNLIIQRDNSEKLEYHEKYHIIENVFKQKKKPTLKQIAKEIGVNPEDIKGYRI | | | | |
| | | TKSGTPEFTSFKLFHDLKKVVKDHAILDDIDLLNQIAEILTIYQDKDSIVAELGQ | | | | |
| | | LEYLMSEADKQSISELTGYTGTHSLSLKCMNMIIDELWHSSMNQMEVFTYL | | | | |
| | | NMRPKKYELKGYQRIPTDMIDDAILSPVVKRTFIQSINVINKVIEKYGIPEDIIIE | | | | |
| | | LARENNSDDRKKFINNLQKKNEATRKRINEIIGQTGNQNAKRIVEKIRLHDQ | | | | |
| | | QEGKCLYSLESIPLEDLLNNPNHYEVDHIIPRSVSFDNSYHNKVLVKQSENSK | | | | |
| | | KSNLTPYQYFNSGKSKLSYNQFKQHILNLSKSQDRISKKKKEYLLEERDINKFE | | | | |
| | | VQKEFINRNLVDTRYATRELTNYLKAYFSANNMNVKVKTINGSFTDYLRKV | | | | |
| | | WKFKKERNHGYKHHAEDALIIANADFLFKENKKLKAVNSVLEKPEIETKQLDI | | | | |
| | | QVDSEDNYSEMFIIPKQVQDIKDFRNFKYSHRVDKKPNRQLINDTLYSTRKK | | | | |
| | | DNSTYIVQTIKDIYAKDNTTLKKQFDKSPEKFLMYQHDPRTFEKLEVIMKQYA | | | | |
| | | NEKNPLAKYHEETGEYLTKYSKKNNGPIVKSLKYIGNKLGSHLDVTHQFKSST | | | | |
| | | KKLVKLSIKNYRFDVYLTEKGYKFVTIAYLNVFKKDNYYYIPKDKYQELKEKKKI | | | | |
| | | KDTDQFIASFYKNDLIKLNGDLYKIIGVNSDDRNIIELDYYDIKYKDYCEINNIK | | | | |
| | | GEPRIKKTIGKKTESIEKFTTDVLGNLYLHSTEKAPQLIFKRGL | | | | |
| sRGN3.3 | Staphylococcus | MNQKFILGLDIGITSVGYGLIDYETKNIIDAGVRLFPEANVENNEGRRSKRGS | 9,039 | N585A | H562A | D10A |
| | spp. | RRLKRRRIHRLERVKLLLTEYDLINKEQIPTSNNPYQIRVKGLSEILSKDELAIAL | | | | |
| | | LHLAKRRGIHNVDVAADKEETASDSLSTKDQINKNAKFLESRYVCELQKERLE | | | | |
| | | NEGHVRGVENRFLTKDIVREAKKIIDTQMQYYPEIDETFKEKYISLVETRREYF | | | | |
| | | EGPGQGSPFGWNGDLKKWYEMLMGHCTYFPQELRSVKYAYSADLFNALN | | | | |
| | | DLNNLIIQRDNSEKLEYHEKYHIIENVFKQKKKPTLKQIAKEIGVNPEDIKGYRI | | | | |
| | | TKSGTPEFTSFKLFHDLKKVVKDHAILDDIDLLNQIAEILTIYQDKDSIVAELGQ | | | | |
| | | LEYLMSEADKQSISELTGYTGTHSLSLKCMNMIIDELWHSSMNQMEVFTYL | | | | |
| | | NMRPKKYELKGYQRIPTDMIDDAILSPVVKRTFIQSINVINKVIEKYGIPEDIIIE | | | | |
| | | LARENNSDDRKKFINNLQKKNEATRKRINEIIGQTGNQNAKRIVEKIRLHDQ | | | | |
| | | QEGKCLYSLESIPLEDLLNNPNHYEVDHIIPRSVSFDNSYHNKVLVKQSENSK | | | | |
| | | KSNLTPYQYFNSGKSKLSYNQFKQHILNLSKSQDRISKKKKEYLLEERDINKFE | | | | |
| | | VQKEFINRNLVDTRYATRELTSYLKAYFSANNMDVKVKTINGSFTNHLRKV | | | | |
| | | WRFDKYRNHGYKHHAEDALIIANADFLFKENKKLQNTNKILEKPTIENNTKK | | | | |
| | | VTVEKEEDYNNVFETPKLVEDIKQYRDYKFSHRVDKKPNRQLINDTLYSTRM | | | | |
| | | KDEHDYIVQTITDIYGKDNTNLKKQFNKNPEKFLMYQNDPKTFEKLSIIMKQ | | | | |
| | | YSDEKNPLAKYYEETGEYLTKYSKKNNGPIVKKIKLLGNKVGNHLDVTNKYEN | | | | |
| | | STKKLVKLSIKNYRFDVYLTEKGYKFVTIAYLNVFKKDNYYYIPKDKYQELKEKK | | | | |
| | | KIKDTDQFIASFYKNDLIKLNGDLYKIIGVNSDDRNIIELDYYDIKYKDYCEINNI | | | | |
| | | KGEPRIKKTIGKKTESIEKFTTDVLGNLYLHSTEKAPQLIFKRGL | | | | |

[0344] In some embodiments, a Cas protein requires a protospacer adjacent motif (PAM) to be present in or adjacent to a target DNA sequence for the Cas protein to bind and/or function. In some embodiments, the PAM is or comprises, from 5′ to 3′, NGG, YG, NNGRRT, NNNRRT, NGA, TYCV, TATV, NTTN, or NNNGATT, where N stands for any nucleotide, Y stands for C or T, R stands for A or G, and V stands for A or C or G. In some embodiments, a Cas protein is a protein listed in Table 7 or 8. In some embodiments, a Cas protein comprises one or more mutations altering its PAM. In some embodiments, a Cas protein comprises E1369R, E1449H, and R1556A mutations or analogous substitutions to the amino acids corresponding to said positions. In some embodiments, a Cas protein comprises E782K, N968K, and R1015H mutations or analogous substitutions to the amino acids corresponding to said positions. In some embodiments, a Cas protein comprises D1135V, R1335Q, and T1337R mutations or analogous substitutions to the amino acids corresponding to said positions. In some embodiments, a Cas protein comprises S542R and K607R mutations or analogous substitutions to the amino acids corresponding to said positions. In some embodiments, a Cas protein comprises S542R, K548V, and N552R mutations or analogous substitutions to the amino acids corresponding to said positions. Exemplary advances in the engineering of Cas enzymes to recognize altered PAM sequences are reviewed in Collias et al Nature Communications 12:555 (2021), incorporated herein by reference in its entirety.

[0345] In some embodiments, the Cas protein is catalytically active and cuts one or both strands of the target DNA site. In some embodiments, cutting the target DNA site is followed by formation of an alteration, e.g., an insertion or deletion, e.g., by the cellular repair machinery.

[0346] In some embodiments, the Cas protein is modified to deactivate or partially deactivate the nuclease, e.g., nuclease-deficient Cas9. Whereas wild-type Cas9 generates double-strand breaks (DSBs) at specific DNA sequences targeted by a gRNA, a number of CRISPR endonucleases having modified functionalities are available, for example: a “nickase” version of Cas9 that has been partially deactivated generates only a single-strand break; a catalytically inactive Cas9 (“dCas9”) does not cut target DNA. In some embodiments, dCas9 binding to a DNA sequence may interfere with transcription at that site by steric hindrance. In some embodiments, dCas9 binding to an anchor sequence may interfere with (e.g., decrease or prevent) genomic complex (e.g., ASMC) formation and/or maintenance. In some embodiments, a DNA-binding domain comprises a catalytically inactive Cas9, e.g., dCas9. Many catalytically inactive Cas9 proteins are known in the art. In some embodiments, dCas9 comprises mutations in each endonuclease domain of the Cas protein, e.g., D10A and H840A or N863A mutations. In some embodiments, a catalytically inactive or partially inactive CRISPR/Cas domain comprises a Cas protein comprising one or more mutations, e.g., one or more of the mutations listed in Table 7. In some embodiments, a Cas protein described on a given row of Table 7 comprises one, two, three, or all of the mutations listed in the same row of Table 7. In some embodiments, a Cas protein, e.g., not described in Table 7, comprises one, two, three, or all of the mutations listed in a row of Table 7 or a corresponding mutation at a corresponding site in that Cas protein.

[0347] In some embodiments, a catalytically inactive, e.g., dCas9, or partially deactivated Cas9 protein comprises a D11 mutation (e.g., D11A mutation) or an analogous substitution to the amino acid corresponding to said position. In some embodiments, a catalytically inactive Cas9 protein, e.g., dCas9, or partially deactivated Cas9 protein comprises a H969 mutation (e.g., H969A mutation) or an analogous substitution to the amino acid corresponding to said position. In some embodiments, a catalytically inactive Cas9 protein, e.g., dCas9, or partially deactivated Cas9 protein comprises a N995 mutation (e.g., N995A mutation) or an analogous substitution to the amino acid corresponding to said position. In some embodiments, a catalytically inactive Cas9 protein, e.g., dCas9, comprises mutations at one, two, or three of positions D11, H969, and N995 (e.g., D11A, H969A, and N995A mutations) or analogous substitutions to the amino acids corresponding to said positions.

[0348] In some embodiments, a catalytically inactive Cas9 protein, e.g., dCas9, or partially deactivated Cas9 protein comprises a D10 mutation (e.g., a D10A mutation) or an analogous substitution to the amino acid corresponding to said position. In some embodiments, a catalytically inactive Cas9 protein, e.g., dCas9, or partially deactivated Cas9 protein comprises a H557 mutation (e.g., a H557A mutation) or an analogous substitution to the amino acid corresponding to said position. In some embodiments, a catalytically inactive Cas9 protein, e.g., dCas9, comprises a D10 mutation (e.g., a D1OA mutation) and a H557 mutation (e.g., a H557A mutation) or analogous substitutions to the amino acids corresponding to said positions.

[0349] In some embodiments, a catalytically inactive Cas9 protein, e.g., dCas9, or partially deactivated Cas9 protein comprises a D839 mutation (e.g., a D839A mutation) or an analogous substitution to the amino acid corresponding to said position. In some embodiments, a catalytically inactive Cas9 protein, e.g., dCas9, or partially deactivated Cas9 protein comprises a H840 mutation (e.g., a H840A mutation) or an analogous substitution to the amino acid corresponding to said position. In some embodiments, a catalytically inactive Cas9 protein, e.g., dCas9, or partially deactivated Cas9 protein comprises a N863 mutation (e.g., a N863A mutation) or an analogous substitution to the amino acid corresponding to said position. In some embodiments, a catalytically inactive Cas9 protein, e.g., dCas9, comprises a D10 mutation (e.g., D10A), a D839 mutation (e.g., D839A), a H840 mutation (e.g., H840A), and a N863 mutation (e.g., N863A) or analogous substitutions to the amino acids corresponding to said positions.

[0350] In some embodiments, a catalytically inactive Cas9 protein, e.g., dCas9, or partially deactivated Cas9 protein comprises a E993 mutation (e.g., a E993A mutation) or an analogous substitution to the amino acid corresponding to said position.

[0351] In some embodiments, a catalytically inactive Cas9 protein, e.g., dCas9, or partially deactivated Cas9 protein comprises a D917 mutation (e.g., a D917A mutation) or an analogous substitution to the amino acid corresponding to said position. In some embodiments, a catalytically inactive Cas9 protein, e.g., dCas9, or partially deactivated Cas9 protein comprises a a E1006 mutation (e.g., a E1006A mutation) or an analogous substitution to the amino acid corresponding to said position. In some embodiments, a catalytically inactive Cas9 protein, e.g., dCas9, or partially deactivated Cas9 protein comprises a D1255 mutation (e.g., a D1255A mutation) or an analogous substitution to the amino acid corresponding to said position. In some embodiments, a catalytically inactive Cas9 protein, e.g., dCas9, comprises a D917 mutation (e.g., D917A), a E1006 mutation (e.g., E1006A), and a D1255 mutation (e.g., D1255A) or analogous substitutions to the amino acids corresponding to said positions.

[0352] In some embodiments, a catalytically inactive Cas9 protein, e.g., dCas9, or partially deactivated Cas9 protein comprises a D16 mutation (e.g., a D16A mutation) or an analogous substitution to the amino acid corresponding to said position. In some embodiments, a catalytically inactive Cas9 protein, e.g., dCas9, or partially deactivated Cas9 protein comprises a D587 mutation (e.g., a D587A mutation) or an analogous substitution to the amino acid corresponding to said position. In some embodiments, a partially deactivated Cas domain has nickase activity. In some embodiments, a partially deactivated Cas9 domain is a Cas9 nickase domain. In some embodiments, the catalytically inactive Cas domain or dead Cas domain produces no detectable double strand break formation. In some embodiments, a catalytically inactive Cas9 protein, e.g., dCas9, or partially deactivated Cas9 protein comprises a H588 mutation (e.g., a H588A mutation) or an analogous substitution to the amino acid corresponding to said position. In some embodiments, a catalytically inactive Cas9 protein, e.g., dCas9, or partially deactivated Cas9 protein comprises a N611 mutation (e.g., a N611A mutation) or an analogous substitution to the amino acid corresponding to said position. In some embodiments, a catalytically inactive Cas9 protein, e.g., dCas9, comprises a D16 mutation (e.g., D16A), a D587 mutation (e.g., D587A), a H588 mutation (e.g., H588A), and a N611 mutation (e.g., N611A) or analogous substitutions to the amino acids corresponding to said positions.

[0353] In some embodiments, a DNA-binding domain or endonuclease domain may comprise a Cas molecule comprising or linked (e.g., covalently) to a gRNA (e.g., a template nucleic acid, e.g., template RNA, comprising a gRNA).

[0354] In some embodiments, an endonuclease domain or DNA binding domain comprises a Streptococcus pyogenes Cas9 (SpCas9) or a functional fragment or variant thereof. In some embodiments, the endonuclease domain or DNA binding domain comprises a modified SpCas9. In embodiments, the modified SpCas9 comprises a modification that alters protospacer-adjacent motif (PAM) specificity. In embodiments, the PAM has specificity for the nucleic acid sequence 5′-NGT-3′. In embodiments, the modified SpCas9 comprises one or more amino acid substitutions, e.g., at one or more of positions L1111, D1135, G1218, E1219, A1322, of R1335, e.g., selected from L1111R, D1135V, G1218R, E1219F, A1322R, R1335V. In embodiments, the modified SpCas9 comprises the amino acid substitution T1337R and one or more additional amino acid substitutions, e.g., selected from L1111, D1135L, S1136R, G1218S, E1219V, D1332A, D1332S, D1332T, D1332V, D1332L, D1332K, D1332R, R1335Q, T1337, T1337L, T1337Q, T1337I, T1337V, T1337F, T1337S, T1337N, T1337K, T1337H, T1337Q, and T1337M, or corresponding amino acid substitutions thereto. In embodiments, the modified SpCas9 comprises: (i) one or more amino acid substitutions selected from D1135L, S1136R, G1218S, E1219V, A1322R, R1335Q, and T1337; and (ii) one or more amino acid substitutions selected from L1111R, G1218R, E1219F, D1332A, D1332S, D1332T, D1332V, D1332L, D1332K, D1332R, T1337L, T1337I, T1337V, T1337F, T1337S, T1337N, T1337K, T1337R, T1337H, T1337Q, and T1337M, or corresponding amino acid substitutions thereto.

[0355] In some embodiments, the endonuclease domain or DNA binding domain comprises a Cas domain, e.g., a Cas9 domain. In embodiments, the endonuclease domain or DNA binding domain comprises a nuclease-active Cas domain, a Cas nickase (nCas) domain, or a nuclease-inactive Cas (dCas) domain. In embodiments, the endonuclease domain or DNA binding domain comprises a nuclease-active Cas9 domain, a Cas9 nickase (nCas9) domain, or a nuclease-inactive Cas9 (dCas9) domain. In some embodiments, the endonuclease domain or DNA binding domain comprises a Cas9 domain of Cas9 (e.g., dCas9 and nCas9), Cas12a/Cpf1, Cas12b/C2c1, Cas12c/C2c3, Cas12d/CasY, Cas12e/CasX, Cas12g, Cas12h, or Cas12i. In some embodiments, the endonuclease domain or DNA binding domain comprises a Cas9 (e.g., dCas9 and nCas9), Cas12a/Cpf1, Cas12b/C2c1, Cas12c/C2c3, Cas12d/CasY, Cas12e/CasX, Cas12g, Cas12h, or Cas12i. In some embodiments, the endonuclease domain or DNA binding domain comprises an S. pyogenes or an S. thermophilus Cas9, or a functional fragment thereof. In some embodiments, the endonuclease domain or DNA binding domain comprises a Cas9 sequence, e.g., as described in Chylinski, Rhun, and Charpentier (2013) RNA Biology 10:5, 726-737; incorporated herein by reference. In some embodiments, the endonuclease domain or DNA binding domain comprises the HNH nuclease subdomain and/or the RuvC1 subdomain of a Cas, e.g., Cas9, e.g., as described herein, or a variant thereof. In some embodiments, the endonuclease domain or DNA binding domain comprises Cas12a/Cpf1, Cas12b/C2c1, Cas12c/C2c3, Cas12d/CasY, Cas12e/CasX, Cas12g, Cas12h, or Cas12i. In some embodiments, the endonuclease domain or DNA binding domain comprises a Cas polypeptide (e.g., enzyme), or a functional fragment thereof. In embodiments, the Cas polypeptide (e.g., enzyme) is selected from Cas1, Cas1B, Cas2, Cas3, Cas4, Cas5, Cas5d, Cas5t, Cas5h, Cas5a, Cash, Cas7, Cas8, Cas8a, Cas8b, Cas8c, Cas9 (e.g., Csn1 or Csx12), Cas10, Cas10d, Cas12a/Cpf1, Cas12b/C2c1, Cas12c/C2c3, Cas12d/CasY, Cas12e/CasX, Cas12g, Cas12h, Cas12i, Csy1, Csy2, Csy3, Csy4, Cse1, Cse2, Cse3, Cse4, Cse5e, Csc1, Csc2, Csa5, Csn1, Csn2, Csm1, Csm2, Csm3, Csm4, Csm5, Csm6, Cmr1, Cmr3, Cmr4, Cmr5, Cmr6, Csb1, Csb2, Csb3, Csx17, Csx14, Csx10, Csx16, CsaX, Csx3, Csx1, Csx1S, Csx11, Csf1, Csf2, CsO, Csf4, Csd1, Csd2, Cst1, Cst2, Csh1, Csh2, Csa1, Csa2, Csa3, Csa4, Csa5, Type II Cas effector proteins, Type V Cas effector proteins, Type VI Cas effector proteins, CARF, DinG, Cpf1, Cas12b/C2c1, Cas12c/C2c3, Cas12b/C2c1, Cas12c/C2c3, SpCas9(K855A), eSpCas9(1.1), SpCas9-HF1, hyper accurate Cas9 variant (HypaCas9), homologues thereof, modified or engineered versions thereof, and/or functional fragments thereof. In embodiments, the Cas9 comprises one or more substitutions, e.g., selected from H840A, D10A, P475A, W476A, N477A, D1125A, W1126A, and D1127A. In embodiments, the Cas9 comprises one or more mutations at positions selected from: D10, G12, G17, E762, H840, N854, N863, H982, H983, A984, D986, and/or A987, e.g., one or more substitutions selected from D1OA, G12A, G17A, E762A, H840A, N854A, N863A, H982A, H983A, A984A, and/or D986A. In some embodiments, the endonuclease domain or DNA binding domain comprises a Cas (e.g., Cas9) sequence from Corynebacterium ulcerans, Corynebacterium diphtheria, Spiroplasma syrphidicola, Prevotella intermedia, Spiroplasma taiwanense, Streptococcus iniae, Belliella baltica, Psychroflexus torquis, Streptococcus thermophilus, Listeria innocua, Campylobacter jejuni, Neisseria meningitidis, Streptococcus pyogenes, or Staphylococcus aureus, or a fragment or variant thereof.

[0356] In some embodiments, the endonuclease domain or DNA binding domain comprises a Cpf1 domain, e.g., comprising one or more substitutions, e.g., at position D917, E1006A, D1255 or any combination thereof, e.g., selected from D917A, E1006A, D1255A, D917A/E1006A, D917A/D1255A, E1006A/D1255A, and D917A/E1006A/D1255A.

[0357] In some embodiments, the endonuclease domain or DNA binding domain comprises spCas9, spCas9-VRQR, spCas9-VRER, xCas9 (sp), saCas9, saCas9-KKH, spCas9-MQKSER, spCas9-LRKIQK, or spCas9-LRVSQL.

[0358] In some embodiments, a gene modifying polypeptide has an endonuclease domain comprising a Cas9 nickase, e.g., Cas9 H840A. In embodiments, the Cas9 H840A has the following amino acid sequence:

Cas9 nickase (H840A):
(SEQ ID NO: 11,001)
DKKYSIGLDIGTNSVGWAVITDEYKVPSKKFKVLGNTDRHSIKKNLIGAL
LFDSGETAEATRLKRTARRRYTRRKNRICYLQEIFSNEMAKVDDSFFHRL
EESFLVEEDKKHERHPIFGNIVDEVAYHEKYPTIYHLRKKLVDSTDKADL
RLIYLALAHMIKFRGHFLIEGDLNPDNSDVDKLFIQLVQTYNQLFEENPI
NASGVDAKAILSARLSKSRRLENLIAQLPGEKKNGLFGNLIALSLGLTPN
FKSNFDLAEDAKLQLSKDTYDDDLDNLLAQIGDQYADLFLAAKNLSDAIL
LSDILRVNTEITKAPLSASMIKRYDEHHQDLTLLKALVRQQLPEKYKEIF
FDQSKNGYAGYIDGGASQEEFYKFIKPILEKMDGTEELLVKLNREDLLRK
QRTFDNGSIPHQIHLGELHAILRRQEDFYPFLKDNREKIEKILTFRIPYY
VGPLARGNSRFAWMTRKSEETITPWNFEEVVDKGASAQSFIERMTNFDKN
LPNEKVLPKHSLLYEYFTVYNELTKVKYVTEGMRKPAFLSGEQKKAIVDL
LFKTNRKVTVKQLKEDYFKKIECFDSVEISGVEDRFNASLGTYHDLLKII
KDKDFLDNEENEDILEDIVLTLTLFEDREMIEERLKTYAHLFDDKVMKQL
KRRRYTGWGRLSRKLINGIRDKQSGKTILDFLKSDGFANRNFMQLIHDDS
LTFKEDIQKAQVSGQGDSLHEHIANLAGSPAIKKGILQTVKVVDELVKVM
GRHKPENIVIEMARENQTTQKGQKNSRERMKRIEEGIKELGSQILKEHPV
ENTQLQNEKLYLYYLQNGRDMYVDQELDINRLSDYDVDAIVPQSFLKDDS
IDNKVLTRSDKNRGKSDNVPSEEVVKKMKNYWRQLLNAKLITQRKFDNLT
KAERGGLSELDKAGFIKRQLVETRQITKHVAQILDSRMNTKYDENDKLIR
EVKVITLKSKLVSDFRKDFQFYKVREINNYHHAHDAYLNAVVGTALIKKY
PKLESEFVYGDYKVYDVRKMIAKSEQEIGKATAKYFFYSNIMNFFKTEIT
LANGEIRKRPLIETNGETGEIVWDKGRDFATVRKVLSMPQVNIVKKTEVQ
TGGFSKESILPKRNSDKLIARKKDWDPKKYGGFDSPTVAYSVLVVAKVEK
GKSKKLKSVKELLGITIMERSSFEKNPIDFLEAKGYKEVKKDLIIKLPKY
SLFELENGRKRMLASAGELQKGNELALPSKYVNFLYLASHYEKLKGSPED
NEQKQLFVEQHKHYLDEIIEQISEFSKRVILADANLDKVLSAYNKHRDKP
IREQAENIIHLFTLTNLGAPAAFKYFDTTIDRKRYTSTKEVLDATLIHQS
ITGLYETRIDLSQLGGD

[0359] In some embodiments, a gene modifying polypeptide comprises a dCas9 sequence comprising a D10A and/or H840A mutation, e.g., the following sequence:

(SEQ ID NO: 5007)
SMDKKYSIGLAIGTNSVGWAVITDDYKVPSKKFKVLGNTDRHSIKKNLIG
ALLFDSGETAEATRLKRTARRRYTRRKNRICYLQEIFSNEMAKVDDSFFH
RLEESFLVEEDKKHERHPIFGNIVDEVAYHEKYPTIYHLRKKLVDSTDKA
DLRLIYLALAHMIKFRGHFLIEGDLNPDNSDVDKLFIQLVQTYNQLFEEN
PINASGVDAKAILSARLSKSRRLENLIAQLPGEKKNGLFGNLIALSLGLT
PNFKSNFDLAEDAKLQLSKDTYDDDLDNLLAQIGDQYADLFLAAKNLSDA
ILLSDILRVNTEITKAPLSASMIKRYDEHHQDLTLLKALVRQQLPEKYKE
IFFDQSKNGYAGYIDGGASQEEFYKFIKPILEKMDGTEELLVKLNREDLL
RKQRTFDNGSIPHQIHLGELHAILRRQEDFYPFLKDNREKIEKILTFRIP
YYVGPLARGNSRFAWMTRKSEETITPWNFEEVVDKGASAQSFIERMTNFD
KNLPNEKVLPKHSLLYEYFTVYNELTKVKYVTEGMRKPAFLSGEQKKAIV
DLLFKTNRKVTVKQLKEDYFKKIECFDSVEISGVEDRFNASLGTYHDLLK
IIKDKDFLDNEENEDILEDIVLTLTLFEDREMIEERLKTYAHLFDDKVMK
QLKRRRYTGWGRLSRKLINGIRDKQSGKTILDFLKSDGFANRNFMQLIHD
DSLTFKEDIQKAQVSGQGDSLHEHIANLAGSPAIKKGILQTVKVVDELVK
VMGRHKPENIVIEMARENQTTQKGQKNSRERMKRIEEGIKELGSQILKEH
PVENTQLQNEKLYLYYLQNGRDMYVDQELDINRLSDYDVDAIVPQSFLKD
DSIDNKVLTRSDKNRGKSDNVPSEEVVKKMKNYWRQLLNAKLITQRKFDN
LTKAERGGLSELDKAGFIKRQLVETRQITKHVAQILDSRMNTKYDENDKL
IREVKVITLKSKLVSDFRKDFQFYKVREINNYHHAHDAYLNAVVGTALIK
KYPKLESEFVYGDYKVYDVRKMIAKSEQEIGKATAKYFFYSNIMNFFKTE
ITLANGEIRKRPLIETNGETGEIVWDKGRDFATVRKVLSMPQVNIVKKTE
VQTGGFSKESILPKRNSDKLIARKKDWDPKKYGGFDSPTVAYSVLVVAKV
EKGKSKKLKSVKELLGITIMERSSFEKNPIDFLEAKGYKEVKKDLIIKLP
KYSLFELENGRKRMLASAGELQKGNELALPSKYVNFLYLASHYEKLKGSP
EDNEQKQLFVEQHKHYLDEIIEQISEFSKRVILADANLDKVLSAYNKHRD
KPIREQAENIIHLFTLTNLGAPAAFKYFDTTIDRKRYTSTKEVLDATLIH
QSITGLYETRIDLSQLGGD

[0360] TAL Effectors and Zinc Finger Nucleases

[0361] In some embodiments, an endonuclease domain or DNA-binding domain comprises a TAL effector molecule. A TAL effector molecule, e.g., a TAL effector molecule that specifically binds a DNA sequence, typically comprises a plurality of TAL effector domains or fragments thereof, and optionally one or more additional portions of naturally occurring TAL effectors (e.g., N- and/or C-terminal of the plurality of TAL effector domains). Many TAL effectors are known to those of skill in the art and are commercially available, e.g., from Thermo Fisher Scientific.

[0362] Naturally occurring TALEs are natural effector proteins secreted by numerous species of bacterial pathogens including the plant pathogen Xanthomonas which modulates gene expression in host plants and facilitates bacterial colonization and survival. The specific binding of TAL effectors is based on a central repeat domain of tandemly arranged nearly identical repeats of typically 33 or 34 amino acids (the repeat-variable di-residues, RVD domain).

[0363] Members of the TAL effectors family differ mainly in the number and order of their repeats. The number of repeats typically ranges from 1.5 to 33.5 repeats and the C-terminal repeat is usually shorter in length (e.g., about 20 amino acids) and is generally referred to as a “half-repeat.” Each repeat of the TAL effector generally features a one-repeat-to-one-base-pair correlation with different repeat types exhibiting different base-pair specificity (one repeat recognizes one base-pair on the target gene sequence). Generally, the smaller the number of repeats, the weaker the protein-DNA interactions. A number of 6.5 repeats has been shown to be sufficient to activate transcription of a reporter gene (Scholze et al., 2010).

[0364] Repeat to repeat variations occur predominantly at amino acid positions 12 and 13, which have therefore been termed “hypervariable” and which are responsible for the specificity of the interaction with the target DNA promoter sequence, as shown in Table 9 listing exemplary repeat variable diresidues (RVD) and their correspondence to nucleic acid base targets.

TABLE 9
RVDs and Nucleic Acid Base Specificity

| Target | Possible RVD Amino Acid Combinations | | | | | | | | | | | | |
|---|---|---|---|---|---|---|---|---|---|---|---|---|---|
| A | NI | NN | CI | HI | KI | | | | | | | | |
| G | NN | GN | SN | VN | LN | DN | QN | EN | HN | RH | NK | AN | FN |
| C | HD | RD | KD | ND | AD | | | | | | | | |
| T | NG | HG | VG | IG | EG | MG | YG | AA | EP | VA | QG | KG | RG |

[0365] Accordingly, it is possible to modify the repeats of a TAL effector to target specific DNA sequences. Further studies have shown that the RVD NK can target G. Target sites of TAL effectors also tend to include a T flanking the 5′ base targeted by the first repeat, but the exact mechanism of this recognition is not known. More than 113 TAL effector sequences are known to date. Non-limiting examples of TAL effectors from Xanthomonas include, Hax2, Hax3, Hax4, AvrXa7, AvrXa10 and AvrBs3.

[0366] Accordingly, the TAL effector domain of a TAL effector molecule described herein may be derived from a TAL effector from any bacterial species (e.g., Xanthomonas species such as the African strain of Xanthomonas oryzae pv. Oryzae (Yu et al. 2011), Xanthomonas campestris pv. raphani strain 756C and Xanthomonas oryzae pv. Oryzicola strain BLS256 (Bogdanove et al. 2011). In some embodiments, the TAL effector domain comprises an RVD domain as well as flanking sequence(s) (sequences on the N-terminal and/or C-terminal side of the RVD domain) also from the naturally occurring TAL effector. It may comprise more or fewer repeats than the RVD of the naturally occurring TAL effector. The TAL effector molecule can be designed to target a given DNA sequence based on the above code and others known in the art. The number of TAL effector domains (e.g., repeats (monomers or modules)) and their specific sequence can beselected based on the desired DNA target sequence. For example, TAL effector domains, e.g., repeats, may be removed or added in order to suit a specific target sequence. In an embodiment, the TAL effector molecule of the present invention comprises between 6.5 and 33.5 TAL effector domains, e.g., repeats. In an embodiment, TAL effector molecule of the present invention comprises between 8 and 33.5 TAL effector domains, e.g., repeats, e.g., between 10 and 25 TAL effector domains, e.g., repeats, e.g., between 10 and 14 TAL effector domains, e.g., repeats.

[0367] In some embodiments, the TAL effector molecule comprises TAL effector domains that correspond to a perfect match to the DNA target sequence. In some embodiments, a mismatch between a repeat and a target base-pair on the DNA target sequence is permitted as along as it allows for the function of the polypeptide comprising the TAL effector molecule. In general, TALE binding is inversely correlated with the number of mismatches. In some embodiments, the TAL effector molecule of a polypeptide of the present invention comprises no more than 7 mismatches, 6 mismatches, 5 mismatches, 4 mismatches, 3 mismatches, 2 mismatches, or 1 mismatch, and optionally no mismatch, with the target DNA sequence. Without wishing to be bound by theory, in general the smaller the number of TAL effector domains in the TAL effector molecule, the smaller the number of mismatches will be tolerated and still allow for the function of the polypeptide comprising the TAL effector molecule. The binding affinity is thought to depend on the sum of matching repeat-DNA combinations. For example, TAL effector molecules having 25 TAL effector domains or more may be able to tolerate up to 7 mismatches.

[0368] In addition to the TAL effector domains, the TAL effector molecule of the present invention may comprise additional sequences derived from a naturally occurring TAL effector. The length of the C-terminal and/or N-terminal sequence(s) included on each side of the TAL effector domain portion of the TAL effector molecule can vary and be selected by one skilled in the art, for example based on the studies of Zhang et al. (2011). Zhang et al., have characterized a number of C-terminal and N-terminal truncation mutants in Hax3 derived TAL-effector based proteins and have identified key elements, which contribute to optimal binding to the target sequence and thus activation of transcription. Generally, it was found that transcriptional activity is inversely correlated with the length of N-terminus. Regarding the C-terminus, an important element for DNA binding residues within the first 68 amino acids of the Hax 3 sequence was identified. Accordingly, in some embodiments, the first 68 amino acids on the C-terminal side of the TAL effector domains of the naturally occurring TAL effector is included in the TAL effector molecule. Accordingly, in an embodiment, a TAL effector molecule comprises 1) one or more TAL effector domains derived from a naturally occurring TAL effector; 2) at least 70, 80, 90, 100, 110, 120, 130, 140, 150, 170, 180, 190, 200, 220, 230, 240, 250, 260, 270, 280 or more amino acids from the naturally occurring TAL effector on the N-terminal side of the TAL effector domains; and/or 3) at least 68, 80, 90, 100, 110, 120, 130, 140, 150, 170, 180, 190, 200, 220, 230, 240, 250, 260 or more amino acids from the naturally occurring TAL effector on the C-terminal side of the TAL effector domains.

[0369] In some embodiments, an endonuclease domain or DNA-binding domain is or comprises a Zn finger molecule. A Zn finger molecule comprises a Zn finger protein, e.g., a naturally occurring Zn finger protein or engineered Zn finger protein, or fragment thereof. Many Zn finger proteins are known to those of skill in the art and are commercially available, e.g., from Sigma-Aldrich.

[0370] In some embodiments, a Zn finger molecule comprises a non-naturally occurring Zn finger protein that is engineered to bind to a target DNA sequence of choice. See, for example, Beerli, et al. (2002) Nature Biotechnol. 20:135-141; Pabo, et al. (2001) Ann. Rev. Biochem. 70:313-340; Isalan, et al. (2001) Nature Biotechnol. 19:656-660; Segal, et al. (2001) Curr. Opin. Biotechnol. 12:632-637; Choo, et al. (2000) Curr. Opin. Struct. Biol. 10:411-416; U.S. Pat. Nos. 6,453,242; 6,534,261; 6,599,692; 6,503,717; 6,689,558; 7,030,215; 6,794,136; 7,067,317; 7,262,054; 7,070,934; 7,361,635; 7,253,273; and U.S. Patent Publication Nos. 2005/0064474; 2007/0218528; 2005/0267061, all incorporated herein by reference in their entireties.

[0371] An engineered Zn finger protein may have a novel binding specificity, compared to a naturally-occurring Zn finger protein. Engineering methods include, but are not limited to, rational design and various types of selection. Rational design includes, for example, using databases comprising triplet (or quadruplet) nucleotide sequences and individual Zn finger amino acid sequences, in which each triplet or quadruplet nucleotide sequence is associated with one or more amino acid sequences of zinc fingers which bind the particular triplet or quadruplet sequence. See, for example, U.S. Pat. Nos. 6,453,242 and 6,534,261, incorporated by reference herein in their entireties.

[0372] Exemplary selection methods, including phage display and two-hybrid systems, are disclosed in U.S. Pat. Nos. 5,789,538; 5,925,523; 6,007,988; 6,013,453; 6,410,248; 6,140,466; 6,200,759; and 6,242,568; as well as International Patent Publication Nos. WO 98/37186; WO 98/53057; WO 00/27878; and WO 01/88197 and GB 2,338,237. In addition, enhancement of binding specificity for zinc finger proteins has been described, for example, in International Patent Publication No. WO 02/077227.

[0373] In addition, as disclosed in these and other references, zinc finger domains and/or multi-fingered zinc finger proteins may be linked together using any suitable linker sequences, including for example, linkers of 5 or more amino acids in length. See, also, U.S. Pat. Nos. 6,479,626; 6,903,185; and 7,153,949 for exemplary linker sequences 6 or more amino acids in length. The proteins described herein may include any combination of suitable linkers between the individual zinc fingers of the protein. In addition, enhancement of binding specificity for zinc finger binding domains has been described, for example, in co-owned International Patent Publication No. WO 02/077227.

[0374] Zn finger proteins and methods for design and construction of fusion proteins (and polynucleotides encoding same) are known to those of skill in the art and described in detail in U.S. Pat. Nos. 6,140,0815; 789,538; 6,453,242; 6,534,261; 5,925,523; 6,007,988; 6,013,453; and 6,200,759; International Patent Publication Nos. WO 95/19431; WO 96/06166; WO 98/53057; WO 98/54311; WO 00/27878; WO 01/60970; WO 01/88197; WO 02/099084; WO 98/53058; WO 98/53059; WO 98/53060; WO 02/016536; and WO 03/016496.

[0375] In addition, as disclosed in these and other references, Zn finger proteins and/or multi-fingered Zn finger proteins may be linked together, e.g., as a fusion protein, using any suitable linker sequences, including for example, linkers of 5 or more amino acids in length. See, also, U.S. Pat. Nos. 6,479,626; 6,903,185; and 7,153,949 for exemplary linker sequences 6 or more amino acids in length. The Zn finger molecules described herein may include any combination of suitable linkers between the individual zinc finger proteins and/or multi-fingered Zn finger proteins of the Zn finger molecule.

[0376] In certain embodiments, the DNA-binding domain or endonuclease domain comprises a Zn finger molecule comprising an engineered zinc finger protein that binds (in a sequence-specific manner) to a target DNA sequence. In some embodiments, the Zn finger molecule comprises one Zn finger protein or fragment thereof. In other embodiments, the Zn finger molecule comprises a plurality of Zn finger proteins (or fragments thereof), e.g., 2, 3, 4, 5, 6 or more Zn finger proteins (and optionally no more than 12, 11, 10, 9, 8, 7, 6, 5, 4, 3, or 2 Zn finger proteins). In some embodiments, the Zn finger molecule comprises at least three Zn finger proteins. In some embodiments, the Zn finger molecule comprises four, five or six fingers. In some embodiments, the Zn finger molecule comprises 8, 9, 10, 11 or 12 fingers. In some embodiments, a Zn finger molecule comprising three Zn finger proteins recognizes a target DNA sequence comprising 9 or 10 nucleotides. In some embodiments, a Zn finger molecule comprising four Zn finger proteins recognizes a target DNA sequence comprising 12 to 14 nucleotides. In some embodiments, a Zn finger molecule comprising six Zn finger proteins recognizes a target DNA sequence comprising 18 to 21 nucleotides.

[0377] In some embodiments, a Zn finger molecule comprises a two-handed Zn finger protein. Two handed zinc finger proteins are those proteins in which two clusters of zinc finger proteins are separated by intervening amino acids so that the two zinc finger domains bind to two discontinuous target DNA sequences. An example of a two handed type of zinc finger binding protein is SIP1, where a cluster of four zinc finger proteins is located at the amino terminus of the protein and a cluster of three Zn finger proteins is located at the carboxyl terminus (see Remade, et al. (1999) EMBO Journal 18(18):5073-5084). Each cluster of zinc fingers in these proteins is able to bind to a unique target sequence and the spacing between the two target sequences can comprise many nucleotides.

[0378] Linkers

[0379] In some embodiments, a gene modifying polypeptide may comprise a linker, e.g., a peptide linker, e.g., a linker as described in Table 10. In some embodiments, a gene modifying polypeptide comprises, in an N-terminal to C-terminal direction, a Cas domain (e.g., a Cas domain of Table 8), a linker of Table 10 (or a sequence having at least 70%, 80%, 85%, 90%, 95%, or 99% identity thereto), and an RT domain (e.g., an RT domain of Table 6). In some embodiments, a gene modifying polypeptide comprises a flexible linker between the endonuclease and the RT domain, e.g., a linker comprising the amino acid sequence SGGSSGGSSGSETPGTSESATPESSGGSSGGSS (SEQ ID NO: 11,002). In some embodiments, an RT domain of a gene modifying polypeptide may be located C-terminal to the endonuclease domain. In some embodiments, an RT domain of a gene modifying polypeptide may be located N-terminal to the endonuclease domain.

TABLE 10
Exemplary linker sequences

| | SEQ |
|---|---|
| Amino Acid Sequence | ID NO |
| GGS | |
| GGSGGS | 5102 |
| GGSGGSGGS | 5103 |
| GGSGGSGGSGGS | 5104 |
| GGSGGSGGSGGSGGS | 5105 |
| GGSGGSGGSGGSGGSGGS | 5106 |
| GGGGS | 5107 |
| GGGGSGGGGS | 5108 |
| GGGGSGGGGSGGGGS | 5109 |
| GGGGSGGGGSGGGGSGGGGS | 5110 |
| GGGGSGGGGSGGGGSGGGGSGGGGS | 5111 |
| GGGGSGGGGSGGGGSGGGGSGGGGSGGGGS | 5112 |
| GGG | |
| GGGG | 5114 |
| GGGGG | 5115 |
| GGGGGG | 5116 |
| GGGGGGG | 5117 |
| GGGGGGGG | 5118 |
| GSS | |
| GSSGSS | 5120 |
| GSSGSSGSS | 5121 |
| GSSGSSGSSGSS | 5122 |
| GSSGSSGSSGSSGSS | 5123 |
| GSSGSSGSSGSSGSSGSS | 5124 |
| EAAAK | 5125 |
| EAAAKEAAAK | 5126 |
| EAAAKEAAAKEAAAK | 5127 |
| EAAAKEAAAKEAAAKEAAAK | 5128 |
| EAAAKEAAAKEAAAKEAAAKEAAAK | 5129 |
| EAAAKEAAAKEAAAKEAAAKEAAAKEAAAK | 5130 |
| PAP | |
| PAPAP | 5132 |
| PAPAPAP | 5133 |
| PAPAPAPAP | 5134 |
| PAPAPAPAPAP | 5135 |
| PAPAPAPAPAPAP | 5136 |
| GGSGGG | 5137 |
| GGGGGS | 5138 |
| GGSGSS | 5139 |
| GSSGGS | 5140 |
| GGSEAAAK | 5141 |
| EAAAKGGS | 5142 |
| GGSPAP | 5143 |
| PAPGGS | 5144 |
| GGGGSS | 5145 |
| GSSGGG | 5146 |
| GGGEAAAK | 5147 |
| EAAAKGGG | 5148 |
| GGGPAP | 5149 |
| PAPGGG | 5150 |
| GSSEAAAK | 5151 |
| EAAAKGSS | 5152 |
| GSSPAP | 5153 |
| PAPGSS | 5154 |
| EAAAKPAP | 5155 |
| PAPEAAAK | 5156 |
| GGSGGGGSS | 5157 |
| GGSGSSGGG | 5158 |
| GGGGGSGSS | 5159 |
| GGGGSSGGS | 5160 |
| GSSGGSGGG | 5161 |
| GSSGGGGGS | 5162 |
| GGSGGGEAAAK | 5163 |
| GGSEAAAKGGG | 5164 |
| GGGGGSEAAAK | 5165 |
| GGGEAAAKGGS | 5166 |
| EAAAKGGSGGG | 5167 |
| EAAAKGGGGGS | 5168 |
| GGSGGGPAP | 5169 |
| GGSPAPGGG | 5170 |
| GGGGGSPAP | 5171 |
| GGGPAPGGS | 5172 |
| PAPGGSGGG | 5173 |
| PAPGGGGGS | 5174 |
| GGSGSSEAAAK | 5175 |
| GGSEAAAKGSS | 5176 |
| GSSGGSEAAAK | 5177 |
| GSSEAAAKGGS | 5178 |
| EAAAKGGSGSS | 5179 |
| EAAAKGSSGGS | 5180 |
| GGSGSSPAP | 5181 |
| GGSPAPGSS | 5182 |
| GSSGGSPAP | 5183 |
| GSSPAPGGS | 5184 |
| PAPGGSGSS | 5185 |
| PAPGSSGGS | 5186 |
| GGSEAAAKPAP | 5187 |
| GGSPAPEAAAK | 5188 |
| EAAAKGGSPAP | 5189 |
| EAAAKPAPGGS | 5190 |
| PAPGGSEAAAK | 5191 |
| PAPEAAAKGGS | 5192 |
| GGGGSSEAAAK | 5193 |
| GGGEAAAKGSS | 5194 |
| GSSGGGEAAAK | 5195 |
| GSSEAAAKGGG | 5196 |
| EAAAKGGGGSS | 5197 |
| EAAAKGSSGGG | 5198 |
| GGGGSSPAP | 5199 |
| GGGPAPGSS | 5200 |
| GSSGGGPAP | 5201 |
| GSSPAPGGG | 5202 |
| PAPGGGGSS | 5203 |
| PAPGSSGGG | 5204 |
| GGGEAAAKPAP | 5205 |
| GGGPAPEAAAK | 5206 |
| EAAAKGGGPAP | 5207 |
| EAAAKPAPGGG | 5208 |
| PAPGGGEAAAK | 5209 |
| PAPEAAAKGGG | 5210 |
| GSSEAAAKPAP | 5211 |
| GSSPAPEAAAK | 5212 |
| EAAAKGSSPAP | 5213 |
| EAAAKPAPGSS | 5214 |
| PAPGSSEAAAK | 5215 |
| PAPEAAAKGSS | 5216 |
| AEAAAKEAAAKEAAAKEAAAKALEAEAAAKEAA | 5217 |
| AKEAAAKEAAAKA | |
| GGGGSEAAAKGGGGS | 5218 |
| EAAAKGGGGSEAAAK | 5219 |
| SGSETPGTSESATPES | 5220 |
| GSAGSAAGSGEF | 5221 |
| SGGSSGGSSGSETPGTSESATPESSGGSSGGSS | 5222 |

[0380] In some embodiments, a linker of a gene modifying polypeptide comprises a motif chosen from: (SGGS)n (SEQ ID NO: 5025), (GGGS)n (SEQ ID NO: 5026), (GGGGS)n (SEQ ID NO: 5027), (G)n, (EAAAK)n (SEQ ID NO: 5028), (GGS)n, or (XP)n.

[0381] Gene Modifying Polypeptide Selection by Pooled Screening

[0382] Candidate gene modifying polypeptides may be screened to evaluate a candidate's gene editing ability. For example, an RNA gene modifying system designed for the targeted editing of a coding sequence in the human genome may be used. In certain embodiments, such a gene modifying system may be used in conjunction with a pooled screening approach.

[0383] For example, a library of gene modifying polypeptide candidates and a template guide RNA (tgRNA) may be introduced into mammalian cells to test the candidates' gene editing abilities by a pooled screening approach. In specific embodiments, a library of gene modifying polypeptide candidates is introduced into mammalian cells followed by introduction of the tgRNA into the cells.

[0384] Representative, non-limiting examples of mammalian cells that may be used in screening include HEK293T cells, U2OS cells, HeLa cells, HepG2 cells, Huh? cells, K562 cells, or iPS cells.

[0385] A gene modifying polypeptide candidate may comprise 1) a Cas-nuclease, for example a wild-type Cas nuclease, e.g., a wild-type Cas9 nuclease, a mutant Cas nuclease, e.g., a Cas nickase, for example, a Cas9 nickase such as a Cas9 N863A nickase, or a Cas nuclease selected from Table 7 or Table 8, 2) a peptide linker, e.g., a sequence from Table D or Table 10, that may exhibit varying degrees of length, flexibility, hydrophobicity, and/or secondary structure; and 3) a reverse transcriptase (RT), e.g. an RT domain from Table D or Table 6. A gene modifying polypeptide candidate library comprises: a plurality of different gene modifying polypeptide candidates that differ from each other with respect to one, two or all three of the Cas nuclease, peptide linker or RT domain components, or a plurality of nucleic acid expression vectors that encode such gene modifying polypeptide candidates.

[0386] For screening of gene modifying polypeptide candidates, a two-component system may be used that comprises a gene modifying polypeptide component and a tgRNA component. A gene modifying component may comprise, for example, an expression vector, e.g., an expression plasmid or lentiviral vector, that encodes a gene modifying polypeptide candidate, for example, comprises a human codon-optimized nucleic acid that encodes a gene modifying polypeptide candidate, e.g., a Cas-linker-RT fusion as described above. In a particular embodiment, a lentiviral cassette is utilized that comprises: (i) a promoter for expression in mammalian cells, e.g., a CMV promoter; (ii) a gene modifying library candidate, e.g. a Cas-linker-RT fusion comprising a Cas nuclease of Table 7 or Table 8, a peptide linker of Table 10, and an RT of Table 6, for example a Cas-linker-RT fusion as in Table D; (iii) a self-cleaving polypeptide, e.g., a T2A peptide; (iv) a marker enabling selection in mammalian cells, e.g., a puromycin resistance gene; and (v) a termination signal, e.g., a poly A tail.

[0387] The tgRNA component may comprise a tgRNA or expression vector, e.g., an expression plasmid, that produces the tgRNA, for example, utilizes a U6 promoter to drive expression of the tgRNA, wherein the tgRNA is a non-coding RNA sequence that is recognized by Cas and localizes it to the genomic locus of interest, and that also templates reverse transcription of the desired edit into the genome by the RT domain.

[0388] To prepare a pool of cells expressing gene modifying polypeptide library candidates, mammalian cells, e.g., HEK293T or U2OS cells, may be transduced with pooled gene modifying polypeptide candidate expression vector preparations, e.g., lentiviral preparations, of the gene modifying candidate polypeptide library. In a particular embodiment, lentiviral plasmids are utilized, and HEK293 Lenti-X cells are seeded in 15 cm plates (12×10⁶ cells) prior to lentiviral plasmid transfection. In such an embodiment, lentiviral plasmid transfection may be performed using the Lentiviral Packaging Mix (Biosettia) and transfection of the plasmid DNA for the gene modifying candidate library is performed the following day using Lipofectamine 2000 and Opti-MEM media according to the manufacturer's protocol. In such an embodiment, extracellular DNA may be removed by a full media change the next day and virus-containing media may be harvested 48 hours after. Lentiviral media may be concentrated using Lenti-X Concentrator (TaKaRa Biosciences) and 5 mL lentiviral aliquots may be made and stored at −80° C. Lentiviral titering is performed by enumerating colony forming units post-selection, e.g., post Puromycin selection.

[0389] For monitoring gene editing of a target DNA, mammalian cells, e.g., HEK293T or U2OS cells, carrying a target DNA may be utilized. In other embodiments for monitoring gene editing of a target DNA, mammalian cells, e.g., HEK293T or U2OS cells, carrying a target DNA genomic landing pad may be utilized. In particular embodiments, the target DNA genomic landing pad may comprise a gene to be edited for treatment of a disease or disorder of interest. In other particular embodiments, the target DNA is a gene sequence that expresses a protein that exhibits detectable characteristics that may be monitored to determine whether gene editing has occurred. For example, in certain embodiments, a blue fluorescence protein (BFP)- or green fluorescence protein (GFP)-expressing genomic landing pad is utilized. In certain embodiments, mammalian cells, e.g., HEK293T or U2OS cells, comprising a target DNA, e.g., a target DNA genomic landing pad, are seeded in culture plates at 500×-3000× cells per gene modifying library candidate and transduced at a 0.2-0.3 multiplicity of infection (MOI) to minimize multiple infections per cell. Puromycin (2.5 ug/mL) may be added 48 hours post infection to allow for selection of infected cells. In such an embodiment, cells may be kept under puromycin selection for at least 7 days and then scaled up for tgRNA introduction, e.g., tgRNA electroporation.

[0390] To ascertain whether gene editing occurs, mammalian cells containing a target DNA to be edited may be infected with gene modifying polypeptide library candidates then transfected with tgRNA designed for use in editing of the target DNA. Subsequently, the cells may be analyzed to determine whether editing of the target locus has occurred according to the designed outcome, or whether no editing or imperfect editing has occurred, e.g., by using cell sorting and sequence analysis.

[0391] In a particular embodiment, to ascertain whether genome editing occurs, BFP- or GFP-expressing mammalian cells, e.g., HEK293T or U2OS cells, may be infected with gene modifying library candidates and then transfected or electroporated with tgRNA plasmid or RNA, e.g., by electroporation of 250,000 cells/well with 200 ng of a tgRNA plasmid designed to convert BFP-to-GFP or GFP-to-BFP, at a cell count ensuring >250×-1000× coverage per library candidate. In such an embodiment, the genome-editing capacity of the various constructs in this assay may be assessed by sorting the cells by Fluorescence-Activated Cell Sorting (FACS) for expression of the color-converted fluorescent protein (FP) at 4-10 days post-electroporation. Cells are sorted and harvested as distinct populations of unedited cells (exhibiting original florescence protein signal), edited cells (exhibiting converted fluorescence protein signal), and imperfect edit (exhibiting no florescence protein signal) cells. A sample of unsorted cells may also be harvested as the input population to determine candidate enrichment during analysis.

[0392] To determine which gene modifying library candidates exhibit genome-editing capacity in an assay, genomic DNA (gDNA) is harvested from the sorted cell populations, and analyzed by sequencing the gene modifying library candidates in each population. Briefly, gene modifying candidates may be amplified from the genome using primers specific to the gene modifying polypeptide expression vector, e.g., the lentiviral cassette, amplified in a second round of PCR to dilute genomic DNA, and then sequenced, for example, sequenced by a next-generation sequencing platform. After quality control of sequencing reads, reads of at least about 1500 nucleotides and generally no more than about 3200 nucleotides are mapped to the gene modifying polypeptide library sequences and those containing a minimum of about an 80% match to a library sequence are considered to be successfully aligned to a given candidate for purposes of this pooled screen. In order to identify candidates capable of performing gene editing in the assay, e.g., the BFP-to-GFP or GFP-to-BFP edit, the read count of each library candidate in the edited population is compared to its read count in the initial, unsorted population.

[0393] For purposes of pooled screening, gene modifying candidates with genome-editing capacity are identified based on enrichment in the edited (converted FP) population relative to unsorted (input) cells. In some embodiments, an enrichment of at least 1.0, 1.5, 2.0, 2.5, 3.0, 4.0, 5.0, 6.0, 7.0, 8.0, 9.0, 10, 15, 20, 25, 30, 40, 50, 60, 70, 80, 90, or at least 100-fold over the input indicates potentially useful gene editing activity, e.g., at least 2-fold enrichment. In some embodiments, the enrichment is converted to a log-value by taking the log base 2 of the enrichment ratio. In some embodiments, a log 2 enrichment score of at least 0, 1, 2, 3, 4, 5, 5.5, 6.0, 6.2, 6.3, 6.4, 6.5, or at least 6.6 indicates potentially useful gene editing activity, e.g., a log 2 enrichment score of at least 1.0. In particular embodiments, enrichment values observed for gene modifying candidates may be compared to enrichment values observed under similar conditions utilizing a reference, e.g., Element ID No: 17380.

[0394] In some embodiments, multiple tgRNAs may be used to screen the gene modifying candidate library. In particular embodiments, a plurality of tgRNAs may be utilized to optimize template/Cas-linker-RT fusion pairs, e.g., for gene editing of particular target genes, for example, gene targets for the treatment of disease. In specific embodiments, a pooled approach to screening gene modifying candidates may be performed using a multiplicity of different tgRNAs in an arrayed format.

[0395] In some embodiments, multiple types of edits, e.g., insertions, substitutions, and/or deletions of different lengths, may be used to screen the gene modifying candidate library.

[0396] In some embodiments, multiple target sequences, e.g., different fluorescent proteins, may be used to screen the gene modifying candidate library. In some embodiments, multiple target sequences, e.g., different fluorescent proteins, may be used to screen the gene modifying candidate library. In some embodiments, multiple cell types, e.g., HEK293T or U20S, may be used to screen the gene modifying candidate library. The person of ordinary skill in the art will appreciate that a given candidate may exhibit altered editing capacity or even the gain or loss of any observable or useful activity across different conditions, including tgRNA sequence (e.g., nucleotide modifications, PBS length, RT template length), target sequence, target location, type of edit, location of mutation relative to the first-strand nick of the gene modifying polypeptide, or cell type. Thus, in some embodiments, gene modifying library candidates are screened across multiple parameters, e.g., with at least two distinct tgRNAs in at least two cell types, and gene editing activity is identified by enrichment in any single condition. In other embodiments, a candidate with more robust activity across different tgRNA and cell types is identified by enrichment in at least two conditions, e.g., in all conditions screened. For clarity, candidates found to exhibit little to no enrichment under any given condition are not assumed to be inactive across all conditions and may be screened with different parameters or reconfigured at the polypeptide level, e.g., by swapping, shuffling, or evolving domains (e.g., RT domain), linkers, or other signals (e.g., NLS).

[0397] Sequences of Exemplary Cas9-Linker-RT Fusions

[0398] In some embodiments, a gene modifying polypeptide comprises a linker sequence and an RT sequence. In some embodiments, a gene modifying polypeptide comprises a linker sequence as listed in Table D, or an amino acid sequence having at least 75%, 80%, 85%, 90%, 95%, 96%, 97%, 98%, or 99% identity thereto. In some embodiments, a gene modifying polypeptide comprises the amino acid sequence of an RT domain as listed in Table D, or an amino acid sequence having at least 75%, 80%, 85%, 90%, 95%, 96%, 97%, 98%, or 99% identity thereto.

[0399] In some embodiments, a gene modifying polypeptide comprises a linker sequence as listed in Table D, or an amino acid sequence having at least 75%, 80%, 85%, 90%, 95%, 96%, 97%, 98%, or 99% identity thereto; and the amino acid sequence of an RT domain as listed in Table D, or an amino acid sequence having at least 75%, 80%, 85%, 90%, 95%, 96%, 97%, 98%, or 99% identity thereto. In some embodiments, a gene modifying polypeptide comprises: (i) a linker sequence as listed in a row of Table D, or an amino acid sequence having at least 75%, 80%, 85%, 90%, 95%, 96%, 97%, 98%, or 99% identity thereto; and (ii) the amino acid sequence of an RT domain as listed in the same row of Table D, or an amino acid sequence having at least 75%, 80%, 85%, 90%, 95%, 96%, 97%, 98%, or 99% identity thereto.

### Exemplary Gene Modifying Polypeptides

[0400] In some embodiments, a gene modifying polypeptide (e.g., a gene modifying polypeptide that is part of a system described herein) comprises an amino acid sequence of any one of SEQ ID NOs: 1-7743, or an amino acid sequence having at least 70%, 75%, 80%, 85%, 90%, 95%, or 99% identity thereto. In some embodiments, a gene modifying polypeptide comprises an amino acid sequence of any one of SEQ ID NOs: 1-7743, or an amino acid sequence having at least 80% identity thereto. In some embodiments, a gene modifying polypeptide comprises an amino acid sequence of any one of SEQ ID NOs: 1-7743, or an amino acid sequence having at least 90% identity thereto. In some embodiments, a gene modifying polypeptide comprises an amino acid sequence of any one of SEQ ID NOs: 1-7743, or an amino acid sequence having at least 95% identity thereto. In some embodiments, a gene modifying polypeptide comprises an amino acid sequence of any one of SEQ ID NOs: 1-7743, or an amino acid sequence having at least 99% identity thereto. In some embodiments, a gene modifying polypeptide comprises an amino acid sequence of any one of SEQ ID NOs: 1-7743. In some embodiments, a gene modifying polypeptide comprises an amino acid sequence of any one of SEQ ID NOs: 6001-7743, or an amino acid sequence having at least 70%, 75%, 80%, 85%, 90%, 95%, or 99% identity thereto. In some embodiments, a gene modifying polypeptide comprises an amino acid sequence of any one of SEQ ID NOs: 4501-4541, or an amino acid sequence having at least 70%, 75%, 80%, 85%, 90%, 95%, or 99% identity thereto.

[0401] In some embodiments, a gene modifying polypeptide comprises an amino acid sequence as listed in Table A1, or an amino acid sequence having at least 70%, 75%, 80%, 85%, 90%, 95%, or 99% identity thereto.

[0402] In some embodiments, a gene modifying polypeptide comprises an amino acid sequence as listed in Table T1, or an amino acid sequence having at least 70%, 75%, 80%, 85%, 90%, 95%, or 99% identity thereto. In some embodiments, a gene modifying polypeptide comprises a linker comprising a linker sequence as listed in Table T1, or an amino acid sequence having at least 70%, 75%, 80%, 85%, 90%, 95%, or 99% identity thereto. In some embodiments, a gene modifying polypeptide comprises an RT domain comprising an RT domain sequence as listed in Table T1, or an amino acid sequence having at least 70%, 75%, 80%, 85%, 90%, 95%, or 99% identity thereto. In some embodiments, a gene modifying polypeptide comprises: (i) a linker comprising a linker sequence as listed in a row of Table T1, or an amino acid sequence having at least 70%, 75%, 80%, 85%, 90%, 95%, or 99% identity thereto; and (ii) an RT domain comprising an RT domain sequence as listed in the same row of Table T1, or an amino acid sequence having at least 70%, 75%, 80%, 85%, 90%, 95%, or 99% identity thereto.

TABLE T1
Selection of exemplary gene modifying polypeptides

| SEQ ID NO: | | | |
|---|---|---|---|
| for Full | | SEQ ID | |
| Polypeptide | | NO: of | |
| Sequence | Linker Sequence | linker | RT name |
| 1372 | AEAAAKEAAAKEAAAK | 15,401 | AVIRE_ |
| | EAAAKALEAEAAAKEA | | P03360_ |
| | AAKEAAAKEAAAKA | | 3mutA |
| 1197 | AEAAAKEAAAKEAAAK | 15,402 | FLV_ |
| | EAAAKALEAEAAAKEA | | P10273_ |
| | AAKEAAAKEAAAKA | | 3mutA |
| 2784 | AEAAAKEAAAKEAAAK | 15,403 | MLVMS_ |
| | EAAAKALEAEAAAKEA | | P03355_ |
| | AAKEAAAKEAAAKA | | 3mutA_WS |
| 647 | AEAAAKEAAAKEAAAK | 15,404 | SFV3L_ |
| | EAAAKALEAEAAAKEA | | P27401_ |
| | AAKEAAAKEAAAKA | | 2mutA |

[0403] In some embodiments, a gene modifying polypeptide comprises an amino acid sequence as listed in Table T2, or an amino acid sequence having at least 70%, 75%, 80%, 85%, 90%, 95%, or 99% identity thereto. In some embodiments, a gene modifying polypeptide comprises a linker comprising a linker sequence as listed in Table T2, or an amino acid sequence having at least 70%, 75%, 80%, 85%, 90%, 95%, or 99% identity thereto. In some embodiments, a gene modifying polypeptide comprises an RT domain comprising an RT domain sequence as listed in Table T2, or an amino acid sequence having at least 70%, 75%, 80%, 85%, 90%, 95%, or 99% identity thereto. In some embodiments, a gene modifying polypeptide comprises: (i) a linker comprising a linker sequence as listed in a row of Table T2, or an amino acid sequence having at least 70%, 75%, 80%, 85%, 90%, 95%, or 99% identity thereto; and (ii) an RT domain comprising an RT domain sequence as listed in the same row of Table T2, or an amino acid sequence having at least 70%, 75%, 80%, 85%, 90%, 95%, or 99% identity thereto.

TABLE T2
Selection of exemplary gene modifying polypeptides

| SEQ ID NO: | | | |
|---|---|---|---|
| for Full | | SEQ ID | |
| Polypeptide | | NO: of | |
| Sequence | Linker Sequence | linker | RT name |
| 2311 | GGGGSGGGGSGGGGSGGGGS | 15,405 | MLVCB_P08361_3mutA |
| 1373 | GGGGGGGGSGGGGSGGGGSGGGGSGGGGS | 15,406 | AVIRE_P03360_3mutA |
| 2644 | GGGGSGGGGSGGGGSGGGGSGGGGSGGGGS | 15,407 | MLVMS_P03355_PLV919 |
| 2304 | GSSGSSGSSGSSGSSGSS | 15,408 | MLVCB_P08361_3mutA |
| 2325 | EAAAKEAAAKEAAAKEAAAK | 15,409 | MLVCB_P08361_3mutA |
| 2322 | EAAAKEAAAKEAAAKEAAAKEAAAKEAAAK | 15,410 | MLVCB_P08361_3mutA |
| 2187 | PAPAPAPAPAP | 15,411 | MLVBM_Q7SVK7_3mut |
| 2309 | PAPAPAPAPAPAP | 15,412 | MLVCB_P08361_3mutA |
| 2534 | PAPAPAPAPAPAP | 15,413 | MLVFF_P26809_3mutA |
| 2797 | PAPAPAPAPAPAP | 15,414 | MLVMS_P03355_3mutA_WS |
| 3084 | PAPAPAPAPAPAP | 15,415 | MLVMS_P03355_3mutA_WS |
| 2868 | PAPAPAPAPAPAP | 15,416 | MLVMS_P03355_PLV919 |
| 126 | EAAAKGGG | 15,417 | PERV_Q4VFZ2_3mut |
| 306 | EAAAKGGG | 15,418 | PERV_Q4VFZ2_3mut |
| 1410 | PAPGGG | 15,419 | AVIRE_P03360_3mutA |
| 804 | GGGGSSGGS | 15,420 | WMSV_P03359_3mut |
| 1937 | GGGGGSEAAAK | 15,421 | BAEVM_P10272_3mutA |
| 2721 | GGGEAAAKGGS | 15,422 | MLVMS_P03355_3mut |
| 3018 | GGGEAAAKGGS | 15,423 | MLVMS_P03355_3mut |
| 1018 | GGGEAAAKGGS | 15,424 | XMRV6_A1Z651_3mutA |
| 2317 | GGSGGGPAP | 15,425 | MLVCB_P08361_3mutA |
| 2649 | PAPGGSGGG | 15,426 | MLVMS_P03355_PLV919 |
| 2878 | PAPGGSGGG | 15,427 | MLVMS_P03355_PLV919 |
| 912 | GGSEAAAKPAP | 15,428 | WMSV_P03359_3mutA |
| 2338 | GGSPAPEAAAK | 15,429 | MLVCB_P08361_3mutA |
| 2527 | GGSPAPEAAAK | 15,430 | MLVFF_P26809_3mutA |
| 141 | EAAAKGGSPAP | 15,431 | PERV_Q4VFZ2_3mut |
| 341 | EAAAKGGSPAP | 15,432 | PERV_Q4VFZ2_3mut |
| 2315 | EAAAKPAPGGS | 15,433 | MLVCB_P08361_3mutA |
| 3080 | EAAAKPAPGGS | 15,434 | MLVMS_P03355_3mutA_WS |
| 2688 | GGGGSSEAAAK | 15,435 | MLVMS_P03355_PLV919 |
| 2885 | GGGGSSEAAAK | 15,436 | MLVMS_P03355_PLV919 |
| 2810 | GSSGGGEAAAK | 15,437 | MLVMS_P03355_3mutA_WS |
| 3057 | GSSGGGEAAAK | 15,438 | MLVMS_P03355_3mutA_WS |
| 1861 | GSSEAAAKGGG | 15,439 | MLVAV_P03356_3mutA |
| 3056 | GSSGGGPAP | 15,440 | MLVMS_P03355_3mutA_WS |
| 1038 | GSSPAPGGG | 15,441 | XMRV6_A1Z651_3mutA |
| 2308 | PAPGGGGSS | 15,442 | MLVCB_P08361_3mutA |
| 1672 | GGGEAAAKPAP | 15,443 | KORV_Q9TTC1-Pro_3mutA |
| 2526 | GGGEAAAKPAP | 15,444 | MLVFF_P26809_3mutA |
| 1938 | GGGPAPEAAAK | 15,445 | BAEVM_P10272_3mutA |
| 2641 | GSSEAAAKPAP | 15,446 | MLVMS_P03355_PLV919 |
| 2891 | GSSEAAAKPAP | 15,447 | MLVMS_P03355_PLV919 |
| 1225 | GSSPAPEAAAK | 15,448 | FLV_P10273_3mutA |
| 2839 | GSSPAPEAAAK | 15,449 | MLVMS_P03355_3mutA_WS |
| 3127 | GSSPAPEAAAK | 15,450 | MLVMS_P03355_3mutA_WS |
| 2798 | PAPGSSEAAAK | 15,451 | MLVMS_P03355_3mutA_WS |
| 3091 | PAPGSSEAAAK | 15,452 | MLVMS_P03355_3mutA_WS |
| 1372 | AEAAAKEAAAKEAAAKEAAAKALEAEAAAKEAA | 15,453 | AVIRE_P03360_3mutA |
| | AKEAAAKEAAAKA | | |
| 1197 | AEAAAKEAAAKEAAAKEAAAKALEAEAAAKEAA | 15,454 | FLV_P10273_3mutA |
| | AKEAAAKEAAAKA | | |
| 2611 | AEAAAKEAAAKEAAAKEAAAKALEAEAAAKEAA | 15,455 | MLVMS_P03355_PLV919 |
| | AKEAAAKEAAAKA | | |
| 2784 | AEAAAKEAAAKEAAAKEAAAKALEAEAAAKEAA | 15,456 | MLVMS_P03355_3mutA_WS |
| | AKEAAAKEAAAKA | | |
| 480 | AEAAAKEAAAKEAAAKEAAAKALEAEAAAKEAA | 15,457 | SFV1_P23074_2mutA |
| | AKEAAAKEAAAKA | | |
| 647 | AEAAAKEAAAKEAAAKEAAAKALEAEAAAKEAA | 15,458 | SFV3L_P27401_2mutA |
| | AKEAAAKEAAAKA | | |
| 1006 | AEAAAKEAAAKEAAAKEAAAKALEAEAAAKEAA | 15,459 | XMRV6_A1Z651_3mutA |
| | AKEAAAKEAAAKA | | |
| 2518 | SGSETPGTSESATPES | 15,460 | MLVFF_P26809_3mutA |

### Subsequences of Exemplary Gene Modifying Polypeptides

[0404] In some embodiments, the gene modifying polypeptide comprises, in N-terminal to C-terminal order, one or more (e.g., 1, 2, 3, 4, 5, or all 6) of an N-terminal methionine residue, a first nuclear localization signal (NLS), a DNA binding domain, a linker, an RT domain, and/or a second NLS. In some embodiments, a gene modifying polypeptide comprises, in N-terminal to C-terminal order, a NLS (e.g., a first NLS), a DNA binding domain, a linker, and an RT domain, wherein the linker and RT domain are the linker and RT domain of a gene modifying polypeptide of any one of SEQ ID NOs: 1-7743, or an amino acid sequence having at least 70%, 75%, 80%, 85%, 90%, 95%, or 99% identity to said linker and RT domain. In some embodiments, a gene modifying polypeptide comprises, in N-terminal to C-terminal order, a DNA binding domain, a linker, an RT domain, and an NLS (e.g., a second NLS) wherein the linker and RT domain are the linker and RT domain of a gene modifying polypeptide of any one of SEQ ID NOs: 1-7743, or an amino acid sequence having at least 70%, 75%, 80%, 85%, 90%, 95%, or 99% identity to said linker and RT domain. In some embodiments, a gene modifying polypeptide comprises, in N-terminal to C-terminal order, a first NLS, a DNA binding domain, a linker, an RT domain, and a second NLS, wherein the linker and RT domain are the linker and RT domain of a gene modifying polypeptide of any one of SEQ ID NOs: 1-7743, or an amino acid sequence having at least 70%, 75%, 80%, 85%, 90%, 95%, or 99% identity to said linker and RT domain. In some embodiments, the gene modifying polypeptide further comprises an N-terminal methionine residue.

[0405] In some embodiments, the gene modifying polypeptide comprises, in N-terminal to C-terminal order, one or more (e.g., 1, 2, 3, 4, 5, or all 6) of an N-terminal methionine residue, a first nuclear localization signal (NLS) (e.g., of a gene modifying polypeptide of any one of SEQ ID NOs: 1-7743 and/or as listed in any of Tables A1, T1, or T2, or an amino acid sequence having at least 70%, 75%, 80%, 85%, 90%, 95%, or 99% identity thereto), a DNA binding domain (e.g., a Cas domain, e.g., a SpyCas9 domain, e.g., as listed in Table 8, or an amino acid sequence having at least 70%, 75%, 80%, 85%, 90%, 95%, or 99% identity thereto; or a DNA binding domain of a gene modifying polypeptide of any one of SEQ ID NOs: 1-7743 and/or as listed in any of Tables A1, T1, or T2, or an amino acid sequence having at least 70%, 75%, 80%, 85%, 90%, 95%, or 99% identity thereto), a linker (e.g., of a gene modifying polypeptide of any one of SEQ ID NOs: 1-7743 and/or as listed in any of Tables A1, T1, or T2, or an amino acid sequence having at least 70%, 75%, 80%, 85%, 90%, 95%, or 99% identity thereto), an RT domain (e.g., of a gene modifying polypeptide of any one of SEQ ID NOs: 1-7743 and/or as listed in any of Tables A1, T1, or T2, or an amino acid sequence having at least 70%, 75%, 80%, 85%, 90%, 95%, or 99% identity thereto), and a second NLS (e.g., of a gene modifying polypeptide of any one of SEQ ID NOs: 1-7743 and/or as listed in any of Tables A1, T1, or T2, or an amino acid sequence having at least 70%, 75%, 80%, 85%, 90%, 95%, or 99% identity thereto). In some embodiments, the gene modifying polypeptide further comprises (e.g., C-terminal to the second NLS) a T2A sequence and/or a puromycin sequence (e.g., of a gene modifying polypeptide of any one of SEQ ID NOs: 1-7743 and/or as listed in any of Tables A1, T1, or T2, or an amino acid sequence having at least 70%, 75%, 80%, 85%, 90%, 95%, or 99% identity thereto). In some embodiments, a nucleic acid encoding a gene modifying polypeptide (e.g., as described herein) encodes a T2A sequence, e.g., wherein the T2A sequence is situated between a region encoding the gene modifying polypeptide and a second region, wherein the second region optionally encodes a selectable marker, e.g., puromycin.

[0406] In certain embodiments, the first NLS comprises a first NLS sequence of a gene modifying polypeptide having an amino acid sequence of any one of SEQ ID NOs: 1-7743, or an amino acid sequence having at least 70%, 75%, 80%, 85%, 90%, 95%, or 99% identity thereto. In certain embodiments, the first NLS comprises a first NLS sequence of a gene modifying polypeptide as listed in any of Tables A1, T1, or T2, or an amino acid sequence having at least 70%, 75%, 80%, 85%, 90%, 95%, or 99% identity thereto. In certain embodiments, the first NLS sequence comprises a C-myc NLS. In certain embodiments, the first NLS comprises the amino acid sequence PAAKRVKLD (SEQ ID NO: 11,095), or an amino acid sequence having at least 70%, 75%, 80%, 85%, 90%, 95%, or 99% identity thereto.

[0407] In certain embodiments, the gene modifying polypeptide further comprises a spacer sequence between the first NLS and the DNA binding domain. In certain embodiments, the spacer sequence between the first NLS and the DNA binding domain comprises 1, 2, 3, 4, 5, 6, 7, 8, 9, or 10 amino acids. In certain embodiments, the spacer sequence between the first NLS and the DNA binding domain comprises the amino acid sequence GG.

[0408] In certain embodiments, the DNA binding domain comprises a DNA binding domain of a gene modifying polypeptide of any one of SEQ ID NOs: 1-7743, or an amino acid sequence having at least 70%, 75%, 80%, 85%, 90%, 95%, or 99% identity thereto. In certain embodiments, the DNA binding domain comprises a DNA binding domain of a gene modifying polypeptide as listed in any of Tables A1, T1, or T2, or an amino acid sequence having at least 70%, 75%, 80%, 85%, 90%, 95%, or 99% identity thereto. In certain embodiments, the DNA binding domain comprises a Cas domain (e.g., as listed in Table 8). In certain embodiments, the DNA binding domain comprises the amino acid sequence of a SpyCas9 polypeptide (e.g., as listed in Table 8, e.g., a Cas9 N863A polypeptide), or an amino acid sequence having at least 70%, 75%, 80%, 85%, 90%, 95%, or 99% identity thereto. In certain embodiments, the DNA binding domain comprises the amino acid sequence:

(SEQ ID NO: 11,096)
DKKYSIGLDIGTNSVGWAVITDEYKVPSKKFKVLGNTDRHSIKKNLIG
ALLFDSGETAEATRLKRTARRRYTRRKNRICYLQEIFSNEMAKVDDSF
FHRLEESFLVEEDKKHERHPIFGNIVDEVAYHEKYPTIYHLRKKLVDS
TDKADLRLIYLALAHMIKFRGHFLIEGDLNPDNSDVDKLFIQLVQTYN
QLFEENPINASGVDAKAILSARLSKSRRLENLIAQLPGEKKNGLFGNL
IALSLGLTPNFKSNFDLAEDAKLQLSKDTYDDDLDNLLAQIGDQYADL
FLAAKNLSDAILLSDILRVNTEITKAPLSASMIKRYDEHHQDLTLLKA
LVRQQLPEKYKEIFFDQSKNGYAGYIDGGASQEEFYKFIKPILEKMDG
TEELLVKLNREDLLRKQRTFDNGSIPHQIHLGELHAILRRQEDFYPFL
KDNREKIEKILTFRIPYYVGPLARGNSRFAWMTRKSEETITPWNFEEV
VDKGASAQSFIERMTNFDKNLPNEKVLPKHSLLYEYFTVYNELTKVKY
VTEGMRKPAFLSGEQKKAIVDLLFKTNRKVTVKQLKEDYFKKIECFDS
VEISGVEDRFNASLGTYHDLLKIIKDKDFLDNEENEDILEDIVLTLTL
FEDREMIEERLKTYAHLFDDKVMKQLKRRRYTGWGRLSRKLINGIRDK
QSGKTILDFLKSDGFANRNFMQLIHDDSLTFKEDIQKAQVSGQGDSLH
EHIANLAGSPAIKKGILQTVKVVDELVKVMGRHKPENIVIEMARENQT
TQKGQKNSRERMKRIEEGIKELGSQILKEHPVENTQLQNEKLYLYYLQ
NGRDMYVDQELDINRLSDYDVDHIVPQSFLKDDSIDNKVLTRSDKARG
KSDNVPSEEVVKKMKNYWRQLLNAKLITQRKFDNLTKAERGGLSELDK
AGFIKRQLVETRQITKHVAQILDSRMNTKYDENDKLIREVKVITLKSK
LVSDFRKDFQFYKVREINNYHHAHDAYLNAVVGTALIKKYPKLESEFV
YGDYKVYDVRKMIAKSEQEIGKATAKYFFYSNIMNFFKTEITLANGEI
RKRPLIETNGETGEIVWDKGRDFATVRKVLSMPQVNIVKKTEVQTGGF
SKESILPKRNSDKLIARKKDWDPKKYGGFDSPTVAYSVLVVAKVEKGK
SKKLKSVKELLGITIMERSSFEKNPIDFLEAKGYKEVKKDLIIKLPKY
SLFELENGRKRMLASAGELQKGNELALPSKYVNFLYLASHYEKLKGSP
EDNEQKQLFVEQHKHYLDEIIEQISEFSKRVILADANLDKVLSAYNKH
RDKPIREQAENIIHLFTLTNLGAPAAFKYFDTTIDRKRYTSTKEVLDA
TLIHQSITGLYETRIDLSQLGGD,

or an amino acid sequence having at least 70%, 75%, 80%, 85%, 90%, 95%, or 99% identity thereto.

[0409] In certain embodiments, the gene modifying polypeptide further comprises a spacer sequence between the DNA binding domain and the linker. In certain embodiments, the spacer sequence between the DNA binding domain and the linker comprises 1, 2, 3, 4, 5, 6, 7, 8, 9, or 10 amino acids. In certain embodiments, the spacer sequence between the DNA binding domain and the linker comprises the amino acid sequence GG.

[0410] In certain embodiments, the linker comprises a linker sequence of a gene modifying polypeptide of any one of SEQ ID NOs: 1-7743, or an amino acid sequence having at least 70%, 75%, 80%, 85%, 90%, 95%, or 99% identity thereto. In certain embodiments, the linker comprises a linker sequence of a gene modifying polypeptide as listed in any of Tables A1, T1, or T2, or an amino acid sequence having at least 70%, 75%, 80%, 85%, 90%, 95%, or 99% identity thereto. In certain embodiments, the linker comprises an amino acid sequence as listed in Table D or 10, or an amino acid sequence having at least 70%, 75%, 80%, 85%, 90%, 95%, or 99% identity thereto.

[0411] In certain embodiments, the gene modifying polypeptide further comprises a spacer sequence between the linker and the RT domain. In certain embodiments, the spacer sequence between the linker and the RT domain comprises 1, 2, 3, 4, 5, 6, 7, 8, 9, or 10 amino acids. In certain embodiments, the spacer sequence between the linker and the RT domain comprises the amino acid sequence GG.

[0412] In certain embodiments, the RT domain comprises a RT domain sequence of a gene modifying polypeptide of any one of SEQ ID NOs: 1-7743, or an amino acid sequence having at least 70%, 75%, 80%, 85%, 90%, 95%, or 99% identity thereto. In certain embodiments, the RT domain comprises a RT domain sequence of a gene modifying polypeptide as listed in any of Tables A1, T1, or T2, or an amino acid sequence having at least 70%, 75%, 80%, 85%, 90%, 95%, or 99% identity thereto. In certain embodiments, the RT domain comprises an amino acid sequence as listed in Table D or 6, or an amino acid sequence having at least 70%, 75%, 80%, 85%, 90%, 95%, or 99% identity thereto. In some embodiments, the RT domain has a length of about 400-500, 500-600, 600-700, 700-800, 800-900, or 900-1000 amino acids.

[0413] In certain embodiments, the gene modifying polypeptide further comprises a spacer sequence between the RT domain and the second NLS. In certain embodiments, the spacer sequence between the RT domain and the second NLS comprises 1, 2, 3, 4, 5, 6, 7, 8, 9, or 10 amino acids. In certain embodiments, the spacer sequence between the RT domain and the second NLS comprises the amino acid sequence AG.

[0414] In certain embodiments, the second NLS comprises a second NLS sequence of a gene modifying polypeptide of any one of SEQ ID NOs: 1-7743. In certain embodiments, the second NLS comprises a second NLS sequence of a gene modifying polypeptide as listed in any of Tables A1, T1, or T2. In certain embodiments, the second NLS sequence comprises a plurality of partial NLS sequences. In embodiments, the NLS sequence, e.g., the second NLS sequence, comprises a first partial NLS sequence, e.g., comprising the amino acid sequence KRTADGSEFE (SEQ ID NO: 11,097), or an amino acid sequence having at least 70%, 75%, 80%, 85%, 90%, 95%, or 99% identity thereto. In embodiments, the NLS sequence, e.g., the second NLS sequence, comprises a second partial NLS sequence. In embodiments, the NLS sequence, e.g., the second NLS sequence, comprises an SV40A5 NLS, e.g., a bipartite SV40A5 NLS, e.g., comprising the amino acid sequence KRTADGSEFESPKKKAKVE (SEQ ID NO: 11,098), or an amino acid sequence having at least 70%, 75%, 80%, 85%, 90%, 95%, or 99% identity thereto. In certain embodiments, the NLS sequence, e.g., the second NLS sequence, comprises the amino acid sequence KRTADGSEFEKRTADGSEFESPKKKAKVE (SEQ ID NO: 11,099), or an amino acid sequence having at least 70%, 75%, 80%, 85%, 90%, 95%, or 99% identity thereto.

[0415] In certain embodiments, the gene modifying polypeptide further comprises a spacer sequence between the second NLS and the T2A sequence and/or puromycin sequence. In certain embodiments, the spacer sequence between the second NLS and the T2A sequence and/or puromycin sequence comprises 1, 2, 3, 4, 5, 6, 7, 8, 9, or 10 amino acids. In certain embodiments, the spacer sequence between the second NLS and the T2A sequence and/or puromycin sequence comprises the amino acid sequence GSG.

### Linkers and RT Domains

[0416] In some embodiments, the gene modifying polypeptide comprises a linker (e.g., as described herein) and an RT domain (e.g., as described herein). In certain embodiments, the gene modifying polypeptide comprises, in N-terminal to C-terminal order, a linker (e.g., as described herein) and an RT domain (e.g., as described herein).

[0417] In certain embodiments, the linker comprises a linker sequence as listed in Table 10, or an amino acid sequence having at least 70%, 75%, 80%, 85%, 90%, 95%, or 99% identity thereto. In certain embodiments, the linker comprises a linker sequence of any one of SEQ ID NOs: 1-7743, or an amino acid sequence having at least 70%, 75%, 80%, 85%, 90%, 95%, or 99% identity thereto. In certain embodiments, the linker comprises a linker sequence of any one of SEQ ID NOs: 6001-7743, or an amino acid sequence having at least 70%, 75%, 80%, 85%, 90%, 95%, or 99% identity thereto. In certain embodiments, the linker comprises a linker sequence of any one of SEQ ID NOs: 4501-4541, or an amino acid sequence having at least 70%, 75%, 80%, 85%, 90%, 95%, or 99% identity thereto. In certain embodiments, the linker comprises a linker sequence of an exemplary gene modifying polypeptide listed in any of Tables A1, T1, or T2, or an amino acid sequence having at least 70%, 75%, 80%, 85%, 90%, 95%, or 99% identity thereto. In certain embodiments, the RT domain comprises an RT domain sequence as listed in Table 6, or an amino acid sequence having at least 70%, 75%, 80%, 85%, 90%, 95%, or 99% identity thereto. In certain embodiments, the RT domain comprises an RT domain sequence of an exemplary gene modifying polypeptide listed in any of Tables A1, T1, or T2, or an amino acid sequence having at least 70%, 75%, 80%, 85%, 90%, 95%, or 99% identity thereto.

[0418] In some embodiments, a gene modifying polypeptide comprises a portion of a gene modifying polypeptide of any one of SEQ ID NOs: 1-7743, wherein the portion comprises a linker and RT domain, or an amino acid sequence having at least 70%, 75%, 80%, 85%, 90%, 95%, or 99% identity to said portion.

[0419] In some embodiments, a gene modifying polypeptide comprises a linker of a gene modifying polypeptide of any one of SEQ ID NOs: 1-7743, or an amino acid sequence having at least 70%, 75%, 80%, 85%, 90%, 95%, or 99% identity to said linker. In some embodiments, a gene modifying polypeptide comprises a linker of a gene modifying polypeptide of any one of SEQ ID NOs: 6001-7743, or an amino acid sequence having at least 70%, 75%, 80%, 85%, 90%, 95%, or 99% identity to said linker. In some embodiments, a gene modifying polypeptide comprises a linker of a gene modifying polypeptide of any one of SEQ ID NOs: 4501-4541, or an amino acid sequence having at least 70%, 75%, 80%, 85%, 90%, 95%, or 99% identity to said linker. In some embodiments, a gene modifying polypeptide comprises a linker of a gene modifying polypeptide as listed in any of Tables A1, T1, or T2, or a linker comprising an amino acid sequence having at least 70%, 75%, 80%, 85%, 90%, 95%, or 99% identity thereto.

[0420] In some embodiments, a gene modifying polypeptide comprises an RT domain of a gene modifying polypeptide of any one of SEQ ID NOs: 1-7743, or an amino acid sequence having at least 70%, 75%, 80%, 85%, 90%, 95%, or 99% identity to said RT domain. In some embodiments, a gene modifying polypeptide comprises an RT domain of a gene modifying polypeptide of any one of SEQ ID NOs: 6001-7743, or an amino acid sequence having at least 70%, 75%, 80%, 85%, 90%, 95%, or 99% identity said RT domain. In some embodiments, a gene modifying polypeptide comprises an RT domain of a gene modifying polypeptide of any one of SEQ ID NOs: 4501-4541, or an amino acid sequence having at least 70%, 75%, 80%, 85%, 90%, 95%, or 99% identity said RT domain. In some embodiments, a gene modifying polypeptide comprises an RT domain of a gene modifying polypeptide as listed in any of Tables A1, T1, or T2, or an RT domain comprising an amino acid sequence having at least 70%, 75%, 80%, 85%, 90%, 95%, or 99% identity thereto.

[0421] In certain embodiments, the linker and the RT domain of a gene modifying polypeptide comprise the amino acid sequences of a linker and RT domain (or amino acid sequences having at least 70%, 75%, 80%, 85%, 90%, 95%, or 99% identity thereto) of a gene modifying polypeptide having the amino acid sequence of any one of SEQ ID NOs: 1-7743. In certain embodiments, the linker and the RT domain of a gene modifying polypeptide comprise amino acid sequences of a linker and RT domain having at least 80% identity to the linker and RT domains of any one of SEQ ID NOs: 1-7743. In certain embodiments, the linker and the RT domain of a gene modifying polypeptide comprise amino acid sequences of a linker and RT domain having at least 90% identity to the linker and RT domains of any one of SEQ ID NOs: 1-7743. In certain embodiments, the linker and the RT domain of a gene modifying polypeptide comprise amino acid sequences of a linker and RT domain having at least 95% identity to the linker and RT domains of any one of SEQ ID NOs: 1-7743. In certain embodiments, the linker and the RT domain of a gene modifying polypeptide comprise amino acid sequences of a linker and RT domain having at least 99% identity to the linker and RT domains of any one of SEQ ID NOs: 1-7743. In certain embodiments, the linker and the RT domain of a gene modifying polypeptide comprise the amino acid sequences of a linker and RT domain (or amino acid sequences having at least 70%, 75%, 80%, 85%, 90%, 95%, or 99% identity thereto) of a gene modifying polypeptide having the amino acid sequence of any one of SEQ ID NOs: 6001-7743. In certain embodiments, the linker and the RT domain of a gene modifying polypeptide comprise the amino acid sequences of a linker and RT domain (or amino acid sequences having at least 70%, 75%, 80%, 85%, 90%, 95%, or 99% identity thereto) of a gene modifying polypeptide having the amino acid sequence of any one of SEQ ID NOs: 4501-4541. In certain embodiments, the linker and the RT domain of a gene modifying polypeptide comprise the amino acid sequences of a linker and RT domain (or amino acid sequences having at least 70%, 75%, 80%, 85%, 90%, 95%, or 99% identity thereto) from a single row of any of Tables A1, T1, or T2 (e.g., from a single exemplary gene modifying polypeptide as listed in any of Tables A1, T1, or T2).

[0422] In certain embodiments, the linker and the RT domain of a gene modifying polypeptide comprise the amino acid sequences of a linker and RT domain (or amino acid sequences having at least 70%, 75%, 80%, 85%, 90%, 95%, or 99% identity thereto) from two different amino acid sequences selected from SEQ ID NOs: 1-7743. In certain embodiments, the linker and the RT domain of a gene modifying polypeptide comprise the amino acid sequences of a linker and RT domain (or amino acid sequences having at least 70%, 75%, 80%, 85%, 90%, 95%, or 99% identity thereto) from different rows of any of Tables A1, T1, or T2.

[0423] In certain embodiments, the gene modifying polypeptide further comprises a first NLS (e.g., a 5′ NLS), e.g., as described herein. In certain embodiments, the gene modifying polypeptide further comprises a second NLS (e.g., a 3′ NLS), e.g., as described herein. In certain embodiments, the gene modifying polypeptide further comprises an N-terminal methionine residue.

[0424] RT Families and Mutants In certain embodiments, a gene modifying polypeptide comprises the amino acid sequence of an RT domain sequence from a family selected from: AVIRE, BAEVM, FFV, FLY, FOAMY, GALV, KORV, MLVAV, MLVBM, MLVCB, MLVFF, MLVMS, PERV, SFV1, SFV3L, WMSV, XMRV6, BLVAU, BLVJ, HTL1A, HTL1C, HTL1L, HTL32, HTL3P, HTLV2, JSRV, MLVFS, MLVRD, MMTVB, MPMV, SFVCP, SMRVH, SRV1, SRV2, and WDSV. In certain embodiments, a gene modifying polypeptide comprises the amino acid sequence of an RT domain sequence from a family selected from: AVIRE, BAEVM, FFV, FLY, FOAMY, GALV, KORV, MLVAV, MLVBM, MLVCB, MLVFF, MLVMS, PERV, SFV1, SFV3L, WMSV, and XMRV6.

[0425] In certain embodiments, a gene modifying polypeptide comprises comprises the amino acid sequence of an RT domain sequence from an MLVMS RT domain. In embodiments, the amino acid sequence of an RT domain sequence comprises one or more point mutations as listed in column 1 of Table M1, or a point mutation corresponding thereto. In embodiments, the amino acid sequence of an RT domain sequence comprises one or more point mutations as listed in column 3 of Table M1 (Gen1 MLVMS), or a point mutation corresponding thereto. In embodiments, the amino acid sequence of an RT domain sequence comprises one or more point mutations at an amino acid position of the RT domain as listed in columns 1 and 2 of Table M2, or an amino acid position corresponding thereto.

[0426] In certain embodiments, a gene modifying polypeptide comprises the amino acid sequence of an RT domain sequence from an AVIRE RT domain. In embodiments, the amino acid sequence of an RT domain sequence comprises one or more point mutations as listed in column 2 of Table M1, or a point mutation corresponding thereto. In embodiments, the amino acid sequence of an RT domain sequence comprises one or more point mutations as listed in column 4 of Table M1 (Gen2 AVIRE), or a point mutation corresponding thereto. In embodiments, the amino acid sequence of an RT domain sequence comprises one or more point mutations at an amino acid position of the RT domain as listed in columns 3 and 4 of Table M2, or an amino acid position corresponding thereto. In certain embodiments, the RT domain comprises an IENSSP (e.g., at the C-terminus).

TABLE M1
Exemplary point mutations in MLVMS and
AVIRE RT domains

| RT-linker | | Gen1 | Gen2 |
|---|---|---|---|
| filing | Corresponding | MLVMS | AVIRE |
| (MLVMS) | AVIRE | (PLV4921) | (PLV10990) |
| | | H8Y | |
| P51L | Q51L | | |
| S67R | T67R | | |
| E67K | E67K | | |
| E69K | E69K | | |
| T197A | T197A | | |
| D200N | D200N | D200N | D200N |
| H204R | N204R | | |
| E302K | E302K | | |
| | | T306K | T306K |
| F309N | Y309N | | |
| W313F | W313F | W313F | W313F |
| T330P | G330P | T330P | G330P |
| L435G | T436G | | |
| N454K | N455K | | |
| D524G | D526G | | |
| E562Q | E564Q | | |
| D583N | D585N | | |
| H594Q | H596Q | | |
| L603W | L605W | L603W | L605W |
| D653N | D655N | | |
| L671P | L673P | | |

IENSSP at C-term

TABLE M2
Positions that can be mutated in exemplary
MLVMS and AVIRE RT domains
WT residue & position

| | MLVMS | | AVIRE |
|---|---|---|---|
| MLVMS | position | AVIRE | position |
| aa | # * | aa | # * |
| H | 8 | Y | 8 |
| P | 51 | Q | 51 |
| S | 67 | T | 67 |
| E | 69 | E | 69 |
| T | 197 | T | 197 |
| D | 200 | D | 200 |
| H | 204 | N | 204 |
| E | 302 | E | 302 |
| T | 306 | T | 306 |
| F | 309 | Y | 309 |
| W | 313 | W | 313 |
| T | 330 | G | 330 |
| L | 435 | T | 436 |
| N | 454 | N | 455 |
| D | 524 | D | 526 |
| E | 562 | E | 564 |
| D | 583 | D | 585 |
| H | 594 | H | 596 |
| L | 603 | L | 605 |
| D | 653 | D | 655 |
| L | 671 | S | 673 |

[0427] In certain embodiments, a gene modifying polypeptide comprises a gamma retrovirus derived RT domain. In certain embodiments, the gamma retrovirus-derived RT domain of a gene modifying polypeptide comprises the amino acid sequence of an RT domain sequence from a family selected from: AVIRE, BAEVM, FFV, FLY, FOAMY, GALV, KORV, MLVAV,

[0428] MLVBM, MLVCB, MLVFF, MLVMS, PERV, SFV1, SFV3L, WMSV, and XMRV6. In some embodiments, the gamma retrovirus-derived RT domain of a gene modifying polypeptide is not derived from PERV. In some embodiments, said RT includes one, two, three, four, five, six or more mutations shown in Table 2A and corresponding to mutations D200N, L603W, T330P, D524G, E562Q, D583N, P51L, S67R, E67K, T197A, H204R, E302K, F309N, W313F, L435G, N454K, H594Q, L671P, E69K, or D653N in the RT domain of murine leukemia virus reverse transcriptase. In some embodiments, the gene modifying polypeptide further comprises a linker having at least 99% identity to a linker domains of any one of SEQ ID NOs: 1-7743. In some embodiments, the gene modifying polypeptide further comprises a linker having at least 99% or 100% identity to SEQ ID NO: 5217 or SEQ ID NO:11,041.

[0429] In embodiments, the RT domain comprises the amino acid sequence of an RT domain of an AVIRE RT (e.g., an AVIRE P03360 sequence, e.g., SEQ ID NO: 8001), or an amino acid sequence having at least 70%, 75%, 80%, 85%, 90%, 95%, or 99% identity thereto. In some embodiments, the RT domain comprises the amino acid sequence of an AVIRE RT further comprising one, two, three, four, or five mutations selected from the group consisting of D200N, G330P, L605W, T306K, and W313F, or a corresponding position in a homologous RT domain. In some embodiments, the RT domain comprises the amino acid sequence of an AVIRE RT further comprising one, two, or three mutations selected from the group consisting of D200N, G330P, and L605W, or a corresponding position in a homologous RT domain.

[0430] In embodiments, the RT domain comprises the amino acid sequence of an RT domain of a BAEVM RT (e.g., an BAEVM_P10272 sequence, e.g., SEQ ID NO: 8004), or an amino acid sequence having at least 70%, 75%, 80%, 85%, 90%, 95%, or 99% identity thereto. In some embodiments, the RT domain comprises the amino acid sequence of a BAEVM RT further comprising one, two, three, four, or five mutations selected from the group consisting of D198N, E328P, L602W, T304K, and W311F, or a corresponding position in a homologous RT domain. In some embodiments, the RT domain comprises the amino acid sequence of a BAEVM RT further comprising one, two, or three mutations selected from the group consisting of D198N, E328P, and L602W, or a corresponding position in a homologous RT domain.

[0431] In embodiments, the RT domain comprises the amino acid sequence of an RT domain of an FFV RT (e.g., an FFV 093209 sequence, e.g., SEQ ID NO: 8012), or an amino acid sequence having at least 70%, 75%, 80%, 85%, 90%, 95%, or 99% identity thereto. In some embodiments, the RT domain comprises the amino acid sequence of an FFV RT further comprising one, two, three, or four mutations selected from the group consisting of D21N, T293N, T419P, and L393K, or a corresponding position in a homologous RT domain. In some embodiments, the RT domain comprises the amino acid sequence of an FFV RT further comprising one, two, or three mutations selected from the group consisting of D21N, T293N, and T419P, or a corresponding position in a homologous RT domain. In some embodiments, the RT domain comprises the amino acid sequence of an FFV RT further comprising the mutation D21N. In some embodiments, the RT domain comprises the amino acid sequence of an FFV RT further comprising one, two, or three mutations selected from the group consisting of T207N, T333P, and L307K, or a corresponding position in a homologous RT domain. In some embodiments, the RT domain comprises the amino acid sequence of an FFV RT further comprising one or two mutations selected from the group consisting of T207N and T333P, or a corresponding position in a homologous RT domain.

[0432] In embodiments, the RT domain comprises the amino acid sequence of an RT domain of an FLV RT (e.g., an FLV P10273 sequence, e.g., SEQ ID NO: 8019), or an amino acid sequence having at least 70%, 75%, 80%, 85%, 90%, 95%, or 99% identity thereto. In some embodiments, the RT domain comprises the amino acid sequence of an FLV RT further comprising one, two, three, or four mutations selected from the group consisting of D199N, L602W, T305K, and W312F, or a corresponding position in a homologous RT domain. In some embodiments, the RT domain comprises the amino acid sequence of an FLV RT further comprising one or two mutations selected from the group consisting of D199N and L602W, or a corresponding position in a homologous RT domain.

[0433] In embodiments, the RT domain comprises the amino acid sequence of an RT domain of a FOAMV RT (e.g., an FOAMV P14350 sequence, e.g., SEQ ID NO: 8021), or an amino acid sequence having at least 70%, 75%, 80%, 85%, 90%, 95%, or 99% identity thereto. In some embodiments, the RT domain comprises the amino acid sequence of an FOAMV RT further comprising one, two, three, or four mutations selected from the group consisting of D24N, T296N, S420P, and L396K, or a corresponding position in a homologous RT domain. In some embodiments, the RT domain comprises the amino acid sequence of an FOAMV RT further comprising one, two, or three mutations selected from the group consisting of D24N, T296N, and S420P, or a corresponding position in a homologous RT domain. In some embodiments, the RT domain comprises the amino acid sequence of an FOAMV RT further comprising the mutation D24N, or a corresponding position in a homologous RT domain. In some embodiments, the RT domain comprises the amino acid sequence of an FOAMV RT further comprising one, two, or three mutations selected from the group consisting of T207N, S331P, and L307K, or a corresponding position in a homologous RT domain. In some embodiments, the RT domain comprises the amino acid sequence of an FOAMV RT further comprising one or two mutations selected from the group consisting of T207N and S331P, or a corresponding position in a homologous RT domain.

[0434] In embodiments, the RT domain comprises the amino acid sequence of an RT domain of a GALV RT (e.g., an GALV P21414 sequence, e.g., SEQ ID NO: 8027), or an amino acid sequence having at least 70%, 75%, 80%, 85%, 90%, 95%, or 99% identity thereto. In some embodiments, the RT domain comprises the amino acid sequence of a GALV RT further comprising one, two, three, four, or five mutations selected from the group consisting of D198N, E328P, L600W, T304K, and W311F, or a corresponding position in a homologous RT domain. In some embodiments, the RT domain comprises the amino acid sequence of a GALV RT further comprising one, two, or three mutations selected from the group consisting of D198N, E328P, and L600W, or a corresponding position in a homologous RT domain.

[0435] In embodiments, the RT domain comprises the amino acid sequence of an RT domain of a KORV RT (e.g., an KORV_Q9TTC1 sequence, e.g., SEQ ID NO: 8047), or an amino acid sequence having at least 70%, 75%, 80%, 85%, 90%, 95%, or 99% identity thereto. In some embodiments, the RT domain comprises the amino acid sequence of a GALV RT further comprising one, two, three, four, five, or six mutations selected from the group consisting of D32N, D322N, E452P, L274W, T428K, and W435F, or a corresponding position in a homologous RT domain. In some embodiments, the RT domain comprises the amino acid sequence of a GALV RT further comprising one, two, three, or four mutations selected from the group consisting of D32N, D322N, E452P, and L274W, or a corresponding position in a homologous RT domain. In some embodiments, the RT domain comprises the amino acid sequence of a GALV RT further comprising the mutation D32N. In some embodiments, the RT domain comprises the amino acid sequence of a KORV RT further comprising one, two, three, four, or five mutations selected from the group consisting of D231N, E361P, L633W, T337K, and W344F, or a corresponding position in a homologous RT domain. In some embodiments, the RT domain comprises the amino acid sequence of a KORV RT further comprising one, two, or three mutations selected from the group consisting of D231N, E361P, and L633W, or a corresponding position in a homologous RT domain.

[0436] In embodiments, the RT domain comprises the amino acid sequence of an RT domain of a MLVAV RT (e.g., an MLVAV_P03356 sequence, e.g., SEQ ID NO: 8053), or an amino acid sequence having at least 70%, 75%, 80%, 85%, 90%, 95%, or 99% identity thereto. In some embodiments, the RT domain comprises the amino acid sequence of a MLVAV RT further comprising one, two, three, four, or five mutations selected from the group consisting of D200N, T330P, L603W, T306K, and W313F, or a corresponding position in a homologous RT domain. In some embodiments, the RT domain comprises the amino acid sequence of a MLVAV RT further comprising one, two, or three mutations selected from the group consisting of D200N, T330P, and L603W, or a corresponding position in a homologous RT domain.

[0437] In embodiments, the RT domain comprises the amino acid sequence of an RT domain of a MLVBM RT (e.g., an MLVBM_Q7SVK7 sequence, e.g., SEQ ID NO: 8056), or an amino acid sequence having at least 70%, 75%, 80%, 85%, 90%, 95%, or 99% identity thereto. In some embodiments, the RT domain comprises the amino acid sequence of a MLVBM RT further comprising one, two, three, four, or five mutations selected from the group consisting of D199N, T329P, L602W, T305K, and W312F, or a corresponding position in a homologous RT domain. In some embodiments, the RT domain comprises the amino acid sequence of a MLVBM RT further comprising one, two, and three mutations selected from the group consisting of D200N, T330P, and L603W, or a corresponding position in a homologous RT domain.

[0438] In embodiments, the RT domain comprises the amino acid sequence of an RT domain of a MLVCB RT (e.g., an MLVCB_P08361 sequence, e.g., SEQ ID NO: 8062), or an amino acid sequence having at least 70%, 75%, 80%, 85%, 90%, 95%, or 99% identity thereto. In some embodiments, the RT domain comprises the amino acid sequence of a MLVCB RT further comprising one, two, three, four, or five mutations selected from the group consisting of D200N, T330P, L603W, T306K, and W313F, or a corresponding position in a homologous RT domain. In some embodiments, the RT domain comprises the amino acid sequence of a MLVCB RT further comprising one, two, and three mutations selected from the group consisting of D200N, T330P, and L603W, or a corresponding position in a homologous RT domain.

[0439] In embodiments, the RT domain comprises the amino acid sequence of an RT domain of a MLVFF RT, or an amino acid sequence having at least 70%, 75%, 80%, 85%, 90%, 95%, or 99% identity thereto. In some embodiments, the RT domain comprises the amino acid sequence of a MLVFF RT further comprising one, two, three, four, or five mutations selected from the group consisting of D200N, T330P, L603W, T306K, and W313F, or a corresponding position in a homologous RT domain. In some embodiments, the RT domain comprises the amino acid sequence of a MLVFF RT further comprising one, two, and three mutations selected from the group consisting of D200N, T330P, and L603W, or a corresponding position in a homologous RT domain.

[0440] In embodiments, the RT domain comprises the amino acid sequence of an RT domain of a MLVMS RT (e.g., an MLVMS reference sequence, e.g., SEQ ID NO: 8137; or an MLVMS P03355 sequence, e.g., SEQ ID NO: 8070), or an amino acid sequence having at least 70%, 75%, 80%, 85%, 90%, 95%, or 99% identity thereto. In some embodiments, the RT domain comprises the amino acid sequence of a MLVMS RT further comprising one, two, three, four, five, or six mutations selected from the group consisting of D200N, T330P, L603W, T306K, W313F, and H8Y, or a corresponding position in a homologous RT domain. In some embodiments, the RT domain comprises the amino acid sequence of a MLVMS RT further comprising one, two, three, four, or five mutations selected from the group consisting of D200N, T330P, L603W, T306K, and W313F, or a corresponding position in a homologous RT domain. In some embodiments, the RT domain comprises the amino acid sequence of a MLVMS RT further comprising one, two, or three mutations selected from the group consisting of D200N, T330P, and L603W, or a corresponding position in a homologous RT domain.

[0441] In embodiments, the RT domain comprises the amino acid sequence of an RT domain of a PERV RT (e.g., an PERV Q4VFZ2 sequence, e.g., SEQ ID NO: 8099), or an amino acid sequence having at least 70%, 75%, 80%, 85%, 90%, 95%, or 99% identity thereto. In some embodiments, the RT domain comprises the amino acid sequence of a PERV RT further comprising one, two, three, four, or five mutations selected from the group consisting of D196N, E326P, L599W, T302K, and W309F, or a corresponding position in a homologous RT domain. In some embodiments, the RT domain comprises the amino acid sequence of a PERV RT further comprising one, two, or three mutations selected from the group consisting of D196N, E326P, and L599W, or a corresponding position in a homologous RT domain.

[0442] In embodiments, the RT domain comprises the amino acid sequence of an RT domain of a SFV1 RT (e.g., an SFV1_P23074 sequence, e.g., SEQ ID NO: 8105), or an amino acid sequence having at least 70%, 75%, 80%, 85%, 90%, 95%, or 99% identity thereto. In some embodiments, the RT domain comprises the amino acid sequence of a SFV1 RT further comprising one, two, three, or four mutations selected from the group consisting of D24N, T296N, N420P, and L396K, or a corresponding position in a homologous RT domain. In some embodiments, the RT domain comprises the amino acid sequence of a SFV1 RT further comprising one, two, or three mutations selected from the group consisting of D24N, T296N, and N420P, or a corresponding position in a homologous RT domain. In some embodiments, the RT domain comprises the amino acid sequence of a SFV1 RT further comprising the D24N, or a corresponding position in a homologous RT domain.

[0443] In embodiments, the RT domain comprises the amino acid sequence of an RT domain of a SFV3L RT (e.g., an SFV3L P27401 sequence, e.g., SEQ ID NO: 8111), or an amino acid sequence having at least 70%, 75%, 80%, 85%, 90%, 95%, or 99% identity thereto. In some embodiments, the RT domain comprises the amino acid sequence of a SFV3L RT further comprising one, two, three, or four mutations selected from the group consisting of D24N, T296N, N422P, and L396K, or a corresponding position in a homologous RT domain. In some embodiments, the RT domain comprises the amino acid sequence of a SFV3L RT further comprising one, two, or three mutations selected from the group consisting of D24N, T296N, and N422P, or a corresponding position in a homologous RT domain. In some embodiments, the RT domain comprises the amino acid sequence of a SFV3L RT further comprising the mutation D24N, or a corresponding position in a homologous RT domain. In some embodiments, the RT domain comprises the amino acid sequence of a SFV3L RT further comprising one, two, or three mutations selected from the group consisting of T307N, N333P, and L307K, or a corresponding position in a homologous RT domain. In some embodiments, the RT domain comprises the amino acid sequence of a SFV3L RT further comprising one or two mutations selected from the group consisting of T307N and N333P, or a corresponding position in a homologous RT domain.

[0444] In embodiments, the RT domain comprises the amino acid sequence of an RT domain of a WMSV RT (e.g., an WMSV P03359 sequence, e.g., SEQ ID NO: 8131), or an amino acid sequence having at least 70%, 75%, 80%, 85%, 90%, 95%, or 99% identity thereto. In some embodiments, the RT domain comprises the amino acid sequence of a WMSV RT further comprising one, two, three, four, or five mutations selected from the group consisting of D198N, E328P, L600W, T304K, and W311F, or a corresponding position in a homologous RT domain. In some embodiments, the RT domain comprises the amino acid sequence of a WMSV RT further comprising one, two, or three mutations selected from the group consisting of D198N, E328P, and L600W, or a corresponding position in a homologous RT domain.

[0445] In embodiments, the RT domain comprises the amino acid sequence of an RT domain of a XMRV6 RT (e.g., an XMRV6_A1Z651 sequence, e.g., SEQ ID NO: 8134), or an amino acid sequence having at least 70%, 75%, 80%, 85%, 90%, 95%, or 99% identity thereto. In some embodiments, the RT domain comprises the amino acid sequence of a XMRV6 RT further comprising one, two, three, four, or five mutations selected from the group consisting of D200N, T330P, L603W, T306K, and W313F, or a corresponding position in a homologous RT domain. In some embodiments, the RT domain comprises the amino acid sequence of a XMRV6 RT further comprising one, two, or three mutations selected from the group consisting of D200N, T330P, and L603W, or a corresponding position in a homologous RT domain.

[0446] In certain embodiments, the RT domain of a gene modifying polypeptide comprises the amino acid sequence of an RT domain of an AVIRE RT, or an amino acid sequence having at least 70%, 75%, 80%, 85%, 90%, 95%, or 99% identity thereto. In embodiments, the RT domain comprises the amino acid sequence of an RT domain comprised in a sequence listed in column 1 of Table A5, or an amino acid sequence having at least 70%, 75%, 80%, 85%, 90%, 95%, or 99% identity thereto. In some embodiments, the gene modifying polypeptide further comprises a linker having at least 99% or 100% identity to SEQ ID NO: 5217 or SEQ ID NO:11,041.

[0447] In certain embodiments, the RT domain of a gene modifying polypeptide comprises the amino acid sequence of an RT domain of an MLVMS RT, or an amino acid sequence having at least 70%, 75%, 80%, 85%, 90%, 95%, or 99% identity thereto. In embodiments, the RT domain comprises the amino acid sequence of an RT domain comprised in a sequence listed in any of columns 2-6 of Table A5, or an amino acid sequence having at least 70%, 75%, 80%, 85%, 90%, 95%, or 99% identity thereto. In some embodiments, the gene modifying polypeptide further comprises a linker having at least 99% or 100% identity to SEQ ID NO: 5217 or SEQ ID NO:11,041.

TABLE A5
Exemplary gene modifying polypeptides comprising
an AVIRE RT domain or an MLVMS RT domain.

| AVIRE SEQ | | | | | |
|---|---|---|---|---|---|
| ID NOS: | MLVMS SEQ ID NOS: | | | | |
| 1 | 2704 | 3007 | 3038 | 2638 | 2930 |
| 2 | 2706 | 3007 | 3038 | 2639 | 2930 |
| 3 | 2708 | 3008 | 3039 | 2639 | 2931 |
| 4 | 2709 | 3008 | 3039 | 2640 | 2931 |
| 5 | 2709 | 3009 | 3040 | 2640 | 2932 |
| 6 | 2710 | 3010 | 3040 | 2641 | 2932 |
| 7 | 2957 | 3010 | 3041 | 2641 | 2933 |
| 9 | 2957 | 3011 | 3041 | 2642 | 2933 |
| 10 | 2958 | 3012 | 3042 | 2642 | 2934 |
| 12 | 2959 | 3012 | 3042 | 2643 | 2934 |
| 13 | 2960 | 3013 | 3043 | 2643 | 2935 |
| 14 | 2962 | 3013 | 3043 | 2644 | 2935 |
| 6076 | 6042 | 3014 | 3044 | 2644 | 2936 |
| 6143 | 6068 | 3014 | 3044 | 2645 | 2936 |
| 6200 | 6097 | 3015 | 3045 | 2645 | 2937 |
| 6254 | 6136 | 3015 | 3045 | 2646 | 2937 |
| 6274 | 6156 | 3016 | 3046 | 2646 | 2938 |
| 6315 | 6215 | 3016 | 3046 | 2647 | 2938 |
| 6328 | 6216 | 3017 | 3047 | 2647 | 2939 |
| 6337 | 6301 | 3018 | 3047 | 2648 | 2939 |
| 6403 | 6352 | 3018 | 3048 | 2648 | 2940 |
| 6420 | 6365 | 3019 | 3048 | 2649 | 2940 |
| 6440 | 6411 | 3019 | 3049 | 2649 | 2941 |
| 6513 | 6436 | 3020 | 3049 | 2650 | 2941 |
| 6552 | 6458 | 3020 | 3050 | 2650 | 2942 |
| 6613 | 6459 | 3021 | 3051 | 2651 | 2942 |
| 6671 | 6524 | 3021 | 3051 | 2651 | 2943 |
| 6822 | 6562 | 3022 | 3052 | 2652 | 2943 |
| 6840 | 6563 | 3023 | 3052 | 2652 | 2944 |
| 6884 | 6699 | 3023 | 3053 | 2653 | 2945 |
| 6907 | 6865 | 3024 | 3053 | 2653 | 2945 |
| 6970 | 7022 | 3024 | 3054 | 2654 | 2946 |
| 7025 | 7037 | 3025 | 3054 | 2655 | 2946 |
| 7052 | 7088 | 3025 | 3055 | 2655 | 2947 |
| 7078 | 7116 | 3026 | 3055 | 2656 | 2947 |
| 7243 | 7175 | 3026 | 3056 | 2656 | 2948 |
| 7253 | 7200 | 3027 | 3056 | 2657 | 2948 |
| 7318 | 7206 | 3027 | 3057 | 2657 | 2949 |
| 7379 | 7277 | 3028 | 3057 | 2658 | 2949 |
| 7486 | 7294 | 3028 | 3058 | 2658 | 2950 |
| 7524 | 7330 | 3029 | 3058 | 2659 | 2950 |
| 7668 | 7411 | 3030 | 3059 | 2659 | 2951 |
| 7680 | 7455 | 3030 | 3059 | 2660 | 2951 |
| 7720 | 7477 | 3031 | 3060 | 2660 | 2952 |
| 1137 | 7511 | 3031 | 3060 | 2661 | 2952 |
| 1138 | 7538 | 3032 | 3061 | 2661 | 2953 |
| 1139 | 7559 | 3032 | 3061 | 2662 | 2953 |
| 1140 | 7560 | 3033 | 3062 | 2662 | 2954 |
| 1141 | 7593 | 3033 | 3062 | 2663 | 2954 |
| 1142 | 7594 | 3034 | 3063 | 2663 | 2955 |
| 1143 | 7607 | 3034 | 3063 | 2664 | 2955 |
| 1144 | 7623 | 6025 | 3064 | 2664 | 6485 |
| 1145 | 7638 | 6041 | 3064 | 2665 | 6486 |
| 1146 | 7717 | 6043 | 3065 | 2665 | 6504 |
| 1147 | 7731 | 6098 | 3065 | 2666 | 6505 |
| 1148 | 7732 | 6099 | 3066 | 2666 | 6595 |
| 1149 | 2711 | 6180 | 3066 | 2667 | 6596 |
| 1150 | 2711 | 6182 | 3067 | 2667 | 6751 |
| 1151 | 2712 | 6237 | 3067 | 2668 | 6752 |
| 1152 | 2712 | 6238 | 3068 | 2668 | 6777 |
| 1153 | 2713 | 6311 | 3068 | 2669 | 6778 |
| 1154 | 2713 | 6312 | 3069 | 2669 | 7172 |
| 1155 | 2714 | 6578 | 3069 | 2670 | 7174 |
| 1156 | 2714 | 6579 | 3070 | 2670 | 7313 |
| 1157 | 2715 | 6663 | 3070 | 2671 | 7314 |
| 1158 | 2715 | 6664 | 3071 | 2671 | |
| 1159 | 2716 | 6708 | 3071 | 2672 | |
| 1160 | 2716 | 6709 | 3072 | 2672 | |
| 1161 | 2717 | 6809 | 3072 | 2673 | |
| 1162 | 2717 | 6831 | 3073 | 2673 | |
| 1163 | 2718 | 6832 | 3073 | 2674 | |
| 1164 | 2718 | 6864 | 3074 | 2674 | |
| 1165 | 2719 | 6866 | 3074 | 2675 | |
| 1166 | 2719 | 7089 | 3075 | 2675 | |
| 1167 | 2720 | 7157 | 3075 | 2676 | |
| 6015 | 2720 | 7159 | 3076 | 2676 | |
| 6029 | 2721 | 7173 | 3076 | 2677 | |
| 6045 | 2721 | 7176 | 3077 | 2677 | |
| 6077 | 2722 | 7293 | 3077 | 2678 | |
| 6129 | 2722 | 7295 | 3078 | 2678 | |
| 6144 | 2723 | 7343 | 3078 | 2679 | |
| 6164 | 2723 | 7393 | 3079 | 2680 | |
| 6201 | 2724 | 7394 | 3079 | 2680 | |
| 6227 | 2724 | 7425 | 3080 | 2681 | |
| 6244 | 2725 | 7426 | 3080 | 2681 | |
| 6250 | 2725 | 7444 | 3081 | 2682 | |
| 6264 | 2726 | 7445 | 3081 | 2682 | |
| 6289 | 2726 | 7476 | 3082 | 2683 | |
| 6304 | 2727 | 7478 | 3082 | 2683 | |
| 6316 | 2727 | 7496 | 3083 | 2684 | |
| 6384 | 2728 | 7497 | 3083 | 2684 | |
| 6421 | 2728 | 7537 | 3084 | 2685 | |
| 6441 | 2729 | 7539 | 3084 | 2685 | |
| 6492 | 2729 | 2780 | 3085 | 2686 | |
| 6514 | 2730 | 2780 | 3085 | 2686 | |
| 6530 | 2730 | 2781 | 3086 | 2687 | |
| 6569 | 2731 | 2781 | 3086 | 2687 | |
| 6584 | 2731 | 2782 | 3087 | 2688 | |
| 6621 | 2732 | 2782 | 3087 | 2688 | |
| 6651 | 2732 | 2783 | 3088 | 2689 | |
| 6659 | 2733 | 2783 | 3088 | 2689 | |
| 6683 | 2734 | 2784 | 3089 | 2690 | |
| 6703 | 2734 | 2784 | 3089 | 2690 | |
| 6727 | 2735 | 2785 | 3090 | 2691 | |
| 6732 | 2735 | 2785 | 3090 | 2692 | |
| 6745 | 2736 | 2786 | 3091 | 2692 | |
| 6755 | 2736 | 2786 | 3091 | 2693 | |
| 6784 | 2737 | 2787 | 3092 | 2693 | |
| 6817 | 2737 | 2787 | 3092 | 2694 | |
| 6823 | 2738 | 2788 | 3093 | 2694 | |
| 6841 | 2739 | 2788 | 3093 | 2695 | |
| 6871 | 2740 | 2789 | 3094 | 2695 | |
| 6885 | 2740 | 2789 | 3095 | 2696 | |
| 6898 | 2741 | 2790 | 3095 | 2696 | |
| 6908 | 2741 | 2790 | 3096 | 2697 | |
| 6933 | 2742 | 2791 | 3096 | 2697 | |
| 6971 | 2742 | 2791 | 3097 | 2698 | |
| 7009 | 2743 | 2792 | 3097 | 2698 | |
| 7018 | 2743 | 2792 | 3098 | 2699 | |
| 7045 | 2744 | 2793 | 3098 | 2699 | |
| 7053 | 2744 | 2793 | 3099 | 2700 | |
| 7068 | 2745 | 2794 | 3099 | 2700 | |
| 7079 | 2745 | 2794 | 3100 | 2701 | |
| 7096 | 2746 | 2795 | 3100 | 2701 | |
| 7104 | 2746 | 2795 | 3101 | 2702 | |
| 7122 | 2747 | 2796 | 3101 | 2702 | |
| 7151 | 2747 | 2796 | 3102 | 2703 | |
| 7163 | 2748 | 2797 | 3102 | 2703 | |
| 7181 | 2748 | 2797 | 3103 | 2862 | |
| 7244 | 2749 | 2798 | 3103 | 2862 | |
| 7273 | 2750 | 2798 | 3104 | 2863 | |
| 7319 | 2750 | 2799 | 3104 | 2863 | |
| 7336 | 2751 | 2799 | 3105 | 2864 | |
| 7380 | 2751 | 2800 | 3105 | 2864 | |
| 7402 | 2752 | 2800 | 3106 | 2865 | |
| 7462 | 2752 | 2801 | 3106 | 2865 | |
| 7487 | 2753 | 2801 | 3107 | 2866 | |
| 7525 | 2753 | 2802 | 3107 | 2866 | |
| 7569 | 2754 | 2802 | 3108 | 2867 | |
| 7626 | 2754 | 2803 | 3108 | 2867 | |
| 7689 | 2755 | 2803 | 3109 | 2868 | |
| 7707 | 2755 | 2804 | 3109 | 2868 | |
| 7721 | 2756 | 2804 | 3110 | 2869 | |
| 1371 | 2756 | 2805 | 3110 | 2869 | |
| 1372 | 2757 | 2805 | 3111 | 2870 | |
| 1373 | 2758 | 2806 | 3111 | 2870 | |
| 1374 | 2758 | 2806 | 3112 | 2871 | |
| 1375 | 2759 | 2807 | 3112 | 2871 | |
| 1376 | 2759 | 2807 | 3113 | 2872 | |
| 1377 | 2760 | 2808 | 3113 | 2872 | |
| 1378 | 2760 | 2808 | 3114 | 2873 | |
| 1379 | 2761 | 2809 | 3114 | 2873 | |
| 1380 | 2761 | 2809 | 3115 | 2874 | |
| 1381 | 2762 | 2810 | 3115 | 2874 | |
| 1382 | 2762 | 2810 | 3116 | 2875 | |
| 1383 | 2763 | 2811 | 3116 | 2875 | |
| 1384 | 2763 | 2811 | 3117 | 2876 | |
| 1385 | 2764 | 2812 | 3117 | 2876 | |
| 1386 | 2764 | 2812 | 3118 | 2877 | |
| 1387 | 2765 | 2813 | 3118 | 2877 | |
| 1388 | 2765 | 2813 | 3119 | 2878 | |
| 1389 | 2766 | 2814 | 3119 | 2878 | |
| 1390 | 2766 | 2814 | 3120 | 2879 | |
| 1391 | 2767 | 2815 | 3120 | 2879 | |
| 1392 | 2767 | 2815 | 3121 | 2880 | |
| 1393 | 2768 | 2816 | 3121 | 2880 | |
| 1394 | 2768 | 2816 | 3122 | 2881 | |
| 1395 | 2769 | 2817 | 3122 | 2881 | |
| 1396 | 2769 | 2817 | 3123 | 2882 | |
| 1397 | 2770 | 2818 | 3123 | 2882 | |
| 1398 | 2770 | 2818 | 3124 | 2883 | |
| 1399 | 2771 | 2819 | 3124 | 2883 | |
| 1400 | 2771 | 2819 | 3125 | 2884 | |
| 1401 | 2772 | 2820 | 3125 | 2884 | |
| 1402 | 2773 | 2820 | 3126 | 2885 | |
| 1403 | 2773 | 2821 | 3126 | 2885 | |
| 1404 | 2774 | 2821 | 3127 | 2886 | |
| 1405 | 2774 | 2822 | 3127 | 2886 | |
| 1406 | 2775 | 2822 | 3128 | 2887 | |
| 1407 | 2775 | 2823 | 3128 | 2887 | |
| 1408 | 2776 | 2823 | 3129 | 2888 | |
| 1409 | 2776 | 2824 | 3129 | 2888 | |
| 1410 | 2777 | 2824 | 3130 | 2889 | |
| 1411 | 2777 | 2825 | 3130 | 2889 | |
| 1412 | 2778 | 2825 | 3131 | 2890 | |
| 1413 | 2779 | 2826 | 3131 | 2890 | |
| 1414 | 2779 | 2826 | 3132 | 2891 | |
| 1415 | 2965 | 2827 | 3133 | 2891 | |
| 1416 | 2965 | 2827 | 3133 | 2892 | |
| 1417 | 2966 | 2828 | 3134 | 2893 | |
| 1418 | 2966 | 2828 | 3134 | 2893 | |
| 1419 | 2967 | 2829 | 3135 | 2894 | |
| 1420 | 2968 | 2829 | 3135 | 2894 | |
| 1421 | 2968 | 2830 | 3136 | 2895 | |
| 1422 | 2969 | 2830 | 3136 | 2895 | |
| 1423 | 2969 | 2831 | 6181 | 2896 | |
| 1424 | 2970 | 2831 | 6183 | 2896 | |
| 1425 | 2970 | 2832 | 6284 | 2897 | |
| 1426 | 2971 | 2832 | 6285 | 2897 | |
| 1427 | 2971 | 2833 | 6760 | 2898 | |
| 1428 | 2972 | 2833 | 6761 | 2898 | |
| 1429 | 2972 | 2834 | 7036 | 2899 | |
| 1430 | 2973 | 2834 | 7038 | 2899 | |
| 1431 | 2974 | 2835 | 7158 | 2900 | |
| 1432 | 2974 | 2835 | 7160 | 2900 | |
| 1433 | 2975 | 2836 | 2610 | 2901 | |
| 1434 | 2976 | 2836 | 2610 | 2901 | |
| 1435 | 2976 | 2837 | 2611 | 2902 | |
| 1436 | 2977 | 2837 | 2611 | 2902 | |
| 1437 | 2977 | 2838 | 2612 | 2903 | |
| 1439 | 2978 | 2838 | 2612 | 2903 | |
| 1440 | 2978 | 2839 | 2613 | 2904 | |
| 1441 | 2979 | 2839 | 2613 | 2904 | |
| 1442 | 2979 | 2840 | 2614 | 2905 | |
| 1443 | 2980 | 2840 | 2614 | 2905 | |
| 1444 | 2980 | 2841 | 2615 | 2906 | |
| 1445 | 2981 | 2841 | 2615 | 2906 | |
| 1446 | 2981 | 2842 | 2616 | 2907 | |
| 1447 | 2982 | 2842 | 2616 | 2907 | |
| 6001 | 2982 | 2843 | 2617 | 2908 | |
| 6030 | 2983 | 2843 | 2617 | 2908 | |
| 6078 | 2983 | 2844 | 2618 | 2909 | |
| 6108 | 2984 | 2844 | 2618 | 2909 | |
| 6130 | 2985 | 2845 | 2619 | 2910 | |
| 6165 | 2985 | 2845 | 2619 | 2910 | |
| 6265 | 2986 | 2846 | 2620 | 2911 | |
| 6275 | 2987 | 2846 | 2620 | 2911 | |
| 6305 | 2987 | 2847 | 2621 | 2912 | |
| 6329 | 2988 | 2847 | 2621 | 2912 | |
| 6370 | 2988 | 2848 | 2622 | 2913 | |
| 6385 | 2989 | 2848 | 2622 | 2913 | |
| 6404 | 2989 | 2849 | 2623 | 2914 | |
| 6531 | 2990 | 2849 | 2623 | 2914 | |
| 6585 | 2990 | 2850 | 2624 | 2915 | |
| 6622 | 2991 | 2850 | 2624 | 2915 | |
| 6652 | 2991 | 2851 | 2625 | 2916 | |
| 6733 | 2992 | 2851 | 2625 | 2916 | |
| 6756 | 2992 | 2852 | 2626 | 2917 | |
| 6765 | 2993 | 2852 | 2626 | 2917 | |
| 6798 | 2993 | 2853 | 2627 | 2918 | |
| 6824 | 2994 | 2853 | 2627 | 2919 | |
| 6972 | 2994 | 2854 | 2628 | 2919 | |
| 7046 | 2995 | 2854 | 2628 | 2920 | |
| 7054 | 2995 | 2855 | 2629 | 2920 | |
| 7069 | 2996 | 2855 | 2629 | 2921 | |
| 7080 | 2996 | 2856 | 2630 | 2921 | |
| 7105 | 2997 | 2856 | 2630 | 2922 | |
| 7123 | 2998 | 2857 | 2631 | 2922 | |
| 7143 | 2998 | 2857 | 2631 | 2923 | |
| 7152 | 2999 | 2858 | 2632 | 2923 | |
| 7204 | 2999 | 2858 | 2632 | 2924 | |
| 7320 | 3001 | 2859 | 2633 | 2924 | |
| 7351 | 3001 | 2859 | 2633 | 2925 | |
| 7381 | 3002 | 2860 | 2634 | 2925 | |
| 7403 | 3002 | 2860 | 2634 | 2926 | |
| 7438 | 3003 | 2861 | 2635 | 2926 | |
| 7488 | 3003 | 2861 | 2635 | 2927 | |
| 7500 | 3004 | 3035 | 2636 | 2927 | |
| 7526 | 3004 | 3036 | 2636 | 2928 | |
| 7588 | 3005 | 3036 | 2637 | 2928 | |
| 7612 | 3005 | 3037 | 2637 | 2929 | |
| 7627 | 3006 | 3037 | 2638 | 2929 | |

### Systems

[0448] In an aspect, the disclosure relates to a system comprising nucleic acid molecule encoding a gene modifying polypeptide (e.g., as described herein) and a template nucleic acid (e.g., a template RNA, e.g., as described herein). In certain embodiments, the nucleic acid molecule encoding the gene modifying polypeptide comprises one or more silent mutations in the coding region (e.g., in the sequence encoding the RT domain) relative to a nucleic acid molecule as described herein. In certain embodiments, the system further comprises a gRNA (e.g., a gRNA that binds to a polypeptide that induces a nick, e.g., in the opposite strand of the target DNA bound by the gene modifying polypeptide).

[0449] In certain embodiments, the nucleic acid molecule encoding the gene modifying polypeptide encodes a polypeptide having an amino acid sequence selected from SEQ ID NOs: 1-7743, or an amino acid sequence having at least 70%, 75%, 80%, 85%, 90%, 95%, or 99% identity thereto. In certain embodiments, the nucleic acid molecule encoding the gene modifying polypeptide encodes a polypeptide having an amino acid sequence selected from SEQ ID NOs: 6001-7743, or an amino acid sequence having at least 70%, 75%, 80%, 85%, 90%, 95%, or 99% identity thereto. In certain embodiments, the nucleic acid molecule encoding the gene modifying polypeptide encodes a polypeptide having an amino acid sequence selected from SEQ ID NOs: 4501-4541, or an amino acid sequence having at least 70%, 75%, 80%, 85%, 90%, 95%, or 99% identity thereto. In certain embodiments, the nucleic acid molecule encoding the gene modifying polypeptide encodes a polypeptide as listed in any of Tables A1, T1, or T2, or an amino acid sequence having at least 70%, 75%, 80%, 85%, 90%, 95%, or 99% identity thereto.

[0450] In certain embodiments, the nucleic acid molecule encoding the gene modifying polypeptide comprises a sequence encoding a portion of an amino acid sequence selected from SEQ ID NOs: 1-7743, wherein the portion comprises a linker and RT domain, or an amino acid sequence having at least 70%, 75%, 80%, 85%, 90%, 95%, or 99% identity to said portion. In certain embodiments, the nucleic acid molecule encoding the gene modifying polypeptide comprises a sequence encoding a portion of an amino acid sequence selected from SEQ ID NOs: 6001-7743, wherein the portion comprises a linker and RT domain, or an amino acid sequence having at least 70%, 75%, 80%, 85%, 90%, 95%, or 99% identity to said portion. In certain embodiments, the nucleic acid molecule encoding the gene modifying polypeptide comprises a sequence encoding a portion of an amino acid sequence selected from SEQ ID NOs: 4501-4541, wherein the portion comprises a linker and RT domain, or an amino acid sequence having at least 70%, 75%, 80%, 85%, 90%, 95%, or 99% identity to said portion. In certain embodiments, the nucleic acid molecule encoding the gene modifying polypeptide comprises a sequence encoding a portion of a polypeptide listed in any of Tables A1, T1, or T2, wherein the portion comprises a linker and RT domain, or an amino acid sequence having at least 70%, 75%, 80%, 85%, 90%, 95%, or 99% identity to said portion.

[0451] In certain embodiments, the nucleic acid molecule encoding the gene modifying polypeptide comprises a sequence encoding the linker of an amino acid sequence selected from SEQ ID NOs: 1-7743, or an amino acid sequence having at least 70%, 75%, 80%, 85%, 90%, 95%, or 99% identity thereto. In certain embodiments, the nucleic acid molecule encoding the gene modifying polypeptide comprises a sequence encoding the linker of a polypeptide having an amino acid sequence selected from SEQ ID NOs: 6001-7743, or an amino acid sequence having at least 70%, 75%, 80%, 85%, 90%, 95%, or 99% identity thereto. In certain embodiments, the nucleic acid molecule encoding the gene modifying polypeptide comprises a sequence encoding the linker of a polypeptide having an amino acid sequence selected from SEQ ID NOs: 4501-4541, or an amino acid sequence having at least 70%, 75%, 80%, 85%, 90%, 95%, or 99% identity thereto. In certain embodiments, the nucleic acid molecule encoding the gene modifying polypeptide comprises a sequence encoding the linker of a polypeptide as listed in any of Tables A1, T1, or T2, or an amino acid sequence having at least 70%, 75%, 80%, 85%, 90%, 95%, or 99% identity thereto.

[0452] In certain embodiments, the nucleic acid molecule encoding the gene modifying polypeptide comprises a sequence encoding the RT domain of an amino acid sequence selected from SEQ ID NOs: 1-7743, or an amino acid sequence having at least 70%, 75%, 80%, 85%, 90%, 95%, or 99% identity thereto. In certain embodiments, the nucleic acid molecule encoding the gene modifying polypeptide comprises a sequence encoding the RT domain of a polypeptide having an amino acid sequence selected from SEQ ID NOs: 6001-7743, or an amino acid sequence having at least 70%, 75%, 80%, 85%, 90%, 95%, or 99% identity thereto. In certain embodiments, the nucleic acid molecule encoding the gene modifying polypeptide comprises a sequence encoding the RT domain of a polypeptide having an amino acid sequence selected from SEQ ID NOs: 4501-4541, or an amino acid sequence having at least 70%, 75%, 80%, 85%, 90%, 95%, or 99% identity thereto. In certain embodiments, the nucleic acid molecule encoding the gene modifying polypeptide comprises a sequence encoding the RT domain of a polypeptide as listed in any of Tables A1, T1, or T2, or an amino acid sequence having at least 70%, 75%, 80%, 85%, 90%, 95%, or 99% identity thereto.

[0453] In an aspect, the disclosure relates to a system comprising a gene modifying polypeptide (e.g., as described herein) and a template nucleic acid (e.g., a template RNA, e.g., as described herein).

[0454] In certain embodiments, the gene modifying polypeptide comprises a polypeptide having an amino acid sequence selected from SEQ ID NOs: 1-7743, or an amino acid sequence having at least 70%, 75%, 80%, 85%, 90%, 95%, or 99% identity thereto. In certain embodiments, the gene modifying polypeptide comprises a polypeptide having an amino acid sequence selected from SEQ ID NOs: 6001-7743, or an amino acid sequence having at least 70%, 75%, 80%, 85%, 90%, 95%, or 99% identity thereto. In certain embodiments, the gene modifying polypeptide comprises a polypeptide having an amino acid sequence selected from SEQ ID NOs: 4501-4541, or an amino acid sequence having at least 70%, 75%, 80%, 85%, 90%, 95%, or 99% identity thereto. In certain embodiments, the gene modifying polypeptide comprises a polypeptide as listed in any of Tables A1, T1, or T2, or an amino acid sequence having at least 70%, 75%, 80%, 85%, 90%, 95%, or 99% identity thereto.

[0455] In certain embodiments, the gene modifying polypeptide comprises a portion of an amino acid sequence selected from SEQ ID NOs: 1-7743, wherein the portion comprises a linker and RT domain, or an amino acid sequence having at least 70%, 75%, 80%, 85%, 90%, 95%, or 99% identity to said portion. In certain embodiments, the gene modifying polypeptide comprises a portion of an amino acid sequence selected from SEQ ID NOs: 6001-7743, wherein the portion comprises a linker and RT domain, or an amino acid sequence having at least 70%, 75%, 80%, 85%, 90%, 95%, or 99% identity to said portion. In certain embodiments, the gene modifying polypeptide comprises a portion of an amino acid sequence selected from SEQ ID NOs: 4501-4541, wherein the portion comprises a linker and RT domain, or an amino acid sequence having at least 70%, 75%, 80%, 85%, 90%, 95%, or 99% identity to said portion. In certain embodiments, the gene modifying polypeptide comprises a portion of a polypeptide listed in any of Tables A1, T1, or T2, wherein the portion comprises a linker and RT domain, or an amino acid sequence having at least 70%, 75%, 80%, 85%, 90%, 95%, or 99% identity to said portion.

[0456] In certain embodiments, the gene modifying polypeptide comprises the linker of an amino acid sequence selected from SEQ ID NOs: 1-7743, or an amino acid sequence having at least 70%, 75%, 80%, 85%, 90%, 95%, or 99% identity thereto. In certain embodiments, the gene modifying polypeptide comprises a sequence encoding the linker of a polypeptide having an amino acid sequence selected from SEQ ID NOs: 6001-7743, or an amino acid sequence having at least 70%, 75%, 80%, 85%, 90%, 95%, or 99% identity thereto. In certain embodiments, the gene modifying polypeptide comprises a sequence encoding the linker of a polypeptide having an amino acid sequence selected from SEQ ID NOs: 4501-4541, or an amino acid sequence having at least 70%, 75%, 80%, 85%, 90%, 95%, or 99% identity thereto. In certain embodiments, the gene modifying polypeptide comprises the linker of a polypeptide as listed in any of Tables A1, T1, or T2, or an amino acid sequence having at least 70%, 75%, 80%, 85%, 90%, 95%, or 99% identity thereto.

[0457] In certain embodiments, the gene modifying polypeptide comprises the RT domain of an amino acid sequence selected from SEQ ID NOs: 1-7743, or an amino acid sequence having at least 70%, 75%, 80%, 85%, 90%, 95%, or 99% identity thereto. In certain embodiments, the gene modifying polypeptide comprises a sequence encoding the RT domain of a polypeptide having an amino acid sequence selected from SEQ ID NOs: 6001-7743, or an amino acid sequence having at least 70%, 75%, 80%, 85%, 90%, 95%, or 99% identity thereto. In certain embodiments, the gene modifying polypeptide comprises a sequence encoding the RT domain of a polypeptide having an amino acid sequence selected from SEQ ID NOs: 4501-4541, or an amino acid sequence having at least 70%, 75%, 80%, 85%, 90%, 95%, or 99% identity thereto. In certain embodiments, the gene modifying polypeptide comprises the RT domain of a polypeptide as listed in any of Tables A1, T1, or T2, or an amino acid sequence having at least 70%, 75%, 80%, 85%, 90%, 95%, or 99% identity thereto.

Lengthy table referenced here
US20240084334A1-20240314-T00001
Please refer to the end of the specification for access instructions.

### Localization Sequences for Gene Modifying Systems

[0458] In certain embodiments, a gene editor system RNA further comprises an intracellular localization sequence, e.g., a nuclear localization sequence (NLS). In some embodiments, a gene modifying polypeptide comprises an NLS as comprised in SEQ ID NO: 4000 and/or SEQ ID NO: 4001, or an NLS having an amino acid sequence having at least 75%, 80%, 85%, 90%, 95%, 96%, 97%, 98%, or 99% identity thereto.

[0459] The nuclear localization sequence may be an RNA sequence that promotes the import of the RNA into the nucleus. In certain embodiments the nuclear localization signal is located on the template RNA. In certain embodiments, the gene modifying polypeptide is encoded on a first RNA, and the template RNA is a second, separate, RNA, and the nuclear localization signal is located on the template RNA and not on an RNA encoding the gene modifying polypeptide. While not wishing to be bound by theory, in some embodiments, the RNA encoding the gene modifying polypeptide is targeted primarily to the cytoplasm to promote its translation, while the template RNA is targeted primarily to the nucleus to promote insertion into the genome. In some embodiments the nuclear localization signal is at the 3′ end, 5′ end, or in an internal region of the template RNA. In some embodiments the nuclear localization signal is 3′ of the heterologous sequence (e.g., is directly 3′ of the heterologous sequence) or is 5′ of the heterologous sequence (e.g., is directly 5′ of the heterologous sequence). In some embodiments the nuclear localization signal is placed outside of the 5′ UTR or outside of the 3′ UTR of the template RNA. In some embodiments the nuclear localization signal is placed between the 5′ UTR and the 3′ UTR, wherein optionally the nuclear localization signal is not transcribed with the transgene (e.g., the nuclear localization signal is an anti-sense orientation or is downstream of a transcriptional termination signal or polyadenylation signal). In some embodiments the nuclear localization sequence is situated inside of an intron. In some embodiments a plurality of the same or different nuclear localization signals are in the RNA, e.g., in the template RNA. In some embodiments the nuclear localization signal is less than 5, 10, 25, 50, 75, 100, 150, 200, 250, 300, 350, 400, 450, 500, 600, 700, 800, 900 or 1000 bp in length. Various RNA nuclear localization sequences can be used. For example, Lubelsky and Ulitsky, Nature 555 (107-111), 2018 describe RNA sequences which drive RNA localization into the nucleus. In some embodiments, the nuclear localization signal is a SINE-derived nuclear RNA localization (SIRLOIN) signal. In some embodiments the nuclear localization signal binds a nuclear-enriched protein. In some embodiments the nuclear localization signal binds the HNRNPK protein. In some embodiments the nuclear localization signal is rich in pyrimidines, e.g., is a C/T rich, C/U rich, C rich, T rich, or U rich region. In some embodiments the nuclear localization signal is derived from a long non-coding RNA. In some embodiments the nuclear localization signal is derived from MALAT1 long non-coding RNA or is the 600 nucleotide M region of MALAT1 (described in Miyagawa et al., RNA 18, (738-751), 2012). In some embodiments the nuclear localization signal is derived from BORG long non-coding RNA or is a AGCCC motif (described in Zhang et al., Molecular and Cellular Biology 34, 2318-2329 (2014). In some embodiments the nuclear localization sequence is described in Shukla et al., The EAIBO Journal e98452 (2018). In some embodiments the nuclear localization signal is derived from a retrovirus.

[0460] In some embodiments, a polypeptide described herein comprises one or more (e.g., 2, 3, 4, 5) nuclear targeting sequences, for example a nuclear localization sequence (NLS). In some embodiments, the NLS is a bipartite NLS. In some embodiments, an NLS facilitates the import of a protein comprising an NLS into the cell nucleus. In some embodiments, the NLS is fused to the N-terminus of a gene modifying polypeptide as described herein. In some embodiments, the NLS is fused to the C-terminus of the gene modifying polypeptide. In some embodiments, the NLS is fused to the N-terminus or the C-terminus of a Cas domain. In some embodiments, a linker sequence is disposed between the NLS and the neighboring domain of the gene modifying polypeptide.

[0461] In some embodiments, an NLS comprises the amino acid sequence MDSLLMNRRKFLYQFKNVRWAKGRRETYLC (SEQ ID NO: 5009), PKKRKVEGADKRTADGSEFESPKKKRKV(SEQ ID NO: 5010), RKSGKIAAIWKRPRKPKKKRKV (SEQ ID NO: 5011) KRTADGSEFESPKKKRKV(SEQ ID NO: 5012), KKTELQTTNAENKTKKL (SEQ ID NO: 5013), or KRGINDRNFWRGENGRKTR (SEQ ID NO: 5014), KRPAATKKAGQAKKKK (SEQ ID NO: 5015), PAAKRVKLD (SEQ ID NO:4644), KRTADGSEFEKRTADGSEFESPKKKAKVE (SEQ ID NO: 4649), KRTADGSEFE (SEQ ID NO: 4650), KRTADGSEFESPKKKAKVE (SEQ ID NO: 4651), AGKRTADGSEFEKRTADGSEFESPKKKAKVE (SEQ ID NO: 4001), or a functional fragment or variant thereof. Exemplary NLS sequences are also described in PCT/EP2000/011690, the contents of which are incorporated herein by reference for their disclosure of exemplary nuclear localization sequences. In some embodiments, an NLS comprises an amino acid sequence as disclosed in Table 11. An NLS of this table may be utilized with one or more copies in a polypeptide in one or more locations in a polypeptide, e.g., 1, 2, 3 or more copies of an NLS in an N-terminal domain, between peptide domains, in a C-terminal domain, or in a combination of locations, in order to improve subcellular localization to the nucleus. Multiple unique sequences may be used within a single polypeptide. Sequences may be naturally monopartite or bipartite, e.g., having one or two stretches of basic amino acids, or may be used as chimeric bipartite sequences. Sequence references correspond to UniProt accession numbers, except where indicated as SeqNLS for sequences mined using a subcellular localization prediction algorithm (Lin et al BMC Bioinformat 13:157 (2012), incorporated herein by reference in its entirety).

TABLE 11
Exemplary nuclear localization
signals for use in gene modifying systems

| | | SEQ |
|---|---|---|
| Sequence | Sequence References | ID No. |
| AHFKISGEKRPSTDPGKKAK | Q76IQ7 | 5223 |
| NPKKKKKKDP | | |
| AHRAKKMSKTHA | P21827 | 5224 |
| ASPEYVNLPINGNG | SeqNLS | 5225 |
| CTKRPRW | O88622, Q86W56, Q9QYM2, O02776 | 5226 |
| DKAKRVSRNKSEKKRR | O15516, Q5RAK8, Q91YB2, Q91YB0, | 5227 |
| | Q8QGQ6, O08785, Q9WVS9, Q6YGZ4 | |
| EELRLKEELLKGIYA | Q9QY16, Q9UHL0, Q2TBP1, Q9QY15 | 5228 |
| EEQLRRRKNSRLNNTG | G5EFF5 | 5229 |
| EVLKVIRTGKRKKKAWKR | SeqNLS | 5230 |
| MVTKVC | | |
| HHHHHHHHHHHHQPH | Q63934, G3V7L5, Q12837 | 5231 |
| HKKKHPDASVNFSEFSK | P10103, Q4R844, P12682, B0CM99, | 5232 |
| | A9RA84, Q6YKA4, P09429, P63159, | |
| | Q08IE6, P63158, Q9YH06, B1MTB0 | |
| HKRTKK | Q2R2D5 | 5233 |
| IINGRKLKLKKSRRRSSQTS | SeqNLS | 5234 |
| NNSFTSRRS | | |
| KAEQERRK | Q8LH59 | 5235 |
| KEKRKRREELFIEQKKRK | SeqNLS | 5236 |
| KKGKDEWFSRGKKP | P30999 | 5237 |
| KKGPSVQKRKKT | Q6ZN17 | 5238 |
| KKKTVINDLLHYKKEK | SeqNLS, P32354 | 5239 |
| KKNGGKGKNKPSAKIKK | SeqNLS | 5240 |
| KKPKWDDFKKKKK | Q15397, Q8BKS9, Q562C7 | 5241 |
| KKRKKD | SeqNLS, Q91Z62, Q1A730, Q969P5, | 5242 |
| | Q2KHT6, Q9CPU7 | |
| KKRRKRRRK | SeqNLS | 5243 |
| KKRRRRARK | Q9UMS6, D4A702, Q91YE8 | 5244 |
| KKSKRGR | Q9UBS0 | 5245 |
| KKSRKRGS | B4FG96 | 5246 |
| KKSTALSRELGKIMRRR | SeqNLS, P32354 | 5247 |
| KKSYQDPEIIAHSRPRK | Q9U7C9 | 5248 |
| KKTGKNRKLKSKRVKTR | Q9Z301, O54943, Q8K3T2 | 5249 |
| KKVSIAGQSGKLWRWKR | Q6YUL8 | 5250 |
| KKYENVVIKRSPRKRGRPR | SeqNLS | 5251 |
| K | | |
| KNKKRK | SeqNLS | 5252 |
| KPKKKR | SeqNLS | 5253 |
| KRAMKDDSHGNSTSPKRRK | Q0E671 | 5254 |
| KRANSNLVAAYEKAKKK | P23508 | 5255 |
| KRASEDTTSGSPPKKSSAGP | Q9BZZ5, Q5R644 | 5256 |
| KR | | |
| KRFKRRWMVRKMKTKK | SeqNLS | 5257 |
| KRGLNSSFETSPKKVK | Q8IV63 | 5258 |
| KRGNSSIGPNDLSKRKQRK | SeqNLS | 5259 |
| K | | |
| KRIHSVSLSQSQIDPSKKVK | SeqNLS | 5260 |
| RAK | | |
| KRKGKLKNKGSKRKK | O15381 | 5261 |
| KRRRRRRREKRKR | Q96GM8 | 5262 |
| KRSNDRTYSPEEEKQRRA | Q91ZF2 | 5263 |
| KRTVATNGDASGAHRAKK | SeqNLS | 5264 |
| MSK | | |
| KRVYNKGEDEQEHLPKGKK | SeqNLS | 5265 |
| R | | |
| KSGKAPRRRAVSMDNSNK | Q9WVH4, O43524 | 5266 |
| KVNFLDMSLDDIIIYKELE | Q9P127 | 5267 |
| KVQHRIAKKTTRRRR | Q9DXE6 | 5268 |
| LSPSLSPL | Q9Y261, P32182, P35583 | 5269 |
| MDSLLMNRRKFLYQFKNVR | Q9GZX7 | 5270 |
| WAKGRRETYLC | | |
| MPQNEYIELHRKRYGYRLD | SeqNLS | 5271 |
| YHEKKRKKESREAHERSKK | | |
| AKKMIGLKAKLYHK | | |
| MVQLRPRASR | SeqNLS | 5272 |
| NNKLLAKRRKGGASPKDDP | Q965G5 | 5273 |
| MDDIK | | |
| NYKRPMDGTYGPPAKRHEG | O14497, A2BH40 | 5274 |
| E | | |
| PDTKRAKLDSSETTMVKKK | SeqNLS | 5275 |
| PEKRTKI | SeqNLS | 5276 |
| PGGRGKKK | Q719N1, Q9UBP0, A2VDN5 | 5277 |
| PGKMDKGEHRQERRDRPY | Q01844, Q61545 | 5278 |
| PKKGDKYDKTD | Q45FA5 | 5279 |
| PKKKSRK | O35914, Q01954 | 5280 |
| PKKNKPE | Q22663 | 5281 |
| PKKRAKV | P04295, P89438 | 5282 |
| PKPKKLKVE | P55263, P55262, P55264, Q64640 | 5283 |
| PKRGRGR | Q9FYS5, Q43386 | 5284 |
| PKRRLVDDA | P0C797 | 5285 |
| PKRRRTY | SeqNLS | 5286 |
| PLFKRR | A8X6H4, Q9TXJ0 | 5287 |
| PLRKAKR | Q86WB0, Q5R8V9 | 5288 |
| PPAKRKCIF | Q6AZ28, O75928, Q8C5D8 | 5289 |
| PPARRRRL | Q8NAG6 | 5290 |
| PPKKKRKV | Q3L6L5, P03070, P14999, P03071 | 5291 |
| PPNKRMKVKH | Q8BN78 | 5292 |
| PPRIYPQLPSAPT | P0C799 | 5293 |
| PQRSPFPKSSVKR | SeqNLS | 5294 |
| PRPRKVPR | P0C799 | 5295 |
| PRRRVQRKR | SeqNLS, Q5R448, Q5TAQ9 | 5296 |
| PRRVRLK | Q58DJ0, P56477, Q13568 | 5297 |
| PSRKRPR | Q62315, Q5F363, Q92833 | 5298 |
| PSSKKRKV | SeqNLS | 5299 |
| PTKKRVK | P07664 | 5300 |
| QRPGPYDRP | SeqNLS | 5301 |
| RGKGGKGLGKGGAKRHRK | SeqNLS | 5302 |
| RKAGKGGGGHKTTKKRSA | B4FG96 | 5303 |
| KDEKVP | | |
| RKIKLKRAK | A1L3G9 | 5304 |
| RKIKRKRAK | B9X187 | 5305 |
| RKKEAPGPREELRSRGR | O35126, P54258, Q5IS70, P54259 | 5306 |
| RKKRKGK | SeqNLS, Q29243, Q62165, Q28685, | 5307 |
| | O18738, Q9TSZ6, Q14118 | |
| RKKRRQRRR | P04326, P69697, P69698, P05907, | 5308 |
| | P20879, P04613, P19553, P0C1J9, | |
| | P20893, P12506, P04612, Q73370, | |
| | P0C1K0, P05906, P35965, P04609, | |
| | P04610, P04614, P04608, P05905 | |
| RKKSIPLSIKNLKRKHKRKK | Q9C0C9 | 5309 |
| NKITR | | |
| RKLVKPKNTKMKTKLRTNP | Q14190 | 5310 |
| Y | | |
| RKRLILSDKGQLDWKK | SeqNLS, Q91Z62, Q1A730, Q2KHT6, | 5311 |
| | Q9CPU7 | |
| RKRLKSK | Q13309 | 5312 |
| RKRRVRDNM | Q8QPH4, Q809M7, A8C8X1, Q2VNC5, | 5313 |
| | Q38SQ0, O89749, Q6DNQ9, Q809L9, | |
| | Q0A429, Q20NV3, P16509, P16505, | |
| | Q6DNQ5, P16506, Q6XT06, P26118, | |
| | Q2ICQ2, Q2RCG8, Q0A2D0, Q0A2H9, | |
| | Q9IQ46, Q809M3, Q6J847, Q6J856, | |
| | B4URE4, A4GCM7, Q0A440, P26120, | |
| | P16511, | |
| RKRSPKDKKEKDLDGAGKR | Q7RTP6 | 5314 |
| RKT | | |
| RKRTPRVDGQTGENDMNK | O94851 | 5315 |
| RRRK | | |
| RLPVRRRRRR | P04499, P12541, P03269, P48313, | 5316 |
| | P03270 | |
| RLRFRKPKSK | P69469 | 5317 |
| RQQRKR | Q14980 | 5318 |
| RRDLNSSFETSPKKVK | Q8K3G5 | 5319 |
| RRDRAKLR | Q9SLB8 | 5320 |
| RRGDGRRR | Q80WE1, Q5R9B4, Q06787, P35922 | 5321 |
| RRGRKRKAEKQ | Q812D1, Q5XXA9, Q99JF8, Q8MJG1, | 5322 |
| | Q66T72, O75475 | |
| RRKKRR | Q0VD86, Q58DS6, Q5R6G2, Q9ERI5, | 5323 |
| | Q6AYK2, Q6NYC1 | |
| RRKRSKSEDMDSVESKRRR | Q7TT18 | 5324 |
| RRKRSR | Q99PU7, D3ZHS6, Q92560, A2VDM8 | 5325 |
| RRPKGKTLQKRKPK | Q6ZN17 | 5326 |
| RRRGFERFGPDNMGRKRK | Q63014, Q9DBR0 | 5327 |
| RRRGKNKVAAQNCRK | SeqNLS | 5328 |
| RRRKRR | Q5FVH8, Q6MZT1, Q08DH5, Q8BQP9 | 5329 |
| RRRQKQKGGASRRR | SeqNLS | 5330 |
| RRRREGPRARRRR | P08313, P10231 | 5331 |
| RRTIRLKLVYDKCDRSCKIQ | SeqNLS | 5332 |
| KKNRNKCQYCRFHKCLSVG | | |
| MSHNAIRFGRMPRSEKAKL | | |
| KAE | | |
| RRVPQRKEVSRCRKCRK | Q5RJN4, Q32L09, Q8CAK3, Q9NUL5 | 5333 |
| RVGGRRQAVECIEDLLNEP | P03255 | 5334 |
| GQPLDLSCKRPRP | | |
| RVVKLRIAP | P52639, Q8JMN0 | 5335 |
| RVVRRR | P70278 | 5336 |
| SKRKTKISRKTR | Q5RAY1, O00443 | 5337 |
| SYVKTVPNRTRTYIKL | P21935 | 5338 |
| TGKNEAKKRKIA | P52739, Q8K3J5, Q5RAU9 | 5339 |
| TLSPASSPSSVSCPVIPASTD | SeqNLS | 5340 |
| ESPGSALNI | | |
| VSKKQRTGKKIH | P52739, Q8K3J5, Q5RAU9 | 5341 |
| SPKKKRKVE | | 5342 |
| KRTAD GSEFE SPKKKRKVE | | 5343 |
| PAAKRVKLD | | 5344 |
| PKKKRKV | | 5345 |
| MDSLLMNRRKFLYQFKNVR | | 5346 |
| WAKGRRETYLC | | |
| SPKKKRKVEAS | | 5347 |
| MAPKKKRKVGIHRGVP | | 5348 |
| KRTADGSEFEKRTADGSEFE | | 5349 |
| SPKKKAKVE | | |
| KRTADGSEFE | | 5350 |
| KRTADGSEFESPKKKAKVE | | 5351 |
| AGKRTADGSEFEKRTADGS | | 4001 |
| EFESPKKKAKVE | | |

[0462] In some embodiments, the NLS is a bipartite NLS. A bipartite NLS typically comprises two basic amino acid clusters separated by a spacer sequence (which may be, e.g., about 10 amino acids in length). A monopartite NLS typically lacks a spacer. An example of a bipartite NLS is the nucleoplasmin NLS, having the sequence KR[PAATKKAGQA]KKKK (SEQ ID NO: 5015), wherein the spacer is bracketed. Another exemplary bipartite NLS has the sequence PKKKRKVEGADKRTADGSEFESPKKKRKV (SEQ ID NO: 5016). Exemplary NLSs are described in International Application WO2020051561, which is herein incorporated by reference in its entirety, including for its disclosures regarding nuclear localization sequences.

[0463] In certain embodiments, a gene editor system polypeptide (e.g., a gene modifying polypeptide as described herein) further comprises an intracellular localization sequence, e.g., a nuclear localization sequence and/or a nucleolar localization sequence. The nuclear localization sequence and/or nucleolar localization sequence may be amino acid sequences that promote the import of the protein into the nucleus and/or nucleolus, where it can promote integration of heterologous sequence into the genome. In certain embodiments, a gene editor system polypeptide (e.g., (e.g., a gene modifying polypeptide as described herein) further comprises a nucleolar localization sequence. In certain embodiments, the gene modifying polypeptide is encoded on a first RNA, and the template RNA is a second, separate, RNA, and the nucleolar localization signal is encoded on the RNA encoding the gene modifying polypeptide and not on the template RNA. In some embodiments, the nucleolar localization signal is located at the N-terminus, C-terminus, or in an internal region of the polypeptide. In some embodiments, a plurality of the same or different nucleolar localization signals are used. In some embodiments, the nuclear localization signal is less than 5, 10, 25, 50, 75, or 100 amino acids in length. Various polypeptide nucleolar localization signals can be used. For example, Yang et al., Journal of Biomedical Science 22, 33 (2015), describe a nuclear localization signal that also functions as a nucleolar localization signal. In some embodiments, the nucleolar localization signal may also be a nuclear localization signal. In some embodiments, the nucleolar localization signal may overlap with a nuclear localization signal. In some embodiments, the nucleolar localization signal may comprise a stretch of basic residues. In some embodiments, the nucleolar localization signal may be rich in arginine and lysine residues. In some embodiments, the nucleolar localization signal may be derived from a protein that is enriched in the nucleolus. In some embodiments, the nucleolar localization signal may be derived from a protein enriched at ribosomal RNA loci. In some embodiments, the nucleolar localization signal may be derived from a protein that binds rRNA. In some embodiments, the nucleolar localization signal may be derived from MSP58. In some embodiments, the nucleolar localization signal may be a monopartite motif. In some embodiments, the nucleolar localization signal may be a bipartite motif. In some embodiments, the nucleolar localization signal may consist of a multiple monopartite or bipartite motifs. In some embodiments, the nucleolar localization signal may consist of a mix of monopartite and bipartite motifs. In some embodiments, the nucleolar localization signal may be a dual bipartite motif. In some embodiments, the nucleolar localization motif may be a KRASSQALGTIPKRRSSSRFIKRKK (SEQ ID NO: 5017). In some embodiments, the nucleolar localization signal may be derived from nuclear factor-KB-inducing kinase. In some embodiments, the nucleolar localization signal may be an RKKRKKK motif (SEQ ID NO: 5018) (described in Birbach et al., Journal of Cell Science, 117 (3615-3624), 2004).

[0464] Evolved Variants of Gene Modifying Polypeptides and Systems

[0465] In some embodiments, the invention provides evolved variants of gene modifying polypeptides as described herein. Evolved variants can, in some embodiments, be produced by mutagenizing a reference gene modifying polypeptide, or one of the fragments or domains comprised therein. In some embodiments, one or more of the domains (e.g., the reverse transcriptase domain) is evolved. One or more of such evolved variant domains can, in some embodiments, be evolved alone or together with other domains. An evolved variant domain or domains may, in some embodiments, be combined with unevolved cognate component(s) or evolved variants of the cognate component(s), e.g., which may have been evolved in either a parallel or serial manner.

[0466] In some embodiments, the process of mutagenizing a reference gene modifying polypeptide, or fragment or domain thereof, comprises mutagenizing the reference gene modifying polypeptide or fragment or domain thereof. In embodiments, the mutagenesis comprises a continuous evolution method (e.g., PACE) or non-continuous evolution method (e.g., PANCE), e.g., as described herein. In some embodiments, the evolved gene modifying polypeptide, or a fragment or domain thereof, comprises one or more amino acid variations introduced into its amino acid sequence relative to the amino acid sequence of the reference gene modifying polypeptide, or fragment or domain thereof. In embodiments, amino acid sequence variations may include one or more mutated residues (e.g., conservative substitutions, non-conservative substitutions, or a combination thereof) within the amino acid sequence of a reference gene modifying polypeptide, e.g., as a result of a change in the nucleotide sequence encoding the gene modifying polypeptide that results in, e.g., a change in the codon at any particular position in the coding sequence, the deletion of one or more amino acids (e.g., a truncated protein), the insertion of one or more amino acids, or any combination of the foregoing. The evolved variant gene modifying polypeptide may include variants in one or more components or domains of the gene modifying polypeptide (e.g., variants introduced into a reverse transcriptase domain).

[0467] In some aspects, the disclosure provides gene modifying polypeptides, systems, kits, and methods using or comprising an evolved variant of a gene modifying polypeptide, e.g., employs an evolved variant of a gene modifying polypeptide or a gene modifying polypeptide produced or producible by PACE or PANCE. In embodiments, the unevolved reference gene modifying polypeptide is a gene modifying polypeptide as disclosed herein.

[0468] The term “phage-assisted continuous evolution (PACE),”as used herein, generally refers to continuous evolution that employs phage as viral vectors. Examples of PACE technology have been described, for example, in International PCT Application No. PCT/US 2009/056194, filed Sep. 8, 2009, published as WO 2010/028347 on Mar. 11, 2010; International PCT Application, PCT/US2011/066747, filed Dec. 22, 2011, published as WO 2012/088381 on Jun. 28, 2012; U.S. Pat. No. 9,023,594, issued May 5, 2015; U.S. Pat. No. 9,771,574, issued Sep. 26, 2017; U.S. Pat. No. 9,394,537, issued Jul. 19, 2016; International PCT Application, PCT/US2015/012022, filed Jan. 20, 2015, published as WO 2015/134121 on Sep. 11, 2015; U.S. Pat. No. 10,179,911, issued Jan. 15, 2019; and International PCT Application, PCT/US2016/027795, filed Apr. 15, 2016, published as WO 2016/168631 on Oct. 20, 2016, the entire contents of each of which are incorporated herein by reference.

[0469] The term “phage-assisted non-continuous evolution (PANCE),” as used herein, generally refers to non-continuous evolution that employs phage as viral vectors. Examples of PANCE technology have been described, for example, in Suzuki T. et al, Crystal structures reveal an elusive functional domain of pyrrolysyl-tRNA synthetase, Nat Chem Biol. 13(12): 1261-1266 (2017), incorporated herein by reference in its entirety. Briefly, PANCE is a technique for rapid in vivo directed evolution using serial flask transfers of evolving selection phage (SP), which contain a gene of interest to be evolved, across fresh host cells (e.g., E. coli cells). Genes inside the host cell may be held constant while genes contained in the SP continuously evolve. Following phage growth, an aliquot of infected cells may be used to transfect a subsequent flask containing host E. coli. This process can be repeated and/or continued until the desired phenotype is evolved, e.g., for as many transfers as desired.

[0470] Methods of applying PACE and PANCE to gene modifying polypeptides may be readily appreciated by the skilled artisan by reference to, inter alia, the foregoing references. Additional exemplary methods for directing continuous evolution of genome-modifying proteins or systems, e.g., in a population of host cells, e.g., using phage particles, can be applied to generate evolved variants of gene modifying polypeptides, or fragments or subdomains thereof. Non-limiting examples of such methods are described in International PCT Application, PCT/US2009/056194, filed Sep. 8, 2009, published as WO 2010/028347 on Mar. 11, 2010; International PCT Application, PCT/US2011/066747, filed Dec. 22, 2011, published as WO 2012/088381 on Jun. 28, 2012; U.S. Pat. No. 9,023,594, issued May 5, 2015; U.S. Pat. No. 9,771,574, issued Sep. 26, 2017; U.S. Pat. No. 9,394,537, issued Jul. 19, 2016; International PCT Application, PCT/US2015/012022, filed Jan. 20, 2015, published as WO 2015/134121 on Sep. 11, 2015; U.S. Pat. No. 10,179,911, issued Jan. 15, 2019; International Application No. PCT/US2019/37216, filed Jun. 14, 2019, International Patent Publication WO 2019/023680, published Jan. 31, 2019, International PCT Application, PCT/US2016/027795, filed Apr. 15, 2016, published as WO 2016/168631 on Oct. 20, 2016, and International Patent Publication No. PCT/US2019/47996, filed Aug. 23, 2019, each of which is incorporated herein by reference in its entirety.

[0471] In some non-limiting illustrative embodiments, a method of evolution of a evolved variant gene modifying polypeptide, of a fragment or domain thereof, comprises: (a) contacting a population of host cells with a population of viral vectors comprising the gene of interest (the starting gene modifying polypeptide or fragment or domain thereof), wherein: (1) the host cell is amenable to infection by the viral vector; (2) the host cell expresses viral genes required for the generation of viral particles; (3) the expression of at least one viral gene required for the production of an infectious viral particle is dependent on a function of the gene of interest; and/or (4) the viral vector allows for expression of the protein in the host cell, and can be replicated and packaged into a viral particle by the host cell. In some embodiments, the method comprises (b) contacting the host cells with a mutagen, using host cells with mutations that elevate mutation rate (e.g., either by carrying a mutation plasmid or some genome modification—e.g., proofing-impaired DNA polymerase, SOS genes, such as UmuC, UmuD′, and/or RecA, which mutations, if plasmid-bound, may be under control of an inducible promoter), or a combination thereof. In some embodiments, the method comprises (c) incubating the population of host cells under conditions allowing for viral replication and the production of viral particles, wherein host cells are removed from the host cell population, and fresh, uninfected host cells are introduced into the population of host cells, thus replenishing the population of host cells and creating a flow of host cells. In some embodiments, the cells are incubated under conditions allowing for the gene of interest to acquire a mutation. In some embodiments, the method further comprises (d) isolating a mutated version of the viral vector, encoding an evolved gene product (e.g., an evolved variant gene modifying polypeptide, or fragment or domain thereof), from the population of host cells.

[0472] The skilled artisan will appreciate a variety of features employable within the above-described framework. For example, in some embodiments, the viral vector or the phage is a filamentous phage, for example, an M13 phage, e.g., an M13 selection phage. In certain embodiments, the gene required for the production of infectious viral particles is the M13 gene III (gIII) In embodiments, the phage may lack a functional gIII, but otherwise comprise gI, gII, gIV, gV, gVI, gVII, gVIII, gIX, and a gX. In some embodiments, the generation of infectious VSV particles involves the envelope protein VSV-G. Various embodiments can use different retroviral vectors, for example, Murine Leukemia Virus vectors, or Lentiviral vectors. In embodiments, the retroviral vectors can efficiently be packaged with VSV-G envelope protein, e.g., as a substitute for the native envelope protein of the virus.

[0473] In some embodiments, host cells are incubated according to a suitable number of viral life cycles, e.g., at least 10, at least 20, at least 30, at least 40, at least 50, at least 100, at least 200, at least 300, at least 400, at least, 500, at least 600, at least 700, at least 800, at least 900, at least 1000, at least 1250, at least 1500, at least 1750, at least 2000, at least 2500, at least 3000, at least 4000, at least 5000, at least 7500, at least 10000, or more consecutive viral life cycles, which in on illustrative and non-limiting examples of M13 phage is 10-20 minutes per virus life cycle. Similarly, conditions can be modulated to adjust the time a host cell remains in a population of host cells, e.g., about 10, about 11, about 12, about 13, about 14, about 15, about 16, about 17, about 18, about 19, about 20, about 21, about 22, about 23, about 24, about 25, about 30, about 35, about 40, about 45, about 50, about 55, about 60, about 70, about 80, about 90, about 100, about 120, about 150, or about 180 minutes. Host cell populations can be controlled in part by density of the host cells, or, in some embodiments, the host cell density in an inflow, e.g., 10³ cells/ml, about 10⁴ cells/ml, about 10⁵ cells/ml, about 5-10⁵ cells/ml, about 10⁶ cells/ml, about 5-10⁶ cells/ml, about 10⁷ cells/ml, about 5-10⁷ cells/ml, about 10⁸ cells/ml, about 5-10⁸ cells/ml, about 10⁹ cells/ml, about 5. 10⁹ cells/ml, about 10¹⁰ cells/ml, or about 5·10¹⁰ cells/ml.

[0474] Inteins

[0475] In some embodiments, as described in more detail below, an intein-N(intN) domain may be fused to the N-terminal portion of a first domain of a gene modifying polypeptide described herein, and an intein-C(intC) domain may be fused to the C-terminal portion of a second domain of a gene modifying polypeptide described herein for the joining of the N-terminal portion to the C-terminal portion, thereby joining the first and second domains. In some embodiments, the first and second domains are each independently chosen from a DNA binding domain, an RNA binding domain, an RT domain, and an endonuclease domain.

[0476] Inteins can occur as self-splicing protein intron (e.g., peptide), e.g., which ligates flanking N-terminal and C-terminal exteins (e.g., fragments to be joined). An intein may, in some instances, comprise a fragment of a protein that is able to excise itself and join the remaining fragments (the exteins) with a peptide bond in a process known as protein splicing. Inteins are also referred to as “protein introns.” The process of an intein excising itself and joining the remaining portions of the protein is herein termed “protein splicing” or “intein-mediated protein splicing.”

[0477] In some embodiments, an intein of a precursor protein (an intein containing protein prior to intein-mediated protein splicing) comes from two genes. Such intein is referred to herein as a split intein (e.g., split intein-N and split intein-C). Accordingly, an intein-based approach may be used to join a first polypeptide sequence and a second polypeptide sequence together. For example, in cyanobacteria, DnaE, the catalytic subunit a of DNA polymerase III, is encoded by two separate genes, dnaE-n and dnaE-c. An intein-N domain, such as that encoded by the dnaE-n gene, when situated as part of a first polypeptide sequence, may join the first polypeptide sequence with a second polypeptide sequence, wherein the second polypeptide sequence comprises an intein-C domain, such as that encoded by the dnaE-c gene. Accordingly, in some embodiments, a protein can be made by providing nucleic acid encoding the first and second polypeptide sequences (e.g., wherein a first nucleic acid molecule encodes the first polypeptide sequence and a second nucleic acid molecule encodes the second polypeptide sequence), and the nucleic acid is introduced into the cell under conditions that allow for production of the first and second polypeptide sequences, and for joining of the first to the second polypeptide sequence via an intein-based mechanism.

[0478] Use of inteins for joining heterologous protein fragments is described, for example, in Wood et al., J. Biol. Chem.289(21); 14512-9 (2014) (incorporated herein by reference in its entirety). For example, when fused to separate protein fragments, the inteins IntN and IntC may recognize each other, splice themselves out, and/or simultaneously ligate the flanking N- and C-terminal exteins of the protein fragments to which they were fused, thereby reconstituting a full-length protein from the two protein fragments.

[0479] In some embodiments, a synthetic intein based on the dnaE intein, the Cfa-N(e.g., split intein-N) and Cfa-C(e.g., split intein-C) intein pair, is used. Examples of such inteins have been described, e.g., in Stevens et al., J Am Chem Soc. 2016 Feb. 24; 138(7):2162-5 (incorporated herein by reference in its entirety). Non-limiting examples of intein pairs that may be used in accordance with the present disclosure include: Cfa DnaE intein, Ssp GyrB intein, Ssp DnaX intein, Ter DnaE3 intein, Ter ThyX intein, Rma DnaB intein and Cne Prp8 intein (e.g., as described in U.S. Pat. No. 8,394,604, incorporated herein by reference.

[0480] In some embodiments involving a split Cas9, an intein-N domain and an intein-C domain may be fused to the N-terminal portion of the split Cas9 and the C-terminal portion of a split Cas9, respectively, for the joining of the N-terminal portion of the split Cas9 and the C-terminal portion of the split Cas9. For example, in some embodiments, an intein-N is fused to the C-terminus of the N-terminal portion of the split Cas9, i.e., to form a structure of N—[N-terminal portion of the split Cas9]-[intein-N]˜C. In some embodiments, an intein-C is fused to the N-terminus of the C-terminal portion of the split Cas9, i.e., to form a structure of N-[intein-C]˜[C-terminal portion of the split Cas9]-C. The mechanism of intein-mediated protein splicing for joining the proteins the inteins are fused to (e.g., split Cas9) is described in Shah et al., Chem Sci. 2014; 5(1):446-461, incorporated herein by reference. Methods for designing and using inteins are known in the art and described, for example by WO2020051561, WO2014004336, WO2017132580, US20150344549, and US20180127780, each of which is incorporated herein by reference in their entirety.

[0481] In some embodiments, a split refers to a division into two or more fragments. In some embodiments, a split Cas9 protein or split Cas9 comprises a Cas9 protein that is provided as an N-terminal fragment and a C-terminal fragment encoded by two separate nucleotide sequences. The polypeptides corresponding to the N-terminal portion and the C-terminal portion of the Cas9 protein may be spliced to form a reconstituted Cas9 protein. In embodiments, the Cas9 protein is divided into two fragments within a disordered region of the protein, e.g., as described in Nishimasu et al., Cell, Volume 156, Issue 5, pp. 935-949, 2014, or as described in Jiang et al. (2016) Science 351: 867-871 and PDB file: 5F9R (each of which is incorporated herein by reference in its entirety). A disordered region may be determined by one or more protein structure determination techniques known in the art, including, without limitation, X-ray crystallography, NMR spectroscopy, electron microscopy (e.g., cryoEM), and/or in silico protein modeling. In some embodiments, the protein is divided into two fragments at any C, T, A, or S, e.g., within a region of SpCas9 between amino acids A292-G364, F445-K483, or E565-T637, or at corresponding positions in any other Cas9, Cas9 variant (e.g., nCas9, dCas9), or other napDNAbp. In some embodiments, protein is divided into two fragments at SpCas9 T310, T313, A456, S469, or C574. In some embodiments, the process of dividing the protein into two fragments is referred to as splitting the protein.

[0482] In some embodiments, a protein fragment ranges from about 2-1000 amino acids (e.g., between 2-10, 10-50, 50-100, 100-200, 200-300, 300-400, 400-500, 500-600, 600-700, 700-800, 800-900, or 900-1000 amino acids) in length. In some embodiments, a protein fragment ranges from about 5-500 amino acids (e.g., between 5-10, 10-50, 50-100, 100-200, 200-300, 300-400, or 400-500 amino acids) in length. In some embodiments, a protein fragment ranges from about 20-200 amino acids (e.g., between 20-30, 30-40, 40-50, 50-100, or 100-200 amino acids) in length.

[0483] In some embodiments, a portion or fragment of a gene modifying polypeptide is fused to an intein. The nuclease can be fused to the N-terminus or the C-terminus of the intein. In some embodiments, a portion or fragment of a fusion protein is fused to an intein and fused to an AAV capsid protein. The intein, nuclease and capsid protein can be fused together in any arrangement (e.g., nuclease-intein-capsid, intein-nuclease-capsid, capsid-intein-nuclease, etc.). In some embodiments, the N-terminus of an intein is fused to the C-terminus of a fusion protein and the C-terminus of the intein is fused to the N-terminus of an AAV capsid protein.

[0484] In some embodiments, an endonuclease domain (e.g., a nickase Cas9 domain) is fused to intein-N and a polypeptide comprising an RT domain is fused to an intein-C.

[0485] Exemplary nucleotide and amino acid sequences of intein-N domains and compatible intein-C domains are provided below:

DnaE Intein-N DNA:
(SEQ ID NO: 5029)
TGCCTGTCATACGAAACCGAGATACTGACAGTAGAATATGGCCTTCTGCC
AATCGGGAAGATTGTGGAGAAACGGATAGAATGCACAGTTTACTCTGTCG
ATAACAATGGTAACATTTATACTCAGCCAGTTGCCCAGTGGCACGACCGG
GGAGAGCAGGAAGTATTCGAATACTGTCTGGAGGATGGAAGTCTCATTAG
GGCCACTAAGGACCACAAATTTATGACAGTCGATGGCCAGATGCTGCCTA
TAGACGAAATCTTTGAGCGAGAGTTGGACCTCATGCGAGTTGACAACCTT
CCTAAT
DnaE Intein-N Protein:
(SEQ ID NO: 5030)
CLSYETEILTVEYGLLPIGKIVEKRIECTVYSVDNNGNIYTQPVAQWHDR
GEQEVFEYCLEDGSLIRATKDHKFMTVDGQMLPIDEIFERELDLMRVDNL
PN
DnaE Intein-C DNA:
(SEQ ID NO: 5031)
ATGATCAAGATAGCTACAAGGAAGTATCTTGGCAAACAAAACGTTTATGA
TATTGGAGTCGAAAGAGATCACAACTTTGCTCTGAAGAACGGATTCATAG
CTTCTAAT
DnaE Intein-C Protein:
(SEQ ID NO: 5032)
MIKIATRKYLGKQNVYDIGVERDHNFALKNGFIASN
Cfa-N DNA:
(SEQ ID NO: 5033)
TGCCTGTCTTATGATACCGAGATACTTACCGTTGAATATGGCTTCTTGCC
TATTGGAAAGATTGTCGAAGAGAGAATTGAATGCACAGTATATACTGTAG
ACAAGAATGGTTTCGTTTACACACAGCCCATTGCTCAATGGCACAATCGC
GGCGAACAAGAAGTATTTGAGTACTGTCTCGAGGATGGAAGCATCATACG
AGCAACTAAAGATCATAAATTCATGACCACTGACGGGCAGATGTTGCCAA
TAGATGAGATATTCGAGCGGGGCTTGGATCTCAAACAAGTGGATGGATTG
CCA
Cfa-N Protein:
(SEQ ID NO: 5034)
CLSYDTEILTVEYGFLPIGKIVEERIECTVYTVDKNGFVYTQPIAQWHNR
GEQEVFEYCLEDGSIIRATKDHKFMTTDGQMLPIDEIFERGLDLKQVDGL
P
Cfa-C DNA:
(SEQ ID NO: 5035)
ATGAAGAGGACTGCCGATGGATCAGAGTTTGAATCTCCCAAGAAGAAGAG
GAAAGTAAAGATAATATCTCGAAAAAGTCTTGGTACCCAAAATGTCTATG
ATATTGGAGTGGAGAAAGATCACAACTTCCTTCTCAAGAACGGTCTCGTA
GCCAGCAAC
Cfa-C Protein:
(SEQ ID NO: 5036)
MKRTADGSEFESPKKKRKVKIISRKSLGTQNVYDIGVEKDHNFLLKNGLV
ASN

[0486] Additional Domains

[0487] The gene modifying polypeptide can bind a target DNA sequence and template nucleic acid (e.g., template RNA), nick the target site, and write (e.g., reverse transcribe) the template into DNA, resulting in a modification of the target site. In some embodiments, additional domains may be added to the polypeptide to enhance the efficiency of the process. In some embodiments, the gene modifying polypeptide may contain an additional DNA ligation domain to join reverse transcribed DNA to the DNA of the target site. In some embodiments, the polypeptide may comprise a heterologous RNA-binding domain. In some embodiments, the polypeptide may comprise a domain having 5′ to 3′ exonuclease activity (e.g., wherein the 5′ to 3′ exonuclease activity increases repair of the alteration of the target site, e.g., in favor of alteration over the original genomic sequence). In some embodiments, the polypeptide may comprise a domain having 3′ to 5′ exonuclease activity, e.g., proof-reading activity. In some embodiments, the writing domain, e.g., RT domain, has 3′ to 5′ exonuclease activity, e.g., proof-reading activity.

### Template Nucleic Acids

[0488] The gene modifying systems described herein can modify a host target DNA site using a template nucleic acid sequence. In some embodiments, the gene modifying systems described herein transcribe an RNA sequence template into host target DNA sites by target-primed reverse transcription (TPRT). By modifying DNA sequence(s) via reverse transcription of the RNA sequence template directly into the host genome, the gene modifying system can insert an object sequence into a target genome without the need for exogenous DNA sequences to be introduced into the host cell (unlike, for example, CRISPR systems), as well as eliminate an exogenous DNA insertion step. The gene modifying system can also delete a sequence from the target genome or introduce a substitution using an object sequence. Therefore, the gene modifying system provides a platform for the use of customized RNA sequence templates containing object sequences, e.g., sequences comprising heterologous gene coding and/or function information.

[0489] In some embodiments, the template nucleic acid comprises one or more sequence (e.g., 2 sequences) that binds the gene modifying polypeptide.

[0490] In some embodiments a system or method described herein comprises a single template nucleic acid (e.g., template RNA). In some embodiments a system or method described herein comprises a plurality of template nucleic acids (e.g., template RNAs). For example, a system described herein comprises a first RNA comprising (e.g., from 5′ to 3′) a sequence that binds the gene modifying polypeptide (e.g., the DNA-binding domain and/or the endonuclease domain, e.g., a gRNA) and a sequence that binds a target site (e.g., a second strand of a site in a target genome), and a second RNA (e.g., a template RNA) comprising (e.g., from 5′ to 3′) optionally a sequence that binds the gene modifying polypeptide (e.g., that specifically binds the RT domain), a heterologous object sequence, and a PBS sequence. In some embodiments, when the system comprises a plurality of nucleic acids, each nucleic acid comprises a conjugating domain. In some embodiments, a conjugating domain enables association of nucleic acid molecules, e.g., by hybridization of complementary sequences. For example, in some embodiments a first RNA comprises a first conjugating domain and a second RNA comprises a second conjugating domain, and the first and second conjugating domains are capable of hybridizing to one another, e.g., under stringent conditions. In some embodiments, the stringent conditions for hybridization include hybridization in 4× sodium chloride/sodium citrate (SSC), at about 65 C, followed by a wash in 1×SSC, at about 65 C.

[0491] In some embodiments, the template nucleic acid comprises RNA. In some embodiments, the template nucleic acid comprises DNA (e.g., single stranded or double stranded DNA).

[0492] In some embodiments, the template nucleic acid comprises one or more (e.g., 2) homology domains that have homology to the target sequence. In some embodiments, the homology domains are about 10-20, 20-50, or 50-100 nucleotides in length.

[0493] In some embodiments, a template RNA can comprise a gRNA sequence, e.g., to direct the gene modifying polypeptide to a target site of interest. In some embodiments, a template RNA comprises (e.g., from 5′ to 3′) (i) optionally a gRNA spacer that binds a target site (e.g., a second strand of a site in a target genome), (ii) optionally a gRNA scaffold that binds a polypeptide described herein (e.g., a gene modifying polypeptide or a Cas polypeptide), (iii) a heterologous object sequence comprising a mutation region (optionally the heterologous object sequence comprises, from 5′ to 3′, a first homology region, a mutation region, and a second homology region), and (iv) a primer binding site (PBS) sequence comprising a 3′ target homology domain.

[0494] The template nucleic acid (e.g., template RNA) component of a genome editing system described herein typically is able to bind the gene modifying polypeptide of the system. In some embodiments the template nucleic acid (e.g., template RNA) has a 3′ region that is capable of binding a gene modifying polypeptide. The binding region, e.g., 3′ region, may be a structured RNA region, e.g., having at least 1, 2 or 3 hairpin loops, capable of binding the gene modifying polypeptide of the system. The binding region may associate the template nucleic acid (e.g., template RNA) with any of the polypeptide modules. In some embodiments, the binding region of the template nucleic acid (e.g., template RNA) may associate with an RNA-binding domain in the polypeptide. In some embodiments, the binding region of the template nucleic acid (e.g., template RNA) may associate with the reverse transcription domain of the gene modifying polypeptide (e.g., specifically bind to the RT domain). In some embodiments, the template nucleic acid (e.g., template RNA) may associate with the DNA binding domain of the polypeptide, e.g., a gRNA associating with a Cas9-derived DNA binding domain. In some embodiments, the binding region may also provide DNA target recognition, e.g., a gRNA hybridizing to the target DNA sequence and binding the polypeptide, e.g., a Cas9 domain. In some embodiments, the template nucleic acid (e.g., template RNA) may associate with multiple components of the polypeptide, e.g., DNA binding domain and reverse transcription domain.

[0495] In some embodiments the template RNA has a poly-A tail at the 3′ end. In some embodiments the template RNA does not have a poly-A tail at the 3′ end.

[0496] In some embodiments, the template nucleic acid is a template RNA. In some embodiments, the template RNA comprises one or more modified nucleotides. For example, in some embodiments, the template RNA comprises one or more deoxyribonucleotides. In some embodiments, regions of the template RNA are replaced by DNA nucleotides, e.g., to enhance stability of the molecule. For example, the 3′ end of the template may comprise DNA nucleotides, while the rest of the template comprises RNA nucleotides that can be reverse transcribed. For instance, in some embodiments, the heterologous object sequence is primarily or wholly made up of RNA nucleotides (e.g., at least 90%, 95%, 98%, or 99% RNA nucleotides). In some embodiments, the PBS sequence is primarily or wholly made up of DNA nucleotides (e.g., at least 90%, 95%, 98%, or 99% DNA nucleotides). In other embodiments, the heterologous object sequence for writing into the genome may comprise DNA nucleotides. In some embodiments, the DNA nucleotides in the template are copied into the genome by a domain capable of DNA-dependent DNA polymerase activity. In some embodiments, the DNA-dependent DNA polymerase activity is provided by a DNA polymerase domain in the polypeptide. In some embodiments, the DNA-dependent DNA polymerase activity is provided by a reverse transcriptase domain that is also capable of DNA-dependent DNA polymerization, e.g., second strand synthesis. In some embodiments, the template molecule is composed of only DNA nucleotides.

[0497] In some embodiments, a system described herein comprises two nucleic acids which together comprise the sequences of a template RNA described herein. In some embodiments, the two nucleic acids are associated with each other non-covalently, e.g., directly associated with each other (e.g., via base pairing), or indirectly associated as part of a complex comprising one or more additional molecule.

[0498] A template RNA described herein may comprise, from 5′ to 3′: (1) a gRNA spacer; (2) a gRNA scaffold; (3) heterologous object sequence (4) a primer binding site (PBS) sequence. Each of these components is now described in more detail.

gRNA spacer and gRNA scaffold

[0499] A template RNA described herein may comprise a gRNA spacer that directs the gene modifying system to a target nucleic acid, and a gRNA scaffold that promotes association of the template RNA with the Cas domain of the gene modifying polypeptide. The systems described herein can also comprise a gRNA that is not part of a template nucleic acid. For example, a gRNA that comprises a gRNA spacer and gRNA scaffold, but not a heterologous object sequence or a PBS sequence, can be used, e.g., to induce second strand nicking, e.g., as described in the section herein entitled “Second Strand Nicking”.

[0500] In some embodiments, the gRNA is a short synthetic RNA composed of a scaffold sequence that participates in CRISPR-associated protein binding and a user-defined −20 nucleotide targeting sequence for a genomic target. The structure of a complete gRNA was described by Nishimasu et al. Cell 156, P935-949 (2014). The gRNA (also referred to as sgRNA for single-guide RNA) consists of crRNA- and tracrRNA-derived sequences connected by an artificial tetraloop. The crRNA sequence can be divided into guide (20 nt) and repeat (12 nt) regions, whereas the tracrRNA sequence can be divided into anti-repeat (14 nt) and three tracrRNA stem loops (Nishimasu et al. Cell 156, P935-949 (2014)). In practice, guide RNA sequences are generally designed to have a length of between 17-24 nucleotides (e.g., 19, 20, or 21 nucleotides) and be complementary to a targeted nucleic acid sequence. Custom gRNA generators and algorithms are available commercially for use in the design of effective guide RNAs. In some embodiments, the gRNA comprises two RNA components from the native CRISPR system, e.g. crRNA and tracrRNA. As is well known in the art, the gRNA may also comprise a chimeric, single guide RNA (sgRNA) containing sequence from both a tracrRNA (for binding the nuclease) and at least one crRNA (to guide the nuclease to the sequence targeted for editing/binding). Chemically modified sgRNAs have also been demonstrated to be effective for use with CRISPR-associated proteins; see, for example, Hendel et al. (2015) Nature Biotechnol., 985-991. In some embodiments, a gRNA spacer comprises a nucleic acid sequence that is complementary to a DNA sequence associated with a target gene.

[0501] In some embodiments, the region of the template nucleic acid, e.g., template RNA, comprising the gRNA adopts an underwound ribbon-like structure of gRNA bound to target DNA (e.g., as described in Mulepati et al. Science 19 Sep. 2014:Vol. 345, Issue 6203, pp. 1479-1484). Without wishing to be bound by theory, this non-canonical structure is thought to be facilitated by rotation of every sixth nucleotide out of the RNA-DNA hybrid. Thus, in some embodiments, the region of the template nucleic acid, e.g., template RNA, comprising the gRNA may tolerate increased mismatching with the target site at some interval, e.g., every sixth base. In some embodiments, the region of the template nucleic acid, e.g., template RNA, comprising the gRNA comprising homology to the target site may possess wobble positions at a regular interval, e.g., every sixth base, that do not need to base pair with the target site.

[0502] In some embodiments, a Cas9 derivative with enhanced activity may be used in the gene modification polypeptide. In some embodiments, a Cas9 derivative may comprise mutations that improve activity of the HNH endonuclease domain, e.g., SpyCas9 R221K, N394K, or mutations that improve R-loop formation, e.g., SpyCas9 L1245V, or comprise a combination of such mutations, e.g., SpyCas9 R221K/N394K, SpyCas9 N394K/L1245V, SpyCas9 R221K/L1245V, or SpyCas9 R221K/N394K/L1245V (see, e.g., Spencer and Zhang Sci Rep 7:16836 (2017), the Cas9 derivatives and comprising mutations of which are incorporated herein by reference). In some embodiments, a Cas9 derivative may comprise one or more types of mutations described herein, e.g., PAM-modifying mutations, protein stabilizing mutations, activity enhancing mutations, and/or mutations partially or fully inactivating one or two endonuclease domains relative to the parental enzyme (e.g., one or more mutations to abolish endonuclease activity towards one or both strands of a target DNA, e.g., a nickase or catalytically dead enzyme). In some embodiments, a Cas9 enzyme used in a system described herein may comprise mutations that confer nickase activity toward the enzyme (e.g., SpyCas9 N863A or H840A) in addition to mutations improving catalytic efficiency (e.g., SpyCas9 R221K, N394K, and/or L1245V). In some embodiments, a Cas9 enzyme used in a system described herein is a SpyCas9 enzyme or derivative that further comprises an N863A mutation to confer nickase activity in addition to R221K and N394K mutations to improve catalytic efficiency.

[0503] In some embodiments, the template nucleic acid (e.g., template RNA) has at least 15, 16, 17, 18, 19, 20, 21, 22, 23, or 24 bases of at least 80%, 85%, 90%, 95%, 99%, or 100% homology to the target site, e.g., at the 5′ end, e.g., comprising a gRNA spacer sequence of length appropriate to the Cas9 domain of the gene modifying polypeptide (Table 8).

[0504] Table 12 provides parameters to define components for designing gRNA and/or Template RNAs to apply Cas variants listed in Table 8 for gene modifying. The cut site indicates the validated or predicted protospacer adjacent motif (PAM) requirements, validated or predicted location of cut site (relative to the most upstream base of the PAM site). The gRNA for a given enzyme can be assembled by concatenating the crRNA, Tetraloop, and tracrRNA sequences, and further adding a 5′ spacer of a length within Spacer (min) and Spacer (max) that matches a protospacer at a target site. Further, the predicted location of the ssDNA nick at the target is important for designing a PBS sequence of a Template RNA that can anneal to the sequence immediately 5′ of the nick in order to initiate target primed reverse transcription. In some embodiments, a gRNA scaffold described herein comprises a nucleic acid sequence comprising, in the 5′ to 3′ direction, a crRNA of Table 12, a tetraloop from the same row of Table 12, and a tracrRNA from the same row of Table 12, or a sequence having at least 70%, 80%, 85%, 90%, 95%, or 99% identity thereto. In some embodiments, the gRNA or template RNA comprising the scaffold further comprises a gRNA spacer having a length within the Spacer (min) and Spacer (max) indicated in the same row of Table 12. In some embodiments, the gRNA or template RNA having a sequence according to Table 12 is comprised by a system that further comprises a gene modifying polypeptide, wherein the gene modifying polypeptide comprises a Cas domain described in the same row of Table 12.

TABLE 12
Parameters to define components for designing gRNA and/or Template RNAs
to apply Cas variants listed in Table 8 in gene modifying systems.

| | | | | Spacer | Spacer | | SEQ ID | | | SEQ ID |
|---|---|---|---|---|---|---|---|---|---|---|
| Variant | PAM(s) | Cut | Tier | (min) | (max) | crRNA | NO: | Tetraloop | tracrRNA | NO: |
| Nme2Cas9 | NNNNCC | -3 | 1 | 22 | 24 | GTTGTAGC | 10,051 | GAAA | CGAAATGAGAACCGTTGCTACAATAAGGC | 10,151 |
| | | | | | | TCCCTTTCT | | | CGTCTGAAAAGATGTGCCGCAACGCTCTG | |
| | | | | | | CATTTCG | | | CCCCTTAAAGCTTCTGCTTTAAGGGGCATC | |
| | | | | | | | | | GTTTA | |
| PpnCas9 | NNNNRTT | | 1 | 21 | 24 | GTTGTAGC | 10,052 | GAAA | GCGAAATGAAAAACGTTGTTACAATAAGA | 10,152 |
| | | | | | | TCCCTTTTT | | | GATGAATTTCTCGCAAAGCTCTGCCTCTTG | |
| | | | | | | CATTTCGC | | | AAATTTCGGTTTCAAGAGGCATC | |
| SauCas9 | NNGRR; | -3 | 1 | 21 | 23 | GTTTTAGT | 10,053 | GAAA | CAGAATCTACTAAAACAAGGCAAAATGCC | 10,153 |
| | NNGRRT | | | | | ACTCTG | | | GTGTTTATCTCGTCAACTTGTTGGCGAGA | |
| SauCas9- | NNNRR; | -3 | 1 | 21 | 21 | GTTTTAGT | 10,054 | GAAA | CAGAATCTACTAAAACAAGGCAAAATGCC | 10,154 |
| KKH | NNNRRT | | | | | ACTCTG | | | GTGTTTATCTCGTCAACTTGTTGGCGAGA | |
| SauriCas9 | NNGG | -3 | 1 | 21 | 21 | GTTTTAGT | 10,055 | GAAA | CAGAATCTACTAAAACAAGGCAAAATGCC | 10,155 |
| | | | | | | ACTCTG | | | GTGTTTATCTCGTCAACTTGTTGGCGAGA | |
| SauriCas9- | NNRG | -3 | 1 | 21 | 21 | GTTTTAGT | 10,056 | GAAA | CAGAATCTACTAAAACAAGGCAAAATGCC | 10,156 |
| KKH | | | | | | ACTCTG | | | GTGTTTATCTCGTCAACTTGTTGGCGAGA | |
| ScaCas9- | NNG | -3 | 1 | 20 | 20 | GTTTTAGA | 10,057 | GAAA | TAGCAAGTTAAAATAAGGCTAGTCCGTTA | 10,157 |
| Sc++ | | | | | | GCTA | | | TCAACTTGAAAAAGTGGCACCGAGTCGGT | |
| | | | | | | | | | GC | |
| SpyCas9 | NGG | -3 | 1 | 20 | 20 | GTTTTAGA | 10,058 | GAAA | TAGCAAGTTAAAATAAGGCTAGTCCGTTA | 10,158 |
| | | | | | | GCTA | | | TCAACTTGAAAAAGTGGCACCGAGTCGGT | |
| | | | | | | | | | GC | |
| SpyCas9_ | NGG | -3 | 1 | 20 | 20 | GTTTTAGA | 10,058 | GAAA | TAGCAAGTTAAAATAAGGCTAGTCCGTTA | 10,193 |
| i_v1 | | | | | | GCTA | | | TCAACTTGGACTTCGGTCCAAGTGGCACC | |
| | | | | | | | | | GAGTCGGTGC | |
| SpyCas9_ | NGG | -3 | 1 | 20 | 20 | GTTTTAGA | 10,058 | GAAA | TAGCAAGTTAAAATAAGGCTAGTCCGTTA | 10,194 |
| i_v2 | | | | | | GCTA | | | TCAACTTGGAGCTTGCTCCAAGTGGCACC | |
| | | | | | | | | | GAGTCGGTGC | |
| SpyCas9_ | NGG | -3 | 1 | 20 | 20 | GTTTTAGA | 10,058 | GAAA | GTTTTAGAGCTAGAAATAGCAAGTTAAAA | 10,195 |
| i_v3 | | | | | | GCTA | | | TAAGGCTAGTCCGTTATCGACTTGAAAAA | |
| | | | | | | | | | GTCGCACCGAGTCGGTGC | |
| SpyCas9- | NG | -3 | 1 | 20 | 20 | GTTTTAGA | 10,059 | GAAA | TAGCAAGTTAAAATAAGGCTAGTCCGTTA | 10,159 |
| NG | (NGG = | | | | | GCTA | | | TCAACTTGAAAAAGTGGCACCGAGTCGGT | |
| | NGA = | | | | | | | | GC | |
| | NGT > | | | | | | | | | |
| | NGC) | | | | | | | | | |
| SpyCas9- | NRN > | -3 | 1 | 20 | 20 | GTTTTAGA | 10,060 | GAAA | TAGCAAGTTAAAATAAGGCTAGTCCGTTA | 10,160 |
| SpRY | NYN | | | | | GCTA | | | TCAACTTGAAAAAGTGGCACCGAGTCGGT | |
| | | | | | | | | | GC | |
| St1Cas9 | NNAGAAW > | -3 | 1 | 20 | 20 | GTCTTTGTA | 10,061 | GTAC | CAGAAGCTACAAAGATAAGGCTTCATGCC | 10,161 |
| | NNAGGAW = | | | | | CTCTG | | | GAAATCAACACCCTGTCATTTTATGGCAG | |
| | NNGGAAW | | | | | | | | GGTGTTTT | |
| BlatCas9 | NNNNCNAA > | -3 | 1 | 19 | 23 | GCTATAGT | 10,062 | GAAA | GGTAAGTTGCTATAGTAAGGGCAACAGAC | 10,162 |
| | NNNNCNDD > | | | | | TCCTTACT | | | CCGAGGCGTTGGGGATCGCCTAGCCCGTG | |
| | NNNNC | | | | | | | | TTTACGGGCTCTCCCCATATTCAAAATAAT | |
| | | | | | | | | | GACAGACGAGCACCTTGGAGCATTTATCT | |
| | | | | | | | | | CCGAGGTGCT | |
| cCas9-v16 | NNVACT; | -3 | 2 | 21 | 21 | GTCTTAGT | 10,063 | GAAA | CAGAATCTACTAAGACAAGGCAAAATGCC | 10,163 |
| | NNVATGM; | | | | | ACTCTG | | | GTGTTTATCTCGTCAACTTGTTGGCGAGA | |
| | NNVATT; | | | | | | | | | |
| | NNVGCT; | | | | | | | | | |
| | NNVGTG; | | | | | | | | | |
| | NNVGTT | | | | | | | | | |
| cCas9-v17 | NNVRRN | -3 | 2 | 21 | 21 | GTCTTAGT | 10,064 | GAAA | CAGAATCTACTAAGACAAGGCAAAATGCC | 10,164 |
| | | | | | | ACTCTG | | | GTGTTTATCTCGTCAACTTGTTGGCGAGA | |
| cCas9-v21 | NNVACT; | -3 | 2 | 21 | 21 | GTCTTAGT | 10,065 | GAAA | CAGAATCTACTAAGACAAGGCAAAATGCC | 10,165 |
| | NNVATGM; | | | | | ACTCTG | | | GTGTTTATCTCGTCAACTTGTTGGCGAGA | |
| | NNVATT; | | | | | | | | | |
| | NNVGCT; | | | | | | | | | |
| | NNVGTG; | | | | | | | | | |
| | NNVGTT | | | | | | | | | |
| cCas9-v42 | NNVRRN | -3 | 2 | 21 | 21 | GTCTTAGT | 10,066 | GAAA | CAGAATCTACTAAGACAAGGCAAAATGCC | 10,166 |
| | | | | | | ACTCTG | | | GTGTTTATCTCGTCAACTTGTTGGCGAGA | |
| CdiCas9 | NNRHHHY; | | 2 | 22 | 22 | ACTGGGGT | 10,067 | GAAA | CTGAACCTCAGTAAGCATTGGCTCGTTTCC | 10,167 |
| | NNRAAAY | | | | | TCAG | | | AATGTTGATTGCTCCGCCGGTGCTCCTTAT | |
| | | | | | | | | | TTTTAAGGGCGCCGGC | |
| CjeCas9 | NNNNRYAC | -3 | 2 | 21 | 23 | GTTTTAGTC | 10,068 | GAAA | AGGGACTAAAATAAAGAGTTTGCGGGACT | 10,168 |
| | | | | | | CCT | | | CTGCGGGGTTACAATCCCCTAAAACCGC | |
| GeoCas9 | NNNNCRAA | | 2 | 21 | 23 | GTCATAGT | 10,069 | GAAA | TCAGGGTTACTATGATAAGGGCTTTCTGCC | 10,169 |
| | | | | | | TCCCCTGA | | | TAAGGCAGACTGACCCGCGGCGTTGGGG | |
| | | | | | | | | | ATCGCCTGTCGCCCGCTTTTGGCGGGCATT | |
| | | | | | | | | | CCCCATCCTT | |
| iSpy | NAAN | -3 | 2 | 19 | 21 | GTTTTAGA | 10,070 | GAAA | TAGCAAGTTAAAATAAGGCTAGTCCGTTA | 10,170 |
| MacCas9 | | | | | | GCTA | | | TCAACTTGAAAAAGTGGCACCGAGTCGGT | |
| | | | | | | | | | GC | |
| NmeCas9 | NNNNGAYT; | -3 | 2 | 20 | 24 | GTTGTAGC | 10,071 | GAAA | CGAAATGAGAACCGTTGCTACAATAAGGC | 10,171 |
| | NNNNGYTT; | | | | | TCCCTTTCT | | | CGTCTGAAAAGATGTGCCGCAACGCTCTG | |
| | NNNNGAYA; | | | | | CATTTCG | | | CCCCTTAAAGCTTCTGCTTTAAGGGGCATC | |
| | NNNNGTCT | | | | | | | | GTTTA | |
| ScaCas9 | NNG | -3 | 2 | 20 | 20 | GTTTTAGA | 10,072 | GAAA | TAGCAAGTTAAAATAAGGCTAGTCCGTTA | 10,172 |
| | | | | | | GCTA | | | TCAACTTGAAAAAGTGGCACCGAGTCGGT | |
| | | | | | | | | | GC | |
| ScaCas9- | NNG | -3 | 2 | 20 | 20 | GTTTTAGA | 10,073 | GAAA | TAGCAAGTTAAAATAAGGCTAGTCCGTTA | 10,173 |
| HiFi-Sc++ | | | | | | GCTA | | | TCAACTTGAAAAAGTGGCACCGAGTCGGT | |
| | | | | | | | | | GC | |
| SpyCas9- | NRRH | -3 | 2 | 20 | 20 | GTTTAAGA | 10,074 | GAAA | CAGCATAGCAAGTTTAAATAAGGCTAGTC | 10,174 |
| 3var-NRRH | | | | | | GCTATGCT | | | CGTTATCAACTTGAAAAAGTGGCACCGAG | |
| | | | | | | G | | | TCGGTGC | |
| SpyCas9- | NRTH | -3 | 2 | 20 | 20 | GTTTAAGA | 10,075 | GAAA | CAGCATAGCAAGTTTAAATAAGGCTAGTC | 10,175 |
| 3var-NRTH | | | | | | GCTATGCT | | | CGTTATCAACTTGAAAAAGTGGCACCGAG | |
| | | | | | | G | | | TCGGTGC | |
| SpyCas9- | NRCH | -3 | 2 | 20 | 20 | GTTTAAGA | 10,076 | GAAA | CAGCATAGCAAGTTTAAATAAGGCTAGTC | 10,176 |
| 3var-NRCH | | | | | | GCTATGCT | | | CGTTATCAACTTGAAAAAGTGGCACCGAG | |
| | | | | | | G | | | TCGGTGC | |
| SpyCas9- | NGG | -3 | 2 | 20 | 20 | GTTTTAGA | 10,077 | GAAA | TAGCAAGTTAAAATAAGGCTAGTCCGTTA | 10,177 |
| HF1 | | | | | | GCTA | | | TCAACTTGAAAAAGTGGCACCGAGTCGGT | |
| | | | | | | | | | GC | |
| SpyCas9- | NAAG | -3 | 2 | 20 | 20 | GTTTTAGA | 10,078 | GAAA | TAGCAAGTTAAAATAAGGCTAGTCCGTTA | 10,178 |
| QQR1 | | | | | | GCTA | | | TCAACTTGAAAAAGTGGCACCGAGTCGGT | |
| | | | | | | | | | GC | |
| SpyCas9- | NGN | -3 | 2 | 20 | 20 | GTTTTAGA | 10,079 | GAAA | TAGCAAGTTAAAATAAGGCTAGTCCGTTA | 10,179 |
| SpG | | | | | | GCTA | | | TCAACTTGAAAAAGTGGCACCGAGTCGGT | |
| | | | | | | | | | GC | |
| SpyCas9- | NGAN | -3 | 2 | 20 | 20 | GTTTTAGA | 10,080 | GAAA | TAGCAAGTTAAAATAAGGCTAGTCCGTTA | 10,180 |
| VQR | | | | | | GCTA | | | TCAACTTGAAAAAGTGGCACCGAGTCGGT | |
| | | | | | | | | | GC | |
| SpyCas9- | NGCG | -3 | 2 | 20 | 20 | GTTTTAGA | 10,081 | GAAA | TAGCAAGTTAAAATAAGGCTAGTCCGTTA | 10,181 |
| VRER | | | | | | GCTA | | | TCAACTTGAAAAAGTGGCACCGAGTCGGT | |
| | | | | | | | | | GC | |
| SpyCas9- | NG;GAA; | -3 | 2 | 20 | 20 | GTTTAAGA | 10,082 | GAAA | CAGCATAGCAAGTTTAAATAAGGCTAGTC | 10,182 |
| xCas | GAT | | | | | GCTATGCT | | | CGTTATCAACTTGAAAAAGTGGCACCGAG | |
| | | | | | | G | | | TCGGTGC | |
| SpyCas9- | NG | -3 | 2 | 20 | 20 | GTTTAAGA | 10,083 | GAAA | CAGCATAGCAAGTTTAAATAAGGCTAGTC | 10,183 |
| xCas-NG | | | | | | GCTATGCT | | | CGTTATCAACTTGAAAAAGTGGCACCGAG | |
| | | | | | | G | | | TCGGTGC | |
| St1Cas9- | NNACAA | -3 | 2 | 20 | 20 | GTCTTTGTA | 10,084 | GTAC | CAGAAGCTACAAAGATAAGGCTTCATGCC | 10,184 |
| CNRZ1066 | | | | | | CTCTG | | | GAAATCAACACCCTGTCATTTTATGGCAG | |
| | | | | | | | | | GGTGTTTT | |
| St1Cas9- | NNGCAA | -3 | 2 | 20 | 20 | GTCTTTGTA | 10,085 | GTAC | CAGAAGCTACAAAGATAAGGCTTCATGCC | 10,185 |
| LMG1831 | | | | | | CTCTG | | | GAAATCAACACCCTGTCATTTTATGGCAG | |
| | | | | | | | | | GGTGTTTT | |
| St1Cas9- | NNAAAA | -3 | 2 | 20 | 20 | GTCTTTGTA | 10,086 | GTAC | CAGAAGCTACAAAGATAAGGCTTCATGCC | 10,186 |
| MTH17CL396 | | | | | | CTCTG | | | GAAATCAACACCCTGTCATTTTATGGCAG | |
| | | | | | | | | | GGTGTTTT | |
| St1Cas9- | NNGAAA | -3 | 2 | 20 | 20 | GTCTTTGTA | 10,087 | GTAC | CAGAAGCTACAAAGATAAGGCTTCATGCC | 10,187 |
| TH1477 | | | | | | CTCTG | | | GAAATCAACACCCTGTCATTTTATGGCAG | |
| | | | | | | | | | GGTGTTTT | |
| SRGN3.1 | NNGG | | 1 | 21 | 23 | GTTTTAGT | 10,088 | GAAA | CAGAATCTACTGAAACAAGACAATATGTC | 10,188 |
| | | | | | | ACTCTG | | | GTGTTTATCCCATCAATTTATTGGTGGGAT | |
| | | | | | | | | | TTT | |
| sRGN3.3 | NNGG | | 1 | 21 | 23 | GTTTTAGT | 10,089 | GAAA | CAGAATCTACTGAAACAAGACAATATGTC | 10,189 |
| | | | | | | ACTCTG | | | GTGTTTATCCCATCAATTTATTGGTGGGAT | |
| | | | | | | | | | TTT | |

[0505] Herein, when an RNA sequence (e.g., a template RNA sequence) is said to comprise a particular sequence (e.g., a sequence of Table 12 or a portion thereof) that comprises thymine (T), it is of course understood that the RNA sequence may (and frequently does) comprise uracil (U) in place of T. For instance, the RNA sequence may comprise U at every position shown as T in the sequence in Table 12. More specifically, the present disclosure provides an RNA sequence according to every gRNA scaffold sequence of Table 12, wherein the RNA sequence has a U in place of each T in the sequence in Table 12. Additionally, it is understood that terminal Us and Ts may optionally be added or removed from tracrRNA sequences and may be modified or unmodified when provided as RNA. Without wishing to be bound by example, versions of gRNA scaffold sequences alternative to those exemplified in Table 12 may also function with the different Cas9 enzymes or derivatives thereof exemplified in Table 8, e.g., alternate gRNA scaffold sequences with nucleotide additions, substitutions, or deletions, e.g., sequences with stem-loop structures added or removed. It is contemplated herein that the gRNA scaffold sequences represent a component of gene modifying systems that can be similarly optimized for a given system, Cas-RT fusion polypeptide, indication, target mutation, template RNA, or delivery vehicle.

### Heterologous Object Sequence

[0506] A template RNA described herein may comprise a heterologous object sequence that the gene modifying polypeptide can use as a template for reverse transcription, to write a desired sequence into the target nucleic acid. In some embodiments, the heterologous object sequence comprises, from 5′ to 3′, a post-edit homology region, the mutation region, and a pre-edit homology region. Without wishing to be bound by theory, an RT performing reverse transcription on the template RNA first reverse transcribes the pre-edit homology region, then the mutation region, and then the post-edit homology region, thereby creating a DNA strand comprising the desired mutation with a homology region on either side.

[0507] In some embodiments, the heterologous object sequence is at least 32, 33, 34, 35, 36, 37, 38, 39, 40, 41, 42, 43, 44, 45, 46, 47, 48, 49, 50, 51, 52, 53, 54, 55, 56, 57, 58, 59, 60, 61, 62, 63, 64, 65, 66, 67, 68, 69, 70, 71, 72, 73, 74, 75, 76, 77, 78, 79, 80, 81, 82, 83, 84, 85, 86, 87, 88, 89, 90, 91, 92, 93, 94, 95, 96, 97, 98, 99, 100, 120, 140, 160, 180, 200, 500, or 1,000 nucleotides (nts) in length, or at least 1, 1.5, 2, 2.5, 3, 3.5, 4, 4.5, 5, 5.5, 6, 6.5, 7, 7.5, 8, 8.5, 9, 9.5, or 10 kilobases in length. In some embodiments, the heterologous object sequence is no more than 33, 34, 35, 36, 37, 38, 39, 40, 41, 42, 43, 44, 45, 46, 47, 48, 49, 50, 51, 52, 53, 54, 55, 56, 57, 58, 59, 60, 61, 62, 63, 64, 65, 66, 67, 68, 69, 70, 71, 72, 73, 74, 75, 76, 77, 78, 79, 80, 81, 82, 83, 84, 85, 86, 87, 88, 89, 90, 91, 92, 93, 94, 95, 96, 97, 98, 99, 100, 120, 140, 160, 180, 200, 500, 1,000, or 2000 nucleotides (nts) in length, or no more than 20, 15, 10, 9, 8, 7, 6, 5, 4, or 3 kilobases in length. In some embodiments, the heterologous object sequence is 30-1000, 40-1000, 50-1000, 60-1000, 70-1000, 74-1000, 75-1000, 76-1000, 77-1000, 78-1000, 79-1000, 80-1000, 85-1000, 90-1000, 100-1000, 120-1000, 140-1000, 160-1000, 180-1000, 200-1000, 500-1000, 30-500, 40-500, 50-500, 60-500, 70-500, 74-500, 75-500, 76-500, 77-500, 78-500, 79-500, 80-500, 85-500, 90-500, 100-500, 120-500, 140-500, 160-500, 180-500, 200-500, 30-200, 40-200, 50-200, 60-200, 70-200, 74-200, 75-200, 76-200, 77-200, 78-200, 79-200, 80-200, 85-200, 90-200, 100-200, 120-200, 140-200, 160-200, 180-200, 30-100, 40-100, 50-100, 60-100, 70-100, 74-100, 75-100, 76-100, 77-100, 78-100, 79-100, 80-100, 85-100, or 90-100 nucleotides (nts) in length, or 1-20, 1-15, 1-10, 1-9, 1-8, 1-7, 1-6, 1-5, 1-4, 1-3, 1-2, 2-20, 2-15, 2-10, 2-9, 2-8, 2-7, 2-6, 2-5, 2-4, 2-3, 3-20, 3-15, 3-10, 3-9, 3-8, 3-7, 3-6, 3-5, 3-4, 4-20, 4-15, 4-10, 4-9, 4-8, 4-7, 4-6, 4-5, 5-20, 5-15, 5-10, 5-9, 5-8, 5-7, 5-6, 6-20, 6-15, 6-10, 6-9, 6-8, 6-7, 7-20, 7-15, 7-10, 7-9, 7-8, 8-20, 8-15, 8-10, 8-9, 9-20, 9-15, 9-10, 10-15, 10-20, or 15-20 kilobases in length. In some embodiments, the heterologous object sequence is 10-100, 10-90, 10-80, 10-70, 10-60, 10-50, 10-40, 10-30, or 10-20 nt in length, e.g., 10-80, 10-50, or 10-20 nt in length, e.g., about 10-20 nt in length. In some embodiments, the heterologous object sequence is 8-30, 9-25, 10-20, 11-16, or 12-15 nucleotides in length, e.g., is 11-16 nt in length. Without wishing to be bound by theory, in some embodiments, a larger insertion size, larger region of editing (e.g., the distance between a first edit/substitution and a second edit/substitution in the target region), and/or greater number of desired edits (e.g., mismatches of the heterologous object sequence to the target genome), may result in a longer optimal heterologous object sequence.

[0508] In certain embodiments, the template nucleic acid comprises a customized RNA sequence template which can be identified, designed, engineered and constructed to contain sequences altering or specifying host genome function, for example by introducing a heterologous coding region into a genome; affecting or causing exon structure/alternative splicing, e.g., leading to exon skipping of one or more exons; causing disruption of an endogenous gene, e.g., creating a genetic knockout; causing transcriptional activation of an endogenous gene; causing epigenetic regulation of an endogenous DNA; causing up-regulation of one or more operably linked genes, e.g., leading to gene activation or overexpression; causing down-regulation of one or more operably linked genes, e.g., creating a genetic knock-down; etc. In certain embodiments, a customized RNA sequence template can be engineered to contain sequences coding for exons and/or transgenes, provide binding sites for transcription factor activators, repressors, enhancers, etc., and combinations thereof. In some embodiments, a customized template can be engineered to encode a nucleic acid or peptide tag to be expressed in an endogenous RNA transcript or endogenous protein operably linked to the target site. In other embodiments, the coding sequence can be further customized with splice donor sites, splice acceptor sites, or poly-A tails.

[0509] The template nucleic acid (e.g., template RNA) of the system typically comprises an object sequence (e.g., a heterologous object sequence) for writing a desired sequence into a target DNA. The object sequence may be coding or non-coding. The template nucleic acid (e.g., template RNA) can be designed to result in insertions, mutations, or deletions at the target DNA locus. In some embodiments, the template nucleic acid (e.g., template RNA) may be designed to cause an insertion in the target DNA. For example, the template nucleic acid (e.g., template RNA) may contain a heterologous sequence, wherein the reverse transcription will result in insertion of the heterologous sequence into the target DNA. In other embodiments, the RNA template may be designed to introduce a deletion into the target DNA. For example, the template nucleic acid (e.g., template RNA) may match the target DNA upstream and downstream of the desired deletion, wherein the reverse transcription will result in the copying of the upstream and downstream sequences from the template nucleic acid (e.g., template RNA) without the intervening sequence, e.g., causing deletion of the intervening sequence. In other embodiments, the template nucleic acid (e.g., template RNA) may be designed to introduce an edit into the target DNA. For example, the template RNA may match the target DNA sequence with the exception of one or more nucleotides, wherein the reverse transcription will result in the copying of these edits into the target DNA, e.g., resulting in mutations, e.g., transition or transversion mutations.

[0510] In some embodiments, writing of an object sequence into a target site results in the substitution of nucleotides, e.g., where the full length of the object sequence corresponds to a matching length of the target site with one or more mismatched bases. In some embodiments, a heterologous object sequence may be designed such that a combination of sequence alterations may occur, e.g., a simultaneous addition and deletion, addition and substitution, or deletion and substitution.

[0511] In some embodiments, the heterologous object sequence may contain an open reading frame or a fragment of an open reading frame. In some embodiments the heterologous object sequence has a Kozak sequence. In some embodiments the heterologous object sequence has an internal ribosome entry site. In some embodiments the heterologous object sequence has a self-cleaving peptide such as a T2A or P2A site. In some embodiments the heterologous object sequence has a start codon. In some embodiments the template RNA has a splice acceptor site. In some embodiments the template RNA has a splice donor site. Exemplary splice acceptor and splice donor sites are described in WO2016044416, incorporated herein by reference in its entirety. Exemplary splice acceptor site sequences are known to those of skill in the art. In some embodiments the template RNA has a microRNA binding site downstream of the stop codon. In some embodiments the template RNA has a polyA tail downstream of the stop codon of an open reading frame. In some embodiments the template RNA comprises one or more exons. In some embodiments the template RNA comprises one or more introns. In some embodiments the template RNA comprises a eukaryotic transcriptional terminator. In some embodiments the template RNA comprises an enhanced translation element or a translation enhancing element. In some embodiments the RNA comprises the human T-cell leukemia virus (HTLV-1) R region. In some embodiments the RNA comprises a posttranscriptional regulatory element that enhances nuclear export, such as that of Hepatitis B Virus (HPRE) or Woodchuck Hepatitis Virus (WPRE).

[0512] In some embodiments, the heterologous object sequence may contain a non-coding sequence. For example, the template nucleic acid (e.g., template RNA) may comprise a regulatory element, e.g., a promoter or enhancer sequence or miRNA binding site. In some embodiments, integration of the object sequence at a target site will result in upregulation of an endogenous gene. In some embodiments, integration of the object sequence at a target site will result in downregulation of an endogenous gene. In some embodiments the template nucleic acid (e.g., template RNA) comprises a tissue specific promoter or enhancer, each of which may be unidirectional or bidirectional. In some embodiments the promoter is an RNA polymerase I promoter, RNA polymerase II promoter, or RNA polymerase III promoter. In some embodiments the promoter comprises a TATA element. In some embodiments the promoter comprises a B recognition element. In some embodiments the promoter has one or more binding sites for transcription factors.

[0513] In some embodiments, the template nucleic acid (e.g., template RNA) comprises a site that coordinates epigenetic modification. In some embodiments, the template nucleic acid (e.g., template RNA) comprises a chromatin insulator. For example, the template nucleic acid (e.g., template RNA) comprises a CTCF site or a site targeted for DNA methylation.

[0514] In some embodiments, the template nucleic acid (e.g., template RNA) comprises a gene expression unit composed of at least one regulatory region operably linked to an effector sequence. The effector sequence may be a sequence that is transcribed into RNA (e.g., a coding sequence or a non-coding sequence such as a sequence encoding a micro RNA).

[0515] In some embodiments, the heterologous object sequence of the template nucleic acid (e.g., template RNA) is inserted into a target genome in an endogenous intron. In some embodiments, the heterologous object sequence of the template nucleic acid (e.g., template RNA) is inserted into a target genome and thereby acts as a new exon. In some embodiments, the insertion of the heterologous object sequence into the target genome results in replacement of a natural exon or the skipping of a natural exon.

[0516] The template nucleic acid (e.g., template RNA) can be designed to result in insertions, mutations, or deletions at the target DNA locus. In some embodiments, the template nucleic acid (e.g., template RNA) may be designed to cause an insertion in the target DNA. For example, the template nucleic acid (e.g., template RNA) may contain a heterologous object sequence, wherein the reverse transcription will result in insertion of the heterologous object sequence into the target DNA. In other embodiments, the RNA template may be designed to write a deletion into the target DNA. For example, the template nucleic acid (e.g., template RNA) may match the target DNA upstream and downstream of the desired deletion, wherein the reverse transcription will result in the copying of the upstream and downstream sequences from the template nucleic acid (e.g., template RNA) without the intervening sequence, e.g., causing deletion of the intervening sequence. In other embodiments, the template nucleic acid (e.g., template RNA) may be designed to write an edit into the target DNA. For example, the template RNA may match the target DNA sequence with the exception of one or more nucleotides, wherein the reverse transcription will result in the copying of these edits into the target DNA, e.g., resulting in mutations, e.g., transition or transversion mutations.

[0517] In some embodiments, the pre-edit homology domain comprises a nucleic acid sequence having 100% sequence identity with a nucleic acid sequence comprised in a target nucleic acid molecule.

[0518] In some embodiments, the post-edit homology domain comprises a nucleic acid sequence having 100% sequence identity with a nucleic acid sequence comprised in a target nucleic acid molecule.

### PBS Sequence

[0519] In some embodiments, a template nucleic acid (e.g., template RNA) comprises a PBS sequence. In some embodiments, a PBS sequence is disposed 3′ of the heterologous object sequence and is complementary to a sequence adjacent to a site to be modified by a system described herein, or comprises no more than 1, 2, 3, 4, or 5 mismatches to a sequence complementary to the sequence adjacent to a site to be modified by the system/gene modifying polypeptide. In some embodiments, the PBS sequence binds within 1, 2, 3, 4, 5, 6, 7, 8, 9, or 10 nucleotides of a nick site in the target nucleic acid molecule. In some embodiments, binding of the PBS sequence to the target nucleic acid molecule permits initiation of target-primed reverse transcription (TPRT), e.g., with the 3′ homology domain acting as a primer for TPRT. In some embodiments, the PBS sequence is 3-5, 5-10, 10-30, 10-25, 10-20, 10-19, 10-18, 10-17, 10-16, 10-15, 10-14, 10-13, 10-12, 10-11, 11-30, 11-25, 11-20, 11-19, 11-18, 11-17, 11-16, 11-15, 11-14, 11-13, 11-12, 12-30, 12-25, 12-20, 12-19, 12-18, 12-17, 12-16, 12-15, 12-14, 12-13, 13-30, 13-25, 13-20, 13-19, 13-18, 13-17, 13-16, 13-15, 13-14, 14-30, 14-25, 14-20, 14-19, 14-18, 14-17, 14-16, 14-15, 15-30, 15-25, 15-20, 15-19, 15-18, 15-17, 15-16, 16-30, 16-25, 16-20, 16-19, 16-18, 16-17, 17-30, 17-25, 17-20, 17-19, 17-18, 18-30, 18-25, 18-20, 18-19, 19-30, 19-25, 19-20, 20-30, 20-25, or 25-30 nucleotides in length, e.g., 10-17, 12-16, or 12-14 nucleotides in length. In some embodiments, the PBS sequence is 5-20, 8-16, 8-14, 8-13, 9-13, 9-12, or 10-12 nucleotides in length, e.g., 9-12 nucleotides in length.

[0520] The template nucleic acid (e.g., template RNA) may have some homology to the target DNA. In some embodiments, the template nucleic acid (e.g., template RNA) PBS sequence domain may serve as an annealing region to the target DNA, such that the target DNA is positioned to prime the reverse transcription of the template nucleic acid (e.g., template RNA). In some embodiments the template nucleic acid (e.g., template RNA) has at least 2, 3, 4, 5, 6, 7, 8, 9, 10, 11, 12, 13, 14, 15, 20, 25, 30, 35, 40, 45, 50, 60, 70, 80, 90, 100, 110, 120, 130, 140, 150, 175, 200 or more bases of exact homology to the target DNA at the 3′ end of the RNA. In some embodiments the template nucleic acid (e.g., template RNA) has at least 2, 3, 4, 5, 6, 7, 8, 9, 10, 11, 12, 13, 14, 15, 20, 25, 30, 35, 40, 45, 50, 60, 70, 80, 90, 100, 110, 120, 130, 140, 150, 175, 200 or more bases of at least 50%, 60%, 70%, 80%, 85%, 90%, 95%, 97%, 98%, 99% or 100% homology to the target DNA, e.g., at the 5′ end of the template nucleic acid (e.g., template RNA).

### Exemplary Template Sequences

[0521] In some embodiments of the systems and methods herein, the template RNA comprises a gRNA spacer comprising the core nucleotides of a gRNA spacer sequence of Table 1. In some embodiments, the gRNA spacer additionally comprises one or more (e.g., 2, 3, or all) consecutive nucleotides starting with the 3′ end of the flanking nucleotides of the gRNA spacer. In some embodiments, the template RNA comprising a sequence of Table 1 is comprised by a system that further comprises a gene modifying polypeptide having an RT domain listed in the same line of Table 1. RT domain amino acid sequences can be found, e.g., in Table 6 herein.

TABLE 1
Exemplary gRNA spacer Cas pairs
Table 1 provides a gRNA database for correcting the pathogenic E342K
mutation in SERPINA1. List of spacers, PAMs, and Cas variants for
generating a nick at an appropriate position to enable installation
of a desired genomic edit with a gene modifying system. The spacers
in this table are designed to be used with a gene modifying
polypeptide comprising a nickase variant of the Cas species
indicated in the table. Tables 2, 3, and 4 detail the other
components of the system and are organized such that the ID number
shown here in Column 1 (“ID”) is meant to correspond to the same ID
number in the subsequent tables.

| | Pam | | SEQ | | | overlaps |
|---|---|---|---|---|---|---|
| ID | sequence | gRNA spacer | ID NO | Cas species | distance | mutation |
| 1 | AAAGG | GCTGTGCTGACCATCGACAAG | 17085 | SauCas9KKH | 0 | 0 |
| 2 | AAAG | GCTGTGCTGACCATCGACAAG | 17086 | SauriCas9- | 0 | 0 |
| | | | | KKH | | |
| 3 | AAAG | CTGTGCTGACCATCGACAAG | 17087 | SpyCas9- | 0 | 0 |
| | | | | QQR1 | | |
| 4 | AAAG | gcTGTGCTGACCATCGACAAG | 17088 | iSpyMacCas9 | 0 | 0 |
| 5 | AAA | CTGTGCTGACCATCGACAAG | 17089 | SpyCas9- | 0 | 0 |
| | | | | SpRY | | |
| 6 | AAAGGG | GCTGTGCTGACCATCGACAAG | 17090 | cCas9-v17 | 0 | 0 |
| 7 | AAAGGG | GCTGTGCTGACCATCGACAAG | 17091 | cCas9-v42 | 0 | 0 |
| 8 | GAAAG | GGCTGTGCTGACCATCGACAA | 17092 | SauCas9KKH | 1 | 0 |
| 9 | TCG | CAGCTTCAGTCCCTTTCTTG | 17093 | ScaCas9 | 1 | 0 |
| 10 | TCG | CAGCTTCAGTCCCTTTCTTG | 17094 | ScaCas9-HiFi- | 1 | 0 |
| | | | | Sc++ | | |
| 11 | TCG | CAGCTTCAGTCCCTTTCTTG | 17095 | ScaCas9- | 1 | 0 |
| | | | | Sc++ | | |
| 12 | TCG | CAGCTTCAGTCCCTTTCTTG | 17096 | SpyCas9- | 1 | 0 |
| | | | | SpRY | | |
| 13 | GAA | GCTGTGCTGACCATCGACAA | 17097 | SpyCas9- | 1 | 0 |
| | | | | SpRY | | |
| 14 | GAA | GCTGTGCTGACCATCGACAA | 17098 | SpyCas9- | 1 | 0 |
| | | | | xCas | | |
| 15 | GAAAGG | GGCTGTGCTGACCATCGACAA | 17099 | cCas9-v17 | 1 | 0 |
| 16 | GAAAGG | GGCTGTGCTGACCATCGACAA | 17100 | cCas9-v42 | 1 | 0 |
| 17 | GAAA | GCTGTGCTGACCATCGACAA | 17101 | SpyCas9- | 1 | 0 |
| | | | | 3var-NRRH | | |
| 18 | GAAA | ggCTGTGCTGACCATCGACAA | 17102 | iSpyMacCas9 | 1 | 0 |
| 19 | AGAAA | AGGCTGTGCTGACCATCGACA | 17103 | SauCas9KKH | 2 | 0 |
| 20 | GTCGA | AGCAGCTTCAGTCCCTTTCTT | 17104 | SauCas9KKH | 2 | 0 |
| 21 | GTCGAT | AGCAGCTTCAGTCCCTTTCTT | 17105 | SauCas9KKH | 2 | 0 |
| 22 | GTCGAT | AGCAGCTTCAGTCCCTTTCTT | 17106 | cCas9-v17 | 2 | 0 |
| 23 | GTCGAT | AGCAGCTTCAGTCCCTTTCTT | 17107 | cCas9-v42 | 2 | 0 |
| 24 | AG | GGCTGTGCTGACCATCGACA | 17108 | SpyCas9-NG | 2 | 0 |
| 25 | AG | GGCTGTGCTGACCATCGACA | 17109 | SpyCas9- | 2 | 0 |
| | | | | xCas | | |
| 26 | AG | GGCTGTGCTGACCATCGACA | 17110 | SpyCas9- | 2 | 0 |
| | | | | xCas-NG | | |
| 27 | AGA | GGCTGTGCTGACCATCGACA | 17111 | SpyCas9-SpG | 2 | 0 |
| 28 | AGA | GGCTGTGCTGACCATCGACA | 17112 | SpyCas9- | 2 | 0 |
| | | | | SpRY | | |
| 29 | GTC | GCAGCTTCAGTCCCTTTCTT | 17113 | SpyCas9- | 2 | 0 |
| | | | | SpRY | | |
| 30 | AGAAAG | AGGCTGTGCTGACCATCGACA | 17114 | cCas9-v17 | 2 | 0 |
| 31 | AGAAAG | AGGCTGTGCTGACCATCGACA | 17115 | cCas9-v42 | 2 | 0 |
| 32 | AGAA | GGCTGTGCTGACCATCGACA | 17116 | SpyCas9- | 2 | 0 |
| | | | | 3var-NRRH | | |
| 33 | AGAA | GGCTGTGCTGACCATCGACA | 17117 | SpyCas9-VQR | 2 | 0 |
| 34 | aAGAA | atAAGGCTGTGCTGACCATCGAC | 17118 | SauCas9 | 3 | 1 |
| 35 | aAGAA | AAGGCTGTGCTGACCATCGAC | 17119 | SauCas9KKH | 3 | 1 |
| 36 | aAG | AGGCTGTGCTGACCATCGAC | 17120 | ScaCas9 | 3 | 1 |
| 37 | aAG | AGGCTGTGCTGACCATCGAC | 17121 | ScaCas9-HiFi- | 3 | 1 |
| | | | | Sc++ | | |
| 38 | aAG | AGGCTGTGCTGACCATCGAC | 17122 | ScaCas9- | 3 | 1 |
| | | | | Sc++ | | |
| 39 | aAG | AGGCTGTGCTGACCATCGAC | 17123 | SpyCas9- | 3 | 1 |
| | | | | SpRY | | |
| 40 | tG | AGCAGCTTCAGTCCCTTTCT | 17124 | SpyCas9-NG | 3 | 1 |
| 41 | tG | AGCAGCTTCAGTCCCTTTCT | 17125 | SpyCas9- | 3 | 1 |
| | | | | xCas | | |
| 42 | tG | AGCAGCTTCAGTCCCTTTCT | 17126 | SpyCas9- | 3 | 1 |
| | | | | xCas-NG | | |
| 43 | tGT | AGCAGCTTCAGTCCCTTTCT | 17127 | SpyCas9-SpG | 3 | 1 |
| 44 | tGT | AGCAGCTTCAGTCCCTTTCT | 17128 | SpyCas9- | 3 | 1 |
| | | | | SpRY | | |
| 45 | aAGAAA | AGGCTGTGCTGACCATCGAC | 17129 | St1Cas9- | 3 | 1 |
| | | | | TH1477 | | |
| 46 | aAGAAA | AAGGCTGTGCTGACCATCGAC | 17130 | cCas9-v17 | 3 | 1 |
| 47 | aAGAAA | AAGGCTGTGCTGACCATCGAC | 17131 | cCas9-v42 | 3 | 1 |
| 48 | aAGA | AGGCTGTGCTGACCATCGAC | 17132 | SpyCas9- | 3 | 1 |
| | | | | 3var-NRRH | | |
| 49 | tGTC | AGCAGCTTCAGTCCCTTTCT | 17133 | SpyCas9- | 3 | 1 |
| | | | | 3var-NRTH | | |
| 50 | CaAGA | TAAGGCTGTGCTGACCATCGA | 17134 | SauCas9KKH | 4 | 1 |
| 51 | CaAG | TAAGGCTGTGCTGACCATCGA | 17135 | SauriCas9- | 4 | 1 |
| | | | | KKH | | |
| 52 | CaAG | AAGGCTGTGCTGACCATCGA | 17136 | SpyCas9- | 4 | 1 |
| | | | | QQR1 | | |
| 53 | CaAG | taAGGCTGTGCTGACCATCGA | 17137 | iSpyMacCas9 | 4 | 1 |
| 54 | TtG | CAGCAGCTTCAGTCCCTTTC | 17138 | ScaCas9 | 4 | 1 |
| 55 | TtG | CAGCAGCTTCAGTCCCTTTC | 17139 | ScaCas9-HiFi- | 4 | 1 |
| | | | | Sc++ | | |
| 56 | TtG | CAGCAGCTTCAGTCCCTTTC | 17140 | ScaCas9- | 4 | 1 |
| | | | | Sc++ | | |
| 57 | TtG | CAGCAGCTTCAGTCCCTTTC | 17141 | SpyCas9- | 4 | 1 |
| | | | | SpRY | | |
| 58 | CaA | AAGGCTGTGCTGACCATCGA | 17142 | SpyCas9- | 4 | 1 |
| | | | | SpRY | | |
| 59 | CaAGAAA | AAGGCTGTGCTGACCATCGA | 17143 | St1Cas9 | 4 | 1 |
| 60 | TtGTCGAT | ccccAGCAGCTTCAGTCCCTTTC | 17144 | BlatCas9 | 4 | 1 |
| 61 | TtGTC | ccccAGCAGCTTCAGTCCCTTTC | 17145 | BlatCas9 | 4 | 1 |
| 62 | CaAGAA | TAAGGCTGTGCTGACCATCGA | 17146 | cCas9-v17 | 4 | 1 |
| 63 | CaAGAA | TAAGGCTGTGCTGACCATCGA | 17147 | cCas9-v42 | 4 | 1 |
| 64 | ACaAG | ATAAGGCTGTGCTGACCATCG | 17148 | SauCas9KKH | 5 | 1 |
| 65 | CTt | CCAGCAGCTTCAGTCCCTTT | 17149 | SpyCas9- | 5 | 1 |
| | | | | SpRY | | |
| 66 | ACa | TAAGGCTGTGCTGACCATCG | 17150 | SpyCas9- | 5 | 1 |
| | | | | SpRY | | |
| 67 | ACaAGA | ATAAGGCTGTGCTGACCATCG | 17151 | cCas9-v17 | 5 | 1 |
| 68 | ACaAGA | ATAAGGCTGTGCTGACCATCG | 17152 | cCas9-v42 | 5 | 1 |
| 69 | GACaA | CATAAGGCTGTGCTGACCATC | 17153 | SauCas9KKH | 6 | 1 |
| 70 | GAC | ATAAGGCTGTGCTGACCATC | 17154 | SpyCas9- | 6 | 0 |
| | | | | SpRY | | |
| 71 | TCT | CCCAGCAGCTTCAGTCCCTT | 17155 | SpyCas9- | 6 | 0 |
| | | | | SpRY | | |
| 72 | GACaAG | CATAAGGCTGTGCTGACCATC | 17156 | cCas9-v17 | 6 | 1 |
| 73 | GACaAG | CATAAGGCTGTGCTGACCATC | 17157 | cCas9-v42 | 6 | 1 |
| 74 | GACa | ATAAGGCTGTGCTGACCATC | 17158 | SpyCas9- | 6 | 1 |
| | | | | 3var-NRCH | | |
| 75 | CG | CATAAGGCTGTGCTGACCAT | 17159 | SpyCas9-NG | 7 | 0 |
| 76 | CG | CATAAGGCTGTGCTGACCAT | 17160 | SpyCas9- | 7 | 0 |
| | | | | xCas | | |
| 77 | CG | CATAAGGCTGTGCTGACCAT | 17161 | SpyCas9- | 7 | 0 |
| | | | | xCas-NG | | |
| 78 | CGA | CATAAGGCTGTGCTGACCAT | 17162 | SpyCas9-SpG | 7 | 0 |
| 79 | CGA | CATAAGGCTGTGCTGACCAT | 17163 | SpyCas9- | 7 | 0 |
| | | | | SpRY | | |
| 80 | TTC | CCCCAGCAGCTTCAGTCCCT | 17164 | SpyCas9- | 7 | 0 |
| | | | | SpRY | | |
| 81 | CGAC | CATAAGGCTGTGCTGACCAT | 17165 | SpyCas9- | 7 | 0 |
| | | | | 3var-NRRH | | |
| 82 | CGAC | CATAAGGCTGTGCTGACCAT | 17166 | SpyCas9-VQR | 7 | 0 |
| 83 | CGACaA | CATAAGGCTGTGCTGACCAT | 17167 | St1Cas9- | 7 | 1 |
| | | | | CNRZ1066 | | |
| 84 | TCG | GCATAAGGCTGTGCTGACCA | 17168 | ScaCas9 | 8 | 0 |
| 85 | TCG | GCATAAGGCTGTGCTGACCA | 17169 | ScaCas9-HiFi- | 8 | 0 |
| | | | | Sc++ | | |
| 86 | TCG | GCATAAGGCTGTGCTGACCA | 17170 | ScaCas9- | 8 | 0 |
| | | | | Sc++ | | |
| 87 | TCG | GCATAAGGCTGTGCTGACCA | 17171 | SpyCas9- | 8 | 0 |
| | | | | SpRY | | |
| 88 | TTT | GCCCCAGCAGCTTCAGTCCC | 17172 | SpyCas9- | 8 | 0 |
| | | | | SpRY | | |
| 89 | TCGACaAG | cgtgCATAAGGCTGTGCTGACCA | 17173 | BlatCas9 | 8 | 1 |
| 90 | TCGAC | cgtgCATAAGGCTGTGCTGACCA | 17174 | BlatCas9 | 8 | 0 |
| 91 | ATCGA | GTGCATAAGGCTGTGCTGACC | 17175 | SauCas9KKH | 9 | 0 |
| 92 | CTT | GGCCCCAGCAGCTTCAGTCC | 17176 | SpyCas9- | 9 | 0 |
| | | | | SpRY | | |
| 93 | ATC | TGCATAAGGCTGTGCTGACC | 17177 | SpyCas9- | 9 | 0 |
| | | | | SpRY | | |
| 94 | CTTTCTtG | catgGCCCCAGCAGCTTCAGTCC | 17178 | BlatCas9 | 9 | 1 |
| 95 | CTTTC | catgGCCCCAGCAGCTTCAGTCC | 17179 | BlatCas9 | 9 | 0 |
| 96 | ATCGAC | GTGCATAAGGCTGTGCTGACC | 17180 | cCas9-v17 | 9 | 0 |
| 97 | ATCGAC | GTGCATAAGGCTGTGCTGACC | 17181 | cCas9-v42 | 9 | 0 |
| 98 | CAT | GTGCATAAGGCTGTGCTGAC | 17182 | SpyCas9- | 10 | 0 |
| | | | | SpRY | | |
| 99 | CCT | TGGCCCCAGCAGCTTCAGTC | 17183 | SpyCas9- | 10 | 0 |
| | | | | SpRY | | |
| 100 | CATCGACa | ggccGTGCATAAGGCTGTGCTGAC | 17184 | NmeCas9 | 10 | 1 |
| 101 | CATC | GTGCATAAGGCTGTGCTGAC | 17185 | SpyCas9- | 10 | 0 |
| | | | | 3var-NRTH | | |
| 102 | CCC | ATGGCCCCAGCAGCTTCAGT | 17186 | SpyCas9- | 11 | 0 |
| | | | | SpRY | | |
| 103 | CCA | CGTGCATAAGGCTGTGCTGA | 17187 | SpyCas9- | 11 | 0 |
| | | | | SpRY | | |
| 104 | CCATC | ggccGTGCATAAGGCTGTGCTGA | 17188 | BlatCas9 | 11 | 0 |
| 105 | TCC | CATGGCCCCAGCAGCTTCAG | 17189 | SpyCas9- | 12 | 0 |
| | | | | SpRY | | |
| 106 | ACC | CCGTGCATAAGGCTGTGCTG | 17190 | SpyCas9- | 12 | 0 |
| | | | | SpRY | | |
| 107 | GAC | GCCGTGCATAAGGCTGTGCT | 17191 | SpyCas9- | 13 | 0 |
| | | | | SpRY | | |
| 108 | GTC | ACATGGCCCCAGCAGCTTCA | 17192 | SpyCas9- | 13 | 0 |
| | | | | SpRY | | |
| 109 | GTCCCTTT | aaaaCATGGCCCCAGCAGCTTCA | 17193 | BlatCas9 | 13 | 0 |
| 110 | GTCCC | aaaaCATGGCCCCAGCAGCTTCA | 17194 | BlatCas9 | 13 | 0 |
| 111 | GACC | GCCGTGCATAAGGCTGTGCT | 17195 | SpyCas9- | 13 | 0 |
| | | | | 3var-NRCH | | |
| 112 | AGTCCC | taAAAACATGGCCCCAGCAGCTTC | 17196 | Nme2Cas9 | 14 | 0 |
| 113 | AG | AACATGGCCCCAGCAGCTTC | 17197 | SpyCas9-NG | 14 | 0 |
| 114 | AG | AACATGGCCCCAGCAGCTTC | 17198 | SpyCas9- | 14 | 0 |
| | | | | xCas | | |
| 115 | AG | AACATGGCCCCAGCAGCTTC | 17199 | SpyCas9- | 14 | 0 |
| | | | | xCas-NG | | |
| 116 | TG | GGCCGTGCATAAGGCTGTGC | 17200 | SpyCas9-NG | 14 | 0 |
| 117 | TG | GGCCGTGCATAAGGCTGTGC | 17201 | SpyCas9- | 14 | 0 |
| | | | | xCas | | |
| 118 | TG | GGCCGTGCATAAGGCTGTGC | 17202 | SpyCas9- | 14 | 0 |
| | | | | xCas-NG | | |
| 119 | AGT | AACATGGCCCCAGCAGCTTC | 17203 | SpyCas9-SpG | 14 | 0 |
| 120 | AGT | AACATGGCCCCAGCAGCTTC | 17204 | SpyCas9- | 14 | 0 |
| | | | | SpRY | | |
| 121 | TGA | GGCCGTGCATAAGGCTGTGC | 17205 | SpyCas9-SpG | 14 | 0 |
| 122 | TGA | GGCCGTGCATAAGGCTGTGC | 17206 | SpyCas9- | 14 | 0 |
| | | | | SpRY | | |
| 123 | AGTCCCTT | aaaaACATGGCCCCAGCAGCTTC | 17207 | BlatCas9 | 14 | 0 |
| 124 | AGTCC | aaaaACATGGCCCCAGCAGCTTC | 17208 | BlatCas9 | 14 | 0 |
| 125 | TGACC | ccagGCCGTGCATAAGGCTGTGC | 17209 | BlatCas9 | 14 | 0 |
| 126 | TGACCAT | CAGGCCGTGCATAAGGCTGTGC | 17210 | CdiCas9 | 14 | 0 |
| 127 | TGAC | GGCCGTGCATAAGGCTGTGC | 17211 | SpyCas9- | 14 | 0 |
| | | | | 3var-NRRH | | |
| 128 | TGAC | GGCCGTGCATAAGGCTGTGC | 17212 | SpyCas9-VQR | 14 | 0 |
| 129 | AGTC | AACATGGCCCCAGCAGCTTC | 17213 | SpyCas9- | 14 | 0 |
| | | | | 3var-NRTH | | |
| 130 | CAGTCC | ctAAAAACATGGCCCCAGCAGCTT | 17214 | Nme2Cas9 | 15 | 0 |
| 131 | CTGACC | ctCCAGGCCGTGCATAAGGCTGTG | 17215 | Nme2Cas9 | 15 | 0 |
| 132 | CAG | AAACATGGCCCCAGCAGCTT | 17216 | ScaCas9 | 15 | 0 |
| 133 | CAG | AAACATGGCCCCAGCAGCTT | 17217 | ScaCas9-HiFi- | 15 | 0 |
| | | | | Sc++ | | |
| 134 | CAG | AAACATGGCCCCAGCAGCTT | 17218 | ScaCas9- | 15 | 0 |
| | | | | Sc++ | | |
| 135 | CAG | AAACATGGCCCCAGCAGCTT | 17219 | SpyCas9- | 15 | 0 |
| | | | | SpRY | | |
| 136 | CTG | AGGCCGTGCATAAGGCTGTG | 17220 | ScaCas9 | 15 | 0 |
| 137 | CTG | AGGCCGTGCATAAGGCTGTG | 17221 | ScaCas9-HiFi- | 15 | 0 |
| | | | | Sc++ | | |
| 138 | CTG | AGGCCGTGCATAAGGCTGTG | 17222 | ScaCas9- | 15 | 0 |
| | | | | Sc++ | | |
| 139 | CTG | AGGCCGTGCATAAGGCTGTG | 17223 | SpyCas9- | 15 | 0 |
| | | | | SpRY | | |
| 140 | CTGACCAT | tccaGGCCGTGCATAAGGCTGTG | 17224 | BlatCas9 | 15 | 0 |
| 141 | CAGTC | taaaAACATGGCCCCAGCAGCTT | 17225 | BlatCas9 | 15 | 0 |
| 142 | CTGAC | tccaGGCCGTGCATAAGGCTGTG | 17226 | BlatCas9 | 15 | 0 |
| 143 | CAGTCCC | AAAAACATGGCCCCAGCAGCTT | 17227 | CdiCas9 | 15 | 0 |
| 144 | CAGT | AAACATGGCCCCAGCAGCTT | 17228 | SpyCas9- | 15 | 0 |
| | | | | 3var-NRRH | | |
| 145 | GCTGA | CCAGGCCGTGCATAAGGCTGT | 17229 | SauCas9KKH | 16 | 0 |
| 146 | TCAG | AAAAACATGGCCCCAGCAGCT | 17230 | SauriCas9- | 16 | 0 |
| | | | | KKH | | |
| 147 | TCA | AAAACATGGCCCCAGCAGCT | 17231 | SpyCas9- | 16 | 0 |
| | | | | SpRY | | |
| 148 | GCT | CAGGCCGTGCATAAGGCTGT | 17232 | SpyCas9- | 16 | 0 |
| | | | | SpRY | | |
| 149 | TTCAG | TAAAAACATGGCCCCAGCAGC | 17233 | SauCas9KKH | 17 | 0 |
| 150 | TTCAGT | TAAAAACATGGCCCCAGCAGC | 17234 | SauCas9KKH | 17 | 0 |
| 151 | TTCAGT | TAAAAACATGGCCCCAGCAGC | 17235 | cCas9-v17 | 17 | 0 |
| 152 | TTCAGT | TAAAAACATGGCCCCAGCAGC | 17236 | cCas9-v42 | 17 | 0 |
| 153 | TG | CCAGGCCGTGCATAAGGCTG | 17237 | SpyCas9-NG | 17 | 0 |
| 154 | TG | CCAGGCCGTGCATAAGGCTG | 17238 | SpyCas9- | 17 | 0 |
| | | | | xCas | | |
| 155 | TG | CCAGGCCGTGCATAAGGCTG | 17239 | SpyCas9- | 17 | 0 |
| | | | | xCas-NG | | |
| 156 | TGC | CCAGGCCGTGCATAAGGCTG | 17240 | SpyCas9-SpG | 17 | 0 |
| 157 | TGC | CCAGGCCGTGCATAAGGCTG | 17241 | SpyCas9- | 17 | 0 |
| | | | | SpRY | | |
| 158 | TTC | AAAAACATGGCCCCAGCAGC | 17242 | SpyCas9- | 17 | 0 |
| | | | | SpRY | | |
| 159 | TGCT | CCAGGCCGTGCATAAGGCTG | 17243 | SpyCas9- | 17 | 0 |
| | | | | 3var-NRCH | | |
| 160 | GTG | TCCAGGCCGTGCATAAGGCT | 17244 | ScaCas9 | 18 | 0 |
| 161 | GTG | TCCAGGCCGTGCATAAGGCT | 17245 | ScaCas9-HiFi- | 18 | 0 |
| | | | | Sc++ | | |
| 162 | GTG | TCCAGGCCGTGCATAAGGCT | 17246 | ScaCas9- | 18 | 0 |
| | | | | Sc++ | | |
| 163 | GTG | TCCAGGCCGTGCATAAGGCT | 17247 | SpyCas9- | 18 | 0 |
| | | | | SpRY | | |
| 164 | CTT | TAAAAACATGGCCCCAGCAG | 17248 | SpyCas9- | 18 | 0 |
| | | | | SpRY | | |
| 165 | TG | CTCCAGGCCGTGCATAAGGC | 17249 | SpyCas9-NG | 19 | 0 |
| 166 | TG | CTCCAGGCCGTGCATAAGGC | 17250 | SpyCas9- | 19 | 0 |
| | | | | xCas | | |
| 167 | TG | CTCCAGGCCGTGCATAAGGC | 17251 | SpyCas9- | 19 | 0 |
| | | | | xCas-NG | | |
| 168 | TGT | CTCCAGGCCGTGCATAAGGC | 17252 | SpyCas9-SpG | 19 | 0 |
| 169 | TGT | CTCCAGGCCGTGCATAAGGC | 17253 | SpyCas9- | 19 | 0 |
| | | | | SpRY | | |
| 170 | GCT | CTAAAAACATGGCCCCAGCA | 17254 | SpyCas9- | 19 | 0 |
| | | | | SpRY | | |
| 171 | GCTTCAGT | cctcTAAAAACATGGCCCCAGCA | 17255 | BlatCas9 | 19 | 0 |
| 172 | TGTGCTGA | ccccTCCAGGCCGTGCATAAGGC | 17256 | BlatCas9 | 19 | 0 |
| 173 | GCTTC | cctcTAAAAACATGGCCCCAGCA | 17257 | BlatCas9 | 19 | 0 |
| 174 | TGTGC | ccccTCCAGGCCGTGCATAAGGC | 17258 | BlatCas9 | 19 | 0 |
| 175 | CTG | CCTCCAGGCCGTGCATAAGG | 17259 | ScaCas9 | 20 | 0 |
| 176 | CTG | CCTCCAGGCCGTGCATAAGG | 17260 | ScaCas9-HiFi- | 20 | 0 |
| | | | | Sc++ | | |
| 177 | CTG | CCTCCAGGCCGTGCATAAGG | 17261 | ScaCas9 | 20 | 0 |
| | | | | Sc++ | | |
| 178 | CTG | CCTCCAGGCCGTGCATAAGG | 17262 | SpyCas9- | 20 | 0 |
| | | | | SpRY | | |
| 179 | AG | TCTAAAAACATGGCCCCAGC | 17263 | SpyCas9-NG | 20 | 0 |
| 180 | AG | TCTAAAAACATGGCCCCAGC | 17264 | SpyCas9- | 20 | 0 |
| | | | | xCas | | |
| 181 | AG | TCTAAAAACATGGCCCCAGC | 17265 | SpyCas9- | 20 | 0 |
| | | | | xCas-NG | | |
| 182 | AGC | TCTAAAAACATGGCCCCAGC | 17266 | SpyCas9-SpG | 20 | 0 |
| 183 | AGC | TCTAAAAACATGGCCCCAGC | 17267 | SpyCas9- | 20 | 0 |
| | | | | SpRY | | |
| 184 | AGCT | TCTAAAAACATGGCCCCAGC | 17268 | SpyCas9- | 20 | 0 |
| | | | | 3var-NRCH | | |
| 185 | CAG | CTCTAAAAACATGGCCCCAG | 17269 | ScaCas9 | 21 | 0 |
| 186 | CAG | CTCTAAAAACATGGCCCCAG | 17270 | ScaCas9-HiFi- | 21 | 0 |
| | | | | Sc++ | | |
| 187 | CAG | CTCTAAAAACATGGCCCCAG | 17271 | ScaCas9- | 21 | 0 |
| | | | | Sc++ | | |
| 188 | CAG | CTCTAAAAACATGGCCCCAG | 17272 | SpyCas9- | 21 | 0 |
| | | | | SpRY | | |
| 189 | GCT | CCCTCCAGGCCGTGCATAAG | 17273 | SpyCas9- | 21 | 0 |
| | | | | SpRY | | |
| 190 | CAGCTTC | GCCTCTAAAAACATGGCCCCAG | 17274 | CdiCas9 | 21 | 0 |
| 191 | CAGC | CTCTAAAAACATGGCCCCAG | 17275 | SpyCas9- | 21 | 0 |
| | | | | 3var-NRRH | | |
| 192 | GCAG | GCCTCTAAAAACATGGCCCCA | 17276 | SauriCas9- | 22 | 0 |
| | | | | KKH | | |
| 193 | GG | CCCCTCCAGGCCGTGCATAA | 17277 | SpyCas9-NG | 22 | 0 |
| 194 | GG | CCCCTCCAGGCCGTGCATAA | 17278 | SpyCas9- | 22 | 0 |
| | | | | xCas | | |
| 195 | GG | CCCCTCCAGGCCGTGCATAA | 17279 | SpyCas9- | 22 | 0 |
| | | | | xCas-NG | | |
| 196 | GGC | CCCCTCCAGGCCGTGCATAA | 17280 | SpyCas9-SpG | 22 | 0 |
| 197 | GGC | CCCCTCCAGGCCGTGCATAA | 17281 | SpyCas9- | 22 | 0 |
| | | | | SpRY | | |
| 198 | GCA | CCTCTAAAAACATGGCCCCA | 17282 | SpyCas9- | 22 | 0 |
| | | | | SpRY | | |
| 199 | GCAGC | tggcCTCTAAAAACATGGCCCCA | 17283 | BlatCas9 | 22 | 0 |
| 200 | GCAGCT | GCCTCTAAAAACATGGCCCCA | 17284 | cCas9-v16 | 22 | 0 |
| 201 | GCAGCT | GCCTCTAAAAACATGGCCCCA | 17285 | cCas9-v21 | 22 | 0 |
| 202 | GGCT | CCCCTCCAGGCCGTGCATAA | 17286 | SpyCas9- | 22 | 0 |
| | | | | 3var-NRCH | | |
| 203 | AGCAG | GGCCTCTAAAAACATGGCCCC | 17287 | SauCas9KKH | 23 | 0 |
| 204 | AGG | TCCCCTCCAGGCCGTGCATA | 17288 | ScaCas9 | 23 | 0 |
| 205 | AGG | TCCCCTCCAGGCCGTGCATA | 17289 | ScaCas9-HiFi- | 23 | 0 |
| | | | | Sc++ | | |
| 206 | AGG | TCCCCTCCAGGCCGTGCATA | 17290 | ScaCas9- | 23 | 0 |
| | | | | Sc++ | | |
| 207 | AGG | TCCCCTCCAGGCCGTGCATA | 17291 | SpyCas9 | 23 | 0 |
| 208 | AGG | TCCCCTCCAGGCCGTGCATA | 17292 | SpyCas9-HF1 | 23 | 0 |
| 209 | AGG | TCCCCTCCAGGCCGTGCATA | 17293 | SpyCas9-SpG | 23 | 0 |
| 210 | AGG | TCCCCTCCAGGCCGTGCATA | 17294 | SpyCas9- | 23 | 0 |
| | | | | SpRY | | |
| 211 | AG | GCCTCTAAAAACATGGCCCC | 17295 | SpyCas9-NG | 23 | 0 |
| 212 | AG | GCCTCTAAAAACATGGCCCC | 17296 | SpyCas9- | 23 | 0 |
| | | | | xCas | | |
| 213 | AG | GCCTCTAAAAACATGGCCCC | 17297 | SpyCas9- | 23 | 0 |
| | | | | xCas-NG | | |
| 214 | AG | TCCCCTCCAGGCCGTGCATA | 17298 | SpyCas9-NG | 23 | 0 |
| 215 | AG | TCCCCTCCAGGCCGTGCATA | 17299 | SpyCas9- | 23 | 0 |
| | | | | xCas | | |
| 216 | AG | TCCCCTCCAGGCCGTGCATA | 17300 | SpyCas9- | 23 | 0 |
| | | | | xCas-NG | | |
| 217 | AGC | GCCTCTAAAAACATGGCCCC | 17301 | SpyCas9-SpG | 23 | 0 |
| 218 | AGC | GCCTCTAAAAACATGGCCCC | 17302 | SpyCas9- | 23 | 0 |
| | | | | SpRY | | |
| 219 | AGCAGC | GGCCTCTAAAAACATGGCCCC | 17303 | cCas9-v17 | 23 | 0 |
| 220 | AGCAGC | GGCCTCTAAAAACATGGCCCC | 17304 | cCas9-v42 | 23 | 0 |
| 221 | AGCAGCTT | tatgGCCTCTAAAAACATGGCCCC | 17305 | NmeCas9 | 23 | 0 |
| 222 | AGGC | TCCCCTCCAGGCCGTGCATA | 17306 | SpyCas9- | 23 | 0 |
| | | | | 3var-NRRH | | |
| 223 | AGCA | GCCTCTAAAAACATGGCCCC | 17307 | SpyCas9- | 23 | 0 |
| | | | | 3var-NRCH | | |
| 224 | AAGG | TCTCCCCTCCAGGCCGTGCAT | 17308 | SauriCas9 | 24 | 0 |
| 225 | AAGG | TCTCCCCTCCAGGCCGTGCAT | 17309 | SauriCas9- | 24 | 0 |
| | | | | KKH | | |
| 226 | CAG | GGCCTCTAAAAACATGGCCC | 17310 | ScaCas9 | 24 | 0 |
| 227 | CAG | GGCCTCTAAAAACATGGCCC | 17311 | ScaCas9-HiFi- | 24 | 0 |
| | | | | Sc++ | | |
| 228 | CAG | GGCCTCTAAAAACATGGCCC | 17312 | ScaCas9- | 24 | 0 |
| | | | | Sc++ | | |
| 229 | CAG | GGCCTCTAAAAACATGGCCC | 17313 | SpyCas9- | 24 | 0 |
| | | | | SpRY | | |
| 230 | AAG | CTCCCCTCCAGGCCGTGCAT | 17314 | ScaCas9 | 24 | 0 |
| 231 | AAG | CTCCCCTCCAGGCCGTGCAT | 17315 | ScaCas9-HiFi- | 24 | 0 |
| | | | | Sc++ | | |
| 232 | AAG | CTCCCCTCCAGGCCGTGCAT | 17316 | ScaCas9- | 24 | 0 |
| | | | | Sc++ | | |
| 233 | AAG | CTCCCCTCCAGGCCGTGCAT | 17317 | SpyCas9- | 24 | 0 |
| | | | | SpRY | | |
| 234 | AAGGCTGT | tctcTCCCCTCCAGGCCGTGCAT | 17318 | BlatCas9 | 24 | 0 |
| 235 | AAGGC | tctcTCCCCTCCAGGCCGTGCAT | 17319 | BlatCas9 | 24 | 0 |
| 236 | AAGGCT | TCTCCCCTCCAGGCCGTGCAT | 17320 | cCas9-v16 | 24 | 0 |
| 237 | AAGGCT | TCTCCCCTCCAGGCCGTGCAT | 17321 | cCas9-v21 | 24 | 0 |
| 238 | CAGC | GGCCTCTAAAAACATGGCCC | 17322 | SpyCas9- | 24 | 0 |
| | | | | 3var-NRRH | | |
| 239 | TAAGG | CTCTCCCCTCCAGGCCGTGCA | 17323 | SauCas9KKH | 25 | 0 |
| 240 | CCAG | ATGGCCTCTAAAAACATGGCC | 17324 | SauriCas9- | 25 | 0 |
| | | | | KKH | | |
| 241 | TAAG | CTCTCCCCTCCAGGCCGTGCA | 17325 | SauriCas9- | 25 | 0 |
| | | | | KKH | | |
| 242 | TAAG | TCTCCCCTCCAGGCCGTGCA | 17326 | SpyCas9- | 25 | 0 |
| | | | | QQR1 | | |
| 243 | TAAG | ctCTCCCCTCCAGGCCGTGCA | 17327 | iSpyMacCas9 | 25 | 0 |
| 244 | TAA | TCTCCCCTCCAGGCCGTGCA | 17328 | SpyCas9- | 25 | 0 |
| | | | | SpRY | | |
| 245 | CCA | TGGCCTCTAAAAACATGGCC | 17329 | SpyCas9- | 25 | 0 |
| | | | | SpRY | | |
| 246 | CCAGC | gtatGGCCTCTAAAAACATGGCC | 17330 | BlatCas9 | 25 | 0 |
| 247 | TAAGGC | CTCTCCCCTCCAGGCCGTGCA | 17331 | cCas9-v17 | 25 | 0 |
| 248 | TAAGGC | CTCTCCCCTCCAGGCCGTGCA | 17332 | cCas9-v42 | 25 | 0 |
| 249 | CCCAG | TATGGCCTCTAAAAACATGGC | 17333 | SauCas9KKH | 26 | 0 |
| 250 | ATAAG | TCTCTCCCCTCCAGGCCGTGC | 17334 | SauCas9KKH | 26 | 0 |
| 251 | CCC | ATGGCCTCTAAAAACATGGC | 17335 | SpyCas9- | 26 | 0 |
| | | | | SpRY | | |
| 252 | ATA | CTCTCCCCTCCAGGCCGTGC | 17336 | SpyCas9- | 26 | 0 |
| | | | | SpRY | | |
| 253 | CCCAGC | TATGGCCTCTAAAAACATGGC | 17337 | cCas9-v17 | 26 | 0 |
| 254 | CCCAGC | TATGGCCTCTAAAAACATGGC | 17338 | cCas9-v42 | 26 | 0 |
| 255 | ATAAGG | TCTCTCCCCTCCAGGCCGTGC | 17339 | cCas9-v17 | 26 | 0 |
| 256 | ATAAGG | TCTCTCCCCTCCAGGCCGTGC | 17340 | cCas9-v42 | 26 | 0 |
| 257 | CATAA | TTCTCTCCCCTCCAGGCCGTG | 17341 | SauCas9KKH | 27 | 0 |
| 258 | CAT | TCTCTCCCCTCCAGGCCGTG | 17342 | SpyCas9- | 27 | 0 |
| | | | | SpRY | | |
| 259 | CCC | TATGGCCTCTAAAAACATGG | 17343 | SpyCas9- | 27 | 0 |
| | | | | SpRY | | |
| 260 | CATA | TCTCTCCCCTCCAGGCCGTG | 17344 | SpyCas9- | 27 | 0 |
| | | | | 3var-NRTH | | |
| 261 | GCC | GTATGGCCTCTAAAAACATG | 17345 | SpyCas9- | 28 | 0 |
| | | | | SpRY | | |
| 262 | GCA | TTCTCTCCCCTCCAGGCCGT | 17346 | SpyCas9- | 28 | 0 |
| | | | | SpRY | | |
| 263 | GCCCC | tgggTATGGCCTCTAAAAACATG | 17347 | BlatCas9 | 28 | 0 |
| 264 | GGCCCC | caTGGGTATGGCCTCTAAAAACAT | 17348 | Nme2Cas9 | 29 | 0 |
| 265 | GG | GGTATGGCCTCTAAAAACAT | 17349 | SpyCas9-NG | 29 | 0 |
| 266 | GG | GGTATGGCCTCTAAAAACAT | 17350 | SpyCas9- | 29 | 0 |
| | | | | xCas | | |
| 267 | GG | GGTATGGCCTCTAAAAACAT | 17351 | SpyCas9- | 29 | 0 |
| | | | | xCas-NG | | |
| 268 | TG | CTTCTCTCCCCTCCAGGCCG | 17352 | SpyCas9-NG | 29 | 0 |
| 269 | TG | CTTCTCTCCCCTCCAGGCCG | 17353 | SpyCas9- | 29 | 0 |
| | | | | xCas | | |
| 270 | TG | CTTCTCTCCCCTCCAGGCCG | 17354 | SpyCas9- | 29 | 0 |
| | | | | xCas-NG | | |
| 271 | GGC | GGTATGGCCTCTAAAAACAT | 17355 | SpyCas9-SpG | 29 | 0 |
| 272 | GGC | GGTATGGCCTCTAAAAACAT | 17356 | SpyCas9- | 29 | 0 |
| | | | | SpRY | | |
| 273 | TGC | CTTCTCTCCCCTCCAGGCCG | 17357 | SpyCas9-SpG | 29 | 0 |
| 274 | TGC | CTTCTCTCCCCTCCAGGCCG | 17358 | SpyCas9- | 29 | 0 |
| | | | | SpRY | | |
| 275 | GGCCCCAG | atggGTATGGCCTCTAAAAACAT | 17359 | BlatCas9 | 29 | 0 |
| 276 | GGCCC | atggGTATGGCCTCTAAAAACAT | 17360 | BlatCas9 | 29 | 0 |
| 277 | GGCC | GGTATGGCCTCTAAAAACAT | 17361 | SpyCas9- | 29 | 0 |
| | | | | 3var-NRCH | | |
| 278 | TGCA | CTTCTCTCCCCTCCAGGCCG | 17362 | SpyCas9- | 29 | 0 |
| | | | | 3var-NRCH | | |
| 279 | TGGCCC | acATGGGTATGGCCTCTAAAAACA | 17363 | Nme2Cas9 | 30 | 0 |
| 280 | TGG | GGGTATGGCCTCTAAAAACA | 17364 | ScaCas9 | 30 | 0 |
| 281 | TGG | GGGTATGGCCTCTAAAAACA | 17365 | ScaCas9-HiFi- | 30 | 0 |
| | | | | Sc++ | | |
| 282 | TGG | GGGTATGGCCTCTAAAAACA | 17366 | ScaCas9- | 30 | 0 |
| | | | | Sc++ | | |
| 283 | TGG | GGGTATGGCCTCTAAAAACA | 17367 | SpyCas9 | 30 | 0 |
| 284 | TGG | GGGTATGGCCTCTAAAAACA | 17368 | SpyCas9-HF1 | 30 | 0 |
| 285 | TGG | GGGTATGGCCTCTAAAAACA | 17369 | SpyCas9-SpG | 30 | 0 |
| 286 | TGG | GGGTATGGCCTCTAAAAACA | 17370 | SpyCas9- | 30 | 0 |
| | | | | SpRY | | |
| 287 | GTG | GCTTCTCTCCCCTCCAGGCC | 17371 | ScaCas9 | 30 | 0 |
| 288 | GTG | GCTTCTCTCCCCTCCAGGCC | 17372 | ScaCas9-HiFi- | 30 | 0 |
| | | | | Sc++ | | |
| 289 | GTG | GCTTCTCTCCCCTCCAGGCC | 17373 | ScaCas9- | 30 | 0 |
| | | | | Sc++ | | |
| 290 | GTG | GCTTCTCTCCCCTCCAGGCC | 17374 | SpyCas9- | 30 | 0 |
| | | | | SpRY | | |
| 291 | TG | GGGTATGGCCTCTAAAAACA | 17375 | SpyCas9-NG | 30 | 0 |
| 292 | TG | GGGTATGGCCTCTAAAAACA | 17376 | SpyCas9- | 30 | 0 |
| | | | | xCas | | |
| 293 | TG | GGGTATGGCCTCTAAAAACA | 17377 | SpyCas9- | 30 | 0 |
| | | | | xCas-NG | | |
| 294 | TGGCC | catgGGTATGGCCTCTAAAAACA | 17378 | BlatCas9 | 30 | 0 |
| 295 | TGGCCCC | ATGGGTATGGCCTCTAAAAACA | 17379 | CdiCas9 | 30 | 0 |
| 296 | TGGC | GGGTATGGCCTCTAAAAACA | 17380 | SpyCas9- | 30 | 0 |
| | | | | 3var-NRRH | | |
| 297 | ATGGCC | gaCATGGGTATGGCCTCTAAAAAC | 17381 | Nme2Cas9 | 31 | 0 |
| 298 | ATGG | ATGGGTATGGCCTCTAAAAAC | 17382 | SauriCas9 | 31 | 0 |
| 299 | ATGG | ATGGGTATGGCCTCTAAAAAC | 17383 | SauriCas9- | 31 | 0 |
| | | | | KKH | | |
| 300 | ATG | TGGGTATGGCCTCTAAAAAC | 17384 | ScaCas9 | 31 | 0 |
| 301 | ATG | TGGGTATGGCCTCTAAAAAC | 17385 | ScaCas9-HiFi- | 31 | 0 |
| | | | | Sc++ | | |
| 302 | ATG | TGGGTATGGCCTCTAAAAAC | 17386 | ScaCas9- | 31 | 0 |
| | | | | Sc++ | | |
| 303 | ATG | TGGGTATGGCCTCTAAAAAC | 17387 | SpyCas9- | 31 | 0 |
| | | | | SpRY | | |
| 304 | CG | TGCTTCTCTCCCCTCCAGGC | 17388 | SpyCas9-NG | 31 | 0 |
| 305 | CG | TGCTTCTCTCCCCTCCAGGC | 17389 | SpyCas9- | 31 | 0 |
| | | | | xCas | | |
| 306 | CG | TGCTTCTCTCCCCTCCAGGC | 17390 | SpyCas9- | 31 | 0 |
| | | | | xCas-NG | | |
| 307 | CGT | TGCTTCTCTCCCCTCCAGGC | 17391 | SpyCas9-SpG | 31 | 0 |
| 308 | CGT | TGCTTCTCTCCCCTCCAGGC | 17392 | SpyCas9- | 31 | 0 |
| | | | | SpRY | | |
| 309 | CGTGCATA | ctctGCTTCTCTCCCCTCCAGGC | 17393 | BlatCas9 | 31 | 0 |
| 310 | ATGGC | acatGGGTATGGCCTCTAAAAAC | 17394 | BlatCas9 | 31 | 0 |
| 311 | CGTGC | ctctGCTTCTCTCCCCTCCAGGC | 17395 | BlatCas9 | 31 | 0 |
| 312 | CATGG | CATGGGTATGGCCTCTAAAAA | 17396 | SauCas9KKH | 32 | 0 |
| 313 | CCG | CTGCTTCTCTCCCCTCCAGG | 17397 | ScaCas9 | 32 | 0 |
| 314 | CCG | CTGCTTCTCTCCCCTCCAGG | 17398 | ScaCas9-HiFi- | 32 | 0 |
| | | | | Sc++ | | |
| 315 | CCG | CTGCTTCTCTCCCCTCCAGG | 17399 | ScaCas9- | 32 | 0 |
| | | | | Sc++ | | |
| 316 | CCG | CTGCTTCTCTCCCCTCCAGG | 17400 | SpyCas9- | 32 | 0 |
| | | | | SpRY | | |
| 317 | CAT | ATGGGTATGGCCTCTAAAAA | 17401 | SpyCas9- | 32 | 0 |
| | | | | SpRY | | |
| 318 | ACA | CATGGGTATGGCCTCTAAAA | 17402 | SpyCas9- | 33 | 0 |
| | | | | SpRY | | |
| 319 | GCC | TCTGCTTCTCTCCCCTCCAG | 17403 | SpyCas9- | 33 | 0 |
| | | | | SpRY | | |
| 320 | GCCGTG | CTCTGCTTCTCTCCCCTCCAG | 17404 | cCas9-v16 | 33 | 0 |
| 321 | GCCGTG | CTCTGCTTCTCTCCCCTCCAG | 17405 | cCas9-v21 | 33 | 0 |
| 322 | GG | CTCTGCTTCTCTCCCCTCCA | 17406 | SpyCas9-NG | 34 | 0 |
| 323 | GG | CTCTGCTTCTCTCCCCTCCA | 17407 | SpyCas9- | 34 | 0 |
| | | | | xCas | | |
| 324 | GG | CTCTGCTTCTCTCCCCTCCA | 17408 | SpyCas9- | 34 | 0 |
| | | | | xCas-NG | | |
| 325 | AAC | ACATGGGTATGGCCTCTAAA | 17409 | SpyCas9- | 34 | 0 |
| | | | | SpRY | | |
| 326 | GGC | CTCTGCTTCTCTCCCCTCCA | 17410 | SpyCas9-SpG | 34 | 0 |
| 327 | GGC | CTCTGCTTCTCTCCCCTCCA | 17411 | SpyCas9- | 34 | 0 |
| | | | | SpRY | | |
| 328 | AACA | ACATGGGTATGGCCTCTAAA | 17412 | SpyCas9- | 34 | 0 |
| | | | | 3var-NRCH | | |
| 329 | GGCC | CTCTGCTTCTCTCCCCTCCA | 17413 | SpyCas9- | 34 | 0 |
| | | | | 3var-NRCH | | |
| 330 | AGG | TCTCTGCTTCTCTCCCCTCC | 17414 | ScaCas9 | 35 | 0 |
| 331 | AGG | TCTCTGCTTCTCTCCCCTCC | 17415 | ScaCas9-HiFi- | 35 | 0 |
| | | | | Sc++ | | |
| 332 | AGG | TCTCTGCTTCTCTCCCCTCC | 17416 | ScaCas9- | 35 | 0 |
| | | | | Sc++ | | |
| 333 | AGG | TCTCTGCTTCTCTCCCCTCC | 17417 | SpyCas9 | 35 | 0 |
| 334 | AGG | TCTCTGCTTCTCTCCCCTCC | 17418 | SpyCas9-HF1 | 35 | 0 |
| 335 | AGG | TCTCTGCTTCTCTCCCCTCC | 17419 | SpyCas9-SpG | 35 | 0 |
| 336 | AGG | TCTCTGCTTCTCTCCCCTCC | 17420 | SpyCas9- | 35 | 0 |
| | | | | SpRY | | |
| 337 | AG | TCTCTGCTTCTCTCCCCTCC | 17421 | SpyCas9-NG | 35 | 0 |
| 338 | AG | TCTCTGCTTCTCTCCCCTCC | 17422 | SpyCas9- | 35 | 0 |
| | | | | xCas | | |
| 339 | AG | TCTCTGCTTCTCTCCCCTCC | 17423 | SpyCas9- | 35 | 0 |
| | | | | xCas-NG | | |
| 340 | AAA | GACATGGGTATGGCCTCTAA | 17424 | SpyCas9- | 35 | 0 |
| | | | | SpRY | | |
| 341 | AGGCCGTG | gtgtCTCTGCTTCTCTCCCCTCC | 17425 | BlatCas9 | 35 | 0 |
| 342 | AGGCC | gtgtCTCTGCTTCTCTCCCCTCC | 17426 | BlatCas9 | 35 | 0 |
| 343 | AAAC | GACATGGGTATGGCCTCTAA | 17427 | SpyCas9- | 35 | 0 |
| | | | | 3var-NRRH | | |
| 344 | AAAC | agACATGGGTATGGCCTCTAA | 17428 | iSpyMacCas9 | 35 | 0 |
| 345 | AGGC | TCTCTGCTTCTCTCCCCTCC | 17429 | SpyCas9- | 35 | 0 |
| | | | | 3var-NRRH | | |
| 346 | CAGGCC | acGTGTCTCTGCTTCTCTCCCCTC | 17430 | Nme2Cas9 | 36 | 0 |
| 347 | CAGG | TGTCTCTGCTTCTCTCCCCTC | 17431 | SauriCas9 | 36 | 0 |
| 348 | CAGG | TGTCTCTGCTTCTCTCCCCTC | 17432 | SauriCas9- | 36 | 0 |
| | | | | KKH | | |
| 349 | CAG | GTCTCTGCTTCTCTCCCCTC | 17433 | ScaCas9 | 36 | 0 |
| 350 | CAG | GTCTCTGCTTCTCTCCCCTC | 17434 | ScaCas9-HiFi- | 36 | 0 |
| | | | | Sc++ | | |
| 351 | CAG | GTCTCTGCTTCTCTCCCCTC | 17435 | ScaCas9- | 36 | 0 |
| | | | | Sc++ | | |
| 352 | CAG | GTCTCTGCTTCTCTCCCCTC | 17436 | SpyCas9- | 36 | 0 |
| | | | | SpRY | | |
| 353 | AAA | AGACATGGGTATGGCCTCTA | 17437 | SpyCas9- | 36 | 0 |
| | | | | SpRY | | |
| 354 | AAAACATG | gataGACATGGGTATGGCCTCTA | 17438 | BlatCas9 | 36 | 0 |
| 355 | CAGGCCGT | cgtgTCTCTGCTTCTCTCCCCTC | 17439 | BlatCas9 | 36 | 0 |
| 356 | AAAAC | gataGACATGGGTATGGCCTCTA | 17440 | BlatCas9 | 36 | 0 |
| 357 | CAGGC | cgtgTCTCTGCTTCTCTCCCCTC | 17441 | BlatCas9 | 36 | 0 |
| 358 | AAAACAT | ATAGACATGGGTATGGCCTCTA | 17442 | CdiCas9 | 36 | 0 |
| 359 | AAAA | AGACATGGGTATGGCCTCTA | 17443 | SpyCas9- | 36 | 0 |
| | | | | 3var-NRRH | | |
| 360 | AAAA | taGACATGGGTATGGCCTCTA | 17444 | iSpyMacCas9 | 36 | 0 |
| 361 | AAAAA | ATAGACATGGGTATGGCCTCT | 17445 | SauCas9KKH | 37 | 0 |
| 362 | CCAGG | GTGTCTCTGCTTCTCTCCCCT | 17446 | SauCas9KKH | 37 | 0 |
| 363 | CCAG | GTGTCTCTGCTTCTCTCCCCT | 17447 | SauriCas9- | 37 | 0 |
| | | | | KKH | | |
| 364 | AAA | TAGACATGGGTATGGCCTCT | 17448 | SpyCas9- | 37 | 0 |
| | | | | SpRY | | |
| 365 | CCA | TGTCTCTGCTTCTCTCCCCT | 17449 | SpyCas9- | 37 | 0 |
| | | | | SpRY | | |
| 366 | AAAAAC | ATAGACATGGGTATGGCCTCT | 17450 | cCas9-v17 | 37 | 0 |
| 367 | AAAAAC | ATAGACATGGGTATGGCCTCT | 17451 | cCas9-v42 | 37 | 0 |
| 368 | CCAGGC | GTGTCTCTGCTTCTCTCCCCT | 17452 | cCas9-v17 | 37 | 0 |
| 369 | CCAGGC | GTGTCTCTGCTTCTCTCCCCT | 17453 | cCas9-v42 | 37 | 0 |
| 370 | AAAA | TAGACATGGGTATGGCCTCT | 17454 | SpyCas9- | 37 | 0 |
| | | | | 3var-NRRH | | |
| 371 | AAAA | atAGACATGGGTATGGCCTCT | 17455 | iSpyMacCas9 | 37 | 0 |
| 372 | TAAAA | GATAGACATGGGTATGGCCTC | 17456 | SauCas9KKH | 38 | 0 |
| 373 | TCCAG | CGTGTCTCTGCTTCTCTCCCC | 17457 | SauCas9KKH | 38 | 0 |
| 374 | TAA | ATAGACATGGGTATGGCCTC | 17458 | SpyCas9- | 38 | 0 |
| | | | | SpRY | | |
| 375 | TCC | GTGTCTCTGCTTCTCTCCCC | 17459 | SpyCas9- | 38 | 0 |
| | | | | SpRY | | |
| 376 | TAAAAA | ATAGACATGGGTATGGCCTC | 17460 | St1Cas9- | 38 | 0 |
| | | | | MTH17CL396 | | |
| 377 | TAAAAA | GATAGACATGGGTATGGCCTC | 17461 | cCas9-v17 | 38 | 0 |
| 378 | TAAAAA | GATAGACATGGGTATGGCCTC | 17462 | cCas9-v42 | 38 | 0 |
| 379 | TCCAGG | CGTGTCTCTGCTTCTCTCCCC | 17463 | cCas9-v17 | 38 | 0 |
| 380 | TCCAGG | CGTGTCTCTGCTTCTCTCCCC | 17464 | cCas9-v42 | 38 | 0 |
| 381 | TAAAAAC | GGATAGACATGGGTATGGCCTC | 17465 | CdiCas9 | 38 | 0 |
| 382 | TAAAAAC | GGATAGACATGGGTATGGCCTC | 17466 | CdiCas9 | 38 | 0 |
| 383 | TAAA | ATAGACATGGGTATGGCCTC | 17467 | SpyCas9- | 38 | 0 |
| | | | | 3var-NRRH | | |
| 384 | TAAA | gaTAGACATGGGTATGGCCTC | 17468 | iSpyMacCas9 | 38 | 0 |
| 385 | CTAAA | GGATAGACATGGGTATGGCCT | 17469 | SauCas9KKH | 39 | 0 |
| 386 | CTA | GATAGACATGGGTATGGCCT | 17470 | SpyCas9- | 39 | 0 |
| | | | | SpRY | | |
| 387 | CTC | CGTGTCTCTGCTTCTCTCCC | 17471 | SpyCas9- | 39 | 0 |
| | | | | SpRY | | |
| 388 | CTAAAA | GATAGACATGGGTATGGCCT | 17472 | St1Cas9- | 39 | 0 |
| | | | | MTH17CL396 | | |
| 389 | CTAAAA | GGATAGACATGGGTATGGCCT | 17473 | cCas9-v17 | 39 | 0 |
| 390 | CTAAAA | GGATAGACATGGGTATGGCCT | 17474 | cCas9-v42 | 39 | 0 |
| 391 | TCTAA | GGGATAGACATGGGTATGGCC | 17475 | SauCas9KKH | 40 | 0 |
| 392 | TCT | GGATAGACATGGGTATGGCC | 17476 | SpyCas9- | 40 | 0 |
| | | | | SpRY | | |
| 393 | CCT | ACGTGTCTCTGCTTCTCTCC | 17477 | SpyCas9- | 40 | 0 |
| | | | | SpRY | | |
| 394 | CCTCCAGG | acaaCGTGTCTCTGCTTCTCTCC | 17478 | BlatCas9 | 40 | 0 |
| 395 | CCTCC | acaaCGTGTCTCTGCTTCTCTCC | 17479 | BlatCas9 | 40 | 0 |
| 396 | CCCTCC | ttACAACGTGTCTCTGCTTCTCTC | 17480 | Nme2Cas9 | 41 | 0 |
| 397 | CTC | GGGATAGACATGGGTATGGC | 17481 | SpyCas9- | 41 | 0 |
| | | | | SpRY | | |
| 398 | CCC | AACGTGTCTCTGCTTCTCTC | 17482 | SpyCas9- | 41 | 0 |
| | | | | SpRY | | |
| 399 | CCCTCCAG | tacaACGTGTCTCTGCTTCTCTC | 17483 | BlatCas9 | 41 | 0 |
| 400 | CCCTC | tacaACGTGTCTCTGCTTCTCTC | 17484 | BlatCas9 | 41 | 0 |
| 401 | CCT | GGGGATAGACATGGGTATGG | 17485 | SpyCas9- | 42 | 0 |
| | | | | SpRY | | |
| 402 | CCC | CAACGTGTCTCTGCTTCTCT | 17486 | SpyCas9- | 42 | 0 |
| | | | | SpRY | | |
| 403 | GCC | GGGGGATAGACATGGGTATG | 17487 | SpyCas9- | 43 | 0 |
| | | | | SpRY | | |
| 404 | TCC | ACAACGTGTCTCTGCTTCTC | 17488 | SpyCas9- | 43 | 0 |
| | | | | SpRY | | |
| 405 | GCCTCTAA | cgggGGGGATAGACATGGGTATG | 17489 | BlatCas9 | 43 | 0 |
| 406 | GCCTCTAA | cgggGGGGATAGACATGGGTATG | 17490 | BlatCas9 | 43 | 0 |
| 407 | GCCTC | cgggGGGGATAGACATGGGTATG | 17491 | BlatCas9 | 43 | 0 |
| 408 | TCCCC | cttaCAACGTGTCTCTGCTTCTC | 17492 | BlatCas9 | 43 | 0 |
| 409 | CTCCCC | gcCTTACAACGTGTCTCTGCTTCT | 17493 | Nme2Cas9 | 44 | 0 |
| 410 | GG | GGGGGGATAGACATGGGTAT | 17494 | SpyCas9-NG | 44 | 0 |
| 411 | GG | GGGGGGATAGACATGGGTAT | 17495 | SpyCas9- | 44 | 0 |
| | | | | xCas | | |
| 412 | GG | GGGGGGATAGACATGGGTAT | 17496 | SpyCas9- | 44 | 0 |
| | | | | xCas-NG | | |
| 413 | GGC | GGGGGGATAGACATGGGTAT | 17497 | SpyCas9-SpG | 44 | 0 |
| 414 | GGC | GGGGGGATAGACATGGGTAT | 17498 | SpyCas9- | 44 | 0 |
| | | | | SpRY | | |
| 415 | CTC | TACAACGTGTCTCTGCTTCT | 17499 | SpyCas9- | 44 | 0 |
| | | | | SpRY | | |
| 416 | CTCCC | ccttACAACGTGTCTCTGCTTCT | 17500 | BlatCas9 | 44 | 0 |
| 417 | GGCC | GGGGGGATAGACATGGGTAT | 17501 | SpyCas9- | 44 | 0 |
| | | | | 3var-NRCH | | |
| 418 | TCTCCC | agCCTTACAACGTGTCTCTGCTTC | 17502 | Nme2Cas9 | 45 | 0 |
| 419 | TGG | GGGGGGGATAGACATGGGTA | 17503 | ScaCas9 | 45 | 0 |
| 420 | TGG | GGGGGGGATAGACATGGGTA | 17504 | ScaCas9-HiFi- | 45 | 0 |
| | | | | Sc++ | | |
| 421 | TGG | GGGGGGGATAGACATGGGTA | 17505 | ScaCas9- | 45 | 0 |
| | | | | Sc++ | | |
| 422 | TGG | GGGGGGGATAGACATGGGTA | 17506 | SpyCas9 | 45 | 0 |
| 423 | TGG | GGGGGGGATAGACATGGGTA | 17507 | SpyCas9-HF1 | 45 | 0 |
| 424 | TGG | GGGGGGGATAGACATGGGTA | 17508 | SpyCas9-SpG | 45 | 0 |
| 425 | TGG | GGGGGGGATAGACATGGGTA | 17509 | SpyCas9- | 45 | 0 |
| | | | | SpRY | | |
| 426 | TG | GGGGGGGATAGACATGGGTA | 17510 | SpyCas9-NG | 45 | 0 |
| 427 | TG | GGGGGGGATAGACATGGGTA | 17511 | SpyCas9- | 45 | 0 |
| | | | | xCas | | |
| 428 | TG | GGGGGGGATAGACATGGGTA | 17512 | SpyCas9- | 45 | 0 |
| | | | | xCas-NG | | |
| 429 | TCT | TTACAACGTGTCTCTGCTTC | 17513 | SpyCas9- | 45 | 0 |
| | | | | SpRY | | |
| 430 | TGGCC | ctcgGGGGGGATAGACATGGGTA | 17514 | BlatCas9 | 45 | 0 |
| 431 | TCTCC | gcctTACAACGTGTCTCTGCTTC | 17515 | BlatCas9 | 45 | 0 |
| 432 | TGGCCTC | TCGGGGGGGATAGACATGGGTA | 17516 | CdiCas9 | 45 | 0 |
| 433 | TGGC | GGGGGGGATAGACATGGGTA | 17517 | SpyCas9- | 45 | 0 |
| | | | | 3var-NRRH | | |
| 434 | ATGGCC | acCTCGGGGGGGATAGACATGGGT | 17518 | Nme2Cas9 | 46 | 0 |
| 435 | CTCTCC | caGCCTTACAACGTGTCTCTGCTT | 17519 | Nme2Cas9 | 46 | 0 |
| 436 | ATGG | TCGGGGGGGATAGACATGGGT | 17520 | SauriCas9 | 46 | 0 |
| 437 | ATGG | TCGGGGGGGATAGACATGGGT | 17521 | SauriCas9- | 46 | 0 |
| | | | | KKH | | |
| 438 | ATG | CGGGGGGGATAGACATGGGT | 17522 | ScaCas9 | 46 | 0 |
| 439 | ATG | CGGGGGGGATAGACATGGGT | 17523 | ScaCas9-HiFi- | 46 | 0 |
| | | | | Sc++ | | |
| 440 | ATG | CGGGGGGGATAGACATGGGT | 17524 | ScaCas9- | 46 | 0 |
| | | | | Sc++ | | |
| 441 | ATG | CGGGGGGGATAGACATGGGT | 17525 | SpyCas9- | 46 | 0 |
| | | | | SpRY | | |
| 442 | CTC | CTTACAACGTGTCTCTGCTT | 17526 | SpyCas9- | 46 | 0 |
| | | | | SpRY | | |
| 443 | ATGGC | cctcGGGGGGGATAGACATGGGT | 17527 | BlatCas9 | 46 | 0 |
| 444 | CTCTC | agccTTACAACGTGTCTCTGCTT | 17528 | BlatCas9 | 46 | 0 |
| 445 | TATGG | CTCGGGGGGGATAGACATGGG | 17529 | SauCas9KKH | 47 | 0 |
| 446 | TAT | TCGGGGGGGATAGACATGGG | 17530 | SpyCas9- | 47 | 0 |
| | | | | SpRY | | |
| 447 | TCT | CCTTACAACGTGTCTCTGCT | 17531 | SpyCas9- | 47 | 0 |
| | | | | SpRY | | |
| 448 | GTA | CTCGGGGGGGATAGACATGG | 17532 | SpyCas9- | 48 | 0 |
| | | | | SpRY | | |
| 449 | TTC | GCCTTACAACGTGTCTCTGC | 17533 | SpyCas9- | 48 | 0 |
| | | | | SpRY | | |
| 450 | TTCTC | tcagCCTTACAACGTGTCTCTGC | 17534 | BlatCas9 | 48 | 0 |
| 451 | GG | CCTCGGGGGGGATAGACATG | 17535 | SpyCas9-NG | 49 | 0 |
| 452 | GG | CCTCGGGGGGGATAGACATG | 17536 | SpyCas9- | 49 | 0 |
| | | | | xCas | | |
| 453 | GG | CCTCGGGGGGGATAGACATG | 17537 | SpyCas9- | 49 | 0 |
| | | | | xCas-NG | | |
| 454 | GGT | CCTCGGGGGGGATAGACATG | 17538 | SpyCas9-SpG | 49 | 0 |
| 455 | GGT | CCTCGGGGGGGATAGACATG | 17539 | SpyCas9- | 49 | 0 |
| | | | | SpRY | | |
| 456 | CTT | AGCCTTACAACGTGTCTCTG | 17540 | SpyCas9- | 49 | 0 |
| | | | | SpRY | | |
| 457 | GGTA | CCTCGGGGGGGATAGACATG | 17541 | SpyCas9- | 49 | 0 |
| | | | | 3var-NRTH | | |
| 458 | GGG | ACCTCGGGGGGGATAGACAT | 17542 | ScaCas9 | 50 | 0 |
| 459 | GGG | ACCTCGGGGGGGATAGACAT | 17543 | ScaCas9-HiFi- | 50 | 0 |
| | | | | Sc++ | | |
| 460 | GGG | ACCTCGGGGGGGATAGACAT | 17544 | ScaCas9- | 50 | 0 |
| | | | | Sc++ | | |
| 461 | GGG | ACCTCGGGGGGGATAGACAT | 17545 | SpyCas9 | 50 | 0 |
| 462 | GGG | ACCTCGGGGGGGATAGACAT | 17546 | SpyCas9-HF1 | 50 | 0 |
| 463 | GGG | ACCTCGGGGGGGATAGACAT | 17547 | SpyCas9-SpG | 50 | 0 |
| 464 | GGG | ACCTCGGGGGGGATAGACAT | 17548 | SpyCas9- | 50 | 0 |
| | | | | SpRY | | |
| 465 | GG | ACCTCGGGGGGGATAGACAT | 17549 | SpyCas9-NG | 50 | 0 |
| 466 | GG | ACCTCGGGGGGGATAGACAT | 17550 | SpyCas9- | 50 | 0 |
| | | | | xCas | | |
| 467 | GG | ACCTCGGGGGGGATAGACAT | 17551 | SpyCas9- | 50 | 0 |
| | | | | xCas-NG | | |
| 468 | GCT | CAGCCTTACAACGTGTCTCT | 17552 | SpyCas9- | 50 | 0 |
| | | | | SpRY | | |
| 469 | GCTTC | gatcAGCCTTACAACGTGTCTCT | 17553 | BlatCas9 | 50 | 0 |
| 470 | GGGT | ACCTCGGGGGGGATAGACAT | 17554 | SpyCas9- | 50 | 0 |
| | | | | 3var-NRRH | | |
| 471 | TGGG | TGACCTCGGGGGGGATAGACA | 17555 | SauriCas9 | 51 | 0 |
| 472 | TGGG | TGACCTCGGGGGGGATAGACA | 17556 | SauriCas9- | 51 | 0 |
| | | | | KKH | | |
| 473 | TGG | GACCTCGGGGGGGATAGACA | 17557 | ScaCas9 | 51 | 0 |
| 474 | TGG | GACCTCGGGGGGGATAGACA | 17558 | ScaCas9-HiFi- | 51 | 0 |
| | | | | Sc++ | | |
| 475 | TGG | GACCTCGGGGGGGATAGACA | 17559 | ScaCas9- | 51 | 0 |
| | | | | Sc++ | | |
| 476 | TGG | GACCTCGGGGGGGATAGACA | 17560 | SpyCas9 | 51 | 0 |
| 477 | TGG | GACCTCGGGGGGGATAGACA | 17561 | SpyCas9-HF1 | 51 | 0 |
| 478 | TGG | GACCTCGGGGGGGATAGACA | 17562 | SpyCas9-SpG | 51 | 0 |
| 479 | TGG | GACCTCGGGGGGGATAGACA | 17563 | SpyCas9- | 51 | 0 |
| | | | | SpRY | | |
| 480 | TG | GACCTCGGGGGGGATAGACA | 17564 | SpyCas9-NG | 51 | 0 |
| 481 | TG | GACCTCGGGGGGGATAGACA | 17565 | SpyCas9- | 51 | 0 |
| | | | | xCas | | |
| 482 | TG | GACCTCGGGGGGGATAGACA | 17566 | SpyCas9- | 51 | 0 |
| | | | | xCas-NG | | |
| 483 | TG | TCAGCCTTACAACGTGTCTC | 17567 | SpyCas9-NG | 51 | 0 |
| 484 | TG | TCAGCCTTACAACGTGTCTC | 17568 | SpyCas9- | 51 | 0 |
| | | | | xCas | | |
| 485 | TG | TCAGCCTTACAACGTGTCTC | 17569 | SpyCas9- | 51 | 0 |
| | | | | xCas-NG | | |
| 486 | TGC | TCAGCCTTACAACGTGTCTC | 17570 | SpyCas9-SpG | 51 | 0 |
| 487 | TGC | TCAGCCTTACAACGTGTCTC | 17571 | SpyCas9- | 51 | 0 |
| | | | | SpRY | | |
| 488 | TGCT | TCAGCCTTACAACGTGTCTC | 17572 | SpyCas9- | 51 | 0 |
| | | | | 3var-NRCH | | |
| 489 | ATGGG | acTTGACCTCGGGGGGGATAGAC | 17573 | SauCas9 | 52 | 0 |
| 490 | ATGGG | TTGACCTCGGGGGGGATAGAC | 17574 | SauCas9KKH | 52 | 0 |
| 491 | ATGGGT | acTTGACCTCGGGGGGGATAGAC | 17575 | SauCas9 | 52 | 0 |
| 492 | ATGGGT | TTGACCTCGGGGGGGATAGAC | 17576 | SauCas9KKH | 52 | 0 |
| 493 | ATGGGT | TTGACCTCGGGGGGGATAGAC | 17577 | cCas9-v17 | 52 | 0 |
| 494 | ATGGGT | TTGACCTCGGGGGGGATAGAC | 17578 | cCas9-v42 | 52 | 0 |
| 495 | ATGG | TTGACCTCGGGGGGGATAGAC | 17579 | SauriCas9 | 52 | 0 |
| 496 | ATGG | TTGACCTCGGGGGGGATAGAC | 17580 | SauriCas9- | 52 | 0 |
| | | | | KKH | | |
| 497 | ATG | TGACCTCGGGGGGGATAGAC | 17581 | ScaCas9 | 52 | 0 |
| 498 | ATG | TGACCTCGGGGGGGATAGAC | 17582 | ScaCas9-HiFi- | 52 | 0 |
| | | | | Sc++ | | |
| 499 | ATG | TGACCTCGGGGGGGATAGAC | 17583 | ScaCas9- | 52 | 0 |
| | | | | Sc++ | | |
| 500 | ATG | TGACCTCGGGGGGGATAGAC | 17584 | SpyCas9- | 52 | 0 |
| | | | | SpRY | | |
| 501 | CTG | ATCAGCCTTACAACGTGTCT | 17585 | ScaCas9 | 52 | 0 |
| 502 | CTG | ATCAGCCTTACAACGTGTCT | 17586 | ScaCas9-HiFi- | 52 | 0 |
| | | | | Sc++ | | |
| 503 | CTG | ATCAGCCTTACAACGTGTCT | 17587 | ScaCas9- | 52 | 0 |
| | | | | Sc++ | | |
| 504 | CTG | ATCAGCCTTACAACGTGTCT | 17588 | SpyCas9- | 52 | 0 |
| | | | | SpRY | | |
| 505 | CTGCTTC | GGATCAGCCTTACAACGTGTCT | 17589 | CdiCas9 | 52 | 0 |
| 506 | CATGG | CTTGACCTCGGGGGGGATAGA | 17590 | SauCas9KKH | 53 | 0 |
| 507 | CAT | TTGACCTCGGGGGGGATAGA | 17591 | SpyCas9- | 53 | 0 |
| | | | | SpRY | | |
| 508 | TCT | GATCAGCCTTACAACGTGTC | 17592 | SpyCas9- | 53 | 0 |
| | | | | SpRY | | |
| 509 | TCTGC | tgggATCAGCCTTACAACGTGTC | 17593 | BlatCas9 | 53 | 0 |
| 510 | ACA | CTTGACCTCGGGGGGGATAG | 17594 | SpyCas9- | 54 | 0 |
| | | | | SpRY | | |
| 511 | CTC | GGATCAGCCTTACAACGTGT | 17595 | SpyCas9- | 54 | 0 |
| | | | | SpRY | | |
| 512 | CTCTGCTT | cctgGGATCAGCCTTACAACGTGT | 17596 | NmeCas9 | 54 | 0 |
| 513 | GAC | ACTTGACCTCGGGGGGGATA | 17597 | SpyCas9- | 55 | 0 |
| | | | | SpRY | | |
| 514 | TCT | GGGATCAGCCTTACAACGTG | 17598 | SpyCas9- | 55 | 0 |
| | | | | SpRY | | |
| 515 | GACA | ACTTGACCTCGGGGGGGATA | 17599 | SpyCas9- | 55 | 0 |
| | | | | 3var-NRCH | | |
| 516 | AG | AACTTGACCTCGGGGGGGAT | 17600 | SpyCas9-NG | 56 | 0 |
| 517 | AG | AACTTGACCTCGGGGGGGAT | 17601 | SpyCas9- | 56 | 0 |
| | | | | xCas | | |
| 518 | AG | AACTTGACCTCGGGGGGGAT | 17602 | SpyCas9- | 56 | 0 |
| | | | | xCas-NG | | |
| 519 | AGA | AACTTGACCTCGGGGGGGAT | 17603 | SpyCas9-SpG | 56 | 0 |
| 520 | AGA | AACTTGACCTCGGGGGGGAT | 17604 | SpyCas9- | 56 | 0 |
| | | | | SpRY | | |
| 521 | GTC | TGGGATCAGCCTTACAACGT | 17605 | SpyCas9- | 56 | 0 |
| | | | | SpRY | | |
| 522 | GTCTC | gcctGGGATCAGCCTTACAACGT | 17606 | BlatCas9 | 56 | 0 |
| 523 | AGAC | AACTTGACCTCGGGGGGGAT | 17607 | SpyCas9- | 56 | 0 |
| | | | | 3var-NRRH | | |
| 524 | AGAC | AACTTGACCTCGGGGGGGAT | 17608 | SpyCas9-VQR | 56 | 0 |
| 525 | TAG | GAACTTGACCTCGGGGGGGA | 17609 | ScaCas9 | 57 | 0 |
| 526 | TAG | GAACTTGACCTCGGGGGGGA | 17610 | ScaCas9-HiFi- | 57 | 0 |
| | | | | Sc++ | | |
| 527 | TAG | GAACTTGACCTCGGGGGGGA | 17611 | ScaCas9- | 57 | 0 |
| | | | | Sc++ | | |
| 528 | TAG | GAACTTGACCTCGGGGGGGA | 17612 | SpyCas9- | 57 | 0 |
| | | | | SpRY | | |
| 529 | TG | CTGGGATCAGCCTTACAACG | 17613 | SpyCas9-NG | 57 | 0 |
| 530 | TG | CTGGGATCAGCCTTACAACG | 17614 | SpyCas9- | 57 | 0 |
| | | | | xCas | | |
| 531 | TG | CTGGGATCAGCCTTACAACG | 17615 | SpyCas9- | 57 | 0 |
| | | | | xCas-NG | | |
| 532 | TGT | CTGGGATCAGCCTTACAACG | 17616 | SpyCas9-SpG | 57 | 0 |
| 533 | TGT | CTGGGATCAGCCTTACAACG | 17617 | SpyCas9- | 57 | 0 |
| | | | | SpRY | | |
| 534 | TAGACATG | gttgAACTTGACCTCGGGGGGGA | 17618 | BlatCas9 | 57 | 0 |
| 535 | TAGAC | gttgAACTTGACCTCGGGGGGGA | 17619 | BlatCas9 | 57 | 0 |
| 536 | TAGACAT | TTGAACTTGACCTCGGGGGGGA | 17620 | CdiCas9 | 57 | 0 |
| 537 | TAGA | GAACTTGACCTCGGGGGGGA | 17621 | SpyCas9- | 57 | 0 |
| | | | | 3var-NRRH | | |
| 538 | TGTC | CTGGGATCAGCCTTACAACG | 17622 | SpyCas9- | 57 | 0 |
| | | | | 3var-NRTH | | |
| 539 | ATAGA | TTGAACTTGACCTCGGGGGGG | 17623 | SauCas9KKH | 58 | 0 |
| 540 | ATAG | TTGAACTTGACCTCGGGGGGG | 17624 | SauriCas9- | 58 | 0 |
| | | | | KKH | | |
| 541 | GTG | CCTGGGATCAGCCTTACAAC | 17625 | ScaCas9 | 58 | 0 |
| 542 | GTG | CCTGGGATCAGCCTTACAAC | 17626 | ScaCas9-HiFi- | 58 | 0 |
| | | | | Sc++ | | |
| 543 | GTG | CCTGGGATCAGCCTTACAAC | 17627 | ScaCas9- | 58 | 0 |
| | | | | Sc++ | | |
| 544 | GTG | CCTGGGATCAGCCTTACAAC | 17628 | SpyCas9- | 58 | 0 |
| | | | | SpRY | | |
| 545 | ATA | TGAACTTGACCTCGGGGGGG | 17629 | SpyCas9- | 58 | 0 |
| | | | | SpRY | | |
| 546 | GTGTC | aggcCTGGGATCAGCCTTACAAC | 17630 | BlatCas9 | 58 | 0 |
| 547 | ATAGAC | TTGAACTTGACCTCGGGGGGG | 17631 | cCas9-v17 | 58 | 0 |
| 548 | ATAGAC | TTGAACTTGACCTCGGGGGGG | 17632 | cCas9-v42 | 58 | 0 |
| 549 | GTGTCTC | GGCCTGGGATCAGCCTTACAAC | 17633 | CdiCas9 | 58 | 0 |
| 550 | GATAG | GTTGAACTTGACCTCGGGGGG | 17634 | SauCas9KKH | 59 | 0 |
| 551 | CG | GCCTGGGATCAGCCTTACAA | 17635 | SpyCas9-NG | 59 | 0 |
| 552 | CG | GCCTGGGATCAGCCTTACAA | 17636 | SpyCas9- | 59 | 0 |
| | | | | xCas | | |
| 553 | CG | GCCTGGGATCAGCCTTACAA | 17637 | SpyCas9- | 59 | 0 |
| | | | | xCas-NG | | |
| 554 | GAT | TTGAACTTGACCTCGGGGGG | 17638 | SpyCas9- | 59 | 0 |
| | | | | SpRY | | |
| 555 | GAT | TTGAACTTGACCTCGGGGGG | 17639 | SpyCas9- | 59 | 0 |
| | | | | xCas | | |
| 556 | CGT | GCCTGGGATCAGCCTTACAA | 17640 | SpyCas9-SpG | 59 | 0 |
| 557 | CGT | GCCTGGGATCAGCCTTACAA | 17641 | SpyCas9- | 59 | 0 |
| | | | | SpRY | | |
| 558 | GATAGACA | tttgTTGAACTTGACCTCGGGGGG | 17642 | NmeCas9 | 59 | 0 |
| 559 | GATA | TTGAACTTGACCTCGGGGGG | 17643 | SpyCas9- | 59 | 0 |
| | | | | 3var-NRTH | | |
| 560 | ACG | GGCCTGGGATCAGCCTTACA | 17644 | ScaCas9 | 60 | 0 |
| 561 | ACG | GGCCTGGGATCAGCCTTACA | 17645 | ScaCas9-HiFi- | 60 | 0 |
| | | | | Sc++ | | |
| 562 | ACG | GGCCTGGGATCAGCCTTACA | 17646 | ScaCas9- | 60 | 0 |
| | | | | Sc++ | | |
| 563 | ACG | GGCCTGGGATCAGCCTTACA | 17647 | SpyCas9- | 60 | 0 |
| | | | | SpRY | | |
| 564 | GG | GTTGAACTTGACCTCGGGGG | 17648 | SpyCas9-NG | 60 | 0 |
| 565 | GG | GTTGAACTTGACCTCGGGGG | 17649 | SpyCas9- | 60 | 0 |
| | | | | xCas | | |
| 566 | GG | GTTGAACTTGACCTCGGGGG | 17650 | SpyCas9- | 60 | 0 |
| | | | | xCas-NG | | |
| 567 | GGA | GTTGAACTTGACCTCGGGGG | 17651 | SpyCas9-SpG | 60 | 0 |
| 568 | GGA | GTTGAACTTGACCTCGGGGG | 17652 | SpyCas9- | 60 | 0 |
| | | | | SpRY | | |
| 569 | ACGTGTCT | tcgaGGCCTGGGATCAGCCTTACA | 17653 | NmeCas9 | 60 | 0 |
| 570 | GGAT | GTTGAACTTGACCTCGGGGG | 17654 | SpyCas9- | 60 | 0 |
| | | | | 3var-NRRH | | |
| 571 | GGAT | GTTGAACTTGACCTCGGGGG | 17655 | SpyCas9-VQR | 60 | 0 |
| 572 | GGG | TGTTGAACTTGACCTCGGGG | 17656 | ScaCas9 | 61 | 0 |
| 573 | GGG | TGTTGAACTTGACCTCGGGG | 17657 | ScaCas9-HiFi- | 61 | 0 |
| | | | | Sc++ | | |
| 574 | GGG | TGTTGAACTTGACCTCGGGG | 17658 | ScaCas9- | 61 | 0 |
| | | | | Sc++ | | |
| 575 | GGG | TGTTGAACTTGACCTCGGGG | 17659 | SpyCas9 | 61 | 0 |
| 576 | GGG | TGTTGAACTTGACCTCGGGG | 17660 | SpyCas9-HF1 | 61 | 0 |
| 577 | GGG | TGTTGAACTTGACCTCGGGG | 17661 | SpyCas9-SpG | 61 | 0 |
| 578 | GGG | TGTTGAACTTGACCTCGGGG | 17662 | SpyCas9- | 61 | 0 |
| | | | | SpRY | | |
| 579 | GG | TGTTGAACTTGACCTCGGGG | 17663 | SpyCas9-NG | 61 | 0 |
| 580 | GG | TGTTGAACTTGACCTCGGGG | 17664 | SpyCas9- | 61 | 0 |
| | | | | xCas | | |
| 581 | GG | TGTTGAACTTGACCTCGGGG | 17665 | SpyCas9- | 61 | 0 |
| | | | | xCas-NG | | |
| 582 | AAC | AGGCCTGGGATCAGCCTTAC | 17666 | SpyCas9- | 61 | 0 |
| | | | | SpRY | | |
| 583 | AACGTG | GAGGCCTGGGATCAGCCTTAC | 17667 | cCas9-v16 | 61 | 0 |
| 584 | AACGTG | GAGGCCTGGGATCAGCCTTAC | 17668 | cCas9-v21 | 61 | 0 |
| 585 | GGGA | TGTTGAACTTGACCTCGGGG | 17669 | SpyCas9- | 61 | 0 |
| | | | | 3var-NRRH | | |
| 586 | GGGGA | ggTTTGTTGAACTTGACCTCGGG | 17670 | SauCas9 | 62 | 0 |
| 587 | GGGGA | TTTGTTGAACTTGACCTCGGG | 17671 | SauCas9KKH | 62 | 0 |
| 588 | GGGGAT | ggTTTGTTGAACTTGACCTCGGG | 17672 | SauCas9 | 62 | 0 |
| 589 | GGGGAT | TTTGTTGAACTTGACCTCGGG | 17673 | SauCas9KKH | 62 | 0 |
| 590 | GGGGAT | TTTGTTGAACTTGACCTCGGG | 17674 | cCas9-v17 | 62 | 0 |
| 591 | GGGGAT | TTTGTTGAACTTGACCTCGGG | 17675 | cCas9-v42 | 62 | 0 |
| 592 | GGGG | TTTGTTGAACTTGACCTCGGG | 17676 | SauriCas9 | 62 | 0 |
| 593 | GGGG | TTTGTTGAACTTGACCTCGGG | 17677 | SauriCas9- | 62 | 0 |
| | | | | KKH | | |
| 594 | GGG | TTGTTGAACTTGACCTCGGG | 17678 | ScaCas9 | 62 | 0 |
| 595 | GGG | TTGTTGAACTTGACCTCGGG | 17679 | ScaCas9-HiFi- | 62 | 0 |
| | | | | Sc++ | | |
| 596 | GGG | TTGTTGAACTTGACCTCGGG | 17680 | ScaCas9- | 62 | 0 |
| | | | | Sc++ | | |
| 597 | GGG | TTGTTGAACTTGACCTCGGG | 17681 | SpyCas9 | 62 | 0 |
| 598 | GGG | TTGTTGAACTTGACCTCGGG | 17682 | SpyCas9-HF1 | 62 | 0 |
| 599 | GGG | TTGTTGAACTTGACCTCGGG | 17683 | SpyCas9-SpG | 62 | 0 |
| 600 | GGG | TTGTTGAACTTGACCTCGGG | 17684 | SpyCas9- | 62 | 0 |
| | | | | SpRY | | |
| 601 | GG | TTGTTGAACTTGACCTCGGG | 17685 | SpyCas9-NG | 62 | 0 |
| 602 | GG | TTGTTGAACTTGACCTCGGG | 17686 | SpyCas9- | 62 | 0 |
| | | | | xCas | | |
| 603 | GG | TTGTTGAACTTGACCTCGGG | 17687 | SpyCas9- | 62 | 0 |
| | | | | xCas-NG | | |
| 604 | CAA | GAGGCCTGGGATCAGCCTTA | 17688 | SpyCas9- | 62 | 0 |
| | | | | SpRY | | |
| 605 | CAAC | GAGGCCTGGGATCAGCCTTA | 17689 | SpyCas9- | 62 | 0 |
| | | | | 3var-NRRH | | |
| 606 | CAAC | cgAGGCCTGGGATCAGCCTTA | 17690 | iSpyMacCas9 | 62 | 0 |
| 607 | GGGGG | ggGTTTGTTGAACTTGACCTCGG | 17691 | SauCas9 | 63 | 0 |
| 608 | GGGGG | GTTTGTTGAACTTGACCTCGG | 17692 | SauCas9KKH | 63 | 0 |
| 609 | GGGG | GTTTGTTGAACTTGACCTCGG | 17693 | SauriCas9 | 63 | 0 |
| 610 | GGGG | GTTTGTTGAACTTGACCTCGG | 17694 | SauriCas9- | 63 | 0 |
| | | | | KKH | | |
| 611 | GGG | TTTGTTGAACTTGACCTCGG | 17695 | ScaCas9 | 63 | 0 |
| 612 | GGG | TTTGTTGAACTTGACCTCGG | 17696 | ScaCas9-HiFi- | 63 | 0 |
| | | | | Sc++ | | |
| 613 | GGG | TTTGTTGAACTTGACCTCGG | 17697 | ScaCas9- | 63 | 0 |
| | | | | Sc++ | | |
| 614 | GGG | TTTGTTGAACTTGACCTCGG | 17698 | SpyCas9 | 63 | 0 |
| 615 | GGG | TTTGTTGAACTTGACCTCGG | 17699 | SpyCas9-HF1 | 63 | 0 |
| 616 | GGG | TTTGTTGAACTTGACCTCGG | 17700 | SpyCas9-SpG | 63 | 0 |
| 617 | GGG | TTTGTTGAACTTGACCTCGG | 17701 | SpyCas9- | 63 | 0 |
| | | | | SpRY | | |
| 618 | GG | TTTGTTGAACTTGACCTCGG | 17702 | SpyCas9-NG | 63 | 0 |
| 619 | GG | TTTGTTGAACTTGACCTCGG | 17703 | SpyCas9- | 63 | 0 |
| | | | | xCas | | |
| 620 | GG | TTTGTTGAACTTGACCTCGG | 17704 | SpyCas9- | 63 | 0 |
| | | | | xCas-NG | | |
| 621 | ACA | CGAGGCCTGGGATCAGCCTT | 17705 | SpyCas9- | 63 | 0 |
| | | | | SpRY | | |
| 622 | ACAACGTG | gctcGAGGCCTGGGATCAGCCTT | 17706 | BlatCas9 | 63 | 0 |
| 623 | ACAAC | gctcGAGGCCTGGGATCAGCCTT | 17707 | BlatCas9 | 63 | 0 |
| 624 | GGGGGA | GTTTGTTGAACTTGACCTCGG | 17708 | cCas9-v17 | 63 | 0 |
| 625 | GGGGGA | GTTTGTTGAACTTGACCTCGG | 17709 | cCas9-v42 | 63 | 0 |
| 626 | GGGGGATA | agggTTTGTTGAACTTGACCTCGG | 17710 | NmeCas9 | 63 | 0 |
| 627 | GGGGG | agGGTTTGTTGAACTTGACCTCG | 17711 | SauCas9 | 64 | 0 |
| 628 | GGGGG | GGTTTGTTGAACTTGACCTCG | 17712 | SauCas9KKH | 64 | 0 |
| 629 | TACAA | CTCGAGGCCTGGGATCAGCCT | 17713 | SauCas9KKH | 64 | 0 |
| 630 | GGGG | GGTTTGTTGAACTTGACCTCG | 17714 | SauriCas9 | 64 | 0 |
| 631 | GGGG | GGTTTGTTGAACTTGACCTCG | 17715 | SauriCas9- | 64 | 0 |
| | | | | KKH | | |
| 632 | GGG | GTTTGTTGAACTTGACCTCG | 17716 | ScaCas9 | 64 | 0 |
| 633 | GGG | GTTTGTTGAACTTGACCTCG | 17717 | ScaCas9-HiFi- | 64 | 0 |
| | | | | Sc++ | | |
| 634 | GGG | GTTTGTTGAACTTGACCTCG | 17718 | ScaCas9- | 64 | 0 |
| | | | | Sc++ | | |
| 635 | GGG | GTTTGTTGAACTTGACCTCG | 17719 | SpyCas9 | 64 | 0 |
| 636 | GGG | GTTTGTTGAACTTGACCTCG | 17720 | SpyCas9-HF1 | 64 | 0 |
| 637 | GGG | GTTTGTTGAACTTGACCTCG | 17721 | SpyCas9-SpG | 64 | 0 |
| 638 | GGG | GTTTGTTGAACTTGACCTCG | 17722 | SpyCas9- | 64 | 0 |
| | | | | SpRY | | |
| 639 | GG | GTTTGTTGAACTTGACCTCG | 17723 | SpyCas9-NG | 64 | 0 |
| 640 | GG | GTTTGTTGAACTTGACCTCG | 17724 | SpyCas9- | 64 | 0 |
| | | | | xCas | | |
| 641 | GG | GTTTGTTGAACTTGACCTCG | 17725 | SpyCas9- | 64 | 0 |
| | | | | xCas-NG | | |
| 642 | TAC | TCGAGGCCTGGGATCAGCCT | 17726 | SpyCas9- | 64 | 0 |
| | | | | SpRY | | |
| 643 | GGGGGG | GGTTTGTTGAACTTGACCTCG | 17727 | cCas9-v17 | 64 | 0 |
| 644 | GGGGGG | GGTTTGTTGAACTTGACCTCG | 17728 | cCas9-v42 | 64 | 0 |
| 645 | TACAAC | CTCGAGGCCTGGGATCAGCCT | 17729 | cCas9-v17 | 64 | 0 |
| 646 | TACAAC | CTCGAGGCCTGGGATCAGCCT | 17730 | cCas9-v42 | 64 | 0 |
| 647 | TACA | TCGAGGCCTGGGATCAGCCT | 17731 | SpyCas9- | 64 | 0 |
| | | | | 3var-NRCH | | |
| 648 | GGGGG | aaGGGTTTGTTGAACTTGACCTC | 17732 | SauCas9 | 65 | 0 |
| 649 | GGGGG | GGGTTTGTTGAACTTGACCTC | 17733 | SauCas9KKH | 65 | 0 |
| 650 | GGGG | GGGTTTGTTGAACTTGACCTC | 17734 | SauriCas9 | 65 | 0 |
| 651 | GGGG | GGGTTTGTTGAACTTGACCTC | 17735 | SauriCas9- | 65 | 0 |
| | | | | KKH | | |
| 652 | GGG | GGTTTGTTGAACTTGACCTC | 17736 | ScaCas9 | 65 | 0 |
| 653 | GGG | GGTTTGTTGAACTTGACCTC | 17737 | ScaCas9-HiFi- | 65 | 0 |
| | | | | Sc++ | | |
| 654 | GGG | GGTTTGTTGAACTTGACCTC | 17738 | ScaCas9- | 65 | 0 |
| | | | | Sc++ | | |
| 655 | GGG | GGTTTGTTGAACTTGACCTC | 17739 | SpyCas9 | 65 | 0 |
| 656 | GGG | GGTTTGTTGAACTTGACCTC | 17740 | SpyCas9-HF1 | 65 | 0 |
| 657 | GGG | GGTTTGTTGAACTTGACCTC | 17741 | SpyCas9-SpG | 65 | 0 |
| 658 | GGG | GGTTTGTTGAACTTGACCTC | 17742 | SpyCas9- | 65 | 0 |
| | | | | SpRY | | |
| 659 | GG | GGTTTGTTGAACTTGACCTC | 17743 | SpyCas9-NG | 65 | 0 |
| 660 | GG | GGTTTGTTGAACTTGACCTC | 17744 | SpyCas9- | 65 | 0 |
| | | | | xCas | | |
| 661 | GG | GGTTTGTTGAACTTGACCTC | 17745 | SpyCas9- | 65 | 0 |
| | | | | xCas-NG | | |
| 662 | TTA | CTCGAGGCCTGGGATCAGCC | 17746 | SpyCas9- | 65 | 0 |
| | | | | SpRY | | |
| 663 | GGGGGG | GGGTTTGTTGAACTTGACCTC | 17747 | cCas9-v17 | 65 | 0 |
| 664 | GGGGGG | GGGTTTGTTGAACTTGACCTC | 17748 | cCas9-v42 | 65 | 0 |
| 665 | TTACAAC | TGCTCGAGGCCTGGGATCAGCC | 17749 | CdiCas9 | 65 | 0 |
| 666 | TTACAA | CTCGAGGCCTGGGATCAGCC | 17750 | St1Cas9- | 65 | 0 |
| | | | | CNRZ1066 | | |
| 667 | CGGGG | aaAGGGTTTGTTGAACTTGACCT | 17751 | SauCas9 | 66 | 0 |
| 668 | CGGGG | AGGGTTTGTTGAACTTGACCT | 17752 | SauCas9KKH | 66 | 0 |
| 669 | CGGG | AGGGTTTGTTGAACTTGACCT | 17753 | SauriCas9 | 66 | 0 |
| 670 | CGGG | AGGGTTTGTTGAACTTGACCT | 17754 | SauriCas9- | 66 | 0 |
| | | | | KKH | | |
| 671 | CGG | GGGTTTGTTGAACTTGACCT | 17755 | ScaCas9 | 66 | 0 |
| 672 | CGG | GGGTTTGTTGAACTTGACCT | 17756 | ScaCas9-HiFi- | 66 | 0 |
| | | | | Sc++ | | |
| 673 | CGG | GGGTTTGTTGAACTTGACCT | 17757 | ScaCas9- | 66 | 0 |
| | | | | Sc++ | | |
| 674 | CGG | GGGTTTGTTGAACTTGACCT | 17758 | SpyCas9 | 66 | 0 |
| 675 | CGG | GGGTTTGTTGAACTTGACCT | 17759 | SpyCas9-HF1 | 66 | 0 |
| 676 | CGG | GGGTTTGTTGAACTTGACCT | 17760 | SpyCas9-SpG | 66 | 0 |
| 677 | CGG | GGGTTTGTTGAACTTGACCT | 17761 | SpyCas9- | 66 | 0 |
| | | | | SpRY | | |
| 678 | CG | GGGTTTGTTGAACTTGACCT | 17762 | SpyCas9-NG | 66 | 0 |
| 679 | CG | GGGTTTGTTGAACTTGACCT | 17763 | SpyCas9- | 66 | 0 |
| | | | | xCas | | |
| 680 | CG | GGGTTTGTTGAACTTGACCT | 17764 | SpyCas9- | 66 | 0 |
| | | | | xCas-NG | | |
| 681 | CTT | GCTCGAGGCCTGGGATCAGC | 17765 | SpyCas9- | 66 | 0 |
| | | | | SpRY | | |
| 682 | CTTAC | cttgCTCGAGGCCTGGGATCAGC | 17766 | BlatCas9 | 66 | 0 |
| 683 | CGGGGG | AGGGTTTGTTGAACTTGACCT | 17767 | cCas9-v17 | 66 | 0 |
| 684 | CGGGGG | AGGGTTTGTTGAACTTGACCT | 17768 | cCas9-v42 | 66 | 0 |
| 685 | TCGGG | caAAGGGTTTGTTGAACTTGACC | 17769 | SauCas9 | 67 | 0 |
| 686 | TCGGG | AAGGGTTTGTTGAACTTGACC | 17770 | SauCas9KKH | 67 | 0 |
| 687 | TCGG | AAGGGTTTGTTGAACTTGACC | 17771 | SauriCas9 | 67 | 0 |
| 688 | TCGG | AAGGGTTTGTTGAACTTGACC | 17772 | SauriCas9- | 67 | 0 |
| | | | | KKH | | |
| 689 | TCG | AGGGTTTGTTGAACTTGACC | 17773 | ScaCas9 | 67 | 0 |
| 690 | TCG | AGGGTTTGTTGAACTTGACC | 17774 | ScaCas9-HiFi- | 67 | 0 |
| | | | | Sc++ | | |
| 691 | TCG | AGGGTTTGTTGAACTTGACC | 17775 | ScaCas9- | 67 | 0 |
| | | | | Sc++ | | |
| 692 | TCG | AGGGTTTGTTGAACTTGACC | 17776 | SpyCas9- | 67 | 0 |
| | | | | SpRY | | |
| 693 | CCT | TGCTCGAGGCCTGGGATCAG | 17777 | SpyCas9- | 67 | 0 |
| | | | | SpRY | | |
| 694 | TCGGGG | AAGGGTTTGTTGAACTTGACC | 17778 | cCas9-v17 | 67 | 0 |
| 695 | TCGGGG | AAGGGTTTGTTGAACTTGACC | 17779 | cCas9-v42 | 67 | 0 |
| 696 | CTCGG | AAAGGGTTTGTTGAACTTGAC | 17780 | SauCas9KKH | 68 | 0 |
| 697 | CTC | AAGGGTTTGTTGAACTTGAC | 17781 | SpyCas9- | 68 | 0 |
| | | | | SpRY | | |
| 698 | GCC | TTGCTCGAGGCCTGGGATCA | 17782 | SpyCas9- | 68 | 0 |
| | | | | SpRY | | |
| 699 | CTCGGG | AAAGGGTTTGTTGAACTTGAC | 17783 | cCas9-v17 | 68 | 0 |
| 700 | CTCGGG | AAAGGGTTTGTTGAACTTGAC | 17784 | cCas9-v42 | 68 | 0 |
| 701 | AG | CTTGCTCGAGGCCTGGGATC | 17785 | SpyCas9-NG | 69 | 0 |
| 702 | AG | CTTGCTCGAGGCCTGGGATC | 17786 | SpyCas9- | 69 | 0 |
| | | | | xCas | | |
| 703 | AG | CTTGCTCGAGGCCTGGGATC | 17787 | SpyCas9- | 69 | 0 |
| | | | | xCas-NG | | |
| 704 | AGC | CTTGCTCGAGGCCTGGGATC | 17788 | SpyCas9-SpG | 69 | 0 |
| 705 | AGC | CTTGCTCGAGGCCTGGGATC | 17789 | SpyCas9- | 69 | 0 |
| | | | | SpRY | | |
| 706 | CCT | AAAGGGTTTGTTGAACTTGA | 17790 | SpyCas9- | 69 | 0 |
| | | | | SpRY | | |
| 707 | AGCC | CTTGCTCGAGGCCTGGGATC | 17791 | SpyCas9- | 69 | 0 |
| | | | | 3var-NRCH | | |
| 708 | CAG | CCTTGCTCGAGGCCTGGGAT | 17792 | ScaCas9 | 70 | 0 |
| 709 | CAG | CCTTGCTCGAGGCCTGGGAT | 17793 | ScaCas9-HiFi- | 70 | 0 |
| | | | | Sc++ | | |
| 710 | CAG | CCTTGCTCGAGGCCTGGGAT | 17794 | ScaCas9- | 70 | 0 |
| | | | | Sc++ | | |
| 711 | CAG | CCTTGCTCGAGGCCTGGGAT | 17795 | SpyCas9- | 70 | 0 |
| | | | | SpRY | | |
| 712 | ACC | CAAAGGGTTTGTTGAACTTG | 17796 | SpyCas9- | 70 | 0 |
| | | | | SpRY | | |
| 713 | ACCTCGGG | agacAAAGGGTTTGTTGAACTTG | 17797 | BlatCas9 | 70 | 0 |
| 714 | CAGCCTTA | gagcCTTGCTCGAGGCCTGGGAT | 17798 | BlatCas9 | 70 | 0 |
| 715 | ACCTC | agacAAAGGGTTTGTTGAACTTG | 17799 | BlatCas9 | 70 | 0 |
| 716 | CAGCC | gagcCTTGCTCGAGGCCTGGGAT | 17800 | BlatCas9 | 70 | 0 |
| 717 | CAGCCTT | AGCCTTGCTCGAGGCCTGGGAT | 17801 | CdiCas9 | 70 | 0 |
| 718 | CAGC | CCTTGCTCGAGGCCTGGGAT | 17802 | SpyCas9- | 70 | 0 |
| | | | | 3var-NRRH | | |
| 719 | TCAGCC | gtGAGCCTTGCTCGAGGCCTGGGA | 17803 | Nme2Cas9 | 71 | 0 |
| 720 | TCAG | AGCCTTGCTCGAGGCCTGGGA | 17804 | SauriCas9- | 71 | 0 |
| | | | | KKH | | |
| 721 | GAC | ACAAAGGGTTTGTTGAACTT | 17805 | SpyCas9- | 71 | 0 |
| | | | | SpRY | | |
| 722 | TCA | GCCTTGCTCGAGGCCTGGGA | 17806 | SpyCas9- | 71 | 0 |
| | | | | SpRY | | |
| 723 | TCAGCCTT | tgagCCTTGCTCGAGGCCTGGGA | 17807 | BlatCas9 | 71 | 0 |
| 724 | TCAGC | tgagCCTTGCTCGAGGCCTGGGA | 17808 | BlatCas9 | 71 | 0 |
| 725 | GACC | ACAAAGGGTTTGTTGAACTT | 17809 | SpyCas9- | 71 | 0 |
| | | | | 3var-NRCH | | |
| 726 | ATCAG | GAGCCTTGCTCGAGGCCTGGG | 17810 | SauCas9KKH | 72 | 0 |
| 727 | TG | GACAAAGGGTTTGTTGAACT | 17811 | SpyCas9-NG | 72 | 0 |
| 728 | TG | GACAAAGGGTTTGTTGAACT | 17812 | SpyCas9- | 72 | 0 |
| | | | | xCas | | |
| 729 | TG | GACAAAGGGTTTGTTGAACT | 17813 | SpyCas9- | 72 | 0 |
| | | | | xCas-NG | | |
| 730 | TGA | GACAAAGGGTTTGTTGAACT | 17814 | SpyCas9-SpG | 72 | 0 |
| 731 | TGA | GACAAAGGGTTTGTTGAACT | 17815 | SpyCas9- | 72 | 0 |
| | | | | SpRY | | |
| 732 | ATC | AGCCTTGCTCGAGGCCTGGG | 17816 | SpyCas9- | 72 | 0 |
| | | | | SpRY | | |
| 733 | TGACC | gaagACAAAGGGTTTGTTGAACT | 17817 | BlatCas9 | 72 | 0 |
| 734 | ATCAGC | GAGCCTTGCTCGAGGCCTGGG | 17818 | cCas9-v17 | 72 | 0 |
| 735 | ATCAGC | GAGCCTTGCTCGAGGCCTGGG | 17819 | cCas9-v42 | 72 | 0 |
| 736 | TGACCTC | AAGACAAAGGGTTTGTTGAACT | 17820 | CdiCas9 | 72 | 0 |
| 737 | TGAC | GACAAAGGGTTTGTTGAACT | 17821 | SpyCas9- | 72 | 0 |
| | | | | 3var-NRRH | | |
| 738 | TGAC | GACAAAGGGTTTGTTGAACT | 17822 | SpyCas9-VQR | 72 | 0 |
| 739 | TTGACC | aaGAAGACAAAGGGTTTGTTGAAC | 17823 | Nme2Cas9 | 73 | 0 |
| 740 | TTG | AGACAAAGGGTTTGTTGAAC | 17824 | ScaCas9 | 73 | 0 |
| 741 | TTG | AGACAAAGGGTTTGTTGAAC | 17825 | ScaCas9-HiFi- | 73 | 0 |
| | | | | Sc++ | | |
| 742 | TTG | AGACAAAGGGTTTGTTGAAC | 17826 | ScaCas9- | 73 | 0 |
| | | | | Sc++ | | |
| 743 | TTG | AGACAAAGGGTTTGTTGAAC | 17827 | SpyCas9- | 73 | 0 |
| | | | | SpRY | | |
| 744 | GAT | GAGCCTTGCTCGAGGCCTGG | 17828 | SpyCas9- | 73 | 0 |
| | | | | SpRY | | |
| 745 | GAT | GAGCCTTGCTCGAGGCCTGG | 17829 | SpyCas9- | 73 | 0 |
| | | | | xCas | | |
| 746 | TTGAC | agaaGACAAAGGGTTTGTTGAAC | 17830 | BlatCas9 | 73 | 0 |
| 747 | TTGACCT | GAAGACAAAGGGTTTGTTGAAC | 17831 | CdiCas9 | 73 | 0 |
| 748 | GATC | GAGCCTTGCTCGAGGCCTGG | 17832 | SpyCas9- | 73 | 0 |
| | | | | 3var-NRTH | | |
| 749 | CTTGA | GAAGACAAAGGGTTTGTTGAA | 17833 | SauCas9KKH | 74 | 0 |
| 750 | GG | TGAGCCTTGCTCGAGGCCTG | 17834 | SpyCas9-NG | 74 | 0 |
| 751 | GG | TGAGCCTTGCTCGAGGCCTG | 17835 | SpyCas9- | 74 | 0 |
| | | | | xCas | | |
| 752 | GG | TGAGCCTTGCTCGAGGCCTG | 17836 | SpyCas9- | 74 | 0 |
| | | | | xCas-NG | | |
| 753 | GGA | TGAGCCTTGCTCGAGGCCTG | 17837 | SpyCas9-SpG | 74 | 0 |
| 754 | GGA | TGAGCCTTGCTCGAGGCCTG | 17838 | SpyCas9- | 74 | 0 |
| | | | | SpRY | | |
| 755 | CTT | AAGACAAAGGGTTTGTTGAA | 17839 | SpyCas9- | 74 | 0 |
| | | | | SpRY | | |
| 756 | GGATC | acgtGAGCCTTGCTCGAGGCCTG | 17840 | BlatCas9 | 74 | 0 |
| 757 | GGAT | TGAGCCTTGCTCGAGGCCTG | 17841 | SpyCas9- | 74 | 0 |
| | | | | 3var-NRRH | | |
| 758 | GGAT | TGAGCCTTGCTCGAGGCCTG | 17842 | SpyCas9-VQR | 74 | 0 |
| 759 | GGG | GTGAGCCTTGCTCGAGGCCT | 17843 | ScaCas9 | 75 | 0 |
| 760 | GGG | GTGAGCCTTGCTCGAGGCCT | 17844 | ScaCas9-HiFi- | 75 | 0 |
| | | | | Sc++ | | |
| 761 | GGG | GTGAGCCTTGCTCGAGGCCT | 17845 | ScaCas9- | 75 | 0 |
| | | | | Sc++ | | |
| 762 | GGG | GTGAGCCTTGCTCGAGGCCT | 17846 | SpyCas9 | 75 | 0 |
| 763 | GGG | GTGAGCCTTGCTCGAGGCCT | 17847 | SpyCas9-HF1 | 75 | 0 |
| 764 | GGG | GTGAGCCTTGCTCGAGGCCT | 17848 | SpyCas9-SpG | 75 | 0 |
| 765 | GGG | GTGAGCCTTGCTCGAGGCCT | 17849 | SpyCas9- | 75 | 0 |
| | | | | SpRY | | |
| 766 | GG | GTGAGCCTTGCTCGAGGCCT | 17850 | SpyCas9-NG | 75 | 0 |
| 767 | GG | GTGAGCCTTGCTCGAGGCCT | 17851 | SpyCas9- | 75 | 0 |
| | | | | xCas | | |
| 768 | GG | GTGAGCCTTGCTCGAGGCCT | 17852 | SpyCas9- | 75 | 0 |
| | | | | xCas-NG | | |
| 769 | ACT | GAAGACAAAGGGTTTGTTGA | 17853 | SpyCas9- | 75 | 0 |
| | | | | SpRY | | |
| 770 | GGGA | GTGAGCCTTGCTCGAGGCCT | 17854 | SpyCas9- | 75 | 0 |
| | | | | 3var-NRRH | | |
| 771 | TGGGA | ccACGTGAGCCTTGCTCGAGGCC | 17855 | SauCas9 | 76 | 0 |
| 772 | TGGGA | ACGTGAGCCTTGCTCGAGGCC | 17856 | SauCas9KKH | 76 | 0 |
| 773 | TGGGAT | ccACGTGAGCCTTGCTCGAGGCC | 17857 | SauCas9 | 76 | 0 |
| 774 | TGGGAT | ACGTGAGCCTTGCTCGAGGCC | 17858 | SauCas9KKH | 76 | 0 |
| 775 | TGGGAT | ACGTGAGCCTTGCTCGAGGCC | 17859 | cCas9-v17 | 76 | 0 |
| 776 | TGGGAT | ACGTGAGCCTTGCTCGAGGCC | 17860 | cCas9-v42 | 76 | 0 |
| 777 | TGGG | ACGTGAGCCTTGCTCGAGGCC | 17861 | SauriCas9 | 76 | 0 |
| 778 | TGGG | ACGTGAGCCTTGCTCGAGGCC | 17862 | SauriCas9- | 76 | 0 |
| | | | | KKH | | |
| 779 | TGG | CGTGAGCCTTGCTCGAGGCC | 17863 | ScaCas9 | 76 | 0 |
| 780 | TGG | CGTGAGCCTTGCTCGAGGCC | 17864 | ScaCas9-HiFi- | 76 | 0 |
| | | | | Sc++ | | |
| 781 | TGG | CGTGAGCCTTGCTCGAGGCC | 17865 | ScaCas9- | 76 | 0 |
| | | | | Sc++ | | |
| 782 | TGG | CGTGAGCCTTGCTCGAGGCC | 17866 | SpyCas9 | 76 | 0 |
| 783 | TGG | CGTGAGCCTTGCTCGAGGCC | 17867 | SpyCas9-HF1 | 76 | 0 |
| 784 | TGG | CGTGAGCCTTGCTCGAGGCC | 17868 | SpyCas9-SpG | 76 | 0 |
| 785 | TGG | CGTGAGCCTTGCTCGAGGCC | 17869 | SpyCas9- | 76 | 0 |
| | | | | SpRY | | |
| 786 | TG | CGTGAGCCTTGCTCGAGGCC | 17870 | SpyCas9-NG | 76 | 0 |
| 787 | TG | CGTGAGCCTTGCTCGAGGCC | 17871 | SpyCas9- | 76 | 0 |
| | | | | xCas | | |
| 788 | TG | CGTGAGCCTTGCTCGAGGCC | 17872 | SpyCas9- | 76 | 0 |
| | | | | xCas-NG | | |
| 789 | AAC | AGAAGACAAAGGGTTTGTTG | 17873 | SpyCas9- | 76 | 0 |
| | | | | SpRY | | |
| 790 | AACT | AGAAGACAAAGGGTTTGTTG | 17874 | SpyCas9- | 76 | 0 |
| | | | | 3var-NRCH | | |
| 791 | CTGGG | tcCACGTGAGCCTTGCTCGAGGC | 17875 | SauCas9 | 77 | 0 |
| 792 | CTGGG | CACGTGAGCCTTGCTCGAGGC | 17876 | SauCas9KKH | 77 | 0 |
| 793 | CTGG | CACGTGAGCCTTGCTCGAGGC | 17877 | SauriCas9 | 77 | 0 |
| 794 | CTGG | CACGTGAGCCTTGCTCGAGGC | 17878 | SauriCas9- | 77 | 0 |
| | | | | KKH | | |
| 795 | CTG | ACGTGAGCCTTGCTCGAGGC | 17879 | ScaCas9 | 77 | 0 |
| 796 | CTG | ACGTGAGCCTTGCTCGAGGC | 17880 | ScaCas9-HiFi- | 77 | 0 |
| | | | | Sc++ | | |
| 797 | CTG | ACGTGAGCCTTGCTCGAGGC | 17881 | ScaCas9- | 77 | 0 |
| | | | | Sc++ | | |
| 798 | CTG | ACGTGAGCCTTGCTCGAGGC | 17882 | SpyCas9- | 77 | 0 |
| | | | | SpRY | | |
| 799 | GAA | AAGAAGACAAAGGGTTTGTT | 17883 | SpyCas9- | 77 | 0 |
| | | | | SpRY | | |
| 800 | GAA | AAGAAGACAAAGGGTTTGTT | 17884 | SpyCas9- | 77 | 0 |
| | | | | xCas | | |
| 801 | CTGGGA | CACGTGAGCCTTGCTCGAGGC | 17885 | cCas9-v17 | 77 | 0 |
| 802 | CTGGGA | CACGTGAGCCTTGCTCGAGGC | 17886 | cCas9-v42 | 77 | 0 |
| 803 | GAAC | AAGAAGACAAAGGGTTTGTT | 17887 | SpyCas9- | 77 | 0 |
| | | | | 3var-NRRH | | |
| 804 | GAAC | taAGAAGACAAAGGGTTTGTT | 17888 | iSpyMacCas9 | 77 | 0 |
| 805 | CCTGG | CCACGTGAGCCTTGCTCGAGG | 17889 | SauCas9KKH | 78 | 0 |
| 806 | TG | TAAGAAGACAAAGGGTTTGT | 17890 | SpyCas9-NG | 78 | 0 |
| 807 | TG | TAAGAAGACAAAGGGTTTGT | 17891 | SpyCas9- | 78 | 0 |
| | | | | xCas | | |
| 808 | TG | TAAGAAGACAAAGGGTTTGT | 17892 | SpyCas9- | 78 | 0 |
| | | | | xCas-NG | | |
| 809 | TGA | TAAGAAGACAAAGGGTTTGT | 17893 | SpyCas9-SpG | 78 | 0 |
| 810 | TGA | TAAGAAGACAAAGGGTTTGT | 17894 | SpyCas9- | 78 | 0 |
| | | | | SpRY | | |
| 811 | CCT | CACGTGAGCCTTGCTCGAGG | 17895 | SpyCas9- | 78 | 0 |
| | | | | SpRY | | |
| 812 | TGAACTTG | cattAAGAAGACAAAGGGTTTGT | 17896 | BlatCas9 | 78 | 0 |
| 813 | TGAAC | cattAAGAAGACAAAGGGTTTGT | 17897 | BlatCas9 | 78 | 0 |
| 814 | TGAACT | TTAAGAAGACAAAGGGTTTGT | 17898 | cCas9-v16 | 78 | 0 |
| 815 | TGAACT | TTAAGAAGACAAAGGGTTTGT | 17899 | cCas9-v21 | 78 | 0 |
| 816 | TGAACTT | ATTAAGAAGACAAAGGGTTTGT | 17900 | CdiCas9 | 78 | 0 |
| 817 | TGAA | TAAGAAGACAAAGGGTTTGT | 17901 | SpyCas9- | 78 | 0 |
| | | | | 3var-NRRH | | |
| 818 | TGAA | TAAGAAGACAAAGGGTTTGT | 17902 | SpyCas9-VQR | 78 | 0 |
| 819 | TTGAA | tcATTAAGAAGACAAAGGGTTTG | 17903 | SauCas9 | 79 | 0 |
| 820 | TTGAA | ATTAAGAAGACAAAGGGTTTG | 17904 | SauCas9KKH | 79 | 0 |
| 821 | TTG | TTAAGAAGACAAAGGGTTTG | 17905 | ScaCas9 | 79 | 0 |
| 822 | TTG | TTAAGAAGACAAAGGGTTTG | 17906 | ScaCas9-HiFi- | 79 | 0 |
| | | | | Sc++ | | |
| 823 | TTG | TTAAGAAGACAAAGGGTTTG | 17907 | ScaCas9- | 79 | 0 |
| | | | | Sc++ | | |
| 824 | TTG | TTAAGAAGACAAAGGGTTTG | 17908 | SpyCas9- | 79 | 0 |
| | | | | SpRY | | |
| 825 | GCC | CCACGTGAGCCTTGCTCGAG | 17909 | SpyCas9- | 79 | 0 |
| | | | | SpRY | | |
| 826 | TTGAAC | ATTAAGAAGACAAAGGGTTTG | 17910 | cCas9-v17 | 79 | 0 |
| 827 | TTGAAC | ATTAAGAAGACAAAGGGTTTG | 17911 | cCas9-v42 | 79 | 0 |
| 828 | TTGAACT | CATTAAGAAGACAAAGGGTTTG | 17912 | CdiCas9 | 79 | 0 |
| 829 | GTTGA | CATTAAGAAGACAAAGGGTTT | 17913 | SauCas9KKH | 80 | 0 |
| 830 | GG | TCCACGTGAGCCTTGCTCGA | 17914 | SpyCas9-NG | 80 | 0 |
| 831 | GG | TCCACGTGAGCCTTGCTCGA | 17915 | SpyCas9- | 80 | 0 |
| | | | | xCas | | |
| 832 | GG | TCCACGTGAGCCTTGCTCGA | 17916 | SpyCas9- | 80 | 0 |
| | | | | xCas-NG | | |
| 833 | GGC | TCCACGTGAGCCTTGCTCGA | 17917 | SpyCas9-SpG | 80 | 0 |
| 834 | GGC | TCCACGTGAGCCTTGCTCGA | 17918 | SpyCas9- | 80 | 0 |
| | | | | SpRY | | |
| 835 | GTT | ATTAAGAAGACAAAGGGTTT | 17919 | SpyCas9- | 80 | 0 |
| | | | | SpRY | | |
| 836 | GGCC | TCCACGTGAGCCTTGCTCGA | 17920 | SpyCas9- | 80 | 0 |
| | | | | 3var-NRCH | | |
| 837 | AGG | GTCCACGTGAGCCTTGCTCG | 17921 | ScaCas9 | 81 | 0 |
| 838 | AGG | GTCCACGTGAGCCTTGCTCG | 17922 | ScaCas9-HiFi- | 81 | 0 |
| | | | | Sc++ | | |
| 839 | AGG | GTCCACGTGAGCCTTGCTCG | 17923 | ScaCas9- | 81 | 0 |
| | | | | Sc++ | | |
| 840 | AGG | GTCCACGTGAGCCTTGCTCG | 17924 | SpyCas9 | 81 | 0 |
| 841 | AGG | GTCCACGTGAGCCTTGCTCG | 17925 | SpyCas9-HF1 | 81 | 0 |
| 842 | AGG | GTCCACGTGAGCCTTGCTCG | 17926 | SpyCas9-SpG | 81 | 0 |
| 843 | AGG | GTCCACGTGAGCCTTGCTCG | 17927 | SpyCas9- | 81 | 0 |
| | | | | SpRY | | |
| 844 | TG | CATTAAGAAGACAAAGGGTT | 17928 | SpyCas9-NG | 81 | 0 |
| 845 | TG | CATTAAGAAGACAAAGGGTT | 17929 | SpyCas9- | 81 | 0 |
| | | | | xCas | | |
| 846 | TG | CATTAAGAAGACAAAGGGTT | 17930 | SpyCas9- | 81 | 0 |
| | | | | xCas-NG | | |
| 847 | AG | GTCCACGTGAGCCTTGCTCG | 17931 | SpyCas9-NG | 81 | 0 |
| 848 | AG | GTCCACGTGAGCCTTGCTCG | 17932 | SpyCas9- | 81 | 0 |
| | | | | xCas | | |
| 849 | AG | GTCCACGTGAGCCTTGCTCG | 17933 | SpyCas9- | 81 | 0 |
| | | | | xCas-NG | | |
| 850 | TGT | CATTAAGAAGACAAAGGGTT | 17934 | SpyCas9-SpG | 81 | 0 |
| 851 | TGT | CATTAAGAAGACAAAGGGTT | 17935 | SpyCas9- | 81 | 0 |
| | | | | SpRY | | |
| 852 | AGGCCTGG | ggtgTCCACGTGAGCCTTGCTCG | 17936 | BlatCas9 | 81 | 0 |
| 853 | AGGCC | ggtgTCCACGTGAGCCTTGCTCG | 17937 | BlatCas9 | 81 | 0 |
| 854 | AGGC | GTCCACGTGAGCCTTGCTCG | 17938 | SpyCas9- | 81 | 0 |
| | | | | 3var-NRRH | | |
| 855 | TGTT | CATTAAGAAGACAAAGGGTT | 17939 | SpyCas9- | 81 | 0 |
| | | | | 3var-NRTH | | |
| 856 | GAGGCC | gaGGTGTCCACGTGAGCCTTGCTC | 17940 | Nme2Cas9 | 82 | 0 |
| 857 | GAGG | GTGTCCACGTGAGCCTTGCTC | 17941 | SauriCas9 | 82 | 0 |
| 858 | GAGG | GTGTCCACGTGAGCCTTGCTC | 17942 | SauriCas9- | 82 | 0 |
| | | | | KKH | | |
| 859 | TTG | TCATTAAGAAGACAAAGGGT | 17943 | ScaCas9 | 82 | 0 |
| 860 | TTG | TCATTAAGAAGACAAAGGGT | 17944 | ScaCas9-HiFi- | 82 | 0 |
| | | | | Sc++ | | |
| 861 | TTG | TCATTAAGAAGACAAAGGGT | 17945 | ScaCas9- | 82 | 0 |
| | | | | Sc++ | | |
| 862 | TTG | TCATTAAGAAGACAAAGGGT | 17946 | SpyCas9- | 82 | 0 |
| | | | | SpRY | | |
| 863 | GAG | TGTCCACGTGAGCCTTGCTC | 17947 | ScaCas9 | 82 | 0 |
| 864 | GAG | TGTCCACGTGAGCCTTGCTC | 17948 | ScaCas9-HiFi- | 82 | 0 |
| | | | | Sc++ | | |
| 865 | GAG | TGTCCACGTGAGCCTTGCTC | 17949 | ScaCas9- | 82 | 0 |
| | | | | Sc++ | | |
| 866 | GAG | TGTCCACGTGAGCCTTGCTC | 17950 | SpyCas9- | 82 | 0 |
| | | | | SpRY | | |
| 867 | GAGGCCTG | aggtGTCCACGTGAGCCTTGCTC | 17951 | BlatCas9 | 82 | 0 |
| 868 | GAGGC | aggtGTCCACGTGAGCCTTGCTC | 17952 | BlatCas9 | 82 | 0 |
| 869 | CGAGG | GGTGTCCACGTGAGCCTTGCT | 17953 | SauCas9KKH | 83 | 0 |
| 870 | CGAG | GGTGTCCACGTGAGCCTTGCT | 17954 | SauriCas9- | 83 | 0 |
| | | | | KKH | | |
| 871 | CGAG | GTGTCCACGTGAGCCTTGCT | 17955 | SpyCas9-VQR | 83 | 0 |
| 872 | CG | GTGTCCACGTGAGCCTTGCT | 17956 | SpyCas9-NG | 83 | 0 |
| 873 | CG | GTGTCCACGTGAGCCTTGCT | 17957 | SpyCas9- | 83 | 0 |
| | | | | xCas | | |
| 874 | CG | GTGTCCACGTGAGCCTTGCT | 17958 | SpyCas9- | 83 | 0 |
| | | | | xCas-NG | | |
| 875 | CGA | GTGTCCACGTGAGCCTTGCT | 17959 | SpyCas9-SpG | 83 | 0 |
| 876 | CGA | GTGTCCACGTGAGCCTTGCT | 17960 | SpyCas9- | 83 | 0 |
| | | | | SpRY | | |
| 877 | TTT | ATCATTAAGAAGACAAAGGG | 17961 | SpyCas9- | 83 | 0 |
| | | | | SpRY | | |
| 878 | CGAGGC | GGTGTCCACGTGAGCCTTGCT | 17962 | cCas9-v17 | 83 | 0 |
| 879 | CGAGGC | GGTGTCCACGTGAGCCTTGCT | 17963 | cCas9-v42 | 83 | 0 |
| 880 | GTTTGTT | gttCAATCATTAAGAAGACAAAGG | 17964 | PpnCas9 | 84 | 0 |
| 881 | TCGAG | ggAGGTGTCCACGTGAGCCTTGC | 17965 | SauCas9 | 84 | 0 |
| 882 | TCGAG | AGGTGTCCACGTGAGCCTTGC | 17966 | SauCas9KKH | 84 | 0 |
| 883 | TCG | GGTGTCCACGTGAGCCTTGC | 17967 | ScaCas9 | 84 | 0 |
| 884 | TCG | GGTGTCCACGTGAGCCTTGC | 17968 | ScaCas9-HiFi- | 84 | 0 |
| | | | | Sc++ | | |
| 885 | TCG | GGTGTCCACGTGAGCCTTGC | 17969 | ScaCas9- | 84 | 0 |
| | | | | Sc++ | | |
| 886 | TCG | GGTGTCCACGTGAGCCTTGC | 17970 | SpyCas9- | 84 | 0 |
| | | | | SpRY | | |
| 887 | GTT | AATCATTAAGAAGACAAAGG | 17971 | SpyCas9- | 84 | 0 |
| | | | | SpRY | | |
| 888 | TCGAGG | AGGTGTCCACGTGAGCCTTGC | 17972 | cCas9-v17 | 84 | 0 |
| 889 | TCGAGG | AGGTGTCCACGTGAGCCTTGC | 17973 | cCas9-v42 | 84 | 0 |
| 890 | CTCGA | GAGGTGTCCACGTGAGCCTTG | 17974 | SauCas9KKH | 85 | 0 |
| 891 | GG | CAATCATTAAGAAGACAAAG | 17975 | SpyCas9-NG | 85 | 0 |
| 892 | GG | CAATCATTAAGAAGACAAAG | 17976 | SpyCas9- | 85 | 0 |
| | | | | xCas | | |
| 893 | GG | CAATCATTAAGAAGACAAAG | 17977 | SpyCas9- | 85 | 0 |
| | | | | xCas-NG | | |
| 894 | GGT | CAATCATTAAGAAGACAAAG | 17978 | SpyCas9-SpG | 85 | 0 |
| 895 | GGT | CAATCATTAAGAAGACAAAG | 17979 | SpyCas9- | 85 | 0 |
| | | | | SpRY | | |
| 896 | CTC | AGGTGTCCACGTGAGCCTTG | 17980 | SpyCas9- | 85 | 0 |
| | | | | SpRY | | |
| 897 | CTCGAG | GAGGTGTCCACGTGAGCCTTG | 17981 | cCas9-v17 | 85 | 0 |
| 898 | CTCGAG | GAGGTGTCCACGTGAGCCTTG | 17982 | cCas9-v42 | 85 | 0 |
| 899 | GGTT | CAATCATTAAGAAGACAAAG | 17983 | SpyCas9- | 85 | 0 |
| | | | | 3var-NRTH | | |
| 900 | GGG | TCAATCATTAAGAAGACAAA | 17984 | ScaCas9 | 86 | 0 |
| 901 | GGG | TCAATCATTAAGAAGACAAA | 17985 | ScaCas9-HiFi- | 86 | 0 |
| | | | | Sc++ | | |
| 902 | GGG | TCAATCATTAAGAAGACAAA | 17986 | ScaCas9- | 86 | 0 |
| | | | | Sc++ | | |
| 903 | GGG | TCAATCATTAAGAAGACAAA | 17987 | SpyCas9 | 86 | 0 |
| 904 | GGG | TCAATCATTAAGAAGACAAA | 17988 | SpyCas9-HF1 | 86 | 0 |
| 905 | GGG | TCAATCATTAAGAAGACAAA | 17989 | SpyCas9-SpG | 86 | 0 |
| 906 | GGG | TCAATCATTAAGAAGACAAA | 17990 | SpyCas9- | 86 | 0 |
| | | | | SpRY | | |
| 907 | GG | TCAATCATTAAGAAGACAAA | 17991 | SpyCas9-NG | 86 | 0 |
| 908 | GG | TCAATCATTAAGAAGACAAA | 17992 | SpyCas9- | 86 | 0 |
| | | | | xCas | | |
| 909 | GG | TCAATCATTAAGAAGACAAA | 17993 | SpyCas9- | 86 | 0 |
| | | | | xCas-NG | | |
| 910 | GCT | GAGGTGTCCACGTGAGCCTT | 17994 | SpyCas9- | 86 | 0 |
| | | | | SpRY | | |
| 911 | GGGT | TCAATCATTAAGAAGACAAA | 17995 | SpyCas9- | 86 | 0 |
| | | | | 3var-NRRH | | |
| 912 | AGGG | GTTCAATCATTAAGAAGACAA | 17996 | SauriCas9 | 87 | 0 |
| 913 | AGGG | GTTCAATCATTAAGAAGACAA | 17997 | SauriCas9- | 87 | 0 |
| | | | | KKH | | |
| 914 | AGG | TTCAATCATTAAGAAGACAA | 17998 | ScaCas9 | 87 | 0 |
| 915 | AGG | TTCAATCATTAAGAAGACAA | 17999 | ScaCas9-HiFi- | 87 | 0 |
| | | | | Sc++ | | |
| 916 | AGG | TTCAATCATTAAGAAGACAA | 18000 | ScaCas9- | 87 | 0 |
| | | | | Sc++ | | |
| 917 | AGG | TTCAATCATTAAGAAGACAA | 18001 | SpyCas9 | 87 | 0 |
| 918 | AGG | TTCAATCATTAAGAAGACAA | 18002 | SpyCas9-HF1 | 87 | 0 |
| 919 | AGG | TTCAATCATTAAGAAGACAA | 18003 | SpyCas9-SpG | 87 | 0 |
| 920 | AGG | TTCAATCATTAAGAAGACAA | 18004 | SpyCas9- | 87 | 0 |
| | | | | SpRY | | |
| 921 | AG | TTCAATCATTAAGAAGACAA | 18005 | SpyCas9-NG | 87 | 0 |
| 922 | AG | TTCAATCATTAAGAAGACAA | 18006 | SpyCas9- | 87 | 0 |
| | | | | xCas | | |
| 923 | AG | TTCAATCATTAAGAAGACAA | 18007 | SpyCas9- | 87 | 0 |
| | | | | xCas-NG | | |
| 924 | TG | GGAGGTGTCCACGTGAGCCT | 18008 | SpyCas9-NG | 87 | 0 |
| 925 | TG | GGAGGTGTCCACGTGAGCCT | 18009 | SpyCas9- | 87 | 0 |
| | | | | xCas | | |
| 926 | TG | GGAGGTGTCCACGTGAGCCT | 18010 | SpyCas9- | 87 | 0 |
| | | | | xCas-NG | | |
| 927 | TGC | GGAGGTGTCCACGTGAGCCT | 18011 | SpyCas9-SpG | 87 | 0 |
| 928 | TGC | GGAGGTGTCCACGTGAGCCT | 18012 | SpyCas9- | 87 | 0 |
| | | | | SpRY | | |
| 929 | TGCTCGAG | ctggGAGGTGTCCACGTGAGCCT | 18013 | BlatCas9 | 87 | 0 |
| 930 | TGCTC | ctggGAGGTGTCCACGTGAGCCT | 18014 | BlatCas9 | 87 | 0 |
| 931 | AGGGTT | GTTCAATCATTAAGAAGACAA | 18015 | cCas9-v16 | 87 | 0 |
| 932 | AGGGTT | GTTCAATCATTAAGAAGACAA | 18016 | cCas9-v21 | 87 | 0 |
| 933 | TGCT | GGAGGTGTCCACGTGAGCCT | 18017 | SpyCas9- | 87 | 0 |
| | | | | 3var-NRCH | | |
| 934 | AAGGGTT | tttTGTTCAATCATTAAGAAGACA | 18018 | PpnCas9 | 88 | 0 |
| 935 | AAGGG | ttTGTTCAATCATTAAGAAGACA | 18019 | SauCas9 | 88 | 0 |
| 936 | AAGGG | TGTTCAATCATTAAGAAGACA | 18020 | SauCas9KKH | 88 | 0 |
| 937 | AAGGGT | ttTGTTCAATCATTAAGAAGACA | 18021 | SauCas9 | 88 | 0 |
| 938 | AAGGGT | TGTTCAATCATTAAGAAGACA | 18022 | SauCas9KKH | 88 | 0 |
| 939 | AAGGGT | TGTTCAATCATTAAGAAGACA | 18023 | cCas9-v17 | 88 | 0 |
| 940 | AAGGGT | TGTTCAATCATTAAGAAGACA | 18024 | cCas9-v42 | 88 | 0 |
| 941 | AAGG | TGTTCAATCATTAAGAAGACA | 18025 | SauriCas9 | 88 | 0 |
| 942 | AAGG | TGTTCAATCATTAAGAAGACA | 18026 | SauriCas9- | 88 | 0 |
| | | | | KKH | | |
| 943 | AAG | GTTCAATCATTAAGAAGACA | 18027 | ScaCas9 | 88 | 0 |
| 944 | AAG | GTTCAATCATTAAGAAGACA | 18028 | ScaCas9-HiFi- | 88 | 0 |
| | | | | Sc++ | | |
| 945 | AAG | GTTCAATCATTAAGAAGACA | 18029 | ScaCas9- | 88 | 0 |
| | | | | Sc++ | | |
| 946 | AAG | GTTCAATCATTAAGAAGACA | 18030 | SpyCas9- | 88 | 0 |
| | | | | SpRY | | |
| 947 | TTG | GGGAGGTGTCCACGTGAGCC | 18031 | ScaCas9 | 88 | 0 |
| 948 | TTG | GGGAGGTGTCCACGTGAGCC | 18032 | ScaCas9-HiFi- | 88 | 0 |
| | | | | Sc++ | | |
| 949 | TTG | GGGAGGTGTCCACGTGAGCC | 18033 | ScaCas9- | 88 | 0 |
| | | | | Sc++ | | |
| 950 | TTG | GGGAGGTGTCCACGTGAGCC | 18034 | SpyCas9- | 88 | 0 |
| | | | | SpRY | | |
| 951 | AAGGGTTT | ttttGTTCAATCATTAAGAAGACA | 18035 | NmeCas9 | 88 | 0 |
| 952 | AAAGG | TTGTTCAATCATTAAGAAGAC | 18036 | SauCas9KKH | 89 | 0 |
| 953 | AAAG | TTGTTCAATCATTAAGAAGAC | 18037 | SauriCas9- | 89 | 0 |
| | | | | KKH | | |
| 954 | AAAG | TGTTCAATCATTAAGAAGAC | 18038 | SpyCas9- | 89 | 0 |
| | | | | QQR1 | | |
| 955 | AAAG | ttGTTCAATCATTAAGAAGAC | 18039 | iSpyMacCas9 | 89 | 0 |
| 956 | AAA | TGTTCAATCATTAAGAAGAC | 18040 | SpyCas9- | 89 | 0 |
| | | | | SpRY | | |
| 957 | CTT | TGGGAGGTGTCCACGTGAGC | 18041 | SpyCas9- | 89 | 0 |
| | | | | SpRY | | |
| 958 | CTTGC | tcctGGGAGGTGTCCACGTGAGC | 18042 | BlatCas9 | 89 | 0 |
| 959 | AAAGGG | TTGTTCAATCATTAAGAAGAC | 18043 | cCas9-v17 | 89 | 0 |
| 960 | AAAGGG | TTGTTCAATCATTAAGAAGAC | 18044 | cCas9-v42 | 89 | 0 |
| 961 | CAAAG | TTTGTTCAATCATTAAGAAGA | 18045 | SauCas9KKH | 90 | 0 |
| 962 | CAA | TTGTTCAATCATTAAGAAGA | 18046 | SpyCas9- | 90 | 0 |
| | | | | SpRY | | |
| 963 | CCT | CTGGGAGGTGTCCACGTGAG | 18047 | SpyCas9- | 90 | 0 |
| | | | | SpRY | | |
| 964 | CAAAGG | TTTGTTCAATCATTAAGAAGA | 18048 | cCas9-v17 | 90 | 0 |
| 965 | CAAAGG | TTTGTTCAATCATTAAGAAGA | 18049 | cCas9-v42 | 90 | 0 |
| 966 | CAAA | TTGTTCAATCATTAAGAAGA | 18050 | SpyCas9- | 90 | 0 |
| | | | | 3var-NRRH | | |
| 967 | CAAA | ttTGTTCAATCATTAAGAAGA | 18051 | iSpyMacCas9 | 90 | 0 |
| 968 | ACAAA | TTTTGTTCAATCATTAAGAAG | 18052 | SauCas9KKH | 91 | 0 |
| 969 | ACA | TTTGTTCAATCATTAAGAAG | 18053 | SpyCas9- | 91 | 0 |
| | | | | SpRY | | |
| 970 | GCC | CCTGGGAGGTGTCCACGTGA | 18054 | SpyCas9- | 91 | 0 |
| | | | | SpRY | | |
| 971 | ACAAAG | TTTTGTTCAATCATTAAGAAG | 18055 | cCas9-v17 | 91 | 0 |
| 972 | ACAAAG | TTTTGTTCAATCATTAAGAAG | 18056 | cCas9-v42 | 91 | 0 |
| 973 | GACAA | ATTTTGTTCAATCATTAAGAA | 18057 | SauCas9KKH | 92 | 0 |
| 974 | AG | TCCTGGGAGGTGTCCACGTG | 18058 | SpyCas9-NG | 92 | 0 |
| 975 | AG | TCCTGGGAGGTGTCCACGTG | 18059 | SpyCas9- | 92 | 0 |
| | | | | xCas | | |
| 976 | AG | TCCTGGGAGGTGTCCACGTG | 18060 | SpyCas9- | 92 | 0 |
| | | | | xCas-NG | | |
| 977 | GAC | TTTTGTTCAATCATTAAGAA | 18061 | SpyCas9- | 92 | 0 |
| | | | | SpRY | | |
| 978 | AGC | TCCTGGGAGGTGTCCACGTG | 18062 | SpyCas9-SpG | 92 | 0 |
| 979 | AGC | TCCTGGGAGGTGTCCACGTG | 18063 | SpyCas9- | 92 | 0 |
| | | | | SpRY | | |
| 980 | GACAAA | ATTTTGTTCAATCATTAAGAA | 18064 | cCas9-v17 | 92 | 0 |
| 981 | GACAAA | ATTTTGTTCAATCATTAAGAA | 18065 | cCas9-v42 | 92 | 0 |
| 982 | GACA | TTTTGTTCAATCATTAAGAA | 18066 | SpyCas9- | 92 | 0 |
| | | | | 3var-NRCH | | |
| 983 | AGCC | TCCTGGGAGGTGTCCACGTG | 18067 | SpyCas9- | 92 | 0 |
| | | | | 3var-NRCH | | |
| 984 | GAG | TTCCTGGGAGGTGTCCACGT | 18068 | ScaCas9 | 93 | 0 |
| 985 | GAG | TTCCTGGGAGGTGTCCACGT | 18069 | ScaCas9-HiFi- | 93 | 0 |
| | | | | Sc++ | | |
| 986 | GAG | TTCCTGGGAGGTGTCCACGT | 18070 | ScaCas9- | 93 | 0 |
| | | | | Sc++ | | |
| 987 | GAG | TTCCTGGGAGGTGTCCACGT | 18071 | SpyCas9- | 93 | 0 |
| | | | | SpRY | | |
| 988 | AG | ATTTTGTTCAATCATTAAGA | 18072 | SpyCas9-NG | 93 | 0 |
| 989 | AG | ATTTTGTTCAATCATTAAGA | 18073 | SpyCas9- | 93 | 0 |
| | | | | xCas | | |
| 990 | AG | ATTTTGTTCAATCATTAAGA | 18074 | SpyCas9- | 93 | 0 |
| | | | | xCas-NG | | |
| 991 | AGA | ATTTTGTTCAATCATTAAGA | 18075 | SpyCas9-SpG | 93 | 0 |
| 992 | AGA | ATTTTGTTCAATCATTAAGA | 18076 | SpyCas9- | 93 | 0 |
| | | | | SpRY | | |
| 993 | GAGCCTTG | cgctTCCTGGGAGGTGTCCACGT | 18077 | BlatCas9 | 93 | 0 |
| 994 | GAGCC | cgctTCCTGGGAGGTGTCCACGT | 18078 | BlatCas9 | 93 | 0 |
| 995 | GAGCCTT | GCTTCCTGGGAGGTGTCCACGT | 18079 | CdiCas9 | 93 | 0 |
| 996 | AGAC | ATTTTGTTCAATCATTAAGA | 18080 | SpyCas9- | 93 | 0 |
| | | | | 3var-NRRH | | |
| 997 | AGAC | ATTTTGTTCAATCATTAAGA | 18081 | SpyCas9-VQR | 93 | 0 |
| 998 | GAGC | TTCCTGGGAGGTGTCCACGT | 18082 | SpyCas9- | 93 | 0 |
| | | | | 3var-NRRH | | |
| 999 | AGACAA | ATTTTGTTCAATCATTAAGA | 18083 | St1Cas9- | 93 | 0 |
| | | | | CNRZ1066 | | |
| 1000 | TGAGCC | agCGCTTCCTGGGAGGTGTCCACG | 18084 | Nme2Cas9 | 94 | 0 |
| 1001 | TGAG | GCTTCCTGGGAGGTGTCCACG | 18085 | SauriCas9- | 94 | 0 |
| | | | | KKH | | |
| 1002 | TGAG | CTTCCTGGGAGGTGTCCACG | 18086 | SpyCas9-VQR | 94 | 0 |
| 1003 | AAG | TATTTTGTTCAATCATTAAG | 18087 | ScaCas9 | 94 | 0 |
| 1004 | AAG | TATTTTGTTCAATCATTAAG | 18088 | ScaCas9-HiFi- | 94 | 0 |
| | | | | Sc++ | | |
| 1005 | AAG | TATTTTGTTCAATCATTAAG | 18089 | ScaCas9- | 94 | 0 |
| | | | | Sc++ | | |
| 1006 | AAG | TATTTTGTTCAATCATTAAG | 18090 | SpyCas9- | 94 | 0 |
| | | | | SpRY | | |
| 1007 | TG | CTTCCTGGGAGGTGTCCACG | 18091 | SpyCas9-NG | 94 | 0 |
| 1008 | TG | CTTCCTGGGAGGTGTCCACG | 18092 | SpyCas9- | 94 | 0 |
| | | | | xCas | | |
| 1009 | TG | CTTCCTGGGAGGTGTCCACG | 18093 | SpyCas9- | 94 | 0 |
| | | | | xCas-NG | | |
| 1010 | TGA | CTTCCTGGGAGGTGTCCACG | 18094 | SpyCas9-SpG | 94 | 0 |
| 1011 | TGA | CTTCCTGGGAGGTGTCCACG | 18095 | SpyCas9- | 94 | 0 |
| | | | | SpRY | | |
| 1012 | AAGACAAA | tggtATTTTGTTCAATCATTAAG | 18096 | BlatCas9 | 94 | 0 |
| 1013 | AAGACAAA | tggtATTTTGTTCAATCATTAAG | 18097 | BlatCas9 | 94 | 0 |
| 1014 | AAGACAAA | tgGTATTTTGTTCAATCATTAAG | 18098 | GeoCas9 | 94 | 0 |
| 1015 | TGAGCCTT | gcgcTTCCTGGGAGGTGTCCACG | 18099 | BlatCas9 | 94 | 0 |
| 1016 | AAGAC | tggtATTTTGTTCAATCATTAAG | 18100 | BlatCas9 | 94 | 0 |
| 1017 | TGAGO | gcgcTTCCTGGGAGGTGTCCACG | 18101 | BlatCas9 | 94 | 0 |
| 1018 | AAGA | TATTTTGTTCAATCATTAAG | 18102 | SpyCas9- | 94 | 0 |
| | | | | 3var-NRRH | | |
| 1019 | GTGAG | agCGCTTCCTGGGAGGTGTCCAC | 18103 | SauCas9 | 95 | 0 |
| 1020 | GTGAG | CGCTTCCTGGGAGGTGTCCAC | 18104 | SauCas9KKH | 95 | 0 |
| 1021 | GAAGA | GGTATTTTGTTCAATCATTAA | 18105 | SauCas9KKH | 95 | 0 |
| 1022 | GAAG | GGTATTTTGTTCAATCATTAA | 18106 | SauriCas9- | 95 | 0 |
| | | | | KKH | | |
| 1023 | GAAG | GTATTTTGTTCAATCATTAA | 18107 | SpyCas9- | 95 | 0 |
| | | | | QQR1 | | |
| 1024 | GAAG | ggTATTTTGTTCAATCATTAA | 18108 | iSpyMacCas9 | 95 | 0 |
| 1025 | GTG | GCTTCCTGGGAGGTGTCCAC | 18109 | ScaCas9 | 95 | 0 |
| 1026 | GTG | GCTTCCTGGGAGGTGTCCAC | 18110 | ScaCas9-HiFi- | 95 | 0 |
| | | | | Sc++ | | |
| 1027 | GTG | GCTTCCTGGGAGGTGTCCAC | 18111 | ScaCas9- | 95 | 0 |
| | | | | Sc++ | | |
| 1028 | GTG | GCTTCCTGGGAGGTGTCCAC | 18112 | SpyCas9- | 95 | 0 |
| | | | | SpRY | | |
| 1029 | GAA | GTATTTTGTTCAATCATTAA | 18113 | SpyCas9- | 95 | 0 |
| | | | | SpRY | | |
| 1030 | GAA | GTATTTTGTTCAATCATTAA | 18114 | SpyCas9- | 95 | 0 |
| | | | | xCas | | |
| 1031 | GAAGAC | GGTATTTTGTTCAATCATTAA | 18115 | cCas9-v17 | 95 | 0 |
| 1032 | GAAGAC | GGTATTTTGTTCAATCATTAA | 18116 | cCas9-v42 | 95 | 0 |
| 1033 | GTGAGC | CGCTTCCTGGGAGGTGTCCAC | 18117 | cCas9-v17 | 95 | 0 |
| 1034 | GTGAGC | CGCTTCCTGGGAGGTGTCCAC | 18118 | cCas9-v42 | 95 | 0 |
| 1035 | AGAAG | TGGTATTTTGTTCAATCATTA | 18119 | SauCas9KKH | 96 | 0 |
| 1036 | CGTGA | GCGCTTCCTGGGAGGTGTCCA | 18120 | SauCas9KKH | 96 | 0 |
| 1037 | AG | GGTATTTTGTTCAATCATTA | 18121 | SpyCas9-NG | 96 | 0 |
| 1038 | AG | GGTATTTTGTTCAATCATTA | 18122 | SpyCas9- | 96 | 0 |
| | | | | xCas | | |
| 1039 | AG | GGTATTTTGTTCAATCATTA | 18123 | SpyCas9- | 96 | 0 |
| | | | | xCas-NG | | |
| 1040 | CG | CGCTTCCTGGGAGGTGTCCA | 18124 | SpyCas9-NG | 96 | 0 |
| 1041 | CG | CGCTTCCTGGGAGGTGTCCA | 18125 | SpyCas9- | 96 | 0 |
| | | | | xCas | | |
| 1042 | CG | CGCTTCCTGGGAGGTGTCCA | 18126 | SpyCas9- | 96 | 0 |
| | | | | xCas-NG | | |
| 1043 | AGA | GGTATTTTGTTCAATCATTA | 18127 | SpyCas9-SpG | 96 | 0 |
| 1044 | AGA | GGTATTTTGTTCAATCATTA | 18128 | SpyCas9- | 96 | 0 |
| | | | | SpRY | | |
| 1045 | CGT | CGCTTCCTGGGAGGTGTCCA | 18129 | SpyCas9-SpG | 96 | 0 |
| 1046 | CGT | CGCTTCCTGGGAGGTGTCCA | 18130 | SpyCas9- | 96 | 0 |
| | | | | SpRY | | |
| 1047 | AGAAGA | TGGTATTTTGTTCAATCATTA | 18131 | cCas9-v17 | 96 | 0 |
| 1048 | AGAAGA | TGGTATTTTGTTCAATCATTA | 18132 | cCas9-v42 | 96 | 0 |
| 1049 | AGAAGACA | acttGGTATTTTGTTCAATCATTA | 18133 | NmeCas9 | 96 | 0 |
| 1050 | AGAA | GGTATTTTGTTCAATCATTA | 18134 | SpyCas9- | 96 | 0 |
| | | | | 3var-NRRH | | |
| 1051 | AGAA | GGTATTTTGTTCAATCATTA | 18135 | SpyCas9-VQR | 96 | 0 |
| 1052 | AAGAA | acTTGGTATTTTGTTCAATCATT | 18136 | SauCas9 | 97 | 0 |
| 1053 | AAGAA | TTGGTATTTTGTTCAATCATT | 18137 | SauCas9KKH | 97 | 0 |
| 1054 | AAG | TGGTATTTTGTTCAATCATT | 18138 | ScaCas9 | 97 | 0 |
| 1055 | AAG | TGGTATTTTGTTCAATCATT | 18139 | ScaCas9-HiFi- | 97 | 0 |
| | | | | Sc++ | | |
| 1056 | AAG | TGGTATTTTGTTCAATCATT | 18140 | ScaCas9- | 97 | 0 |
| | | | | Sc++ | | |
| 1057 | AAG | TGGTATTTTGTTCAATCATT | 18141 | SpyCas9- | 97 | 0 |
| | | | | SpRY | | |
| 1058 | ACG | GCGCTTCCTGGGAGGTGTCC | 18142 | ScaCas9 | 97 | 0 |
| 1059 | ACG | GCGCTTCCTGGGAGGTGTCC | 18143 | ScaCas9-HiFi- | 97 | 0 |
| | | | | Sc++ | | |
| 1060 | ACG | GCGCTTCCTGGGAGGTGTCC | 18144 | ScaCas9- | 97 | 0 |
| | | | | Sc++ | | |
| 1061 | ACG | GCGCTTCCTGGGAGGTGTCC | 18145 | SpyCas9- | 97 | 0 |
| | | | | SpRY | | |
| 1062 | AAGAAG | TTGGTATTTTGTTCAATCATT | 18146 | cCas9-v17 | 97 | 0 |
| 1063 | AAGAAG | TTGGTATTTTGTTCAATCATT | 18147 | cCas9-v42 | 97 | 0 |
| 1064 | AAGA | TGGTATTTTGTTCAATCATT | 18148 | SpyCas9- | 97 | 0 |
| | | | | 3var-NRRH | | |
| 1065 | TAAGA | CTTGGTATTTTGTTCAATCAT | 18149 | SauCas9KKH | 98 | 0 |
| 1066 | TAAG | CTTGGTATTTTGTTCAATCAT | 18150 | SauriCas9- | 98 | 0 |
| | | | | KKH | | |
| 1067 | TAAG | TTGGTATTTTGTTCAATCAT | 18151 | SpyCas9- | 98 | 0 |
| | | | | QQR1 | | |
| 1068 | TAAG | ctTGGTATTTTGTTCAATCAT | 18152 | iSpyMacCas9 | 98 | 0 |
| 1069 | TAA | TTGGTATTTTGTTCAATCAT | 18153 | SpyCas9- | 98 | 0 |
| | | | | SpRY | | |
| 1070 | CAC | AGCGCTTCCTGGGAGGTGTC | 18154 | SpyCas9- | 98 | 0 |
| | | | | SpRY | | |
| 1071 | CACGTG | GAGCGCTTCCTGGGAGGTGTC | 18155 | cCas9-v16 | 98 | 0 |
| 1072 | CACGTG | GAGCGCTTCCTGGGAGGTGTC | 18156 | cCas9-v21 | 98 | 0 |
| 1073 | TAAGAA | CTTGGTATTTTGTTCAATCAT | 18157 | cCas9-v17 | 98 | 0 |
| 1074 | TAAGAA | CTTGGTATTTTGTTCAATCAT | 18158 | cCas9-v42 | 98 | 0 |
| 1075 | TTAAG | ACTTGGTATTTTGTTCAATCA | 18159 | SauCas9KKH | 99 | 0 |
| 1076 | TTA | CTTGGTATTTTGTTCAATCA | 18160 | SpyCas9- | 99 | 0 |
| | | | | SpRY | | |
| 1077 | CCA | GAGCGCTTCCTGGGAGGTGT | 18161 | SpyCas9- | 99 | 0 |
| | | | | SpRY | | |
| 1078 | TTAAGA | ACTTGGTATTTTGTTCAATCA | 18162 | cCas9-v17 | 99 | 0 |
| 1079 | TTAAGA | ACTTGGTATTTTGTTCAATCA | 18163 | cCas9-v42 | 99 | 0 |
| 1080 | ATTAA | GACTTGGTATTTTGTTCAATC | 18164 | SauCas9KKH | 100 | 0 |
| 1081 | ATT | ACTTGGTATTTTGTTCAATC | 18165 | SpyCas9- | 100 | 0 |
| | | | | SpRY | | |
| 1082 | TCC | TGAGCGCTTCCTGGGAGGTG | 18166 | SpyCas9- | 100 | 0 |
| | | | | SpRY | | |
| 1083 | TCCACGTG | gagtGAGCGCTTCCTGGGAGGTG | 18167 | BlatCas9 | 100 | 0 |
| 1084 | TCCAC | gagtGAGCGCTTCCTGGGAGGTG | 18168 | BlatCas9 | 100 | 0 |

In the exemplary template sequences provided herein, capital letters indicate “core nucleotides” while lower case letters indicate “flanking nucleotides.” Herein, when an RNA sequence (e.g., a template RNA sequence) is said to comprise a particular sequence (e.g., a sequence of Table 1 or a portion thereof) that comprises thymine (T), it is of course understood that the RNA sequence may (and frequently does) comprise uracil (U) in place of T. For instance, the RNA sequence may comprise U at every position shown as T in the sequence in Table 1. More specifically, the present disclosure provides an RNA sequence according to every gRNA spacer sequence shown in Table 1, wherein the RNA sequence has a U in place of each T in the sequence in Table 1.

[0522] In some embodiments of the systems and methods herein, the heterologous object sequence comprises the core nucleotides of an RT template sequence from Table 3. In some embodiments, the heterologous object sequence additionally comprises one or more (e.g., 2, 3, 4, 5, 10, 20, 30, 40, or all) consecutive nucleotides starting with the 3′ end of the flanking nucleotides of the RT template sequence. In some embodiments, the heterologous object sequence comprises the core nucleotides of the RT template sequence of Table 3 that corresponds to the gRNA spacer sequence. In the context of the sequence tables, a first component “corresponds to” a second component when both components have the same ID number in the referenced table. For example, for a gRNA spacer of ID #1, the corresponding RT template would be the RT template also having ID #1. In some embodiments, the heterologous object sequence additionally comprises one or more consecutive nucleotides starting with the 3′ end of the flanking nucleotides of the RT template sequence.

[0523] In some embodiments, the primer binding site (PBS) sequence has a sequence comprising the core nucleotides of a PBS sequence from the same row of Table 3 as the RT template sequence. In some embodiments, the PBS sequence additionally comprises one or more (e.g., 1, 2, 3, 4, 5, 6, 7, or all) consecutive nucleotides starting with the 5′ end of the flanking nucleotides of the primer region.

TABLE 3
Exemplary RT sequence (heterologous object sequence) and PBS sequence pairs
Table 3 provides exemplified PBS sequences and heterologous object
sequences (reverse transcription template regions) of a template RNA
for correcting the pathogenic E342K mutation in SERPINA1. The gRNA
spacers from Table 1 were filtered, e.g., filtered by occurrence within
15 nt of the desired editing location and use of a Tier 1 Cas enzyme.
PBS sequences and heterologous object sequences (reverse transcription
template regions) were designed relative to the nick site directed by
the cognate gRNA from Table 1, as described in this application. For
exemplification, these regions were designed to be 8-17 nt (priming)
and 1-50 nt extended beyond the location of the edit (RT). Without
wishing to be limited by example, given variability of length, se-
quences are provided that use the maximum length parameters and
comprise all templates of shorter length within the given parameters.
Sequences are shown with uppercase letters indicating core sequence
and lowercase letters indicating flanking sequence that may be
truncated within the described length parameters.

| | | SEQ | | SEQ |
|---|---|---|---|---|
| | | ID | PBS | ID |
| ID | RT template sequence | NO | sequence | NO |
| 1 | catgggtatggcctctaaaaacatggccccagcagcttcagtccctttcTC | 18169 | GTCGATGGtca | 18320 |
| | | | gcacag | |
| 2 | catgggtatggcctctaaaaacatggccccagcagcttcagtccctttcTC | 18170 | GTCGATGGtca | 18321 |
| | | | gcacag | |
| 5 | catgggtatggcctctaaaaacatggccccagcagcttcagtccctttcTC | 18171 | GTCGATGGtca | 18322 |
| | | | gcacag | |
| 8 | catgggtatggcctctaaaaacatggccccagcagcttcagtccctttcTC | 18172 | TCGATGGTcag | 18323 |
| | G | | cacagc | |
| 11 | tctgcttctctcccctccaggccgtgcataaggctgtgctgaccatcgaCG | 18173 | GAAAGGGActg | 18324 |
| | A | | aagctg | |
| 12 | tctgcttctctcccctccaggccgtgcataaggctgtgctgaccatcgaCG | 18174 | GAAAGGGActg | 18325 |
| | A | | aagctg | |
| 13 | catgggtatggcctctaaaaacatggccccagcagcttcagtccctttcTC | 18175 | TCGATGGTcag | 18326 |
| | G | | cacagc | |
| 19 | catgggtatggcctctaaaaacatggccccagcagcttcagtccctttcTC | 18176 | CGATGGTCagc | 18327 |
| | GT | | acagcc | |
| 20 | tctgcttctctcccctccaggccgtgcataaggctgtgctgaccatcgaCG | 18177 | AAAGGGACtga | 18328 |
| | AG | | agctgc | |
| 21 | tctgcttctctcccctccaggccgtgcataaggctgtgctgaccatcgaCG | 18178 | AAAGGGACtga | 18329 |
| | AG | | agctgc | |
| 24 | catgggtatggcctctaaaaacatggccccagcagcttcagtccctttcTC | 18179 | CGATGGTCagc | 18330 |
| | GT | | acagcc | |
| 28 | catgggtatggcctctaaaaacatggccccagcagcttcagtccctttcTC | 18180 | CGATGGTCagc | 18331 |
| | GT | | acagcc | |
| 29 | tctgcttctctcccctccaggccgtgcataaggctgtgctgaccatcgaCG | 18181 | AAAGGGACtga | 18332 |
| | AG | | agctgc | |
| 34 | catgggtatggcctctaaaaacatggccccagcagcttcagtccctttcTC | 18182 | GATGGTCAgca | 18333 |
| | GTC | | cagcct | |
| 35 | catgggtatggcctctaaaaacatggccccagcagcttcagtccctttcTC | 18183 | GATGGTCAgca | 18334 |
| | GTC | | cagcct | |
| 38 | catgggtatggcctctaaaaacatggccccagcagcttcagtccctttcTC | 18184 | GATGGTCAgca | 18335 |
| | GTC | | cagcct | |
| 39 | catgggtatggcctctaaaaacatggccccagcagcttcagtccctttcTC | 18185 | GATGGTCAgca | 18336 |
| | GTC | | cagcct | |
| 40 | tctgcttctctcccctccaggccgtgcataaggctgtgctgaccatcgaCG | 18186 | AAGGGACTgaa | 18337 |
| | AGA | | gctgct | |
| 44 | tctgcttctctcccctccaggccgtgcataaggctgtgctgaccatcgaCG | 18187 | AAGGGACTgaa | 18338 |
| | AGA | | gctgct | |
| 50 | catgggtatggcctctaaaaacatggccccagcagcttcagtccctttcTC | 18188 | ATGGTCAGcac | 18339 |
| | GTCG | | agcctt | |
| 51 | catgggtatggcctctaaaaacatggccccagcagcttcagtccctttcTC | 18189 | ATGGTCAGcac | 18340 |
| | GTCG | | agcctt | |
| 56 | tctgcttctctcccctccaggccgtgcataaggctgtgctgaccatcgaCG | 18190 | AGGGACTGaag | 18341 |
| | AGAA | | ctgctg | |
| 57 | tctgcttctctcccctccaggccgtgcataaggctgtgctgaccatcgaCG | 18191 | AGGGACTGaag | 18342 |
| | AGAA | | ctgctg | |
| 58 | catgggtatggcctctaaaaacatggccccagcagcttcagtccctttcTC | 18192 | ATGGTCAGcac | 18343 |
| | GTCG | | agcctt | |
| 59 | catgggtatggcctctaaaaacatggccccagcagcttcagtccctttcTC | 18193 | ATGGTCAGcac | 18344 |
| | GTCG | | agcctt | |
| 60 | tctgcttctctcccctccaggccgtgcataaggctgtgctgaccatcgaCG | 18194 | AGGGACTGaag | 18345 |
| | AGAA | | ctgctg | |
| 61 | tctgcttctctcccctccaggccgtgcataaggctgtgctgaccatcgaCG | 18195 | AGGGACTGaag | 18346 |
| | AGAA | | ctgctg | |
| 64 | catgggtatggcctctaaaaacatggccccagcagcttcagtccctttcTC | 18196 | TGGTCAGCaca | 18347 |
| | GTCGA | | gcctta | |
| 65 | tctgcttctctcccctccaggccgtgcataaggctgtgctgaccatcgaCG | 18197 | GGGACTGAagc | 18348 |
| | AGAAA | | tgctgg | |
| 66 | catgggtatggcctctaaaaacatggccccagcagcttcagtccctttcTC | 18198 | TGGTCAGCaca | 18349 |
| | GTCGA | | gcctta | |
| 69 | catgggtatggcctctaaaaacatggccccagcagcttcagtccctttcTC | 18199 | GGTCAGCAcag | 18350 |
| | GTCGAT | | ccttat | |
| 70 | catgggtatggcctctaaaaacatggccccagcagcttcagtccctttcTC | 18200 | GGTCAGCAcag | 18351 |
| | GTCGAT | | ccttat | |
| 71 | tctgcttctctcccctccaggccgtgcataaggctgtgctgaccatcgaCG | 18201 | GGACTGAAgct | 18352 |
| | AGAAAG | | gctggg | |
| 75 | catgggtatggcctctaaaaacatggccccagcagcttcagtccctttcTC | 18202 | GTCAGCACagc | 18353 |
| | GTCGATG | | cttatg | |
| 79 | catgggtatggcctctaaaaacatggccccagcagcttcagtccctttcTC | 18203 | GTCAGCACagc | 18354 |
| | GTCGATG | | cttatg | |
| 80 | tctgcttctctcccctccaggccgtgcataaggctgtgctgaccatcgaCG | 18204 | GACTGAAGctg | 18355 |
| | AGAAAGG | | ctgggg | |
| 86 | catgggtatggcctctaaaaacatggccccagcagcttcagtccctttcTC | 18205 | TCAGCACAgcc | 18356 |
| | GTCGATGG | | ttatgc | |
| 87 | catgggtatggcctctaaaaacatggccccagcagcttcagtccctttcTC | 18206 | TCAGCACAgcc | 18357 |
| | GTCGATGG | | ttatgc | |
| 88 | tctgcttctctcccctccaggccgtgcataaggctgtgctgaccatcgaCG | 18207 | ACTGAAGCtgc | 18358 |
| | AGAAAGGG | | tggggc | |
| 89 | catgggtatggcctctaaaaacatggccccagcagcttcagtccctttcTC | 18208 | TCAGCACAgcc | 18359 |
| | GTCGATGG | | ttatgc | |
| 90 | catgggtatggcctctaaaaacatggccccagcagcttcagtccctttcTC | 18209 | TCAGCACAgcc | 18360 |
| | GTCGATGG | | ttatgc | |
| 91 | catgggtatggcctctaaaaacatggccccagcagcttcagtccctttcTC | 18210 | CAGCACAGcct | 18361 |
| | GTCGATGGT | | tatgca | |
| 92 | tctgcttctctcccctccaggccgtgcataaggctgtgctgaccatcgaCG | 18211 | CTGAAGCTgct | 18362 |
| | AGAAAGGGA | | ggggcc | |
| 93 | catgggtatggcctctaaaaacatggccccagcagcttcagtccctttcTC | 18212 | CAGCACAGcct | 18363 |
| | GTCGATGGT | | tatgca | |
| 94 | tctgcttctctcccctccaggccgtgcataaggctgtgctgaccatcgaCG | 18213 | CTGAAGCTgct | 18364 |
| | AGAAAGGGA | | ggggcc | |
| 95 | tctgcttctctcccctccaggccgtgcataaggctgtgctgaccatcgaCG | 18214 | CTGAAGCTgct | 18365 |
| | AGAAAGGGA | | ggggcc | |
| 98 | catgggtatggcctctaaaaacatggccccagcagcttcagtccctttcTC | 18215 | AGCACAGCctt | 18366 |
| | GTCGATGGTC | | atgcac | |
| 99 | tctgcttctctcccctccaggccgtgcataaggctgtgctgaccatcgaCG | 18216 | TGAAGCTGctg | 18367 |
| | AGAAAGGGAC | | gggcca | |
| 102 | tctgcttctctcccctccaggccgtgcataaggctgtgctgaccatcgaCG | 18217 | GAAGCTGCtgg | 18368 |
| | AGAAAGGGACT | | ggccat | |
| 103 | catgggtatggcctctaaaaacatggccccagcagcttcagtccctttcTC | 18218 | GCACAGCCtta | 18369 |
| | GTCGATGGTCA | | tgcacg | |
| 104 | catgggtatggcctctaaaaacatggccccagcagcttcagtccctttcTC | 18219 | GCACAGCCtta | 18370 |
| | GTCGATGGTCA | | tgcacg | |
| 105 | tctgcttctctcccctccaggccgtgcataaggctgtgctgaccatcgaCG | 18220 | AAGCTGCTggg | 18371 |
| | AGAAAGGGACTG | | gccatg | |
| 106 | catgggtatggcctctaaaaacatggccccagcagcttcagtccctttcTC | 18221 | CACAGCCTtat | 18372 |
| | GTCGATGGTCAG | | gcacgg | |
| 107 | catgggtatggcctctaaaaacatggccccagcagcttcagtccctttcTC | 18222 | ACAGCCTTatg | 18373 |
| | GTCGATGGTCAGC | | cacggc | |
| 108 | tctgcttctctcccctccaggccgtgcataaggctgtgctgaccatcgaCG | 18223 | AGCTGCTGggg | 18374 |
| | AGAAAGGGACTGA | | ccatgt | |
| 109 | tctgcttctctcccctccaggccgtgcataaggctgtgctgaccatcgaCG | 18224 | AGCTGCTGggg | 18375 |
| | AGAAAGGGACTGA | | ccatgt | |
| 110 | tctgcttctctcccctccaggccgtgcataaggctgtgctgaccatcgaCG | 18225 | AGCTGCTGggg | 18376 |
| | AGAAAGGGACTGA | | ccatgt | |
| 112 | tctgcttctctcccctccaggccgtgcataaggctgtgctgaccatcgaCG | 18226 | GCTGCTGGggc | 18377 |
| | AGAAAGGGACTGAA | | catgtt | |
| 113 | tctgcttctctcccctccaggccgtgcataaggctgtgctgaccatcgaCG | 18227 | GCTGCTGGggc | 18378 |
| | AGAAAGGGACTGAA | | catgtt | |
| 116 | catgggtatggcctctaaaaacatggccccagcagcttcagtccctttcTC | 18228 | CAGCCTTAtgc | 18379 |
| | GTCGATGGTCAGCA | | acggcc | |
| 120 | tctgcttctctcccctccaggccgtgcataaggctgtgctgaccatcgaCG | 18229 | GCTGCTGGggc | 18380 |
| | CAGAAAGGGATGAA | | catgtt | |
| 122 | catgggtatggcctctaaaaacatggccccagcagcttcagtccctttcTC | 18230 | CAGCCTTAtgc | 18381 |
| | GTCGATGGTCAGCA | | acggcc | |
| 123 | tctgcttctctcccctccaggccgtgcataaggctgtgctgaccatcgaCG | 18231 | GCTGCTGGggc | 18382 |
| | AGAAAGGGACTGAA | | catgtt | |
| 124 | tctgcttctctcccctccaggccgtgcataaggctgtgctgaccatcgaCG | 18232 | GCTGCTGGggc | 18383 |
| | AGAAAGGGACTGAA | | catgtt | |
| 125 | catgggtatggcctctaaaaacatggccccagcagcttcagtccctttcTC | 18233 | CAGCCTTAtgc | 18384 |
| | GTCGATGGTCAGCA | | acggcc | |
| 130 | tctgcttctctcccctccaggccgtgcataaggctgtgctgaccatcgaCG | 18234 | CTGCTGGGgcc | 18385 |
| | AGAAAGGGACTGAAG | | atgttt | |
| 131 | catgggtatggcctctaaaaacatggccccagcagcttcagtccctttcTC | 18235 | AGCCTTATgca | 18386 |
| | GTCGATGGTCAGCAC | | cggcct | |
| 134 | tctgcttctctcccctccaggccgtgcataaggctgtgctgaccatcgaCG | 18236 | CTGCTGGGgcc | 18387 |
| | AGAAAGGGACTGAAG | | atgttt | |
| 135 | tctgcttctctcccctccaggccgtgcataaggctgtgctgaccatcgaCG | 18237 | CTGCTGGGgcc | 18388 |
| | AGAAAGGGACTGAAG | | atgttt | |
| 138 | catgggtatggcctctaaaaacatggccccagcagcttcagtccctttcTC | 18238 | AGCCTTATgca | 18389 |
| | GTCGATGGTCAGCAC | | cggcct | |
| 139 | catgggtatggcctctaaaaacatggccccagcagcttcagtccctttcTC | 18239 | AGCCTTATgca | 18390 |
| | GTCGATGGTCAGCAC | | cggcct | |
| 140 | catgggtatggcctctaaaaacatggccccagcagcttcagtccctttcTC | 18240 | AGCCTTATgca | 18391 |
| | GTCGATGGTCAGCAC | | cggcct | |
| 141 | tctgcttctctcccctccaggccgtgcataaggctgtgctgaccatcgaCG | 18241 | CTGCTGGGgcc | 18392 |
| | AGAAAGGGACTGAAG | | atgttt | |
| 142 | catgggtatggcctctaaaaacatggccccagcagcttcagtccctttcTC | 18242 | AGCCTTATgca | 18393 |
| | GTCGATGGTCAGCAC | | cggcct | |
| 145 | catgggtatggcctctaaaaacatggccccagcagcttcagtccctttcTC | 18243 | GCCTTATGcac | 18394 |
| | GTCGATGGTCAGCACA | | ggcctg | |
| 146 | tctgcttctctcccctccaggccgtgcataaggctgtgctgaccatcgaCG | 18244 | TGCTGGGGcca | 18395 |
| | AGAAAGGGACTGAAGC | | tgtttt | |
| 147 | tctgcttctctcccctccaggccgtgcataaggctgtgctgaccatcgaCG | 18245 | TGCTGGGGcca | 18396 |
| | AGAAAGGGACTGAAGC | | tgtttt | |
| 148 | catgggtatggcctctaaaaacatggccccagcagcttcagtccctttcTC | 18246 | GCCTTATGcac | 18397 |
| | GTCGATGGTCAGCACA | | ggcctg | |
| 149 | tctgcttctctcccctccaggccgtgcataaggctgtgctgaccatcgaCG | 18247 | GCTGGGGCcat | 18398 |
| | AGAAAGGGACTGAAGCT | | gttttt | |
| 150 | tctgcttctctcccctccaggccgtgcataaggctgtgctgaccatcgaCG | 18248 | GCTGGGGCcat | 18399 |
| | AGAAAGGGACTGAAGCT | | gttttt | |
| 153 | catgggtatggcctctaaaaacatggccccagcagcttcagtccctttcTC | 18249 | CCTTATGCacg | 18400 |
| | GTCGATGGTCAGCACAG | | gcctgg | |
| 157 | catgggtatggcctctaaaaacatggccccagcagcttcagtccctttcTC | 18250 | CCTTATGCacg | 18401 |
| | GTCGATGGTCAGCACAG | | gcctgg | |
| 158 | tctgcttctctcccctccaggccgtgcataaggctgtgctgaccatcgaCG | 18251 | GCTGGGGCcat | 18402 |
| | AGAAAGGGACTGAAGCT | | gttttt | |
| 162 | catgggtatggcctctaaaaacatggccccagcagcttcagtccctttcTC | 18252 | CTTATGCAcgg | 18403 |
| | GTCGATGGTCAGCACAGC | | cctgga | |
| 163 | catgggtatggcctctaaaaacatggccccagcagcttcagtccctttcTC | 18253 | CTTATGCAcgg | 18404 |
| | GTCGATGGTCAGCACAGC | | cctgga | |
| 164 | tctgcttctctcccctccaggccgtgcataaggctgtgctgaccatcgaCG | 18254 | CTGGGGCCatg | 18405 |
| | AGAAAGGGACTGAAGCTG | | ttttta | |
| 165 | catgggtatggcctctaaaaacatggccccagcagcttcagtccctttcTC | 18255 | TTATGCACggc | 18406 |
| | GTCGATGGTCAGCACAGCC | | ctggag | |
| 169 | catgggtatggcctctaaaaacatggccccagcagcttcagtccctttcTC | 18256 | TTATGCACggc | 18407 |
| | GTCGATGGTCAGCACAGCC | | ctggag | |
| 170 | tctgcttctctcccctccaggccgtgcataaggctgtgctgaccatcgaCG | 18257 | TGGGGCCAtgt | 18408 |
| | AGAAAGGGACTGAAGCTGC | | ttttag | |
| 171 | tctgcttctctcccctccaggccgtgcataaggctgtgctgaccatcgaCG | 18258 | TGGGGCCAtgt | 18409 |
| | AGAAAGGGACTGAAGCTGC | | ttttag | |
| 172 | catgggtatggcctctaaaaacatggccccagcagcttcagtccctttcTC | 18259 | TTATGCACggc | 18410 |
| | GTCGATGGTCAGCACAGCC | | ctggag | |
| 173 | tctgcttctctcccctccaggccgtgcataaggctgtgctgaccatcgaCG | 18260 | TGGGGCCAtgt | 18411 |
| | AGAAAGGGACTGAAGCTGC | | ttttag | |
| 174 | catgggtatggcctctaaaaacatggccccagcagcttcagtccctttcTC | 18261 | TTATGCACggc | 18412 |
| | GTCGATGGTCAGCACAGCC | | ctggag | |
| 177 | catgggtatggcctctaaaaacatggccccagcagcttcagtccctttcTC | 18262 | TATGCACGgcc | 18413 |
| | TGTCGATGGCAGCACAGCCT | | tggagg | |
| 178 | catgggtatggcctctaaaaacatggccccagcagcttcagtccctttcTC | 18263 | TATGCACGgcc | 18414 |
| | GTCGATGGTCAGCACAGCCT | | tggagg | |
| 179 | tctgcttctctcccctccaggccgtgcataaggctgtgctgaccatcgaCG | 18264 | GGGGCCATgtt | 18415 |
| | AGAAAGGGACTGAAGCTGCT | | tttaga | |
| 183 | tctgcttctctcccctccaggccgtgcataaggctgtgctgaccatcgaCG | 18265 | GGGGCCATgtt | 18416 |
| | AGAAAGGGACTGAAGCTGCT | | tttaga | |
| 187 | tctgcttctctcccctccaggccgtgcataaggctgtgctgaccatcgaCG | 18266 | GGGCCATGttt | 18417 |
| | AGAAAGGGACTGAAGCTGCTG | | ttagag | |
| 188 | tctgcttctctcccctccaggccgtgcataaggctgtgctgaccatcgaCG | 18267 | GGGCCATGttt | 18418 |
| | AGAAAGGGACTGAAGCTGCTG | | ttagag | |
| 189 | catgggtatggcctctaaaaacatggccccagcagcttcagtccctttcTC | 18268 | ATGCACGGcct | 18419 |
| | GTCGATGGTCAGCACAGCCTT | | ggaggg | |
| 192 | tctgcttctctcccctccaggccgtgcataaggctgtgctgaccatcgaCG | 18269 | GGCCATGTttt | 18420 |
| | AGAAAGGGACTGAAGCTGCTGG | | tagagg | |
| 193 | catgggtatggcctctaaaaacatggccccagcagcttcagtccctttcTC | 18270 | TGCACGGCctg | 18421 |
| | GTCGATGGTCAGCACAGCCTTA | | gagggg | |
| 197 | catgggtatggcctctaaaaacatggccccagcagcttcagtccctttcTC | 18271 | TGCACGGCctg | 18422 |
| | GTCGATGGTCAGCACAGCCTTA | | gagggg | |
| 198 | tctgcttctctcccctccaggccgtgcataaggctgtgctgaccatcgaCG | 18272 | GGCCATGTttt | 18423 |
| | AGAAAGGGACTGAAGCTGCTGG | | tagagg | |
| 199 | tctgcttctctcccctccaggccgtgcataaggctgtgctgaccatcgaCG | 18273 | GGCCATGTttt | 18424 |
| | AGAAAGGGACTGAAGCTGCTGG | | tagagg | |
| 203 | tctgcttctctcccctccaggccgtgcataaggctgtgctgaccatcgaCG | 18274 | GCCATGTTttt | 18425 |
| | CAGAAAGGGATGAAGCTGCTGGG | | agaggc | |
| 206 | catgggtatggcctctaaaaacatggccccagcagcttcagtccctttcTC | 18275 | GCACGGCCtgg | 18426 |
| | GTCGATGGTCAGCACAGCCTTAT | | agggga | |
| 207 | catgggtatggcctctaaaaacatggccccagcagcttcagtccctttcTC | 18276 | GCACGGCCtgg | 18427 |
| | GTCGATGGTCAGCACAGCCTTAT | | agggga | |
| 210 | catgggtatggcctctaaaaacatggccccagcagcttcagtccctttcTC | 18277 | GCACGGCCtgg | 18428 |
| | GTCGATGGTCAGCACAGCCTTAT | | agggga | |
| 211 | tctgcttctctcccctccaggccgtgcataaggctgtgctgaccatcgaCG | 18278 | GCCATGTTttt | 18429 |
| | AGAAAGGGACTGAAGCTGCTGGG | | agaggc | |
| 214 | catgggtatggcctctaaaaacatggccccagcagcttcagtccctttcTC | 18279 | GCACGGCCtgg | 18430 |
| | GTCGATGGTCAGCACAGCCTTAT | | agggga | |
| 218 | tctgcttctctcccctccaggccgtgcataaggctgtgctgaccatcgaCG | 18280 | GCCATGTTttt | 18431 |
| | AGAAAGGGACTGAAGCTGCTGGG | | agaggc | |
| 224 | catgggtatggcctctaaaaacatggccccagcagcttcagtccctttcTC | 18281 | CACGGCCTgga | 18432 |
| | GTCGATGGTCAGCACAGCCTTATG | | ggggag | |
| 225 | catgggtatggcctctaaaaacatggccccagcagcttcagtccctttcTC | 18282 | CACGGCCTgga | 18433 |
| | GTCGATGGTCAGCACAGCCTTATG | | ggggag | |
| 228 | tctgcttctctcccctccaggccgtgcataaggctgtgctgaccatcgaCG | 18283 | CCATGTTTtta | 18434 |
| | AGAAAGGGACTGAAGCTGCTGGGG | | gaggcc | |
| 229 | tctgcttctctcccctccaggccgtgcataaggctgtgctgaccatcgaCG | 18284 | CCATGTTTtta | 18435 |
| | AGAAAGGGACTGAAGCTGCTGGGG | | gaggcc | |
| 232 | catgggtatggcctctaaaaacatggccccagcagcttcagtccctttcTC | 18285 | CACGGCCTgga | 18436 |
| | GTCGATGGTCAGCACAGCCTTATG | | ggggag | |
| 233 | catgggtatggcctctaaaaacatggccccagcagcttcagtccctttcTC | 18286 | CACGGCCTgga | 18437 |
| | GTCGATGGTCAGCACAGCCTTATG | | ggggag | |
| 234 | catgggtatggcctctaaaaacatggccccagcagcttcagtccctttcTC | 18287 | CACGGCCTgga | 18438 |
| | GTCGATGGTCAGCACAGCCTTATG | | ggggag | |
| 235 | catgggtatggcctctaaaaacatggccccagcagcttcagtccctttcTC | 18288 | CACGGCCTgga | 18439 |
| | GTCGATGGTCAGCACAGCCTTATG | | ggggag | |
| 239 | catgggtatggcctctaaaaacatggccccagcagcttcagtccctttcTC | 18289 | ACGGCCTGgag | 18440 |
| | GTCGATGGTCAGCACAGCCTTATGC | | gggaga | |
| 240 | tctgcttctctcccctccaggccgtgcataaggctgtgctgaccatcgaCG | 18290 | CATGTTTTtag | 18441 |
| | AGAAAGGGACTGAAGCTGCTGGGGC | | aggcca | |
| 241 | catgggtatggcctctaaaaacatggccccagcagcttcagtccctttcTC | 18291 | ACGGCCTGgag | 18442 |
| | GTCGATGGTCAGCACAGCCTTATGC | | gggaga | |
| 244 | catgggtatggcctctaaaaacatggccccagcagcttcagtccctttcTC | 18292 | ACGGCCTGgag | 18443 |
| | GTCGATGGTCAGCACAGCCTTATGC | | gggaga | |
| 245 | tctgcttctctcccctccaggccgtgcataaggctgtgctgaccatcgaCG | 18293 | CATGTTTTtag | 18444 |
| | AGAAAGGGACTGAAGCTGCTGGGGC | | aggcca | |
| 246 | tctgcttctctcccctccaggccgtgcataaggctgtgctgaccatcgaCG | 18294 | CATGTTTTtag | 18445 |
| | AGAAAGGGACTGAAGCTGCTGGGGC | | aggcca | |
| 249 | tctgcttctctcccctccaggccgtgcataaggctgtgctgaccatcgaCG | 18295 | ATGTTTTTaga | 18446 |
| | AGAAAGGGACTGAAGCTGCTGGGGCC | | ggccat | |
| 250 | catgggtatggcctctaaaaacatggccccagcagcttcagtccctttcTC | 18296 | CGGCCTGGagg | 18447 |
| | GTCGATGGTCAGCACAGCCTTATGCA | | ggagag | |
| 251 | tctgcttctctcccctccaggccgtgcataaggctgtgctgaccatcgaCG | 18297 | ATGTTTTTaga | 18448 |
| | AGAAAGGGACTGAAGCTGCTGGGGCC | | ggccat | |
| 252 | catgggtatggcctctaaaaacatggccccagcagcttcagtccctttcTC | 18298 | CGGCCTGGagg | 18449 |
| | GTCGATGGTCAGCACAGCCTTATGCA | | ggagag | |
| 257 | catgggtatggcctctaaaaacatggccccagcagcttcagtccctttcTC | 18299 | GGCCTGGAggg | 18450 |
| | GTCGATGGTCAGCACAGCCTTATGCAC | | gagaga | |
| 258 | catgggtatggcctctaaaaacatggccccagcagcttcagtccctttcTC | 18300 | GGCCTGGAggg | 18451 |
| | GTCGATGGTCAGCACAGCCTTATGCAC | | gagaga | |
| 259 | tctgcttctctcccctccaggccgtgcataaggctgtgctgaccatcgaCG | 18301 | TGTTTTTAgag | 18452 |
| | CAGAAAGGGATGAAGCTGCTGGGGCCA | | gccata | |
| 261 | tctgcttctctcccctccaggccgtgcataaggctgtgctgaccatcgaCG | 18302 | GTTTTTAGagg | 18453 |
| | AGAAAGGGACTGAAGCTGCTGGGGCCAT | | ccatac | |
| 262 | catgggtatggcctctaaaaacatggccccagcagcttcagtccctttcTC | 18303 | GCCTGGAGggg | 18454 |
| | GTCGATGGTCAGCACAGCCTTATGCACG | | agagaa | |
| 263 | tctgcttctctcccctccaggccgtgcataaggctgtgctgaccatcgaCG | 18304 | GTTTTTAGagg | 18455 |
| | AGAAAGGGACTGAAGCTGCTGGGGCCAT | | ccatac | |
| 264 | tctgcttctctcccctccaggccgtgcataaggctgtgctgaccatcgaCG | 18305 | TTTTTAGAggc | 18456 |
| | AGAAAGGGACTGAAGCTGCTGGGGCCATG | | catacc | |
| 265 | tctgcttctctcccctccaggccgtgcataaggctgtgctgaccatcgaCG | 18306 | TTTTTAGAggc | 18457 |
| | AGAAAGGGACTGAAGCTGCTGGGGCCATG | | catacc | |
| 268 | catgggtatggcctctaaaaacatggccccagcagcttcagtccctttcTC | 18307 | CCTGGAGGgga | 18458 |
| | GTCGATGGTCAGCACAGCCTTATGCACGG | | gagaag | |
| 272 | tctgcttctctcccctccaggccgtgcataaggctgtgctgaccatcgaCG | 18308 | TTTTTAGAggc | 18459 |
| | AGAAAGGGACTGAAGCTGCTGGGGCCATG | | catacc | |
| 274 | catgggtatggcctctaaaaacatggccccagcagcttcagtccctttcTC | 18309 | CCTGGAGGgga | 18460 |
| | GTCGATGGTCAGCACAGCCTTATGCACGG | | gagaag | |
| 275 | tctgcttctctcccctccaggccgtgcataaggctgtgctgaccatcgaCG | 18310 | TTTTTAGAggc | 18461 |
| | AGAAAGGGACTGAAGCTGCTGGGGCCATG | | catacc | |
| 276 | tctgcttctctcccctccaggccgtgcataaggctgtgctgaccatcgaCG | 18311 | TTTTTAGAggc | 18462 |
| | AGAAAGGGACTGAAGCTGCTGGGGCCATG | | catacc | |
| 279 | tctgcttctctcccctccaggccgtgcataaggctgtgctgaccatcgaCG | 18312 | TTTTAGAGgcc | 18463 |
| | AGAAAGGGACTGAAGCTGCTGGGGCCATGT | | ataccc | |
| 282 | tctgcttctctcccctccaggccgtgcataaggctgtgctgaccatcgaCG | 18313 | TTTTAGAGgcc | 18464 |
| | CTGAAGCTGCTGGGGCCATGT | | ataccc | |
| 283 | tctgcttctctcccctccaggccgtgcataaggctgtgctgaccatcgaCG | 18314 | TTTTAGAGgcc | 18465 |
| | CAGAAAGGGATGAAGCTGCTGGGGCCATGT | | ataccc | |
| 286 | tctgcttctctcccctccaggccgtgcataaggctgtgctgaccatcgaCG | 18315 | TTTTAGAGgcc | 18466 |
| | AGAAAGGGACTGAAGCTGCTGGGGCCATGT | | ataccc | |
| 289 | catgggtatggcctctaaaaacatggccccagcagcttcagtccctttcTC | 18316 | CTGGAGGGgag | 18467 |
| | GTCGATGGTCAGCACAGCCTTATGAGAAAGGGACACGGC | | agaagc | |
| 290 | catgggtatggcctctaaaaacatggccccagcagcttcagtccctttcTC | 18317 | CTGGAGGGgag | 18468 |
| | GTCGATGGTCAGCACAGCCTTATGCACGGC | | agaagc | |
| 291 | tctgcttctctcccctccaggccgtgcataaggctgtgctgaccatcgaCG | 18318 | TTTTAGAGgcc | 18469 |
| | CAGAAAGGGATGAAGCTGCTGGGGCCATGT | | ataccc | |
| 294 | tctgcttctctcccctccaggccgtgcataaggctgtgctgaccatcgaCG | 18319 | TTTTAGAGgcc | 18470 |
| | CAGAAAGGGATGAAGCTGCTGGGGCCATGT | | ataccc | |

[0524] Capital letters indicate “core nucleotides” while lower case letters indicate “flanking nucleotides.” Herein, when an RNA sequence (e.g., a template RNA sequence) is said to comprise a particular sequence (e.g., a sequence of Table 3 or a portion thereof) that comprises thymine (T), it is of course understood that the RNA sequence may (and frequently does) comprise uracil (U) in place of T. For instance, the RNA sequence may comprise U at every position shown as T in the sequence in Table 3. More specifically, the present disclosure provides an RNA sequence according to every heterologous object sequence and PBS sequence shown in Table 3, wherein the RNA sequence has a U in place of each T in the sequence of Table 3.

[0525] In some embodiments of the systems and methods herein, the template RNA comprises a gRNA scaffold (e.g., that binds a gene modifying polypeptide, e.g., a Cas polypeptide) that comprises a sequence of a gRNA scaffold of Table 12. In some embodiments, the gRNA scaffold comprises a sequence having at least 70%, 75%, 80%, 85%, 90%, 95%, 96%, 97%, 98%, or 99% identity to a gRNA scaffold of Table 12. In some embodiments, the gRNA scaffold comprises a sequence of a scaffold region of Table 12 that corresponds to the RT template sequence, the spacer sequence, or both, or a sequence having at least 70%, 75%, 80%, 85%, 90%, 95%, 96%, 97%, 98%, or 99% identity thereto.

[0526] In some embodiments of the systems and methods herein, the system further comprises a second strand-targeting gRNA that directs a nick to the second strand of the human SERPINA1 gene. In some embodiments, the second strand-targeting gRNA comprises a left gRNA spacer sequence or a right gRNA spacer sequence from Table 2. In some embodiments, the gRNA spacer additionally comprises one or more (e.g., 2, 3, or all) consecutive nucleotides starting with the 3′ end of the flanking nucleotides of the left gRNA spacer sequence or right gRNA spacer sequence. In some embodiments, the second strand-targeting gRNA comprises a sequence comprising the core nucleotides of a second nick gRNA sequence from Table 4, or a sequence having at least 70%, 75%, 80%, 85%, 90%, 95%, 96%, 97%, 98%, or 99% identity thereto. In some embodiments, the second nick gRNA sequence additionally comprises one or more consecutive nucleotides starting with the 3′ end of the flanking nucleotides of the second nick gRNA sequence. In some embodiments, the second nick gRNA comprises a gRNA scaffold sequence that is orthogonal to the Cas domain of the gene modifying polypeptide. In some embodiments, the second nick gRNA comprises a gRNA scaffold sequence of Table 12.

TABLE 2
Exemplary left gRNA spacer and right gRNA spacer pairs
Table 2 provides exemplified second strand-targeting gRNA species for
optional use for correcting the pathogenic E342K mutation in SERPINA1.
The gRNA spacers from Table 1 were filtered, e.g., filtered by occur-
rence within 15 nt of the desired editing location and use of a Tier
1 Cas enzyme. Second strand-targeting gRNAs were generated by search-
ing the opposite strand of DNA in the regions −40 to −140 (“left”)
and +40 to +140 (“right”), relative to the first nick site defined
by the first gRNA, for the PAM utilized by the corresponding Cas
variant. One exemplary spacer is shown for each side of the target
nick site.

| | | SEQ | | | SEQ | |
|---|---|---|---|---|---|---|
| | | ID | left | | ID | right |
| ID | left gRNA spacer | NO | pam | right gRNA spacer | NO | pam |
| 1 | ACTTGGTATTTTGTTCAATCA | 1847 | TTAAG | CAAGGCTCACGTGGACACCTC | 1877 | CCAGG |
| | | 1 | | | 3 | |
| 2 | CTTGGTATTTTGTTCAATCAT | 1847 | TAAG | CAAGGCTCACGTGGACACCTC | 1877 | CCAG |
| | | 2 | | | 4 | |
| 5 | CTTGGTATTTTGTTCAATCA | 1847 | TTA | AAGGCTCACGTGGACACCTC | 1877 | CCA |
| | | 3 | | | 5 | |
| 8 | CTTGGTATTTTGTTCAATCAT | 1847 | TAAGA | AAGGCTCACGTGGACACCTCC | 1877 | CAGGA |
| | | 4 | | | 6 | |
| 11 | ACCCTTTGTCTTCTTAATGA | 1847 | TTG | GCGCTTCCTGGGAGGTGTCC | 1877 | ACG |
| | | 5 | | | 7 | |
| 12 | TTGTCTTCTTAATGATTGAA | 1847 | CAA | AGCGCTTCCTGGGAGGTGTC | 1877 | CAC |
| | | 6 | | | 8 | |
| 13 | TTGGTATTTTGTTCAATCAT | 1847 | TAA | AGGCTCACGTGGACACCTCC | 1877 | CAG |
| | | 7 | | | 9 | |
| 19 | TTGGTATTTTGTTCAATCATT | 1847 | AAGAA | AGGCTCACGTGGACACCTCCC | 1878 | AGGAA |
| | | 8 | | | 0 | |
| 20 | TTTGTCTTCTTAATGATTGAA | 1847 | CAAAA | GCGCTTCCTGGGAGGTGTCCA | 1878 | CGTGA |
| | | 9 | | | 1 | |
| 21 | TTTGTCTTCTTAATGATTGAA | 1848 | CAAAA | GCGCTTCCTGGGAGGTGTCCA | 1878 | CGTGA |
| | | 0 | | | 2 | |
| 24 | GGTATTTTGTTCAATCATTA | 1848 | AG | GGCTCACGTGGACACCTCCC | 1878 | AG |
| | | 1 | | | 3 | |
| 28 | TGGTATTTTGTTCAATCATT | 1848 | AAG | GGCTCACGTGGACACCTCCC | 1878 | AGG |
| | | 2 | | | 4 | |
| 29 | TGTCTTCTTAATGATTGAAC | 1848 | AAA | GCGCTTCCTGGGAGGTGTCC | 1878 | ACG |
| | | 3 | | | 5 | |
| 34 | acTTGGTATTTTGTTCAATCATT | 1848 | AAGAA | caAGGCTCACGTGGACACCTCC | 1878 | AGGAA |
| | | 4 | | C | 6 | |
| 35 | TGGTATTTTGTTCAATCATTA | 1848 | AGAAG | GGCTCACGTGGACACCTCCCA | 1878 | GGAAG |
| | | 5 | | | 7 | |
| 38 | TGGTATTTTGTTCAATCATT | 1848 | AAG | GGCTCACGTGGACACCTCCC | 1878 | AGG |
| | | 6 | | | 8 | |
| 39 | GGTATTTTGTTCAATCATTA | 1848 | AGA | GCTCACGTGGACACCTCCCA | 1878 | GGA |
| | | 7 | | | 9 | |
| 40 | CCCTTTGTCTTCTTAATGAT | 1848 | TG | CGCTTCCTGGGAGGTGTCCA | 1879 | CG |
| | | 8 | | | 0 | |
| 44 | GTCTTCTTAATGATTGAACA | 1848 | AAA | CGCTTCCTGGGAGGTGTCCA | 1879 | CGT |
| | | 9 | | | 1 | |
| 50 | GGTATTTTGTTCAATCATTAA | 1849 | GAAGA | GGCTCACGTGGACACCTCCCA | 1879 | GGAAG |
| | | 0 | | | 2 | |
| 51 | GGTATTTTGTTCAATCATTAA | 1849 | GAAG | GCTCACGTGGACACCTCCCAG | 1879 | GAAG |
| | | 1 | | | 3 | |
| 56 | TAATGATTGAACAAAATACC | 1849 | AAG | GCTTCCTGGGAGGTGTCCAC | 1879 | GTG |
| | | 2 | | | 4 | |
| 57 | TCTTCTTAATGATTGAACAA | 1849 | AAT | GCTTCCTGGGAGGTGTCCAC | 1879 | GTG |
| | | 3 | | | 5 | |
| 58 | GTATTTTGTTCAATCATTAA | 1849 | GAA | CTCACGTGGACACCTCCCAG | 1879 | GAA |
| | | 4 | | | 6 | |
| 59 | | | | AAGGCTCACGTGGACACCTC | 1879 | CCAGGAA |
| | | | | | 7 | |
| 60 | ttgtCTTCTTAATGATTGAACAA | 1849 | AATAC | gcgcTTCCTGGGAGGTGTCCAC | 1879 | TGAGCCT |
| | | 6 | | G | 8 | T |
| 61 | ttgtCTTCTTAATGATTGAACAA | 1849 | AATAC | gcgcTTCCTGGGAGGTGTCCAC | 1879 | TGAGCCT |
| | | 7 | | G | 9 | T |
| 64 | GGTATTTTGTTCAATCATTAA | 1849 | GAAGA | GGCTCACGTGGACACCTCCCA | 1880 | GGAAG |
| | | 8 | | | 0 | |
| 65 | CTTCTTAATGATTGAACAAA | 1849 | ATA | CTTCCTGGGAGGTGTCCACG | 1880 | TGA |
| | | 9 | | | 1 | |
| 66 | TATTTTGTTCAATCATTAAG | 1850 | AAG | TCACGTGGACACCTCCCAGG | 1880 | AAG |
| | | 0 | | | 2 | |
| 69 | ATTTTGTTCAATCATTAAGAA | 1850 | GACAA | GGCTCACGTGGACACCTCCCA | 1880 | GGAAG |
| | | 1 | | | 3 | |
| 70 | ATTTTGTTCAATCATTAAGA | 1850 | AGA | CACGTGGACACCTCCCAGGA | 1880 | AGC |
| | | 2 | | | 4 | |
| 71 | TTCTTAATGATTGAACAAAA | 1850 | TAC | TTCCTGGGAGGTGTCCACGT | 1880 | GAG |
| | | 3 | | | 5 | |
| 75 | ATTTTGTTCAATCATTAAGA | 1850 | AG | CACGTGGACACCTCCCAGGA | 1880 | AG |
| | | 4 | | | 6 | |
| 79 | TTTTGTTCAATCATTAAGAA | 1850 | GAC | ACGTGGACACCTCCCAGGAA | 1880 | GCG |
| | | 5 | | | 7 | |
| 80 | TCTTAATGATTGAACAAAAT | 1850 | ACC | TCCTGGGAGGTGTCCACGTG | 1880 | AGC |
| | | 6 | | | 8 | |
| 86 | TATTTTGTTCAATCATTAAG | 1850 | AAG | ACGTGGACACCTCCCAGGAA | 1880 | GCG |
| | | 7 | | | 9 | |
| 87 | TTTGTTCAATCATTAAGAAG | 1850 | ACA | CGTGGACACCTCCCAGGAAG | 1881 | CGC |
| | | 8 | | | 0 | |
| 88 | CTTAATGATTGAACAAAATA | 1850 | CCA | CCTGGGAGGTGTCCACGTGA | 1881 | GCC |
| | | 9 | | | 1 | |
| 89 | tggtATTTTGTTCAATCATTAAG | 1851 | AAGACAA | tcacGTGGACACCTCCCAGGAA | 1881 | CGCTC |
| | | 0 | A | G | 2 | |
| 90 | tggtATTTTGTTCAATCATTAAG | 1851 | AAGACAA | tcacGTGGACACCTCCCAGGAA | 1881 | CGCTC |
| | | 1 | A | G | 3 | |
| 91 | TTTGTTCAATCATTAAGAAGA | 1851 | CAAAG | GGCTCACGTGGACACCTCCCA | 1881 | GGAAG |
| | | 2 | | | 4 | |
| 92 | TTAATGATTGAACAAAATAC | 1851 | CAA | CTGGGAGGTGTCCACGTGAG | 1881 | CCT |
| | | 3 | | | 5 | |
| 93 | TTGTTCAATCATTAAGAAGA | 1851 | CAA | GTGGACACCTCCCAGGAAGC | 1881 | GCT |
| | | 4 | | | 6 | |
| 94 | tcttAATGATTGAACAAAATACC | 1851 | AAGTC | tcctGGGAGGTGTCCACGTGAG | 1881 | CTTGC |
| | | 5 | | C | 7 | |
| 95 | tcttAATGATTGAACAAAATACC | 1851 | AAGTC | tcctGGGAGGTGTCCACGTGAG | 1881 | CTTGC |
| | | 6 | | C | 8 | |
| 98 | TGTTCAATCATTAAGAAGAC | 1851 | AAA | TGGACACCTCCCAGGAAGCG | 1881 | CTC |
| | | 7 | | | 9 | |
| 99 | TAATGATTGAACAAAATACC | 1851 | AAG | TGGGAGGTGTCCACGTGAGC | 1882 | CTT |
| | | 8 | | | 0 | |
| 102 | AATGATTGAACAAAATACCA | 1851 | AGT | GGGAGGTGTCCACGTGAGCC | 1882 | TTG |
| | | 9 | | | 1 | |
| 103 | GTTCAATCATTAAGAAGACA | 1852 | AAG | GGACACCTCCCAGGAAGCGC | 1882 | TCA |
| | | 0 | | | 2 | |
| 104 | tggtATTTTGTTCAATCATTAAG | 1852 | AAGACAA | acgtGGACACCTCCCAGGAAGC | 1882 | CTCAC |
| | | 1 | A | G | 3 | |
| 105 | ATGATTGAACAAAATACCAA | 1852 | GTC | GGAGGTGTCCACGTGAGCCT | 1882 | TGC |
| | | 2 | | | 4 | |
| 106 | TTCAATCATTAAGAAGACAA | 1852 | AGG | GACACCTCCCAGGAAGCGCT | 1882 | CAC |
| | | 3 | | | 5 | |
| 107 | TCAATCATTAAGAAGACAAA | 1852 | GGG | ACACCTCCCAGGAAGCGCTC | 1882 | ACT |
| | | 4 | | | 6 | |
| 108 | TGATTGAACAAAATACCAAG | 1852 | TCT | GAGGTGTCCACGTGAGCCTT | 1882 | GCT |
| | | 5 | | | 7 | |
| 109 | taatGATTGAACAAAATACCAA | 1852 | TCTCC | ctggGAGGTGTCCACGTGAGCC | 1882 | TGCTC |
| | G | 6 | | T | 8 | |
| 110 | taatGATTGAACAAAATACCAA | 1852 | TCTCC | ctggGAGGTGTCCACGTGAGCC | 1882 | TGCTC |
| | G | 7 | | T | 9 | |
| 112 | taATGATTGAACAAAATACCAA | 1852 | CTCCCC | gaGGTGTCCACGTGAGCCTTG | 1883 | GAGGCC |
| | GT | 8 | | CTC | 0 | |
| 113 | AATGATTGAACAAAATACCA | 1852 | AG | GGAGGTGTCCACGTGAGCCT | 1883 | TG |
| | | 9 | | | 1 | |
| 116 | CAATCATTAAGAAGACAAAG | 1853 | GG | CGTGGACACCTCCCAGGAAG | 1883 | CG |
| | | 0 | | | 2 | |
| 120 | GATTGAACAAAATACCAAGT | 1853 | CTC | AGGTGTCCACGTGAGCCTTG | 1883 | CTC |
| | | 1 | | | 3 | |
| 122 | CAATCATTAAGAAGACAAAG | 1853 | GGT | CACCTCCCAGGAAGCGCTCA | 1883 | CTC |
| | | 2 | | | 4 | |
| 123 | aatgATTGAACAAAATACCAAG | 1853 | CTCCC | ctggGAGGTGTCCACGTGAGCC | 1883 | TGCTC |
| | T | 3 | | T | 5 | |
| 124 | aatgATTGAACAAAATACCAAG | 1853 | CTCCC | ctggGAGGTGTCCACGTGAGCC | 1883 | TGCTC |
| | T | 4 | | T | 6 | |
| 125 | cattAAGAAGACAAAGGGTTTG | 1853 | TGAACTT | ggacACCTCCCAGGAAGCGCTC | 1883 | CTCCC |
| | T | 5 | G | A | 7 | |
| 130 | taATGATTGAACAAAATACCAA | 1853 | CTCCCC | gaGGTGTCCACGTGAGCCTTG | 1883 | GAGGCC |
| | GT | 6 | | CTC | 8 | |
| 131 | aaGAAGACAAAGGGTTTGTTG | 1853 | TTGACC | ggACACCTCCCAGGAAGCGCT | 1883 | TCCCCC |
| | AAC | 7 | | CAC | 9 | |
| 134 | TAATGATTGAACAAAATACC | 1853 | AAG | GGTGTCCACGTGAGCCTTGC | 1884 | TCG |
| | | 8 | | | 0 | |
| 135 | ATTGAACAAAATACCAAGTC | 1853 | TCC | GGTGTCCACGTGAGCCTTGC | 1884 | TCG |
| | | 9 | | | 1 | |
| 138 | TCATTAAGAAGACAAAGGGT | 1854 | TTG | CCAGGAAGCGCTCACTCCCC | 1884 | CTG |
| | | 0 | | | 2 | |
| 139 | AATCATTAAGAAGACAAAGG | 1854 | GTT | ACCTCCCAGGAAGCGCTCAC | 1884 | TCC |
| | | 1 | | | 3 | |
| 140 | cattAAGAAGACAAAGGGTTTG | 1854 | TGAACTT | gacaCCTCCCAGGAAGCGCTCA | 1884 | TCCCC |
| | T | 2 | G | C | 4 | |
| 141 | atgaTTGAACAAAATACCAAGT | 1854 | TCCCC | aggtGTCCACGTGAGCCTTGCT | 1884 | GAGGC |
| | C | 3 | | C | 5 | |
| 142 | cattAAGAAGACAAAGGGTTTG | 1854 | TGAACTT | gacaCCTCCCAGGAAGCGCTCA | 1884 | TCCCC |
| | T | 4 | G | C | 6 | |
| 145 | CATTAAGAAGACAAAGGGTTT | 1854 | GTTGA | TCCCAGGAAGCGCTCACTCCC | 1884 | CCTGG |
| | | 5 | | | 7 | |
| 146 | CTTAATGATTGAACAAAATAC | 1854 | CAAG | GGTGTCCACGTGAGCCTTGCT | 1884 | CGAG |
| | | 6 | | | 8 | |
| 147 | TTGAACAAAATACCAAGTCT | 1854 | CCC | GTGTCCACGTGAGCCTTGCT | 1884 | CGA |
| | | 7 | | | 9 | |
| 148 | ATCATTAAGAAGACAAAGGG | 1854 | TT | CCTCCCAGGAAGCGCTCACT | 1885 | CCC |
| | | 8 | | | 0 | |
| 149 | AAATACCAAGTCTCCCCTCTT | 1854 | CATGG | GGTGTCCACGTGAGCCTTGCT | 1885 | CGAGG |
| | | 9 | | | 1 | |
| 150 | AAATACCAAGTCTCCCCTCTT | 1855 | CATGG | GGTGTCCACGTGAGCCTTGCT | 1885 | CGAGG |
| | | 0 | | | 2 | |
| 153 | CATTAAGAAGACAAAGGGTT | 1855 | TG | CAGGAAGCGCTCACTCCCCC | 1885 | TG |
| | | 1 | | | 3 | |
| 157 | TCATTAAGAAGACAAAGGGT | 1855 | TTG | CTCCCAGGAAGCGCTCACTC | 1885 | CCC |
| | | 2 | | | 4 | |
| 158 | TGAACAAAATACCAAGTCTC | 1855 | CCC | TGTCCACGTGAGCCTTGCTC | 1885 | GAG |
| | | 3 | | | 5 | |
| 162 | TCATTAAGAAGACAAAGGGT | 1855 | TTG | CCAGGAAGCGCTCACTCCCC | 1885 | CTG |
| | | 4 | | | 6 | |
| 163 | CATTAAGAAGACAAAGGGTT | 1855 | TGT | TCCCAGGAAGCGCTCACTCC | 1885 | CCC |
| | | 5 | | | 7 | |
| 164 | GAACAAAATACCAAGTCTCC | 1855 | CCT | GTCCACGTGAGCCTTGCTCG | 1885 | AGG |
| | | 6 | | | 8 | |
| 165 | CATTAAGAAGACAAAGGGTT | 1855 | TG | CAGGAAGCGCTCACTCCCCC | 1885 | TG |
| | | 7 | | | 9 | |
| 169 | ATTAAGAAGACAAAGGGTTT | 1855 | GTT | CCCAGGAAGCGCTCACTCCC | 1886 | CCT |
| | | 8 | | | 0 | |
| 170 | AACAAAATACCAAGTCTCCC | 1855 | CTC | TCCACGTGAGCCTTGCTCGA | 1886 | GGC |
| | | 9 | | | 1 | |
| 171 | tgaaCAAAATACCAAGTCTCCCC | 1856 | TCTTCAT | ggtgTCCACGTGAGCCTTGCTC | 1886 | AGGCCTG |
| | | 0 | G | G | 2 | G |
| 172 | cattAAGAAGACAAAGGGTTTG | 1856 | TGAACTT | tcccAGGAAGCGCTCACTCCCC | 1886 | TGGAC |
| | T | 1 | G | C | 3 | |
| 173 | tgaaCAAAATACCAAGTCTCCCC | 1856 | TCTTCAT | ggtgTCCACGTGAGCCTTGCTC | 1886 | AGGCCTG |
| | | 2 | G | G | 4 | G |
| 174 | cattAAGAAGACAAAGGGTTTG | 1856 | TGAACTT | tcccAGGAAGCGCTCACTCCCC | 1886 | TGGAC |
| | T | 3 | G | C | 5 | |
| 177 | TTAAGAAGACAAAGGGTTTG | 1856 | TTG | CCAGGAAGCGCTCACTCCCC | 1886 | CTG |
| | | 4 | | | 6 | |
| 178 | TTAAGAAGACAAAGGGTTTG | 1856 | TTG | CCAGGAAGCGCTCACTCCCC | 1886 | CTG |
| | | 5 | | | 7 | |
| 179 | TACCAAGTCTCCCCTCTTCA | 1856 | TG | TCCACGTGAGCCTTGCTCGA | 1886 | GG |
| | | 6 | | | 8 | |
| 183 | ACAAAATACCAAGTCTCCCC | 1856 | TCT | CCACGTGAGCCTTGCTCGAG | 1886 | GCC |
| | | 7 | | | 9 | |
| 187 | ATACCAAGTCTCCCCTCTTC | 1856 | ATG | ACGTGAGCCTTGCTCGAGGC | 1887 | CTG |
| | | 8 | | | 0 | |
| 188 | CAAAATACCAAGTCTCCCCT | 1856 | CTT | CACGTGAGCCTTGCTCGAGG | 1887 | CCT |
| | | 9 | | | 1 | |
| 189 | TAAGAAGACAAAGGGTTTGT | 1857 | TGA | CAGGAAGCGCTCACTCCCCC | 1887 | TGG |
| | | 0 | | | 2 | |
| 192 | AATACCAAGTCTCCCCTCTTC | 1857 | ATGG | CACGTGAGCCTTGCTCGAGGC | 1887 | CTGG |
| | | 1 | | | 3 | |
| 193 | TAAGAAGACAAAGGGTTTGT | 1857 | TG | AGGAAGCGCTCACTCCCCCT | 1887 | GG |
| | | 2 | | | 4 | |
| 197 | AAGAAGACAAAGGGTTTGTT | 1857 | GAA | AGGAAGCGCTCACTCCCCCT | 1887 | GGA |
| | | 3 | | | 5 | |
| 198 | AAAATACCAAGTCTCCCCTC | 1857 | TTC | ACGTGAGCCTTGCTCGAGGC | 1887 | CTG |
| | | 4 | | | 6 | |
| 199 | tgaaCAAAATACCAAGTCTCCCC | 1857 | TCTTCAT | acgtGAGCCTTGCTCGAGGCCT | 1887 | GGATC |
| | | 5 | G | G | 7 | |
| 203 | AAATACCAAGTCTCCCCTCTT | 1857 | CATGG | ACGTGAGCCTTGCTCGAGGCC | 1887 | TGGGAT |
| | | 6 | | | 8 | |
| 206 | TTAAGAAGACAAAGGGTTTG | 1857 | TTG | GAAGCGCTCACTCCCCCTGG | 1887 | ACG |
| | | 7 | | | 9 | |
| 207 | GGGTTTGTTGAACTTGACCT | 1857 | CGG | CAGGAAGCGCTCACTCCCCC | 1888 | TGG |
| | | 8 | | | 0 | |
| 210 | AGAAGACAAAGGGTTTGTTG | 1857 | AAC | GGAAGCGCTCACTCCCCCTG | 1888 | GAC |
| | | 9 | | | 1 | |
| 211 | TACCAAGTCTCCCCTCTTCA | 1858 | TG | CGTGAGCCTTGCTCGAGGCC | 1888 | TG |
| | | 0 | | | 2 | |
| 214 | TAAGAAGACAAAGGGTTTGT | 1858 | TG | AGGAAGCGCTCACTCCCCCT | 1888 | GG |
| | | 1 | | | 3 | |
| 218 | AAATACCAAGTCTCCCCTCT | 1858 | TCA | CGTGAGCCTTGCTCGAGGCC | 1888 | TGG |
| | | 2 | | | 4 | |
| 224 | AAGGGTTTGTTGAACTTGACC | 1858 | TCGG | GGAAGCGCTCACTCCCCCTGG | 1888 | ACGG |
| | | 3 | | | 5 | |
| 225 | AAGGGTTTGTTGAACTTGACC | 1858 | TCGG | GGAAGCGCTCACTCCCCCTGG | 1888 | ACGG |
| | | 4 | | | 6 | |
| 228 | ATACCAAGTCTCCCCTCTTC | 1858 | ATG | GTGAGCCTTGCTCGAGGCCT | 1888 | GGG |
| | | 5 | | | 7 | |
| 229 | AATACCAAGTCTCCCCTCTT | 1858 | CAT | GTGAGCCTTGCTCGAGGCCT | 1888 | GGG |
| | | 6 | | | 8 | |
| 232 | AGACAAAGGGTTTGTTGAAC | 1858 | TTG | GAAGCGCTCACTCCCCCTGG | 1888 | ACG |
| | | 7 | | | 9 | |
| 233 | GAAGACAAAGGGTTTGTTGA | 1858 | ACT | GAAGCGCTCACTCCCCCTGG | 1889 | ACG |
| | | 8 | | | 0 | |
| 234 | agaaGACAAAGGGTTTGTTGAA | 1858 | TTGAC | caggAAGCGCTCACTCCCCCTG | 1889 | ACGGC |
| | C | 9 | | G | 1 | |
| 235 | agaaGACAAAGGGTTTGTTGAA | 1859 | TTGAC | caggAAGCGCTCACTCCCCCTG | 1889 | ACGGC |
| | C | 0 | | G | 2 | |
| 239 | GAAGACAAAGGGTTTGTTGAA | 1859 | CTTGA | AGGAAGCGCTCACTCCCCCTG | 1889 | GACGG |
| | | 1 | | | 3 | |
| 240 | AATACCAAGTCTCCCCTCTTC | 1859 | ATGG | ACGTGAGCCTTGCTCGAGGCC | 1889 | TGGG |
| | | 2 | | | 4 | |
| 241 | AAGGGTTTGTTGAACTTGACC | 1859 | TCGG | GGAAGCGCTCACTCCCCCTGG | 1889 | ACGG |
| | | 3 | | | 5 | |
| 244 | AAGACAAAGGGTTTGTTGAA | 1859 | CTT | AAGCGCTCACTCCCCCTGGA | 1889 | CGG |
| | | 4 | | | 6 | |
| 245 | ATACCAAGTCTCCCCTCTTC | 1859 | ATG | TGAGCCTTGCTCGAGGCCTG | 1889 | GGA |
| | | 5 | | | 7 | |
| 246 | tgaaCAAAATACCAAGTCTCCCC | 1859 | TCTTCAT | acgtGAGCCTTGCTCGAGGCCT | 1889 | GGATC |
| | | 6 | G | G | 8 | |
| 249 | ATACCAAGTCTCCCCTCTTCA | 1859 | TGGGA | GAGCCTTGCTCGAGGCCTGGG | 1889 | ATCAG |
| | | 7 | | | 9 | |
| 250 | GAAGACAAAGGGTTTGTTGAA | 1859 | CTTGA | CGCTCACTCCCCCTGGACGGC | 1890 | CCTGG |
| | | 8 | | | 0 | |
| 251 | TACCAAGTCTCCCCTCTTCA | 1859 | TGG | GAGCCTTGCTCGAGGCCTGG | 1890 | GAT |
| | | 9 | | | 1 | |
| 252 | AGACAAAGGGTTTGTTGAAC | 1860 | TTG | AGCGCTCACTCCCCCTGGAC | 1890 | GGC |
| | | 0 | | | 2 | |
| 257 | GAAGACAAAGGGTTTGTTGAA | 1860 | CTTGA | CGCTCACTCCCCCTGGACGGC | 1890 | CCTGG |
| | | 1 | | | 3 | |
| 258 | GACAAAGGGTTTGTTGAACT | 1860 | TGA | GCGCTCACTCCCCCTGGACG | 1890 | GCC |
| | | 2 | | | 4 | |
| 259 | ACCAAGTCTCCCCTCTTCAT | 1860 | GGG | AGCCTTGCTCGAGGCCTGGG | 1890 | ATC |
| | | 3 | | | 5 | |
| 261 | CCAAGTCTCCCCTCTTCATG | 1860 | GGA | GCCTTGCTCGAGGCCTGGGA | 1890 | TCA |
| | | 4 | | | 6 | |
| 262 | ACAAAGGGTTTGTTGAACTT | 1860 | GAC | CGCTCACTCCCCCTGGACGG | 1890 | CCC |
| | | 5 | | | 7 | |
| 263 | tgaaCAAAATACCAAGTCTCCCC | 1860 | TCTTCAT | tgagCCTTGCTCGAGGCCTGGG | 1890 | TCAGC |
| | | 6 | G | A | 8 | |
| 264 | tcCCCTCTTCATGGGAAAAGTG | 1860 | GAATCC | gtGAGCCTTGCTCGAGGCCTG | 1890 | TCAGCC |
| | GT | 7 | | GGA | 9 | |
| 265 | CCAAGTCTCCCCTCTTCATG | 1860 | GG | CTTGCTCGAGGCCTGGGATC | 1891 | AG |
| | | 8 | | | 0 | |
| 268 | GACAAAGGGTTTGTTGAACT | 1860 | TG | TCACTCCCCCTGGACGGCCC | 1891 | TG |
| | | 9 | | | 1 | |
| 272 | CAAGTCTCCCCTCTTCATGG | 1861 | GAA | CCTTGCTCGAGGCCTGGGAT | 1891 | CAG |
| | | 0 | | | 2 | |
| 274 | CAAAGGGTTTGTTGAACTTG | 1861 | ACC | GCTCACTCCCCCTGGACGGC | 1891 | CCT |
| | | 1 | | | 3 | |
| 275 | tgaaCAAAATACCAAGTCTCCCC | 1861 | TCTTCAT | gagcCTTGCTCGAGGCCTGGGA | 1891 | CAGCCTT |
| | | 2 | G | T | 4 | A |
| 276 | tgaaCAAAATACCAAGTCTCCCC | 1861 | TCTTCAT | gagcCTTGCTCGAGGCCTGGGA | 1891 | CAGCCTT |
| | | 3 | G | T | 5 | A |
| 279 | tcCCCTCTTCATGGGAAAAGTG | 1861 | GAATCC | gtGAGCCTTGCTCGAGGCCTG | 1891 | TCAGCC |
| | GT | 4 | | GGA | 6 | |
| 282 | GTCTCCCCTCTTCATGGGAA | 1861 | AAG | CCTTGCTCGAGGCCTGGGAT | 1891 | CAG |
| | | 5 | | | 7 | |
| 283 | ACCAAGTCTCCCCTCTTCAT | 1861 | GGG | GTGAGCCTTGCTCGAGGCCT | 1891 | GGG |
| | | 6 | | | 8 | |
| 286 | AAGTCTCCCCTCTTCATGGG | 1861 | AAA | CTTGCTCGAGGCCTGGGATC | 1891 | AGC |
| | | 7 | | | 9 | |
| 289 | AGGGTTTGTTGAACTTGACC | 1861 | TCG | CTCACTCCCCCTGGACGGCC | 1892 | CTG |
| | | 8 | | | 0 | |
| 290 | AAAGGGTTTGTTGAACTTGA | 1861 | CCT | CTCACTCCCCCTGGACGGCC | 1892 | CTG |
| | | 9 | | | 1 | |
| 291 | CCAAGTCTCCCCTCTTCATG | 1862 | GG | CTTGCTCGAGGCCTGGGATC | 1892 | AG |
| | | 0 | | | 2 | |
| 294 | ccccTCTTCATGGGAAAAGTGG | 1862 | GAATC | gagcCTTGCTCGAGGCCTGGGA | 1892 | CAGCCTT |
| | T | 1 | | T | 3 | A |

[0527] Capital letters indicate “core nucleotides” while lower case letters indicate “flanking nucleotides.” Herein, when an RNA sequence (e.g., a gRNA to produce a second nick) is said to comprise a particular sequence (e.g., a sequence of Table 2 or a portion thereof) that comprises thymine (T), it is of course understood that the RNA sequence may (and frequently does) comprise uracil (U) in place of T. For instance, the RNA sequence may comprise U at every position shown as T in the sequence in Table 2. More specifically, the present disclosure provides an RNA sequence according to every gRNA spacer sequence shown in Table 2, wherein the RNA sequence has a U in place of each T in the sequence in Table 2.

[0528] In some embodiments, the systems and methods provided herein may comprise a template sequence listed in Table 4. Table 4 provides exemplary template RNA sequences (column 4) and optional second strand-targeting gRNA sequences (column 5) designed to be paired with a gene modifying polypeptide to correct a mutation in the SERPINA1 gene. The templates in Table 4 are meant to exemplify the total sequence of: (1) gRNA spacer (e.g., for targeting for first strand nick), (2) gRNA scaffold, (3) heterologous object sequence, and (4) PBS sequence (e.g., for initiating TPRT at first strand nick).

TABLE 4
Exemplary template RNA sequences and second nick gRNA sequences
Table 4 provides design of RNA components of gene modifying systems for correcting
the pathogenic E342K mutation in SERPINA1. The gRNA spacers from Table 1 were
filtered, e.g., filtered by occurrence within 15 nt of the desired editing location
and use of a Tier 1 Cas enzyme. For each gRNA ID, this table details the sequence of
a complete template RNA, optional second strand-targeting gRNA, and Cas variant for
use in a Cas-RT fusion gene modifying polypeptide. For exemplification, PBS sequences
and post-edit homology regions (after the location of the edit) are set to 12 nt and
30 nt, respectively. Additionally, a second strand-targeting gRNA is selected with
preference for a distance near 100 nt from the first nick and a first preference for
a design resulting in a PAM-in system, as described elsewhere in this application.

| | Cas | | | SEQ | | SEQ |
|---|---|---|---|---|---|---|
| ID | species | Strand | Template RNA | ID NO | Second strand-targeting gRNA | ID NO |
| 1 | SauCas9 | − | GCTGTGCTGACCATCGACAAGGTTTTAGTACTCTGGAAACAGA | 19075 | ACTTGGTATTTTGTTCAATCAGTTTTAGT | 19226 |
| | KKH | | ATCTACTAAAACAAGGCAAAATGCCGTGTTTATCTCGTCAACT | | ACTCTGGAAACAGAATCTACTAAAACAAG | |
| | | | TGTTGGCGAGAcatggccccagcagcttcagtccctttcTCGT | | GCAAAATGCCGTGTTTATCTCGTCAACTT | |
| | | | CGATGGtcag | | GTTGGCGAGA | |
| 2 | Sauri- | − | GCTGTGCTGACCATCGACAAGGTTTTAGTACTCTGGAAACAGA | 19076 | CTTGGTATTTTGTTCAATCATGTTTTAGT | 19227 |
| | Cas9- | | ATCTACTAAAACAAGGCAAAATGCCGTGTTTATCTCGTCAACT | | ACTCTGGAAACAGAATCTACTAAAACAAG | |
| | KKH | | TGTTGGCGAGAcatggccccagcagcttcagtccctttcTCGT | | GCAAAATGCCGTGTTTATCTCGTCAACTT | |
| | | | CGATGGtcag | | GTTGGCGAGA | |
| 5 | SpyCas9- | − | CTGTGCTGACCATCGACAAGGTTTTAGAGCTAGAAATAGCAAG | 19077 | CTTGGTATTTTGTTCAATCAGTTTTAGAG | 19228 |
| | SpRY | | TTAAAATAAGGCTAGTCCGTTATCAACTTGAAAAAGTGGCACC | | CTAGAAATAGCAAGTTAAAATAAGGCTAG | |
| | | | GAGTCGGTGCcatggccccagcagcttcagtccctttcTCGTC | | TCCGTTATCAACTTGAAAAAGTGGCACCG | |
| | | | GATGGtcag | | AGTCGGTGC | |
| 8 | SauCas9- | − | GGCTGTGCTGACCATCGACAAGTTTTAGTACTCTGGAAACAGA | 19078 | CTTGGTATTTTGTTCAATCATGTTTTAGT | 19229 |
| | KKH | | ATCTACTAAAACAAGGCAAAATGCCGTGTTTATCTCGTCAACT | | ACTCTGGAAACAGAATCTACTAAAACAAG | |
| | | | TGTTGGCGAGAatggccccagcagcttcagtccctttcTCGTC | | GCAAAATGCCGTGTTTATCTCGTCAACTT | |
| | | | GATGGTcagc | | GTTGGCGAGA | |
| 11 | ScaCas9- | + | CAGCTTCAGTCCCTTTCTTGGTTTTAGAGCTAGAAATAGCAAG | 19079 | GCGCTTCCTGGGAGGTGTCCGTTTTAGAG | 19230 |
| | Sc++ | | TTAAAATAAGGCTAGTCCGTTATCAACTTGAAAAAGTGGCACC | | CTAGAAATAGCAAGTTAAAATAAGGCTAG | |
| | | | GAGTCGGTGCcgtgcataaggctgtgctgaccatcgaCGAGAA | | TCCGTTATCAACTTGAAAAAGTGGCACCG | |
| | | | AGGGActga | | AGTCGGTGC | |
| 12 | SpyCas9- | + | CAGCTTCAGTCCCTTTCTTGGTTTTAGAGCTAGAAATAGCAAG | 19080 | AGCGCTTCCTGGGAGGTGTCGTTTTAGAG | 19231 |
| | SpRY | | TTAAAATAAGGCTAGTCCGTTATCAACTTGAAAAAGTGGCACC | | CTAGAAATAGCAAGTTAAAATAAGGCTAG | |
| | | | GAGTCGGTGCcgtgcataaggctgtgctgaccatcgaCGAGAA | | TCCGTTATCAACTTGAAAAAGTGGCACCG | |
| | | | AGGGActga | | AGTCGGTGC | |
| 13 | SpyCas9- | − | GCTGTGCTGACCATCGACAAGTTTTAGAGCTAGAAATAGCAAG | 19081 | TTGGTATTTTGTTCAATCATGTTTTAGAG | 19232 |
| | SpRY | | TTAAAATAAGGCTAGTCCGTTATCAACTTGAAAAAGTGGCACC | | CTAGAAATAGCAAGTTAAAATAAGGCTAG | |
| | | | GAGTCGGTGCatggccccagcagcttcagtccctttcTCGTCG | | TCCGTTATCAACTTGAAAAAGTGGCACCG | |
| | | | ATGGTcagc | | AGTCGGTGC | |
| 19 | SauCas9 | − | AGGCTGTGCTGACCATCGACAGTTTTAGTACTCTGGAAACAGA | 19082 | TTGGTATTTTGTTCAATCATTGTTTTAGT | 19233 |
| | KKH | | ATCTACTAAAACAAGGCAAAATGCCGTGTTTATCTCGTCAACT | | ACTCTGGAAACAGAATCTACTAAAACAAG | |
| | | | TGTTGGCGAGAtggccccagcagcttcagtccctttcTCGTCG | | GCAAAATGCCGTGTTTATCTCGTCAACTT | |
| | | | ATGGTCagca | | GTTGGCGAGA | |
| 20 | SauCas9 | + | AGCAGCTTCAGTCCCTTTCTTGTTTTAGTACTCTGGAAACAGA | 19083 | GCGCTTCCTGGGAGGTGTCCAGTTTTAGT | 19234 |
| | KKH | | ATCTACTAAAACAAGGCAAAATGCCGTGTTTATCTCGTCAACT | | ACTCTGGAAACAGAATCTACTAAAACAAG | |
| | | | TGTTGGCGAGAgtgcataaggctgtgctgaccatcgaCGAGAA | | GCAAAATGCCGTGTTTATCTCGTCAACTT | |
| | | | AGGGACtgaa | | GTTGGCGAGA | |
| 21 | SauCas9 | + | AGCAGCTTCAGTCCCTTTCTTGTTTTAGTACTCTGGAAACAGA | 19084 | GCGCTTCCTGGGAGGTGTCCAGTTTTAGT | 19235 |
| | KKH | | ATCTACTAAAACAAGGCAAAATGCCGTGTTTATCTCGTCAACT | | ACTCTGGAAACAGAATCTACTAAAACAAG | |
| | | | TGTTGGCGAGAgtgcataaggctgtgctgaccatcgaCGAGAA | | GCAAAATGCCGTGTTTATCTCGTCAACTT | |
| | | | AGGGACtgaa | | GTTGGCGAGA | |
| 24 | SpyCas9- | − | GGCTGTGCTGACCATCGACAGTTTTAGAGCTAGAAATAGCAAG | 19085 | GGTATTTTGTTCAATCATTAGTTTTAGAG | 19236 |
| | NG | | TTAAAATAAGGCTAGTCCGTTATCAACTTGAAAAAGTGGCACC | | CTAGAAATAGCAAGTTAAAATAAGGCTAG | |
| | | | GAGTCGGTGCtggccccagcagcttcagtccctttcTCGTCGA | | TCCGTTATCAACTTGAAAAAGTGGCACCG | |
| | | | TGGTCagca | | AGTCGGTGC | |
| 28 | SpyCas9- | − | GGCTGTGCTGACCATCGACAGTTTTAGAGCTAGAAATAGCAAG | 19086 | TGGTATTTTGTTCAATCATTGTTTTAGAG | 19237 |
| | SpRY | | TTAAAATAAGGCTAGTCCGTTATCAACTTGAAAAAGTGGCACC | | CTAGAAATAGCAAGTTAAAATAAGGCTAG | |
| | | | GAGTCGGTGCtggccccagcagcttcagtccctttcTCGTCGA | | TCCGTTATCAACTTGAAAAAGTGGCACCG | |
| | | | TGGTCagca | | AGTCGGTGC | |
| 29 | SpyCas9- | + | GCAGCTTCAGTCCCTTTCTTGTTTTAGAGCTAGAAATAGCAAG | 19087 | GCGCTTCCTGGGAGGTGTCCGTTTTAGAG | 19238 |
| | SpRY | | TTAAAATAAGGCTAGTCCGTTATCAACTTGAAAAAGTGGCACC | | CTAGAAATAGCAAGTTAAAATAAGGCTAG | |
| | | | GAGTCGGTGCgtgcataaggctgtgctgaccatcgaCGAGAAA | | TCCGTTATCAACTTGAAAAAGTGGCACCG | |
| | | | GGGACtgaa | | AGTCGGTGC | |
| 34 | SauCas9 | − | atAAGGCTGTGCTGACCATCGACGTTTTAGTACTCTGGAAACA | 19088 | acTTGGTATTTTGTTCAATCATTGTTTTA | 19239 |
| | | | GAATCTACTAAAACAAGGCAAAATGCCGTGTTTATCTCGTCAA | | GTACTCTGGAAACAGAATCTACTAAAACA | |
| | | | CTTGTTGGCGAGAggccccagcagcttcagtccctttcTCGTC | | AGGCAAAATGCCGTGTTTATCTCGTCAAC | |
| | | | GATGGTCAgcac | | TTGTTGGCGAGA | |
| 35 | SauCas9 | − | AAGGCTGTGCTGACCATCGACGTTTTAGTACTCTGGAAACAGA | 19089 | TGGTATTTTGTTCAATCATTAGTTTTAGT | 19240 |
| | KKH | | ATCTACTAAAACAAGGCAAAATGCCGTGTTTATCTCGTCAACT | | ACTCTGGAAACAGAATCTACTAAAACAAG | |
| | | | TGTTGGCGAGAggccccagcagcttcagtccctttcTCGTCGA | | GCAAAATGCCGTGTTTATCTCGTCAACTT | |
| | | | TGGTCAgcac | | GTTGGCGAGA | |
| 38 | ScaCas9- | − | AGGCTGTGCTGACCATCGACGTTTTAGAGCTAGAAATAGCAAG | 19090 | TGGTATTTTGTTCAATCATTGTTTTAGAG | 19241 |
| | Sc++ | | TTAAAATAAGGCTAGTCCGTTATCAACTTGAAAAAGTGGCACC | | CTAGAAATAGCAAGTTAAAATAAGGCTAG | |
| | | | GAGTCGGTGCggccccagcagcttcagtccctttcTCGTCGAT | | TCCGTTATCAACTTGAAAAAGTGGCACCG | |
| | | | GGTCAgcac | | AGTCGGTGC | |
| 39 | SpyCas9- | − | AGGCTGTGCTGACCATCGACGTTTTAGAGCTAGAAATAGCAAG | 19091 | GGTATTTTGTTCAATCATTAGTTTTAGAG | 19242 |
| | SpRY | | TTAAAATAAGGCTAGTCCGTTATCAACTTGAAAAAGTGGCACC | | CTAGAAATAGCAAGTTAAAATAAGGCTAG | |
| | | | GAGTCGGTGCggccccagcagcttcagtccctttcTCGTCGAT | | TCCGTTATCAACTTGAAAAAGTGGCACCG | |
| | | | GGTCAgcac | | AGTCGGTGC | |
| 40 | SpyCas9- | + | AGCAGCTTCAGTCCCTTTCTGTTTTAGAGCTAGAAATAGCAAG | 19092 | CGCTTCCTGGGAGGTGTCCAGTTTTAGAG | 19243 |
| | NG | | TTAAAATAAGGCTAGTCCGTTATCAACTTGAAAAAGTGGCACC | | CTAGAAATAGCAAGTTAAAATAAGGCTAG | |
| | | | GAGTCGGTGCtgcataaggctgtgctgaccatcgaCGAGAAAG | | TCCGTTATCAACTTGAAAAAGTGGCACCG | |
| | | | GGACTgaag | | AGTCGGTGC | |
| 44 | SpyCas9- | + | AGCAGCTTCAGTCCCTTTCTGTTTTAGAGCTAGAAATAGCAAG | 19093 | CGCTTCCTGGGAGGTGTCCAGTTTTAGAG | 19244 |
| | SpRY | | TTAAAATAAGGCTAGTCCGTTATCAACTTGAAAAAGTGGCACC | | CTAGAAATAGCAAGTTAAAATAAGGCTAG | |
| | | | GAGTCGGTGCtgcataaggctgtgctgaccatcgaCGAGAAAG | | TCCGTTATCAACTTGAAAAAGTGGCACCG | |
| | | | GGACTgaag | | AGTCGGTGC | |
| 50 | SauCas9 | − | TAAGGCTGTGCTGACCATCGAGTTTTAGTACTCTGGAAACAGA | 19094 | GGTATTTTGTTCAATCATTAAGTTTTAGT | 19245 |
| | KKH | | ATCTACTAAAACAAGGCAAAATGCCGTGTTTATCTCGTCAACT | | ACTCTGGAAACAGAATCTACTAAAACAAG | |
| | | | TGTTGGCGAGAgccccagcagcttcagtccctttcTCGTCGAT | | GCAAAATGCCGTGTTTATCTCGTCAACTT | |
| | | | GGTCAGcaca | | GTTGGCGAGA | |
| 51 | Sauri- | − | TAAGGCTGTGCTGACCATCGAGTTTTAGTACTCTGGAAACAGA | 19095 | GGTATTTTGTTCAATCATTAAGTTTTAGT | 19246 |
| | Cas9- | | ATCTACTAAAACAAGGCAAAATGCCGTGTTTATCTCGTCAACT | | ACTCTGGAAACAGAATCTACTAAAACAAG | |
| | KKH | | TGTTGGCGAGAgccccagcagcttcagtccctttcTCGTCGAT | | GCAAAATGCCGTGTTTATCTCGTCAACTT | |
| | | | GGTCAGcaca | | GTTGGCGAGA | |
| 56 | ScaCas9- | + | CAGCAGCTTCAGTCCCTTTCGTTTTAGAGCTAGAAATAGCAAG | 19096 | GCTTCCTGGGAGGTGTCCACGTTTTAGAG | 19247 |
| | Sc++ | | TTAAAATAAGGCTAGTCCGTTATCAACTTGAAAAAGTGGCACC | | CTAGAAATAGCAAGTTAAAATAAGGCTAG | |
| | | | GAGTCGGTGCgcataaggctgtgctgaccatcgaCGAGAAAGG | | TCCGTTATCAACTTGAAAAAGTGGCACCG | |
| | | | GACTGaagc | | AGTCGGTGC | |
| 57 | SpyCas9- | + | CAGCAGCTTCAGTCCCTTTCGTTTTAGAGCTAGAAATAGCAAG | 19097 | GCTTCCTGGGAGGTGTCCACGTTTTAGAG | 19248 |
| | SpRY | | TTAAAATAAGGCTAGTCCGTTATCAACTTGAAAAAGTGGCACC | | CTAGAAATAGCAAGTTAAAATAAGGCTAG | |
| | | | GAGTCGGTGCgcataaggctgtgctgaccatcgaCGAGAAAGG | | TCCGTTATCAACTTGAAAAAGTGGCACCG | |
| | | | GACTGaagc | | AGTCGGTGC | |
| 58 | SpyCas9- | − | AAGGCTGTGCTGACCATCGAGTTTTAGAGCTAGAAATAGCAAG | 19098 | GTATTTTGTTCAATCATTAAGTTTTAGAG | 19249 |
| | SpRY | | TTAAAATAAGGCTAGTCCGTTATCAACTTGAAAAAGTGGCACC | | CTAGAAATAGCAAGTTAAAATAAGGCTAG | |
| | | | GAGTCGGTGCgccccagcagcttcagtccctttcTCGTCGATG | | TCCGTTATCAACTTGAAAAAGTGGCACCG | |
| | | | GTCAGcaca | | AGTCGGTGC | |
| 59 | St1Cas9 | − | AAGGCTGTGCTGACCATCGAGTCTTTGTACTCTGGTACCAGAA | 19099 | NAGTCTTTGTACTCTGGTACCAGAAGCTA | 19250 |
| | | | GCTACAAAGATAAGGCTTCATGCCGAAATCAACACCCTGTCAT | | CAAAGATAAGGCTTCATGCCGAAATCAAC | |
| | | | TTTATGGCAGGGTGTTTTgccccagcagcttcagtccctttcT | | ACCCTGTCATTTTATGGCAGGGTGTTTT | |
| | | | CGTCGATGGTCAGcaca | | | |
| 60 | BlatCas9 | + | ccccAGCAGCTTCAGTCCCTTTCGCTATAGTTCCTTACTGAAA | 19100 | gcgcTTCCTGGGAGGTGTCCACGGCTATA | 19251 |
| | | | GGTAAGTTGCTATAGTAAGGGCAACAGACCCGAGGCGTTGGGG | | GTTCCTTACTGAAAGGTAAGTTGCTATAG | |
| | | | ATCGCCTAGCCCGTGTTTACGGGCTCTCCCCATATTCAAAATA | | TAAGGGCAACAGACCCGAGGCGTTGGGGA | |
| | | | ATGACAGACGAGCACCTTGGAGCATTTATCTCCGAGGTGCTgc | | TCGCCTAGCCCGTGTTTACGGGCTCTCCC | |
| | | | ataaggctgtgctgaccatcgaCGAGAAAGGGACTGaagc | | CATATTCAAAATAATGACAGACGAGCACC | |
| | | | | | TTGGAGCATTTATCTCCGAGGTGCT | |
| 61 | BlatCas9 | + | ccccAGCAGCTTCAGTCCCTTTCGCTATAGTTCCTTACTGAAA | 19101 | gcgcTTCCTGGGAGGTGTCCACGGCTATA | 19252 |
| | | | GGTAAGTTGCTATAGTAAGGGCAACAGACCCGAGGCGTTGGGG | | GTTCCTTACTGAAAGGTAAGTTGCTATAG | |
| | | | ATCGCCTAGCCCGTGTTTACGGGCTCTCCCCATATTCAAAATA | | TAAGGGCAACAGACCCGAGGCGTTGGGGA | |
| | | | ATGACAGACGAGCACCTTGGAGCATTTATCTCCGAGGTGCTgc | | TCGCCTAGCCCGTGTTTACGGGCTCTCCC | |
| | | | ataaggctgtgctgaccatcgaCGAGAAAGGGACTGaagc | | CATATTCAAAATAATGACAGACGAGCACC | |
| | | | | | TTGGAGCATTTATCTCCGAGGTGCT | |
| 64 | SauCas9 | − | ATAAGGCTGTGCTGACCATCGGTTTTAGTACTCTGGAAACAGA | 19102 | GGTATTTTGTTCAATCATTAAGTTTTAGT | 19253 |
| | KKH | | ATCTACTAAAACAAGGCAAAATGCCGTGTTTATCTCGTCAACT | | ACTCTGGAAACAGAATCTACTAAAACAAG | |
| | | | TGTTGGCGAGAccccagcagcttcagtccctttcTCGTCGATG | | GCAAAATGCCGTGTTTATCTCGTCAACTT | |
| | | | GTCAGCacag | | GTTGGCGAGA | |
| 65 | SpyCas9- | + | CCAGCAGCTTCAGTCCCTTTGTTTTAGAGCTAGAAATAGCAAG | 19103 | CTTCCTGGGAGGTGTCCACGGTTTTAGAG | 19254 |
| | SpRY | | TTAAAATAAGGCTAGTCCGTTATCAACTTGAAAAAGTGGCACC | | CTAGAAATAGCAAGTTAAAATAAGGCTAG | |
| | | | GAGTCGGTGCcataaggctgtgctgaccatcgaCGAGAAAGGG | | TCCGTTATCAACTTGAAAAAGTGGCACCG | |
| | | | ACTGAagct | | AGTCGGTGC | |
| 66 | SpyCas9- | − | TAAGGCTGTGCTGACCATCGGTTTTAGAGCTAGAAATAGCAAG | 19104 | TATTTTGTTCAATCATTAAGGTTTTAGAG | 19255 |
| | SpRY | | TTAAAATAAGGCTAGTCCGTTATCAACTTGAAAAAGTGGCACC | | CTAGAAATAGCAAGTTAAAATAAGGCTAG | |
| | | | GAGTCGGTGCccccagcagcttcagtccctttcTCGTCGATGG | | TCCGTTATCAACTTGAAAAAGTGGCACCG | |
| | | | TCAGCacag | | AGTCGGTGC | |
| 69 | SauCas9 | − | CATAAGGCTGTGCTGACCATCGTTTTAGTACTCTGGAAACAGA | 19105 | ATTTTGTTCAATCATTAAGAAGTTTTAGT | 19256 |
| | KKH | | ATCTACTAAAACAAGGCAAAATGCCGTGTTTATCTCGTCAACT | | ACTCTGGAAACAGAATCTACTAAAACAAG | |
| | | | TGTTGGCGAGAcccagcagcttcagtccctttcTCGTCGATGG | | GCAAAATGCCGTGTTTATCTCGTCAACTT | |
| | | | TCAGCAcagc | | GTTGGCGAGA | |
| 70 | SpyCas9- | − | ATAAGGCTGTGCTGACCATCGTTTTAGAGCTAGAAATAGCAAG | 19106 | ATTTTGTTCAATCATTAAGAGTTTTAGAG | 19257 |
| | SpRY | | TTAAAATAAGGCTAGTCCGTTATCAACTTGAAAAAGTGGCACC | | CTAGAAATAGCAAGTTAAAATAAGGCTAG | |
| | | | GAGTCGGTGCcccagcagcttcagtccctttcTCGTCGATGGT | | TCCGTTATCAACTTGAAAAAGTGGCACCG | |
| | | | CAGCAcagc | | AGTCGGTGC | |
| 71 | SpyCas9- | + | CCCAGCAGCTTCAGTCCCTTGTTTTAGAGCTAGAAATAGCAAG | 19107 | TTCCTGGGAGGTGTCCACGTGTTTTAGAG | 19258 |
| | SpRY | | TTAAAATAAGGCTAGTCCGTTATCAACTTGAAAAAGTGGCACC | | CTAGAAATAGCAAGTTAAAATAAGGCTAG | |
| | | | GAGTCGGTGCataaggctgtgctgaccatcgaCGAGAAAGGGA | | TCCGTTATCAACTTGAAAAAGTGGCACCG | |
| | | | CTGAAgctg | | AGTCGGTGC | |
| 75 | SpyCas9- | − | CATAAGGCTGTGCTGACCATGTTTTAGAGCTAGAAATAGCAAG | 19108 | ATTTTGTTCAATCATTAAGAGTTTTAGAG | 19259 |
| | NG | | TTAAAATAAGGCTAGTCCGTTATCAACTTGAAAAAGTGGCACC | | CTAGAAATAGCAAGTTAAAATAAGGCTAG | |
| | | | GAGTCGGTGCccagcagcttcagtccctttcTCGTCGATGGTC | | TCCGTTATCAACTTGAAAAAGTGGCACCG | |
| | | | AGCACagCC | | AGTCGGTGC | |
| 79 | SpyCas9- | − | CATAAGGCTGTGCTGACCATGTTTTAGAGCTAGAAATAGCAAG | 19109 | TTTTGTTCAATCATTAAGAAGTTTTAGAG | 19260 |
| | SpRY | | TTAAAATAAGGCTAGTCCGTTATCAACTTGAAAAAGTGGCACC | | CTAGAAATAGCAAGTTAAAATAAGGCTAG | |
| | | | GAGTCGGTGCccagcagcttcagtccctttcTCGTCGATGGTC | | TCCGTTATCAACTTGAAAAAGTGGCACCG | |
| | | | AGCACagcc | | AGTCGGTGC | |
| 80 | SpyCas9- | + | CCCCAGCAGCTTCAGTCCCTGTTTTAGAGCTAGAAATAGCAAG | 19110 | TCCTGGGAGGTGTCCACGTGGTTTTAGAG | 19261 |
| | SpRY | | TTAAAATAAGGCTAGTCCGTTATCAACTTGAAAAAGTGGCACC | | CTAGAAATAGCAAGTTAAAATAAGGCTAG | |
| | | | GAGTCGGTGCtaaggctgtgctgaccatcgaCGAGAAAGGGAC | | TCCGTTATCAACTTGAAAAAGTGGCACCG | |
| | | | TGAAGctgc | | AGTCGGTGC | |
| 86 | ScaCas9- | − | GCATAAGGCTGTGCTGACCAGTTTTAGAGCTAGAAATAGCAAG | 19111 | TATTTTGTTCAATCATTAAGGTTTTAGAG | 19262 |
| | Sc++ | | TTAAAATAAGGCTAGTCCGTTATCAACTTGAAAAAGTGGCACC | | CTAGAAATAGCAAGTTAAAATAAGGCTAG | |
| | | | GAGTCGGTGCcagcagcttcagtccctttcTCGTCGATGGTCA | | TCCGTTATCAACTTGAAAAAGTGGCACCG | |
| | | | GCACAgcct | | AGTCGGTGC | |
| 87 | SpyCas9- | − | GCATAAGGCTGTGCTGACCAGTTTTAGAGCTAGAAATAGCAAG | 19112 | TTTGTTCAATCATTAAGAAGGTTTTAGAG | 19263 |
| | SpRY | | TTAAAATAAGGCTAGTCCGTTATCAACTTGAAAAAGTGGCACC | | CTAGAAATAGCAAGTTAAAATAAGGCTAG | |
| | | | GAGTCGGTGCcagcagcttcagtccctttcTCGTCGATGGTCA | | TCCGTTATCAACTTGAAAAAGTGGCACCG | |
| | | | GCACAgcct | | AGTCGGTGC | |
| 88 | SpyCas9- | + | GCCCCAGCAGCTTCAGTCCCGTTTTAGAGCTAGAAATAGCAAG | 19113 | CCTGGGAGGTGTCCACGTGAGTTTTAGAG | 19264 |
| | SpRY | | TTAAAATAAGGCTAGTCCGTTATCAACTTGAAAAAGTGGCACC | | CTAGAAATAGCAAGTTAAAATAAGGCTAG | |
| | | | GAGTCGGTGCaaggctgtgctgaccatcgaCGAGAAAGGGACT | | TCCGTTATCAACTTGAAAAAGTGGCACCG | |
| | | | GAAGCtgct | | AGTCGGTGC | |
| 89 | BlatCas9 | − | cgtgCATAAGGCTGTGCTGACCAGCTATAGTTCCTTACTGAAA | 19114 | tggtATTTTGTTCAATCATTAAGGCTATA | 19265 |
| | | | GGTAAGTTGCTATAGTAAGGGCAACAGACCCGAGGCGTTGGGG | | GTTCCTTACTGAAAGGTAAGTTGCTATAG | |
| | | | ATCGCCTAGCCCGTGTTTACGGGCTCTCCCCATATTCAAAATA | | TAAGGGCAACAGACCCGAGGCGTTGGGGA | |
| | | | ATGACAGACGAGCACCTTGGAGCATTTATCTCCGAGGTGCTca | | TCGCCTAGCCCGTGTTTACGGGCTCTCCC | |
| | | | gcagcttcagtccctttcTCGTCGATGGTCAGCACAgcct | | CATATTCAAAATAATGACAGACGAGCACC | |
| | | | | | TTGGAGCATTTATCTCCGAGGTGCT | |
| 90 | BlatCas9 | − | cgtgCATAAGGCTGTGCTGACCAGCTATAGTTCCTTACTGAAA | 19115 | tggtATTTTGTTCAATCATTAAGGCTATA | 19266 |
| | | | GGTAAGTTGCTATAGTAAGGGCAACAGACCCGAGGCGTTGGGG | | GTTCCTTACTGAAAGGTAAGTTGCTATAG | |
| | | | ATCGCCTAGCCCGTGTTTACGGGCTCTCCCCATATTCAAAATA | | TAAGGGCAACAGACCCGAGGCGTTGGGGA | |
| | | | ATGACAGACGAGCACCTTGGAGCATTTATCTCCGAGGTGCTca | | TCGCCTAGCCCGTGTTTACGGGCTCTCCC | |
| | | | gcagcttcagtccctttcTCGTCGATGGTCAGCACAgcct | | CATATTCAAAATAATGACAGACGAGCACC | |
| | | | | | TTGGAGCATTTATCTCCGAGGTGCT | |
| 91 | SauCas9 | − | GTGCATAAGGCTGTGCTGACCGTTTTAGTACTCTGGAAACAGA | 19116 | TTTGTTCAATCATTAAGAAGAGTTTTAGT | 19267 |
| | KKH | | ATCTACTAAAACAAGGCAAAATGCCGTGTTTATCTCGTCAACT | | ACTCTGGAAACAGAATCTACTAAAACAAG | |
| | | | TGTTGGCGAGAagcagcttcagtccctttcTCGTCGATGGTCA | | GCAAAATGCCGTGTTTATCTCGTCAACTT | |
| | | | GCACAGcctt | | GTTGGCGAGA | |
| 92 | SpyCas9- | + | GGCCCCAGCAGCTTCAGTCCGTTTTAGAGCTAGAAATAGCAAG | 19117 | CTGGGAGGTGTCCACGTGAGGTTTTAGAG | 19268 |
| | SpRY | | TTAAAATAAGGCTAGTCCGTTATCAACTTGAAAAAGTGGCACC | | CTAGAAATAGCAAGTTAAAATAAGGCTAG | |
| | | | GAGTCGGTGCaggctgtgctgaccatcgaCGAGAAAGGGACTG | | TCCGTTATCAACTTGAAAAAGTGGCACCG | |
| | | | AAGCTgctg | | AGTCGGTGC | |
| 93 | SpyCas9- | − | TGCATAAGGCTGTGCTGACCGTTTTAGAGCTAGAAATAGCAAG | 19118 | TTGTTCAATCATTAAGAAGAGTTTTAGAG | 19269 |
| | SpRY | | TTAAAATAAGGCTAGTCCGTTATCAACTTGAAAAAGTGGCACC | | CTAGAAATAGCAAGTTAAAATAAGGCTAG | |
| | | | GAGTCGGTGCagcagcttcagtccctttcTCGTCGATGGTCAG | | TCCGTTATCAACTTGAAAAAGTGGCACCG | |
| | | | CACAGcctt | | AGTCGGTGC | |
| 94 | BlatCas9 | + | catgGCCCCAGCAGCTTCAGTCCGCTATAGTTCCTTACTGAAA | 19119 | tcctGGGAGGTGTCCACGTGAGCGCTATA | 19270 |
| | | | GGTAAGTTGCTATAGTAAGGGCAACAGACCCGAGGCGTTGGGG | | GTTCCTTACTGAAAGGTAAGTTGCTATAG | |
| | | | ATCGCCTAGCCCGTGTTTACGGGCTCTCCCCATATTCAAAATA | | TAAGGGCAACAGACCCGAGGCGTTGGGGA | |
| | | | ATGACAGACGAGCACCTTGGAGCATTTATCTCCGAGGTGCTag | | TCGCCTAGCCCGTGTTTACGGGCTCTCCC | |
| | | | gctgtgctgaccatcgaCGAGAAAGGGACTGAAGCTgctg | | CATATTCAAAATAATGACAGACGAGCACC | |
| | | | | | TTGGAGCATTTATCTCCGAGGTGCT | |
| 95 | BlatCas9 | + | catgGCCCCAGCAGCTTCAGTCCGCTATAGTTCCTTACTGAAA | 19120 | tcctGGGAGGTGTCCACGTGAGCGCTATA | 19271 |
| | | | GGTAAGTTGCTATAGTAAGGGCAACAGACCCGAGGCGTTGGGG | | GTTCCTTACTGAAAGGTAAGTTGCTATAG | |
| | | | ATCGCCTAGCCCGTGTTTACGGGCTCTCCCCATATTCAAAATA | | TAAGGGCAACAGACCCGAGGCGTTGGGGA | |
| | | | ATGACAGACGAGCACCTTGGAGCATTTATCTCCGAGGTGCTag | | TCGCCTAGCCCGTGTTTACGGGCTCTCCC | |
| | | | gctgtgctgaccatcgaCGAGAAAGGGACTGAAGCTgctg | | CATATTCAAAATAATGACAGACGAGCACC | |
| | | | | | TTGGAGCATTTATCTCCGAGGTGCT | |
| 98 | SpyCas9- | − | GTGCATAAGGCTGTGCTGACGTTTTAGAGCTAGAAATAGCAAG | 19121 | TGTTCAATCATTAAGAAGACGTTTTAGAG | 19272 |
| | SpRY | | TTAAAATAAGGCTAGTCCGTTATCAACTTGAAAAAGTGGCACC | | CTAGAAATAGCAAGTTAAAATAAGGCTAG | |
| | | | GAGTCGGTGCgcagcttcagtccctttcTCGTCGATGGTCAGC | | TCCGTTATCAACTTGAAAAAGTGGCACCG | |
| | | | ACAGCctta | | AGTCGGTGC | |
| 99 | SpyCas9- | + | TGGCCCCAGCAGCTTCAGTCGTTTTAGAGCTAGAAATAGCAAG | 19122 | TGGGAGGTGTCCACGTGAGCGTTTTAGAG | 19273 |
| | SpRY | | TTAAAATAAGGCTAGTCCGTTATCAACTTGAAAAAGTGGCACC | | CTAGAAATAGCAAGTTAAAATAAGGCTAG | |
| | | | GAGTCGGTGCggctgtgctgaccatcgaCGAGAAAGGGACTGA | | TCCGTTATCAACTTGAAAAAGTGGCACCG | |
| | | | AGCTGctgg | | AGTCGGTGC | |
| 102 | SpyCas9- | + | ATGGCCCCAGCAGCTTCAGTGTTTTAGAGCTAGAAATAGCAAG | 19123 | GGGAGGTGTCCACGTGAGCCGTTTTAGAG | 19274 |
| | SpRY | | TTAAAATAAGGCTAGTCCGTTATCAACTTGAAAAAGTGGCACC | | CTAGAAATAGCAAGTTAAAATAAGGCTAG | |
| | | | GAGTCGGTGCgctgtgctgaccatcgaCGAGAAAGGGACTGAA | | TCCGTTATCAACTTGAAAAAGTGGCACCG | |
| | | | GCTGCtggg | | AGTCGGTGC | |
| 103 | SpyCas9- | − | CGTGCATAAGGCTGTGCTGAGTTTTAGAGCTAGAAATAGCAAG | 19124 | GTTCAATCATTAAGAAGACAGTTTTAGAG | 19275 |
| | SpRY | | TTAAAATAAGGCTAGTCCGTTATCAACTTGAAAAAGTGGCACC | | CTAGAAATAGCAAGTTAAAATAAGGCTAG | |
| | | | GAGTCGGTGCcagcttcagtccctttcTCGTCGATGGTCAGCA | | TCCGTTATCAACTTGAAAAAGTGGCACCG | |
| | | | CAGCCttat | | AGTCGGTGC | |
| 104 | BlatCas9 | − | ggccGTGCATAAGGCTGTGCTGAGCTATAGTTCCTTACTGAAA | 19125 | tggtATTTTGTTCAATCATTAAGGCTATA | 19276 |
| | | | GGTAAGTTGCTATAGTAAGGGCAACAGACCCGAGGCGTTGGGG | | GTTCCTTACTGAAAGGTAAGTTGCTATAG | |
| | | | ATCGCCTAGCCCGTGTTTACGGGCTCTCCCCATATTCAAAATA | | TAAGGGCAACAGACCCGAGGCGTTGGGGA | |
| | | | ATGACAGACGAGCACCTTGGAGCATTTATCTCCGAGGTGCTca | | TCGCCTAGCCCGTGTTTACGGGCTCTCCC | |
| | | | gcttcagtccctttcTCGTCGATGGTCAGCACAGCCttat | | CATATTCAAAATAATGACAGACGAGCACC | |
| | | | | | TTGGAGCATTTATCTCCGAGGTGCT | |
| 105 | SpyCas9- | + | CATGGCCCCAGCAGCTTCAGGTTTTAGAGCTAGAAATAGCAAG | 19126 | GGAGGTGTCCACGTGAGCCTGTTTTAGAG | 19277 |
| | SpRY | | TTAAAATAAGGCTAGTCCGTTATCAACTTGAAAAAGTGGCACC | | CTAGAAATAGCAAGTTAAAATAAGGCTAG | |
| | | | GAGTCGGTGCctgtgctgaccatcgaCGAGAAAGGGACTGAAG | | TCCGTTATCAACTTGAAAAAGTGGCACCG | |
| | | | CTGCTgggg | | AGTCGGTGC | |
| 106 | SpyCas9- | − | CCGTGCATAAGGCTGTGCTGGTTTTAGAGCTAGAAATAGCAAG | 19127 | TTCAATCATTAAGAAGACAAGTTTTAGAG | 19278 |
| | SpRY | | TTAAAATAAGGCTAGTCCGTTATCAACTTGAAAAAGTGGCACC | | CTAGAAATAGCAAGTTAAAATAAGGCTAG | |
| | | | GAGTCGGTGCagcttcagtccctttcTCGTCGATGGTCAGCAC | | TCCGTTATCAACTTGAAAAAGTGGCACCG | |
| | | | AGCCTtatg | | AGTCGGTGC | |
| 107 | SpyCas9- | − | GCCGTGCATAAGGCTGTGCTGTTTTAGAGCTAGAAATAGCAAG | 19128 | TCAATCATTAAGAAGACAAAGTTTTAGAG | 19279 |
| | SpRY | | TTAAAATAAGGCTAGTCCGTTATCAACTTGAAAAAGTGGCACC | | CTAGAAATAGCAAGTTAAAATAAGGCTAG | |
| | | | GAGTCGGTGCgcttcagtccctttcTCGTCGATGGTCAGCACA | | TCCGTTATCAACTTGAAAAAGTGGCACCG | |
| | | | GCCTTatgc | | AGTCGGTGC | |
| 108 | SpyCas9- | + | ACATGGCCCCAGCAGCTTCAGTTTTAGAGCTAGAAATAGCAAG | 19129 | GAGGTGTCCACGTGAGCCTTGTTTTAGAG | 19280 |
| | SpRY | | TTAAAATAAGGCTAGTCCGTTATCAACTTGAAAAAGTGGCACC | | CTAGAAATAGCAAGTTAAAATAAGGCTAG | |
| | | | GAGTCGGTGCtgtgctgaccatcgaCGAGAAAGGGACTGAAGC | | TCCGTTATCAACTTGAAAAAGTGGCACCG | |
| | | | TGCTGgggc | | AGTCGGTGC | |
| 109 | BlatCas9 | + | aaaaCATGGCCCCAGCAGCTTCAGCTATAGTTCCTTACTGAAA | 19130 | ctggGAGGTGTCCACGTGAGCCTGCTATA | 19281 |
| | | | GGTAAGTTGCTATAGTAAGGGCAACAGACCCGAGGCGTTGGGG | | GTTCCTTACTGAAAGGTAAGTTGCTATAG | |
| | | | ATCGCCTAGCCCGTGTTTACGGGCTCTCCCCATATTCAAAATA | | TAAGGGCAACAGACCCGAGGCGTTGGGGA | |
| | | | ATGACAGACGAGCACCTTGGAGCATTTATCTCCGAGGTGCTtg | | TCGCCTAGCCCGTGTTTACGGGCTCTCCC | |
| | | | tgctgaccatcgaCGAGAAAGGGACTGAAGCTGCTGgggc | | CATATTCAAAATAATGACAGACGAGCACC | |
| | | | | | TTGGAGCATTTATCTCCGAGGTGCT | |
| 110 | BlatCas9 | + | aaaaCATGGCCCCAGCAGCTTCAGCTATAGTTCCTTACTGAAA | 19131 | ctggGAGGTGTCCACGTGAGCCTGCTATA | 19282 |
| | | | GGTAAGTTGCTATAGTAAGGGCAACAGACCCGAGGCGTTGGGG | | GTTCCTTACTGAAAGGTAAGTTGCTATAG | |
| | | | ATCGCCTAGCCCGTGTTTACGGGCTCTCCCCATATTCAAAATA | | TAAGGGCAACAGACCCGAGGCGTTGGGGA | |
| | | | ATGACAGACGAGCACCTTGGAGCATTTATCTCCGAGGTGCTtg | | TCGCCTAGCCCGTGTTTACGGGCTCTCCC | |
| | | | tgctgaccatcgaCGAGAAAGGGACTGAAGCTGCTGgggc | | CATATTCAAAATAATGACAGACGAGCACC | |
| | | | | | TTGGAGCATTTATCTCCGAGGTGCT | |
| 112 | Nme2Cas9 | + | taAAAACATGGCCCCAGCAGCTTCGTTGTAGCTCCCTTTCTCA | 19132 | gaGGTGTCCACGTGAGCCTTGCTCGTTGT | 19283 |
| | | | TTTCGGAAACGAAATGAGAACCGTTGCTACAATAAGGCCGTCT | | AGCTCCCTTTCTCATTTCGGAAACGAAAT | |
| | | | GAAAAGATGTGCCGCAACGCTCTGCCCCTTAAAGCTTCTGCTT | | GAGAACCGTTGCTACAATAAGGCCGTCTG | |
| | | | TAAGGGGCATCGTTTAgtgctgaccatcgaCGAGAAAGGGACT | | AAAAGATGTGCCGCAACGCTCTGCCCCTT | |
| | | | GAAGCTGCTGGggcc | | AAAGCTTCTGCTTTAAGGGGCATCGTTTA | |
| 113 | SpyCas9- | + | AACATGGCCCCAGCAGCTTCGTTTTAGAGCTAGAAATAGCAAG | 19133 | GGAGGTGTCCACGTGAGCCTGTTTTAGAG | 19284 |
| | NG | | TTAAAATAAGGCTAGTCCGTTATCAACTTGAAAAAGTGGCACC | | CTAGAAATAGCAAGTTAAAATAAGGCTAG | |
| | | | GAGTCGGTGCgtgctgaccatcgaCGAGAAAGGGACTGAAGCT | | TCCGTTATCAACTTGAAAAAGTGGCACCG | |
| | | | GCTGGggcc | | AGTCGGTGC | |
| 116 | SpyCas9- | − | GGCCGTGCATAAGGCTGTGCGTTTTAGAGCTAGAAATAGCAAG | 19134 | CAATCATTAAGAAGACAAAGGTTTTAGAG | 19285 |
| | NG | | TTAAAATAAGGCTAGTCCGTTATCAACTTGAAAAAGTGGCACC | | CTAGAAATAGCAAGTTAAAATAAGGCTAG | |
| | | | GAGTCGGTGCcttcagtccctttcTCGTCGATGGTCAGCACAG | | TCCGTTATCAACTTGAAAAAGTGGCACCG | |
| | | | CCTTAtgca | | AGTCGGTGC | |
| 120 | SpyCas9- | + | AACATGGCCCCAGCAGCTTCGTTTTAGAGCTAGAAATAGCAAG | 19135 | AGGTGTCCACGTGAGCCTTGGTTTTAGAG | 19286 |
| | SpRY | | TTAAAATAAGGCTAGTCCGTTATCAACTTGAAAAAGTGGCACC | | CTAGAAATAGCAAGTTAAAATAAGGCTAG | |
| | | | GAGTCGGTGCgtgctgaccatcgaCGAGAAAGGGACTGAAGCT | | TCCGTTATCAACTTGAAAAAGTGGCACCG | |
| | | | GCTGGggcc | | AGTCGGTGC | |
| 122 | SpyCas9- | − | GGCCGTGCATAAGGCTGTGCGTTTTAGAGCTAGAAATAGCAAG | 19136 | CAATCATTAAGAAGACAAAGGTTTTAGAG | 19287 |
| | SpRY | | TTAAAATAAGGCTAGTCCGTTATCAACTTGAAAAAGTGGCACC | | CTAGAAATAGCAAGTTAAAATAAGGCTAG | |
| | | | GAGTCGGTGCcttcagtccctttcTCGTCGATGGTCAGCACAG | | TCCGTTATCAACTTGAAAAAGTGGCACCG | |
| | | | CCTTAtgca | | AGTCGGTGC | |
| 123 | BlatCas9 | + | aaaaACATGGCCCCAGCAGCTTCGCTATAGTTCCTTACTGAAA | 19137 | ctggGAGGTGTCCACGTGAGCCTGCTATA | 19288 |
| | | | GGTAAGTTGCTATAGTAAGGGCAACAGACCCGAGGCGTTGGGG | | GTTCCTTACTGAAAGGTAAGTTGCTATAG | |
| | | | ATCGCCTAGCCCGTGTTTACGGGCTCTCCCCATATTCAAAATA | | TAAGGGCAACAGACCCGAGGCGTTGGGGA | |
| | | | ATGACAGACGAGCACCTTGGAGCATTTATCTCCGAGGTGCTgt | | TCGCCTAGCCCGTGTTTACGGGCTCTCCC | |
| | | | gctgaccatcgaCGAGAAAGGGACTGAAGCTGCTGGggcc | | CATATTCAAAATAATGACAGACGAGCACC | |
| | | | | | TTGGAGCATTTATCTCCGAGGTGCT | |
| 124 | BlatCas9 | + | aaaaACATGGCCCCAGCAGCTTCGCTATAGTTCCTTACTGAAA | 19138 | ctggGAGGTGTCCACGTGAGCCTGCTATA | 19289 |
| | | | GGTAAGTTGCTATAGTAAGGGCAACAGACCCGAGGCGTTGGGG | | GTTCCTTACTGAAAGGTAAGTTGCTATAG | |
| | | | ATCGCCTAGCCCGTGTTTACGGGCTCTCCCCATATTCAAAATA | | TAAGGGCAACAGACCCGAGGCGTTGGGGA | |
| | | | ATGACAGACGAGCACCTTGGAGCATTTATCTCCGAGGTGCTgt | | TCGCCTAGCCCGTGTTTACGGGCTCTCCC | |
| | | | gctgaccatcgaCGAGAAAGGGACTGAAGCTGCTGGggcc | | CATATTCAAAATAATGACAGACGAGCACC | |
| | | | | | TTGGAGCATTTATCTCCGAGGTGCT | |
| 125 | BlatCas9 | − | ccagGCCGTGCATAAGGCTGTGCGCTATAGTTCCTTACTGAAA | 19139 | cattAAGAAGACAAAGGGTTTGTGCTATA | 19290 |
| | | | GGTAAGTTGCTATAGTAAGGGCAACAGACCCGAGGCGTTGGGG | | GTTCCTTACTGAAAGGTAAGTTGCTATAG | |
| | | | ATCGCCTAGCCCGTGTTTACGGGCTCTCCCCATATTCAAAATA | | TAAGGGCAACAGACCCGAGGCGTTGGGGA | |
| | | | ATGACAGACGAGCACCTTGGAGCATTTATCTCCGAGGTGCTct | | TCGCCTAGCCCGTGTTTACGGGCTCTCCC | |
| | | | tcagtccctttcTCGTCGATGGTCAGCACAGCCTTAtgca | | CATATTCAAAATAATGACAGACGAGCACC | |
| | | | | | TTGGAGCATTTATCTCCGAGGTGCT | |
| 130 | Nme2Cas9 | + | ctAAAAACATGGCCCCAGCAGCTTGTTGTAGCTCCCTTTCTCA | 19140 | gaGGTGTCCACGTGAGCCTTGCTCGTTGT | 19291 |
| | | | TTTCGGAAACGAAATGAGAACCGTTGCTACAATAAGGCCGTCT | | AGCTCCCTTTCTCATTTCGGAAACGAAAT | |
| | | | GAAAAGATGTGCCGCAACGCTCTGCCCCTTAAAGCTTCTGCTT | | GAGAACCGTTGCTACAATAAGGCCGTCTG | |
| | | | TAAGGGGCATCGTTTAtgctgaccatcgaCGAGAAAGGGACTG | | AAAAGATGTGCCGCAACGCTCTGCCCCTT | |
| | | | AAGCTGCTGGGgcca | | AAAGCTTCTGCTTTAAGGGGCATCGTTTA | |
| 131 | Nme2Cas9 | − | ctCCAGGCCGTGCATAAGGCTGTGGTTGTAGCTCCCTTTCTCA | 19141 | aaGAAGACAAAGGGTTTGTTGAACGTTGT | 19292 |
| | | | TTTCGGAAACGAAATGAGAACCGTTGCTACAATAAGGCCGTCT | | AGCTCCCTTTCTCATTTCGGAAACGAAAT | |
| | | | GAAAAGATGTGCCGCAACGCTCTGCCCCTTAAAGCTTCTGCTT | | GAGAACCGTTGCTACAATAAGGCCGTCTG | |
| | | | TAAGGGGCATCGTTTAttcagtccctttcTCGTCGATGGTCAG | | AAAAGATGTGCCGCAACGCTCTGCCCCTT | |
| | | | CACAGCCTTATgcac | | AAAGCTTCTGCTTTAAGGGGCATCGTTTA | |
| 134 | ScaCas9- | + | AAACATGGCCCCAGCAGCTTGTTTTAGAGCTAGAAATAGCAAG | 19142 | GGTGTCCACGTGAGCCTTGCGTTTTAGAG | 19293 |
| | Sc++ | | TTAAAATAAGGCTAGTCCGTTATCAACTTGAAAAAGTGGCACC | | CTAGAAATAGCAAGTTAAAATAAGGCTAG | |
| | | | GAGTCGGTGCtgctgaccatcgaCGAGAAAGGGACTGAAGCTG | | TCCGTTATCAACTTGAAAAAGTGGCACCG | |
| | | | CTGGGgcca | | AGTCGGTGC | |
| 135 | SpyCas9- | + | AAACATGGCCCCAGCAGCTTGTTTTAGAGCTAGAAATAGCAAG | 19143 | GGTGTCCACGTGAGCCTTGCGTTTTAGAG | 19294 |
| | SpRY | | TTAAAATAAGGCTAGTCCGTTATCAACTTGAAAAAGTGGCACC | | CTAGAAATAGCAAGTTAAAATAAGGCTAG | |
| | | | GAGTCGGTGCtgctgaccatcgaCGAGAAAGGGACTGAAGCTG | | TCCGTTATCAACTTGAAAAAGTGGCACCG | |
| | | | CTGGGgcca | | AGTCGGTGC | |
| 138 | ScaCas9- | − | AGGCCGTGCATAAGGCTGTGGTTTTAGAGCTAGAAATAGCAAG | 19144 | TCATTAAGAAGACAAAGGGTGTTTTAGAG | 19295 |
| | Sc++ | | TTAAAATAAGGCTAGTCCGTTATCAACTTGAAAAAGTGGCACC | | CTAGAAATAGCAAGTTAAAATAAGGCTAG | |
| | | | GAGTCGGTGCttcagtccctttcTCGTCGATGGTCAGCACAGC | | TCCGTTATCAACTTGAAAAAGTGGCACCG | |
| | | | CTTATgcac | | AGTCGGTGC | |
| 139 | SpyCas9- | − | AGGCCGTGCATAAGGCTGTGGTTTTAGAGCTAGAAATAGCAAG | 19145 | AATCATTAAGAAGACAAAGGGTTTTAGAG | 19296 |
| | SpRY | | TTAAAATAAGGCTAGTCCGTTATCAACTTGAAAAAGTGGCACC | | CTAGAAATAGCAAGTTAAAATAAGGCTAG | |
| | | | GAGTCGGTGCttcagtccctttcTCGTCGATGGTCAGCACAGC | | TCCGTTATCAACTTGAAAAAGTGGCACCG | |
| | | | CTTATgcac | | AGTCGGTGC | |
| 140 | BlatCas9 | − | tccaGGCCGTGCATAAGGCTGTGGCTATAGTTCCTTACTGAAA | 19146 | cattAAGAAGACAAAGGGTTTGTGCTATA | 19297 |
| | | | GGTAAGTTGCTATAGTAAGGGCAACAGACCCGAGGCGTTGGGG | | GTTCCTTACTGAAAGGTAAGTTGCTATAG | |
| | | | ATCGCCTAGCCCGTGTTTACGGGCTCTCCCCATATTCAAAATA | | TAAGGGCAACAGACCCGAGGCGTTGGGGA | |
| | | | ATGACAGACGAGCACCTTGGAGCATTTATCTCCGAGGTGCTtt | | TCGCCTAGCCCGTGTTTACGGGCTCTCCC | |
| | | | cagtccctttcTCGTCGATGGTCAGCACAGCCTTATgcac | | CATATTCAAAATAATGACAGACGAGCACC | |
| | | | | | TTGGAGCATTTATCTCCGAGGTGCT | |
| 141 | BlatCas9 | + | taaaAACATGGCCCCAGCAGCTTGCTATAGTTCCTTACTGAAA | 19147 | aggtGTCCACGTGAGCCTTGCTCGCTATA | 19298 |
| | | | GGTAAGTTGCTATAGTAAGGGCAACAGACCCGAGGCGTTGGGG | | GTTCCTTACTGAAAGGTAAGTTGCTATAG | |
| | | | ATCGCCTAGCCCGTGTTTACGGGCTCTCCCCATATTCAAAATA | | TAAGGGCAACAGACCCGAGGCGTTGGGGA | |
| | | | ATGACAGACGAGCACCTTGGAGCATTTATCTCCGAGGTGCTtg | | TCGCCTAGCCCGTGTTTACGGGCTCTCCC | |
| | | | ctgaccatcgaCGAGAAAGGGACTGAAGCTGCTGGGgcca | | CATATTCAAAATAATGACAGACGAGCACC | |
| | | | | | TTGGAGCATTTATCTCCGAGGTGCT | |
| 142 | BlatCas9 | − | tccaGGCCGTGCATAAGGCTGTGGCTATAGTTCCTTACTGAAA | 19148 | cattAAGAAGACAAAGGGTTTGTGCTATA | 19299 |
| | | | GGTAAGTTGCTATAGTAAGGGCAACAGACCCGAGGCGTTGGGG | | GTTCCTTACTGAAAGGTAAGTTGCTATAG | |
| | | | ATCGCCTAGCCCGTGTTTACGGGCTCTCCCCATATTCAAAATA | | TAAGGGCAACAGACCCGAGGCGTTGGGGA | |
| | | | ATGACAGACGAGCACCTTGGAGCATTTATCTCCGAGGTGCTtt | | TCGCCTAGCCCGTGTTTACGGGCTCTCCC | |
| | | | cagtccctttcTCGTCGATGGTCAGCACAGCCTTATgcac | | CATATTCAAAATAATGACAGACGAGCACC | |
| | | | | | TTGGAGCATTTATCTCCGAGGTGCT | |
| 145 | SauCas9 | − | CCAGGCCGTGCATAAGGCTGTGTTTTAGTACTCTGGAAACAGA | 19149 | CATTAAGAAGACAAAGGGTTTGTTTTAGT | 19300 |
| | KKH | | ATCTACTAAAACAAGGCAAAATGCCGTGTTTATCTCGTCAACT | | ACTCTGGAAACAGAATCTACTAAAACAAG | |
| | | | TGTTGGCGAGAtcagtccctttcTCGTCGATGGTCAGCACAGC | | GCAAAATGCCGTGTTTATCTCGTCAACTT | |
| | | | CTTATGcacg | | GTTGGCGAGA | |
| 146 | Sauri- | + | AAAAACATGGCCCCAGCAGCTGTTTTAGTACTCTGGAAACAGA | 19150 | GGTGTCCACGTGAGCCTTGCTGTTTTAGT | 19301 |
| | Cas9- | | ATCTACTAAAACAAGGCAAAATGCCGTGTTTATCTCGTCAACT | | ACTCTGGAAACAGAATCTACTAAAACAAG | |
| | KKH | | TGTTGGCGAGAgctgaccatcgaCGAGAAAGGGACTGAAGCTG | | GCAAAATGCCGTGTTTATCTCGTCAACTT | |
| | | | CTGGGGccat | | GTTGGCGAGA | |
| 147 | SpyCas9- | + | AAAACATGGCCCCAGCAGCTGTTTTAGAGCTAGAAATAGCAAG | 19151 | GTGTCCACGTGAGCCTTGCTGTTTTAGAG | 19302 |
| | SpRY | | TTAAAATAAGGCTAGTCCGTTATCAACTTGAAAAAGTGGCACC | | CTAGAAATAGCAAGTTAAAATAAGGCTAG | |
| | | | GAGTCGGTGCgctgaccatcgaCGAGAAAGGGACTGAAGCTGC | | TCCGTTATCAACTTGAAAAAGTGGCACCG | |
| | | | TGGGGccat | | AGTCGGTGC | |
| 148 | SpyCas9- | − | CAGGCCGTGCATAAGGCTGTGTTTTAGAGCTAGAAATAGCAAG | 19152 | ATCATTAAGAAGACAAAGGGGTTTTAGAG | 19303 |
| | SpRY | | TTAAAATAAGGCTAGTCCGTTATCAACTTGAAAAAGTGGCACC | | CTAGAAATAGCAAGTTAAAATAAGGCTAG | |
| | | | GAGTCGGTGCtcagtccctttcTCGTCGATGGTCAGCACAGCC | | TCCGTTATCAACTTGAAAAAGTGGCACCG | |
| | | | TTATGcacg | | AGTCGGTGC | |
| 149 | SauCas9 | + | TAAAAACATGGCCCCAGCAGCGTTTTAGTACTCTGGAAACAGA | 19153 | GGTGTCCACGTGAGCCTTGCTGTTTTAGT | 19304 |
| | KKH | | ATCTACTAAAACAAGGCAAAATGCCGTGTTTATCTCGTCAACT | | ACTCTGGAAACAGAATCTACTAAAACAAG | |
| | | | TGTTGGCGAGActgaccatcgaCGAGAAAGGGACTGAAGCTGC | | GCAAAATGCCGTGTTTATCTCGTCAACTT | |
| | | | TGGGGCcatg | | GTTGGCGAGA | |
| 150 | SauCas9 | + | TAAAAACATGGCCCCAGCAGCGTTTTAGTACTCTGGAAACAGA | 19154 | GGTGTCCACGTGAGCCTTGCTGTTTTAGT | 19305 |
| | KKH | | ATCTACTAAAACAAGGCAAAATGCCGTGTTTATCTCGTCAACT | | ACTCTGGAAACAGAATCTACTAAAACAAG | |
| | | | TGTTGGCGAGActgaccatcgaCGAGAAAGGGACTGAAGCTGC | | GCAAAATGCCGTGTTTATCTCGTCAACTT | |
| | | | TGGGGCcatg | | GTTGGCGAGA | |
| 153 | SpyCas9- | − | CCAGGCCGTGCATAAGGCTGGTTTTAGAGCTAGAAATAGCAAG | 19155 | CATTAAGAAGACAAAGGGTTGTTTTAGAG | 19306 |
| | NG | | TTAAAATAAGGCTAGTCCGTTATCAACTTGAAAAAGTGGCACC | | CTAGAAATAGCAAGTTAAAATAAGGCTAG | |
| | | | GAGTCGGTGCcagtccctttcTCGTCGATGGTCAGCACAGCCT | | TCCGTTATCAACTTGAAAAAGTGGCACCG | |
| | | | TATGCacgg | | AGTCGGTGC | |
| 157 | SpyCas9- | − | CCAGGCCGTGCATAAGGCTGGTTTTAGAGCTAGAAATAGCAAG | 19156 | TCATTAAGAAGACAAAGGGTGTTTTAGAG | 19307 |
| | SpRY | | TTAAAATAAGGCTAGTCCGTTATCAACTTGAAAAAGTGGCACC | | CTAGAAATAGCAAGTTAAAATAAGGCTAG | |
| | | | GAGTCGGTGCcagtccctttcTCGTCGATGGTCAGCACAGCCT | | TCCGTTATCAACTTGAAAAAGTGGCACCG | |
| | | | TATGCacgg | | AGTCGGTGC | |
| 158 | SpyCas9- | + | AAAAACATGGCCCCAGCAGCGTTTTAGAGCTAGAAATAGCAAG | 19157 | TGTCCACGTGAGCCTTGCTCGTTTTAGAG | 19308 |
| | SpRY | | TTAAAATAAGGCTAGTCCGTTATCAACTTGAAAAAGTGGCACC | | CTAGAAATAGCAAGTTAAAATAAGGCTAG | |
| | | | GAGTCGGTGCctgaccatcgaCGAGAAAGGGACTGAAGCTGCT | | TCCGTTATCAACTTGAAAAAGTGGCACCG | |
| | | | GGGGCcatg | | AGTCGGTGC | |
| 162 | ScaCas9- | − | TCCAGGCCGTGCATAAGGCTGTTTTAGAGCTAGAAATAGCAAG | 19158 | TCATTAAGAAGACAAAGGGTGTTTTAGAG | 19309 |
| | Sc++ | | TTAAAATAAGGCTAGTCCGTTATCAACTTGAAAAAGTGGCACC | | CTAGAAATAGCAAGTTAAAATAAGGCTAG | |
| | | | GAGTCGGTGCagtccctttcTCGTCGATGGTCAGCACAGCCTT | | TCCGTTATCAACTTGAAAAAGTGGCACCG | |
| | | | ATGCAcggc | | AGTCGGTGC | |
| 163 | SpyCas9- | − | TCCAGGCCGTGCATAAGGCTGTTTTAGAGCTAGAAATAGCAAG | 19159 | CATTAAGAAGACAAAGGGTTGTTTTAGAG | 19310 |
| | SpRY | | TTAAAATAAGGCTAGTCCGTTATCAACTTGAAAAAGTGGCACC | | CTAGAAATAGCAAGTTAAAATAAGGCTAG | |
| | | | GAGTCGGTGCagtccctttcTCGTCGATGGTCAGCACAGCCTT | | TCCGTTATCAACTTGAAAAAGTGGCACCG | |
| | | | ATGCAcggc | | AGTCGGTGC | |
| 164 | SpyCas9- | + | TAAAAACATGGCCCCAGCAGGTTTTAGAGCTAGAAATAGCAAG | 19160 | GTCCACGTGAGCCTTGCTCGGTTTTAGAG | 19311 |
| | SpRY | | TTAAAATAAGGCTAGTCCGTTATCAACTTGAAAAAGTGGCACC | | CTAGAAATAGCAAGTTAAAATAAGGCTAG | |
| | | | GAGTCGGTGCtgaccatcgaCGAGAAAGGGACTGAAGCTGCTG | | TCCGTTATCAACTTGAAAAAGTGGCACCG | |
| | | | GGGCCatgt | | AGTCGGTGC | |
| 165 | SpyCas9- | − | CTCCAGGCCGTGCATAAGGCGTTTTAGAGCTAGAAATAGCAAG | 19161 | CATTAAGAAGACAAAGGGTTGTTTTAGAG | 19312 |
| | NG | | TTAAAATAAGGCTAGTCCGTTATCAACTTGAAAAAGTGGCACC | | CTAGAAATAGCAAGTTAAAATAAGGCTAG | |
| | | | GAGTCGGTGCgtccctttcTCGTCGATGGTCAGCACAGCCTTA | | TCCGTTATCAACTTGAAAAAGTGGCACCG | |
| | | | TGCACggcc | | AGTCGGTGC | |
| 169 | SpyCas9- | − | CTCCAGGCCGTGCATAAGGCGTTTTAGAGCTAGAAATAGCAAG | 19162 | ATTAAGAAGACAAAGGGTTTGTTTTAGAG | 19313 |
| | SpRY | | TTAAAATAAGGCTAGTCCGTTATCAACTTGAAAAAGTGGCACC | | CTAGAAATAGCAAGTTAAAATAAGGCTAG | |
| | | | GAGTCGGTGCgtccctttcTCGTCGATGGTCAGCACAGCCTTA | | TCCGTTATCAACTTGAAAAAGTGGCACCG | |
| | | | TGCACggcc | | AGTCGGTGC | |
| 170 | SpyCas9- | + | CTAAAAACATGGCCCCAGCAGTTTTAGAGCTAGAAATAGCAAG | 19163 | TCCACGTGAGCCTTGCTCGAGTTTTAGAG | 19314 |
| | SpRY | | TTAAAATAAGGCTAGTCCGTTATCAACTTGAAAAAGTGGCACC | | CTAGAAATAGCAAGTTAAAATAAGGCTAG | |
| | | | GAGTCGGTGCgaccatcgaCGAGAAAGGGACTGAAGCTGCTGG | | TCCGTTATCAACTTGAAAAAGTGGCACCG | |
| | | | GGCCAtgtt | | AGTCGGTGC | |
| 171 | BlatCas9 | + | cctcTAAAAACATGGCCCCAGCAGCTATAGTTCCTTACTGAAA | 19164 | ggtgTCCACGTGAGCCTTGCTCGGCTATA | 19315 |
| | | | GGTAAGTTGCTATAGTAAGGGCAACAGACCCGAGGCGTTGGGG | | GTTCCTTACTGAAAGGTAAGTTGCTATAG | |
| | | | ATCGCCTAGCCCGTGTTTACGGGCTCTCCCCATATTCAAAATA | | TAAGGGCAACAGACCCGAGGCGTTGGGGA | |
| | | | ATGACAGACGAGCACCTTGGAGCATTTATCTCCGAGGTGCTga | | TCGCCTAGCCCGTGTTTACGGGCTCTCCC | |
| | | | ccatcgaCGAGAAAGGGACTGAAGCTGCTGGGGCCAtgtt | | CATATTCAAAATAATGACAGACGAGCACC | |
| | | | | | TTGGAGCATTTATCTCCGAGGTGCT | |
| 172 | BlatCas9 | − | ccccTCCAGGCCGTGCATAAGGCGCTATAGTTCCTTACTGAAA | 19165 | cattAAGAAGACAAAGGGTTTGTGCTATA | 19316 |
| | | | GGTAAGTTGCTATAGTAAGGGCAACAGACCCGAGGCGTTGGGG | | GTTCCTTACTGAAAGGTAAGTTGCTATAG | |
| | | | ATCGCCTAGCCCGTGTTTACGGGCTCTCCCCATATTCAAAATA | | TAAGGGCAACAGACCCGAGGCGTTGGGGA | |
| | | | ATGACAGACGAGCACCTTGGAGCATTTATCTCCGAGGTGCTgt | | TCGCCTAGCCCGTGTTTACGGGCTCTCCC | |
| | | | ccctttcTCGTCGATGGTCAGCACAGCCTTATGCACggcc | | CATATTCAAAATAATGACAGACGAGCACC | |
| | | | | | TTGGAGCATTTATCTCCGAGGTGCT | |
| 173 | BlatCas9 | + | cctcTAAAAACATGGCCCCAGCAGCTATAGTTCCTTACTGAAA | 19166 | ggtgTCCACGTGAGCCTTGCTCGGCTATA | 19317 |
| | | | GGTAAGTTGCTATAGTAAGGGCAACAGACCCGAGGCGTTGGGG | | GTTCCTTACTGAAAGGTAAGTTGCTATAG | |
| | | | ATCGCCTAGCCCGTGTTTACGGGCTCTCCCCATATTCAAAATA | | TAAGGGCAACAGACCCGAGGCGTTGGGGA | |
| | | | ATGACAGACGAGCACCTTGGAGCATTTATCTCCGAGGTGCTga | | TCGCCTAGCCCGTGTTTACGGGCTCTCCC | |
| | | | ccatcgaCGAGAAAGGGACTGAAGCTGCTGGGGCCAtgtt | | CATATTCAAAATAATGACAGACGAGCACC | |
| | | | | | TTGGAGCATTTATCTCCGAGGTGCT | |
| 174 | BlatCas9 | − | ccccTCCAGGCCGTGCATAAGGCGCTATAGTTCCTTACTGAAA | 19167 | cattAAGAAGACAAAGGGTTTGTGCTATA | 19318 |
| | | | GGTAAGTTGCTATAGTAAGGGCAACAGACCCGAGGCGTTGGGG | | GTTCCTTACTGAAAGGTAAGTTGCTATAG | |
| | | | ATCGCCTAGCCCGTGTTTACGGGCTCTCCCCATATTCAAAATA | | TAAGGGCAACAGACCCGAGGCGTTGGGGA | |
| | | | ATGACAGACGAGCACCTTGGAGCATTTATCTCCGAGGTGCTgt | | TCGCCTAGCCCGTGTTTACGGGCTCTCCC | |
| | | | ccctttcTCGTCGATGGTCAGCACAGCCTTATGCACggcc | | CATATTCAAAATAATGACAGACGAGCACC | |
| | | | | | TTGGAGCATTTATCTCCGAGGTGCT | |
| 177 | ScaCas9- | − | CCTCCAGGCCGTGCATAAGGGTTTTAGAGCTAGAAATAGCAAG | 19168 | TTAAGAAGACAAAGGGTTTGGTTTTAGAG | 19319 |
| | Sc++ | | TTAAAATAAGGCTAGTCCGTTATCAACTTGAAAAAGTGGCACC | | CTAGAAATAGCAAGTTAAAATAAGGCTAG | |
| | | | GAGTCGGTGCtccctttcTCGTCGATGGTCAGCACAGCCTTAT | | TCCGTTATCAACTTGAAAAAGTGGCACCG | |
| | | | GCACGgcct | | AGTCGGTGC | |
| 178 | SpyCas9- | − | CCTCCAGGCCGTGCATAAGGGTTTTAGAGCTAGAAATAGCAAG | 19169 | TTAAGAAGACAAAGGGTTTGGTTTTAGAG | 19320 |
| | SpRY | | TTAAAATAAGGCTAGTCCGTTATCAACTTGAAAAAGTGGCACC | | CTAGAAATAGCAAGTTAAAATAAGGCTAG | |
| | | | GAGTCGGTGCtccctttcTCGTCGATGGTCAGCACAGCCTTAT | | TCCGTTATCAACTTGAAAAAGTGGCACCG | |
| | | | GCACGgcct | | AGTCGGTGC | |
| 179 | SpyCas9- | + | TCTAAAAACATGGCCCCAGCGTTTTAGAGCTAGAAATAGCAAG | 19170 | TCCACGTGAGCCTTGCTCGAGTTTTAGAG | 19321 |
| | NG | | TTAAAATAAGGCTAGTCCGTTATCAACTTGAAAAAGTGGCACC | | CTAGAAATAGCAAGTTAAAATAAGGCTAG | |
| | | | GAGTCGGTGCaccatcgaCGAGAAAGGGACTGAAGCTGCTGGG | | TCCGTTATCAACTTGAAAAAGTGGCACCG | |
| | | | GCCATgttt | | AGTCGGTGC | |
| 183 | SpyCas9- | + | TCTAAAAACATGGCCCCAGCGTTTTAGAGCTAGAAATAGCAAG | 19171 | CCACGTGAGCCTTGCTCGAGGTTTTAGAG | 19322 |
| | SpRY | | TTAAAATAAGGCTAGTCCGTTATCAACTTGAAAAAGTGGCACC | | CTAGAAATAGCAAGTTAAAATAAGGCTAG | |
| | | | GAGTCGGTGCaccatcgaCGAGAAAGGGACTGAAGCTGCTGGG | | TCCGTTATCAACTTGAAAAAGTGGCACCG | |
| | | | GCCATgttt | | AGTCGGTGC | |
| 187 | ScaCas9- | + | CTCTAAAAACATGGCCCCAGGTTTTAGAGCTAGAAATAGCAAG | 19172 | ACGTGAGCCTTGCTCGAGGCGTTTTAGAG | 19323 |
| | Sc++ | | TTAAAATAAGGCTAGTCCGTTATCAACTTGAAAAAGTGGCACC | | CTAGAAATAGCAAGTTAAAATAAGGCTAG | |
| | | | GAGTCGGTGCccatcgaCGAGAAAGGGACTGAAGCTGCTGGGG | | TCCGTTATCAACTTGAAAAAGTGGCACCG | |
| | | | CCATGtttt | | AGTCGGTGC | |
| 188 | SpyCas9- | + | CTCTAAAAACATGGCCCCAGGTTTTAGAGCTAGAAATAGCAAG | 19173 | CACGTGAGCCTTGCTCGAGGGTTTTAGAG | 19324 |
| | SpRY | | TTAAAATAAGGCTAGTCCGTTATCAACTTGAAAAAGTGGCACC | | CTAGAAATAGCAAGTTAAAATAAGGCTAG | |
| | | | GAGTCGGTGCccatcgaCGAGAAAGGGACTGAAGCTGCTGGGG | | TCCGTTATCAACTTGAAAAAGTGGCACCG | |
| | | | CCATGtttt | | AGTCGGTGC | |
| 189 | SpyCas9- | − | CCCTCCAGGCCGTGCATAAGGTTTTAGAGCTAGAAATAGCAAG | 19174 | TAAGAAGACAAAGGGTTTGTGTTTTAGAG | 19325 |
| | SpRY | | TTAAAATAAGGCTAGTCCGTTATCAACTTGAAAAAGTGGCACC | | CTAGAAATAGCAAGTTAAAATAAGGCTAG | |
| | | | GAGTCGGTGCccctttcTCGTCGATGGTCAGCACAGCCTTATG | | TCCGTTATCAACTTGAAAAAGTGGCACCG | |
| | | | CACGGcctg | | AGTCGGTGC | |
| 192 | Sauri- | + | GCCTCTAAAAACATGGCCCCAGTTTTAGTACTCTGGAAACAGA | 19175 | CACGTGAGCCTTGCTCGAGGCGTTTTAGT | 19326 |
| | Cas9- | | ATCTACTAAAACAAGGCAAAATGCCGTGTTTATCTCGTCAACT | | ACTCTGGAAACAGAATCTACTAAAACAAG | |
| | KKH | | TGTTGGCGAGAcatcgaCGAGAAAGGGACTGAAGCTGCTGGGG | | GCAAAATGCCGTGTTTATCTCGTCAACTT | |
| | | | CCATGTtttt | | GTTGGCGAGA | |
| 193 | SpyCas9- | − | CCCCTCCAGGCCGTGCATAAGTTTTAGAGCTAGAAATAGCAAG | 19176 | TAAGAAGACAAAGGGTTTGTGTTTTAGAG | 19327 |
| | NG | | TTAAAATAAGGCTAGTCCGTTATCAACTTGAAAAAGTGGCACC | | CTAGAAATAGCAAGTTAAAATAAGGCTAG | |
| | | | GAGTCGGTGCcctttcTCGTCGATGGTCAGCACAGCCTTATGC | | TCCGTTATCAACTTGAAAAAGTGGCACCG | |
| | | | ACGGCctgg | | AGTCGGTGC | |
| 197 | SpyCas9- | − | CCCCTCCAGGCCGTGCATAAGTTTTAGAGCTAGAAATAGCAAG | 19177 | AAGAAGACAAAGGGTTTGTTGTTTTAGAG | 19328 |
| | SpRY | | TTAAAATAAGGCTAGTCCGTTATCAACTTGAAAAAGTGGCACC | | CTAGAAATAGCAAGTTAAAATAAGGCTAG | |
| | | | GAGTCGGTGCcctttcTCGTCGATGGTCAGCACAGCCTTATGC | | TCCGTTATCAACTTGAAAAAGTGGCACCG | |
| | | | ACGGCctgg | | AGTCGGTGC | |
| 198 | SpyCas9- | + | CCTCTAAAAACATGGCCCCAGTTTTAGAGCTAGAAATAGCAAG | 19178 | ACGTGAGCCTTGCTCGAGGCGTTTTAGAG | 19329 |
| | SpRY | | TTAAAATAAGGCTAGTCCGTTATCAACTTGAAAAAGTGGCACC | | CTAGAAATAGCAAGTTAAAATAAGGCTAG | |
| | | | GAGTCGGTGCcatcgaCGAGAAAGGGACTGAAGCTGCTGGGGC | | TCCGTTATCAACTTGAAAAAGTGGCACCG | |
| | | | CATGTtttt | | AGTCGGTGC | |
| 199 | BlatCas9 | + | tggcCTCTAAAAACATGGCCCCAGCTATAGTTCCTTACTGAAA | 19179 | acgtGAGCCTTGCTCGAGGCCTGGCTATA | 19330 |
| | | | GGTAAGTTGCTATAGTAAGGGCAACAGACCCGAGGCGTTGGGG | | GTTCCTTACTGAAAGGTAAGTTGCTATAG | |
| | | | ATCGCCTAGCCCGTGTTTACGGGCTCTCCCCATATTCAAAATA | | TAAGGGCAACAGACCCGAGGCGTTGGGGA | |
| | | | ATGACAGACGAGCACCTTGGAGCATTTATCTCCGAGGTGCTca | | TCGCCTAGCCCGTGTTTACGGGCTCTCCC | |
| | | | tcgaCGAGAAAGGGACTGAAGCTGCTGGGGCCATGTtttt | | CATATTCAAAATAATGACAGACGAGCACC | |
| | | | | | TTGGAGCATTTATCTCCGAGGTGCT | |
| 203 | SauCas9 | + | GGCCTCTAAAAACATGGCCCCGTTTTAGTACTCTGGAAACAGA | 19180 | ACGTGAGCCTTGCTCGAGGCCGTTTTAGT | 19331 |
| | KKH | | ATCTACTAAAACAAGGCAAAATGCCGTGTTTATCTCGTCAACT | | ACTCTGGAAACAGAATCTACTAAAACAAG | |
| | | | TGTTGGCGAGAatcgaCGAGAAAGGGACTGAAGCTGCTGGGGC | | GCAAAATGCCGTGTTTATCTCGTCAACTT | |
| | | | CATGTTttta | | GTTGGCGAGA | |
| 206 | ScaCas9- | − | TCCCCTCCAGGCCGTGCATAGTTTTAGAGCTAGAAATAGCAAG | 19181 | TTAAGAAGACAAAGGGTTTGGTTTTAGAG | 19332 |
| | Sc++ | | TTAAAATAAGGCTAGTCCGTTATCAACTTGAAAAAGTGGCACC | | CTAGAAATAGCAAGTTAAAATAAGGCTAG | |
| | | | GAGTCGGTGCctttcTCGTCGATGGTCAGCACAGCCTTATGCA | | TCCGTTATCAACTTGAAAAAGTGGCACCG | |
| | | | CGGCCtgga | | AGTCGGTGC | |
| 207 | SpyCas9 | − | TCCCCTCCAGGCCGTGCATAGTTTTAGAGCTAGAAATAGCAAG | 19182 | GGGTTTGTTGAACTTGACCTGTTTTAGAG | 19333 |
| | | | TTAAAATAAGGCTAGTCCGTTATCAACTTGAAAAAGTGGCACC | | CTAGAAATAGCAAGTTAAAATAAGGCTAG | |
| | | | GAGTCGGTGCctttcTCGTCGATGGTCAGCACAGCCTTATGCA | | TCCGTTATCAACTTGAAAAAGTGGCACCG | |
| | | | CGGCCtgga | | AGTCGGTGC | |
| 210 | SpyCas9- | − | TCCCCTCCAGGCCGTGCATAGTTTTAGAGCTAGAAATAGCAAG | 19183 | AGAAGACAAAGGGTTTGTTGGTTTTAGAG | 19334 |
| | SpRY | | TTAAAATAAGGCTAGTCCGTTATCAACTTGAAAAAGTGGCACC | | CTAGAAATAGCAAGTTAAAATAAGGCTAG | |
| | | | GAGTCGGTGCctttcTCGTCGATGGTCAGCACAGCCTTATGCA | | TCCGTTATCAACTTGAAAAAGTGGCACCG | |
| | | | CGGCCtgga | | AGTCGGTGC | |
| 211 | SpyCas9- | + | GCCTCTAAAAACATGGCCCCGTTTTAGAGCTAGAAATAGCAAG | 19184 | CGTGAGCCTTGCTCGAGGCCGTTTTAGAG | 19335 |
| | NG | | TTAAAATAAGGCTAGTCCGTTATCAACTTGAAAAAGTGGCACC | | CTAGAAATAGCAAGTTAAAATAAGGCTAG | |
| | | | GAGTCGGTGCatcgaCGAGAAAGGGACTGAAGCTGCTGGGGCC | | TCCGTTATCAACTTGAAAAAGTGGCACCG | |
| | | | ATGTTttta | | AGTCGGTGC | |
| 214 | SpyCas9- | − | TCCCCTCCAGGCCGTGCATAGTTTTAGAGCTAGAAATAGCAAG | 19185 | TAAGAAGACAAAGGGTTTGTGTTTTAGAG | 19336 |
| | NG | | TTAAAATAAGGCTAGTCCGTTATCAACTTGAAAAAGTGGCACC | | CTAGAAATAGCAAGTTAAAATAAGGCTAG | |
| | | | GAGTCGGTGCctttcTCGTCGATGGTCAGCACAGCCTTATGCA | | TCCGTTATCAACTTGAAAAAGTGGCACCG | |
| | | | CGGCCtgga | | AGTCGGTGC | |
| 218 | SpyCas9- | + | GCCTCTAAAAACATGGCCCCGTTTTAGAGCTAGAAATAGCAAG | 19186 | CGTGAGCCTTGCTCGAGGCCGTTTTAGAG | 19337 |
| | SpRY | | TTAAAATAAGGCTAGTCCGTTATCAACTTGAAAAAGTGGCACC | | CTAGAAATAGCAAGTTAAAATAAGGCTAG | |
| | | | GAGTCGGTGCatcgaCGAGAAAGGGACTGAAGCTGCTGGGGCC | | TCCGTTATCAACTTGAAAAAGTGGCACCG | |
| | | | ATGTTttta | | AGTCGGTGC | |
| 224 | Sauri- | − | TCTCCCCTCCAGGCCGTGCATGTTTTAGTACTCTGGAAACAGA | 19187 | AAGGGTTTGTTGAACTTGACCGTTTTAGT | 19338 |
| | Cas9 | | ATCTACTAAAACAAGGCAAAATGCCGTGTTTATCTCGTCAACT | | ACTCTGGAAACAGAATCTACTAAAACAAG | |
| | | | TGTTGGCGAGAtttcTCGTCGATGGTCAGCACAGCCTTATGCA | | GCAAAATGCCGTGTTTATCTCGTCAACTT | |
| | | | CGGCCTggag | | GTTGGCGAGA | |
| 225 | Sauri- | − | TCTCCCCTCCAGGCCGTGCATGTTTTAGTACTCTGGAAACAGA | 19188 | AAGGGTTTGTTGAACTTGACCGTTTTAGT | 19339 |
| | Cas9- | | ATCTACTAAAACAAGGCAAAATGCCGTGTTTATCTCGTCAACT | | ACTCTGGAAACAGAATCTACTAAAACAAG | |
| | KKH | | TGTTGGCGAGAtttcTCGTCGATGGTCAGCACAGCCTTATGCA | | GCAAAATGCCGTGTTTATCTCGTCAACTT | |
| | | | CGGCCTggag | | GTTGGCGAGA | |
| 228 | ScaCas9- | + | GGCCTCTAAAAACATGGCCCGTTTTAGAGCTAGAAATAGCAAG | 19189 | GTGAGCCTTGCTCGAGGCCTGTTTTAGAG | 19340 |
| | Sc++ | | TTAAAATAAGGCTAGTCCGTTATCAACTTGAAAAAGTGGCACC | | CTAGAAATAGCAAGTTAAAATAAGGCTAG | |
| | | | GAGTCGGTGCtcgaCGAGAAAGGGACTGAAGCTGCTGGGGCCA | | TCCGTTATCAACTTGAAAAAGTGGCACCG | |
| | | | TGTTTttag | | AGTCGGTGC | |
| 229 | SpyCas9- | + | GGCCTCTAAAAACATGGCCCGTTTTAGAGCTAGAAATAGCAAG | 19190 | GTGAGCCTTGCTCGAGGCCTGTTTTAGAG | 19341 |
| | SpRY | | TTAAAATAAGGCTAGTCCGTTATCAACTTGAAAAAGTGGCACC | | CTAGAAATAGCAAGTTAAAATAAGGCTAG | |
| | | | GAGTCGGTGCtcgaCGAGAAAGGGACTGAAGCTGCTGGGGCCA | | TCCGTTATCAACTTGAAAAAGTGGCACCG | |
| | | | TGTTTttag | | AGTCGGTGC | |
| 232 | ScaCas9- | − | CTCCCCTCCAGGCCGTGCATGTTTTAGAGCTAGAAATAGCAAG | 19191 | AGACAAAGGGTTTGTTGAACGTTTTAGAG | 19342 |
| | Sc++ | | TTAAAATAAGGCTAGTCCGTTATCAACTTGAAAAAGTGGCACC | | CTAGAAATAGCAAGTTAAAATAAGGCTAG | |
| | | | GAGTCGGTGCtttcTCGTCGATGGTCAGCACAGCCTTATGCAC | | TCCGTTATCAACTTGAAAAAGTGGCACCG | |
| | | | GGCCTggag | | AGTCGGTGC | |
| 233 | SpyCas9- | − | CTCCCCTCCAGGCCGTGCATGTTTTAGAGCTAGAAATAGCAAG | 19192 | GAAGACAAAGGGTTTGTTGAGTTTTAGAG | 19343 |
| | SpRY | | TTAAAATAAGGCTAGTCCGTTATCAACTTGAAAAAGTGGCACC | | CTAGAAATAGCAAGTTAAAATAAGGCTAG | |
| | | | GAGTCGGTGCtttcTCGTCGATGGTCAGCACAGCCTTATGCAC | | TCCGTTATCAACTTGAAAAAGTGGCACCG | |
| | | | GGCCTggag | | AGTCGGTGC | |
| 234 | BlatCas9 | − | tctcTCCCCTCCAGGCCGTGCATGCTATAGTTCCTTACTGAAA | 19193 | agaaGACAAAGGGTTTGTTGAACGCTATA | 19344 |
| | | | GGTAAGTTGCTATAGTAAGGGCAACAGACCCGAGGCGTTGGGG | | GTTCCTTACTGAAAGGTAAGTTGCTATAG | |
| | | | ATCGCCTAGCCCGTGTTTACGGGCTCTCCCCATATTCAAAATA | | TAAGGGCAACAGACCCGAGGCGTTGGGGA | |
| | | | ATGACAGACGAGCACCTTGGAGCATTTATCTCCGAGGTGCTtt | | TCGCCTAGCCCGTGTTTACGGGCTCTCCC | |
| | | | tcTCGTCGATGGTCAGCACAGCCTTATGCACGGCCTggag | | CATATTCAAAATAATGACAGACGAGCACC | |
| | | | | | TTGGAGCATTTATCTCCGAGGTGCT | |
| 235 | BlatCas9 | − | tctcTCCCCTCCAGGCCGTGCATGCTATAGTTCCTTACTGAAA | 19194 | agaaGACAAAGGGTTTGTTGAACGCTATA | 19345 |
| | | | GGTAAGTTGCTATAGTAAGGGCAACAGACCCGAGGCGTTGGGG | | GTTCCTTACTGAAAGGTAAGTTGCTATAG | |
| | | | ATCGCCTAGCCCGTGTTTACGGGCTCTCCCCATATTCAAAATA | | TAAGGGCAACAGACCCGAGGCGTTGGGGA | |
| | | | ATGACAGACGAGCACCTTGGAGCATTTATCTCCGAGGTGCTtt | | TCGCCTAGCCCGTGTTTACGGGCTCTCCC | |
| | | | tcTCGTCGATGGTCAGCACAGCCTTATGCACGGCCTggag | | CATATTCAAAATAATGACAGACGAGCACC | |
| | | | | | TTGGAGCATTTATCTCCGAGGTGCT | |
| 239 | SauCas9 | − | CTCTCCCCTCCAGGCCGTGCAGTTTTAGTACTCTGGAAACAGA | 19195 | GAAGACAAAGGGTTTGTTGAAGTTTTAGT | 19346 |
| | KKH | | ATCTACTAAAACAAGGCAAAATGCCGTGTTTATCTCGTCAACT | | ACTCTGGAAACAGAATCTACTAAAACAAG | |
| | | | TGTTGGCGAGAttcTCGTCGATGGTCAGCACAGCCTTATGCAC | | GCAAAATGCCGTGTTTATCTCGTCAACTT | |
| | | | GGCCTGgagg | | GTTGGCGAGA | |
| 240 | Sauri- | + | ATGGCCTCTAAAAACATGGCCGTTTTAGTACTCTGGAAACAGA | 19196 | ACGTGAGCCTTGCTCGAGGCCGTTTTAGT | 19347 |
| | Cas9- | | ATCTACTAAAACAAGGCAAAATGCCGTGTTTATCTCGTCAACT | | ACTCTGGAAACAGAATCTACTAAAACAAG | |
| | KKH | | TGTTGGCGAGAcgaCGAGAAAGGGACTGAAGCTGCTGGGGCCA | | GCAAAATGCCGTGTTTATCTCGTCAACTT | |
| | | | TGTTTTtaga | | GTTGGCGAGA | |
| 241 | Sauri- | − | CTCTCCCCTCCAGGCCGTGCAGTTTTAGTACTCTGGAAACAGA | 19197 | AAGGGTTTGTTGAACTTGACCGTTTTAGT | 19348 |
| | Cas9- | | ATCTACTAAAACAAGGCAAAATGCCGTGTTTATCTCGTCAACT | | ACTCTGGAAACAGAATCTACTAAAACAAG | |
| | KKH | | TGTTGGCGAGAttcTCGTCGATGGTCAGCACAGCCTTATGCAC | | GCAAAATGCCGTGTTTATCTCGTCAACTT | |
| | | | GGCCTGgagg | | GTTGGCGAGA | |
| 244 | SpyCas9- | − | TCTCCCCTCCAGGCCGTGCAGTTTTAGAGCTAGAAATAGCAAG | 19198 | AAGACAAAGGGTTTGTTGAAGTTTTAGAG | 19349 |
| | SpRY | | TTAAAATAAGGCTAGTCCGTTATCAACTTGAAAAAGTGGCACC | | CTAGAAATAGCAAGTTAAAATAAGGCTAG | |
| | | | GAGTCGGTGCttcTCGTCGATGGTCAGCACAGCCTTATGCACG | | TCCGTTATCAACTTGAAAAAGTGGCACCG | |
| | | | GCCTGgagg | | AGTCGGTGC | |
| 245 | SpyCas9- | + | TGGCCTCTAAAAACATGGCCGTTTTAGAGCTAGAAATAGCAAG | 19199 | TGAGCCTTGCTCGAGGCCTGGTTTTAGAG | 19350 |
| | SpRY | | TTAAAATAAGGCTAGTCCGTTATCAACTTGAAAAAGTGGCACC | | CTAGAAATAGCAAGTTAAAATAAGGCTAG | |
| | | | GAGTCGGTGCcgaCGAGAAAGGGACTGAAGCTGCTGGGGCCAT | | TCCGTTATCAACTTGAAAAAGTGGCACCG | |
| | | | GTTTTtaga | | AGTCGGTGC | |
| 246 | BlatCas9 | + | gtatGGCCTCTAAAAACATGGCCGCTATAGTTCCTTACTGAAA | 19200 | acgtGAGCCTTGCTCGAGGCCTGGCTATA | 19351 |
| | | | GGTAAGTTGCTATAGTAAGGGCAACAGACCCGAGGCGTTGGGG | | GTTCCTTACTGAAAGGTAAGTTGCTATAG | |
| | | | ATCGCCTAGCCCGTGTTTACGGGCTCTCCCCATATTCAAAATA | | TAAGGGCAACAGACCCGAGGCGTTGGGGA | |
| | | | ATGACAGACGAGCACCTTGGAGCATTTATCTCCGAGGTGCTcg | | TCGCCTAGCCCGTGTTTACGGGCTCTCCC | |
| | | | aCGAGAAAGGGACTGAAGCTGCTGGGGCCATGTTTTtaga | | CATATTCAAAATAATGACAGACGAGCACC | |
| | | | | | TTGGAGCATTTATCTCCGAGGTGCT | |
| 249 | SauCas9 | + | TATGGCCTCTAAAAACATGGCGTTTTAGTACTCTGGAAACAGA | 19201 | GAGCCTTGCTCGAGGCCTGGGGTTTTAGT | 19352 |
| | KKH | | ATCTACTAAAACAAGGCAAAATGCCGTGTTTATCTCGTCAACT | | ACTCTGGAAACAGAATCTACTAAAACAAG | |
| | | | TGTTGGCGAGAgaCGAGAAAGGGACTGAAGCTGCTGGGGCCAT | | GCAAAATGCCGTGTTTATCTCGTCAACTT | |
| | | | GTTTTTagag | | GTTGGCGAGA | |
| 250 | SauCas9 | − | TCTCTCCCCTCCAGGCCGTGCGTTTTAGTACTCTGGAAACAGA | 19202 | GAAGACAAAGGGTTTGTTGAAGTTTTAGT | 19353 |
| | KKH | | ATCTACTAAAACAAGGCAAAATGCCGTGTTTATCTCGTCAACT | | ACTCTGGAAACAGAATCTACTAAAACAAG | |
| | | | TGTTGGCGAGAtcTCGTCGATGGTCAGCACAGCCTTATGCACG | | GCAAAATGCCGTGTTTATCTCGTCAACTT | |
| | | | GCCTGGaggg | | GTTGGCGAGA | |
| 251 | SpyCas9- | + | ATGGCCTCTAAAAACATGGCGTTTTAGAGCTAGAAATAGCAAG | 19203 | GAGCCTTGCTCGAGGCCTGGGTTTTAGAG | 19354 |
| | SpRY | | TTAAAATAAGGCTAGTCCGTTATCAACTTGAAAAAGTGGCACC | | CTAGAAATAGCAAGTTAAAATAAGGCTAG | |
| | | | GAGTCGGTGCgaCGAGAAAGGGACTGAAGCTGCTGGGGCCATG | | TCCGTTATCAACTTGAAAAAGTGGCACCG | |
| | | | TTTTTagag | | AGTCGGTGC | |
| 252 | SpyCas9- | − | CTCTCCCCTCCAGGCCGTGCGTTTTAGAGCTAGAAATAGCAAG | 19204 | AGACAAAGGGTTTGTTGAACGTTTTAGAG | 19355 |
| | SpRY | | TTAAAATAAGGCTAGTCCGTTATCAACTTGAAAAAGTGGCACC | | CTAGAAATAGCAAGTTAAAATAAGGCTAG | |
| | | | GAGTCGGTGCtcTCGTCGATGGTCAGCACAGCCTTATGCACGG | | TCCGTTATCAACTTGAAAAAGTGGCACCG | |
| | | | CCTGGaggg | | AGTCGGTGC | |
| 257 | SauCas9 | − | TTCTCTCCCCTCCAGGCCGTGGTTTTAGTACTCTGGAAACAGA | 19205 | GAAGACAAAGGGTTTGTTGAAGTTTTAGT | 19356 |
| | KKH | | ATCTACTAAAACAAGGCAAAATGCCGTGTTTATCTCGTCAACT | | ACTCTGGAAACAGAATCTACTAAAACAAG | |
| | | | TGTTGGCGAGACTCGTCGATGGTCAGCACAGCCTTATGCACGG | | GCAAAATGCCGTGTTTATCTCGTCAACTT | |
| | | | CCTGGAgggg | | GTTGGCGAGA | |
| 258 | SpyCas9- | − | TCTCTCCCCTCCAGGCCGTGGTTTTAGAGCTAGAAATAGCAAG | 19206 | GACAAAGGGTTTGTTGAACTGTTTTAGAG | 19357 |
| | SpRY | | TTAAAATAAGGCTAGTCCGTTATCAACTTGAAAAAGTGGCACC | | CTAGAAATAGCAAGTTAAAATAAGGCTAG | |
| | | | GAGTCGGTGCcTCGTCGATGGTCAGCACAGCCTTATGCACGGC | | TCCGTTATCAACTTGAAAAAGTGGCACCG | |
| | | | CTGGAgggg | | AGTCGGTGC | |
| 259 | SpyCas9- | + | TATGGCCTCTAAAAACATGGGTTTTAGAGCTAGAAATAGCAAG | 19207 | AGCCTTGCTCGAGGCCTGGGGTTTTAGAG | 19358 |
| | SpRY | | TTAAAATAAGGCTAGTCCGTTATCAACTTGAAAAAGTGGCACC | | CTAGAAATAGCAAGTTAAAATAAGGCTAG | |
| | | | GAGTCGGTGCaCGAGAAAGGGACTGAAGCTGCTGGGGCCATGT | | TCCGTTATCAACTTGAAAAAGTGGCACCG | |
| | | | TTTTAgagg | | AGTCGGTGC | |
| 261 | SpyCas9- | + | GTATGGCCTCTAAAAACATGGTTTTAGAGCTAGAAATAGCAAG | 19208 | GCCTTGCTCGAGGCCTGGGAGTTTTAGAG | 19359 |
| | SpRY | | TTAAAATAAGGCTAGTCCGTTATCAACTTGAAAAAGTGGCACC | | CTAGAAATAGCAAGTTAAAATAAGGCTAG | |
| | | | GAGTCGGTGCCGAGAAAGGGACTGAAGCTGCTGGGGCCATGTT | | TCCGTTATCAACTTGAAAAAGTGGCACCG | |
| | | | TTTAGaggc | | AGTCGGTGC | |
| 262 | SpyCas9- | − | TTCTCTCCCCTCCAGGCCGTGTTTTAGAGCTAGAAATAGCAAG | 19209 | ACAAAGGGTTTGTTGAACTTGTTTTAGAG | 19360 |
| | SpRY | | TTAAAATAAGGCTAGTCCGTTATCAACTTGAAAAAGTGGCACC | | CTAGAAATAGCAAGTTAAAATAAGGCTAG | |
| | | | GAGTCGGTGCTCGTCGATGGTCAGCACAGCCTTATGCACGGCC | | TCCGTTATCAACTTGAAAAAGTGGCACCG | |
| | | | TGGAGggga | | AGTCGGTGC | |
| 263 | BlatCas9 | + | tgggTATGGCCTCTAAAAACATGGCTATAGTTCCTTACTGAAA | 19210 | tgagCCTTGCTCGAGGCCTGGGAGCTATA | 19361 |
| | | | GGTAAGTTGCTATAGTAAGGGCAACAGACCCGAGGCGTTGGGG | | GTTCCTTACTGAAAGGTAAGTTGCTATAG | |
| | | | ATCGCCTAGCCCGTGTTTACGGGCTCTCCCCATATTCAAAATA | | TAAGGGCAACAGACCCGAGGCGTTGGGGA | |
| | | | ATGACAGACGAGCACCTTGGAGCATTTATCTCCGAGGTGCTCG | | TCGCCTAGCCCGTGTTTACGGGCTCTCCC | |
| | | | AGAAAGGGACTGAAGCTGCTGGGGCCATGTTTTTAGaggc | | CATATTCAAAATAATGACAGACGAGCACC | |
| | | | | | TTGGAGCATTTATCTCCGAGGTGCT | |
| 264 | Nme2Cas9 | + | caTGGGTATGGCCTCTAAAAACATGTTGTAGCTCCCTTTCTCA | 19211 | gtGAGCCTTGCTCGAGGCCTGGGAGTTGT | 19362 |
| | | | TTTCGGAAACGAAATGAGAACCGTTGCTACAATAAGGCCGTCT | | AGCTCCCTTTCTCATTTCGGAAACGAAAT | |
| | | | GAAAAGATGTGCCGCAACGCTCTGCCCCTTAAAGCTTCTGCTT | | GAGAACCGTTGCTACAATAAGGCCGTCTG | |
| | | | TAAGGGGCATCGTTTAGAGAAAGGGACTGAAGCTGCTGGGGCC | | AAAAGATGTGCCGCAACGCTCTGCCCCTT | |
| | | | ATGTTTTTAGAggcc | | AAAGCTTCTGCTTTAAGGGGCATCGTTTA | |
| 265 | SpyCas9- | + | GGTATGGCCTCTAAAAACATGTTTTAGAGCTAGAAATAGCAAG | 19212 | CTTGCTCGAGGCCTGGGATCGTTTTAGAG | 19363 |
| | NG | | TTAAAATAAGGCTAGTCCGTTATCAACTTGAAAAAGTGGCACC | | CTAGAAATAGCAAGTTAAAATAAGGCTAG | |
| | | | GAGTCGGTGCGAGAAAGGGACTGAAGCTGCTGGGGCCATGTTT | | TCCGTTATCAACTTGAAAAAGTGGCACCG | |
| | | | TTAGAggcc | | AGTCGGTGC | |
| 268 | SpyCas9- | − | CTTCTCTCCCCTCCAGGCCGGTTTTAGAGCTAGAAATAGCAAG | 19213 | GACAAAGGGTTTGTTGAACTGTTTTAGAG | 19364 |
| | NG | | TTAAAATAAGGCTAGTCCGTTATCAACTTGAAAAAGTGGCACC | | CTAGAAATAGCAAGTTAAAATAAGGCTAG | |
| | | | GAGTCGGTGCCGTCGATGGTCAGCACAGCCTTATGCACGGCCT | | TCCGTTATCAACTTGAAAAAGTGGCACCG | |
| | | | GGAGGggag | | AGTCGGTGC | |
| 272 | SpyCas9- | + | GGTATGGCCTCTAAAAACATGTTTTAGAGCTAGAAATAGCAAG | 19214 | CCTTGCTCGAGGCCTGGGATGTTTTAGAG | 19365 |
| | SpRY | | TTAAAATAAGGCTAGTCCGTTATCAACTTGAAAAAGTGGCACC | | CTAGAAATAGCAAGTTAAAATAAGGCTAG | |
| | | | GAGTCGGTGCGAGAAAGGGACTGAAGCTGCTGGGGCCATGTTT | | TCCGTTATCAACTTGAAAAAGTGGCACCG | |
| | | | TTAGAggcc | | AGTCGGTGC | |
| 274 | SpyCas9- | − | CTTCTCTCCCCTCCAGGCCGGTTTTAGAGCTAGAAATAGCAAG | 19215 | CAAAGGGTTTGTTGAACTTGGTTTTAGAG | 19366 |
| | SpRY | | TTAAAATAAGGCTAGTCCGTTATCAACTTGAAAAAGTGGCACC | | CTAGAAATAGCAAGTTAAAATAAGGCTAG | |
| | | | GAGTCGGTGCCGTCGATGGTCAGCACAGCCTTATGCACGGCCT | | TCCGTTATCAACTTGAAAAAGTGGCACCG | |
| | | | GGAGGggag | | AGTCGGTGC | |
| 275 | BlatCas9 | + | atggGTATGGCCTCTAAAAACATGCTATAGTTCCTTACTGAAA | 19216 | gagcCTTGCTCGAGGCCTGGGATGCTATA | 19367 |
| | | | GGTAAGTTGCTATAGTAAGGGCAACAGACCCGAGGCGTTGGGG | | GTTCCTTACTGAAAGGTAAGTTGCTATAG | |
| | | | ATCGCCTAGCCCGTGTTTACGGGCTCTCCCCATATTCAAAATA | | TAAGGGCAACAGACCCGAGGCGTTGGGGA | |
| | | | ATGACAGACGAGCACCTTGGAGCATTTATCTCCGAGGTGCTGA | | TCGCCTAGCCCGTGTTTACGGGCTCTCCC | |
| | | | GAAAGGGACTGAAGCTGCTGGGGCCATGTTTTTAGAggcc | | CATATTCAAAATAATGACAGACGAGCACC | |
| | | | | | TTGGAGCATTTATCTCCGAGGTGCT | |
| 276 | BlatCas9 | + | atggGTATGGCCTCTAAAAACATGCTATAGTTCCTTACTGAAA | 19217 | gagcCTTGCTCGAGGCCTGGGATGCTATA | 19368 |
| | | | GGTAAGTTGCTATAGTAAGGGCAACAGACCCGAGGCGTTGGGG | | GTTCCTTACTGAAAGGTAAGTTGCTATAG | |
| | | | ATCGCCTAGCCCGTGTTTACGGGCTCTCCCCATATTCAAAATA | | TAAGGGCAACAGACCCGAGGCGTTGGGGA | |
| | | | ATGACAGACGAGCACCTTGGAGCATTTATCTCCGAGGTGCTGA | | TCGCCTAGCCCGTGTTTACGGGCTCTCCC | |
| | | | GAAAGGGACTGAAGCTGCTGGGGCCATGTTTTTAGAggcc | | CATATTCAAAATAATGACAGACGAGCACC | |
| | | | | | TTGGAGCATTTATCTCCGAGGTGCT | |
| 279 | Nme2Cas9 | + | acATGGGTATGGCCTCTAAAAACAGTTGTAGCTCCCTTTCTCA | 19218 | gtGAGCCTTGCTCGAGGCCTGGGAGTTGT | 19369 |
| | | | TTTCGGAAACGAAATGAGAACCGTTGCTACAATAAGGCCGTCT | | AGCTCCCTTTCTCATTTCGGAAACGAAAT | |
| | | | GAAAAGATGTGCCGCAACGCTCTGCCCCTTAAAGCTTCTGCTT | | GAGAACCGTTGCTACAATAAGGCCGTCTG | |
| | | | TAAGGGGCATCGTTTAAGAAAGGGACTGAAGCTGCTGGGGCCA | | AAAAGATGTGCCGCAACGCTCTGCCCCTT | |
| | | | TGTTTTTAGAGgcca | | AAAGCTTCTGCTTTAAGGGGCATCGTTTA | |
| 282 | ScaCas9- | + | GGGTATGGCCTCTAAAAACAGTTTTAGAGCTAGAAATAGCAAG | 19219 | CCTTGCTCGAGGCCTGGGATGTTTTAGAG | 19370 |
| | Sc++ | | TTAAAATAAGGCTAGTCCGTTATCAACTTGAAAAAGTGGCACC | | CTAGAAATAGCAAGTTAAAATAAGGCTAG | |
| | | | GAGTCGGTGCAGAAAGGGACTGAAGCTGCTGGGGCCATGTTTT | | TCCGTTATCAACTTGAAAAAGTGGCACCG | |
| | | | TAGAGgcca | | AGTCGGTGC | |
| 283 | SpyCas9 | + | GGGTATGGCCTCTAAAAACAGTTTTAGAGCTAGAAATAGCAAG | 19220 | GTGAGCCTTGCTCGAGGCCTGTTTTAGAG | 19371 |
| | | | TTAAAATAAGGCTAGTCCGTTATCAACTTGAAAAAGTGGCACC | | CTAGAAATAGCAAGTTAAAATAAGGCTAG | |
| | | | GAGTCGGTGCAGAAAGGGACTGAAGCTGCTGGGGCCATGTTTT | | TCCGTTATCAACTTGAAAAAGTGGCACCG | |
| | | | TAGAGgcca | | AGTCGGTGC | |
| 286 | SpyCas9- | + | GGGTATGGCCTCTAAAAACAGTTTTAGAGCTAGAAATAGCAAG | 19221 | CTTGCTCGAGGCCTGGGATCGTTTTAGAG | 19372 |
| | SpRY | | TTAAAATAAGGCTAGTCCGTTATCAACTTGAAAAAGTGGCACC | | CTAGAAATAGCAAGTTAAAATAAGGCTAG | |
| | | | GAGTCGGTGCAGAAAGGGACTGAAGCTGCTGGGGCCATGTTTT | | TCCGTTATCAACTTGAAAAAGTGGCACCG | |
| | | | TAGAGgcca | | AGTCGGTGC | |
| 289 | ScaCas9- | − | GCTTCTCTCCCCTCCAGGCCGTTTTAGAGCTAGAAATAGCAAG | 19222 | AGGGTTTGTTGAACTTGACCGTTTTAGAG | 19373 |
| | Sc++ | | TTAAAATAAGGCTAGTCCGTTATCAACTTGAAAAAGTGGCACC | | CTAGAAATAGCAAGTTAAAATAAGGCTAG | |
| | | | GAGTCGGTGCGTCGATGGTCAGCACAGCCTTATGCACGGCCTG | | TCCGTTATCAACTTGAAAAAGTGGCACCG | |
| | | | GAGGGgaga | | AGTCGGTGC | |
| 290 | SpyCas9- | − | GCTTCTCTCCCCTCCAGGCCGTTTTAGAGCTAGAAATAGCAAG | 19223 | AAAGGGTTTGTTGAACTTGAGTTTTAGAG | 19374 |
| | SpRY | | TTAAAATAAGGCTAGTCCGTTATCAACTTGAAAAAGTGGCACC | | CTAGAAATAGCAAGTTAAAATAAGGCTAG | |
| | | | GAGTCGGTGCGTCGATGGTCAGCACAGCCTTATGCACGGCCTG | | TCCGTTATCAACTTGAAAAAGTGGCACCG | |
| | | | GAGGGgaga | | AGTCGGTGC | |
| 291 | SpyCas9- | + | GGGTATGGCCTCTAAAAACAGTTTTAGAGCTAGAAATAGCAAG | 19224 | CTTGCTCGAGGCCTGGGATCGTTTTAGAG | 19375 |
| | NG | | TTAAAATAAGGCTAGTCCGTTATCAACTTGAAAAAGTGGCACC | | CTAGAAATAGCAAGTTAAAATAAGGCTAG | |
| | | | GAGTCGGTGCAGAAAGGGACTGAAGCTGCTGGGGCCATGTTTT | | TCCGTTATCAACTTGAAAAAGTGGCACCG | |
| | | | TAGAGgcca | | AGTCGGTGC | |
| 294 | BlatCas9 | + | catgGGTATGGCCTCTAAAAACAGCTATAGTTCCTTACTGAAA | 19225 | gagcCTTGCTCGAGGCCTGGGATGCTATA | 19376 |
| | | | GGTAAGTTGCTATAGTAAGGGCAACAGACCCGAGGCGTTGGGG | | GTTCCTTACTGAAAGGTAAGTTGCTATAG | |
| | | | ATCGCCTAGCCCGTGTTTACGGGCTCTCCCCATATTCAAAATA | | TAAGGGCAACAGACCCGAGGCGTTGGGGA | |
| | | | ATGACAGACGAGCACCTTGGAGCATTTATCTCCGAGGTGCTAG | | TCGCCTAGCCCGTGTTTACGGGCTCTCCC | |
| | | | AAAGGGACTGAAGCTGCTGGGGCCATGTTTTTAGAGgcca | | CATATTCAAAATAATGACAGACGAGCACC | |
| | | | | | TTGGAGCATTTATCTCCGAGGTGCT | |

[0529] Capital letters indicate “core nucleotides” while lower case letters indicate “flanking nucleotides.” Herein, when an RNA sequence (e.g., a template RNA sequence) is said to comprise a particular sequence (e.g., a sequence of Table 4 or a portion thereof) that comprises thymine (T), it is of course understood that the RNA sequence may (and frequently does) comprise uracil (U) in place of T. For instance, the RNA sequence may comprise U at every position shown as T in the sequence in Table 4. More specifically, the present disclosure provides an RNA sequence according to every template sequence shown in Table 4, wherein the RNA sequence has a U in place of each T in the sequence of Table 4.

TABLE 5
Exemplary template RNA sequences comprising PAM-inactivating sites
Table 5 provides select sequences from Table 4, with annotation illustrating
inactivation of PAM sites. Column “ID” contains a unique identifier for the
template RNA that corresponds to the ID used in Tables 1-4 and can be used,
e.g., to identify the corresponding gRNA spacer sequence in Table 1. Column
“Cas species” indicates a type of Cas domain suitable for inclusion in a
gene modifying polypeptide for use with the template RNA. Column “consensus”
indicates a consensus PAM motif recognized by the Cas. Column “PAM sequence”
indicates a particular PAM sequence recognized by the Cas, e.g., in the
SERPINA1 gene. Column “PAM mutation” indicates a mutation that can be produced
in the PAM by a template RNA described on the same row of the table; mutated
nucleotides are indicated with bold and underlining. Column “strand” indicates
the + or 1 strand of the target nucleic acid. Column “distance” indicates the
number of nucleotides in the pre-edit homology region. Column “PBS sequence”
indicates a PBS sequence for partial or full inclusion in the template RNA,
wherein core nucleotides are capitalized and flanking nucleotides are lower
case. Column “RT template sequence” indicates a heterologous object sequence
for partial or full inclusion in the template RNA, wherein core nucleotides
are capitalized, flanking nucleotides are lower case, and nucleotide
differences from the target nucleic acid are shown in bold and underline.

| | | | | | | | | | RT Template | |
|---|---|---|---|---|---|---|---|---|---|---|
| | Cas | con- | PAM | PAM | | | PBS | SEQ | Sequence | SEQ |
| ID | species | sensus | sequence | mutation | strand | distance | sequence | ID NO | (Mutation) | ID NO |
| 5 | SpyCas9- | NRN | AAA | | | 0 | GTCGATGGt | 19432 | catgggtatggcctcta | 19463 |
| | SpRY | | | | | | cagcacag | | aaaacatggccccagca | |
| | | | | | | | | | gcttcagtccctttcTC | |
| 11 | ScaCas9- | NNG | TCG | TCA | + | 1 | GAAAGGGAc | 19433 | tctgcttctctcccctc | 19464 |
| | Sc++ | | | | | | tgaagctg | | caggccgtgcataaggc | |
| | | | | | | | | | tgtgctgaccattgaCG | |
| | | | | | | | | | A | |
| 12 | SpyCas9- | NYN | TCG | | + | 1 | GAAAGGGAc | 19434 | tctgcttctctcccctc | 19465 |
| | SpRY | | | | | | tgaagctg | | caggccgtgcataaggc | |
| | | | | | | | | | tgtgctgaccatcgaCG | |
| | | | | | | | | | A | |
| 13 | SpyCas9- | NRN | GAA | | | 1 | TCGATGGTc | 19435 | catgggtatggcctcta | 19466 |
| | SpRY | | | | | | agcacagc | | aaaacatggccccagca | |
| | | | | | | | | | gcttcagtccctttcTC | |
| | | | | | | | | | G | |
| 20 | SauCas9KKH | NNNRR | GTCGA | GTCTA | + | 2 | AAAGGGACt | 19436 | tctgcttctctcccctc | 19467 |
| | | | | | | | gaagctgc | | caggccgtgcataaggc | |
| | | | | | | | | | tgtgctgaccatagaCG | |
| | | | | | | | | | AG | |
| 21 | SauCas9KKH | NNNRR | GTCGAT | GTCTAT | + | 2 | AAAGGGACt | 19437 | tctgcttctctcccctc | 19468 |
| | | T | | | | | gaagctgc | | caggccgtgcataaggc | |
| | | | | | | | | | tgtgctgaccatagaCG | |
| | | | | | | | | | AG | |
| 24 | SpyCas9-NG | NG | AG | AA | − | 2 | CGATGGTCa | 19438 | catgggtatggcctcta | 19469 |
| | | | | | | | gcacagcc | | aaaacatggccccagca | |
| | | | | | | | | | gcttcagtcccttttTC | |
| | | | | | | | | | GT | |
| 28 | SpyCas9- | NRN | AGA | | − | 2 | CGATGGTCa | 19439 | catgggtatggcctcta | 19470 |
| | SpRY | | | | | | gcacagcc | | aaaacatggccccagca | |
| | | | | | | | | | gcttcagtccctttcTC | |
| | | | | | | | | | GT | |
| 29 | SpyCas9- | NYN | GTC | | + | 2 | AAAGGGACt | 19440 | tctgcttctctcccctc | 19471 |
| | SpRY | | | | | | gaagctgc | | caggccgtgcataaggc | |
| | | | | | | | | | tgtgctgaccatcgaCG | |
| | | | | | | | | | AG | |
| 34 | SauCas9 | NNGRR | aAGAA | gAAAA | − | 3 | GATGGTCAg | 19441 | catgggtatggcctcta | 19472 |
| | | | | | | | cacagcct | | aaaacatggccccagca | |
| | | | | | | | | | gcttcagtcccttttTC | |
| | | | | | | | | | GTC | |
| 38 | ScaCas9- | NNG | aAG | gAA | − | 3 | GATGGTCAg | 19442 | catgggtatggcctcta | 19473 |
| | Sc++ | | | | | | cacagcct | | aaaacatggccccagca | |
| | | | | | | | | | gcttcagtcccttttTC | |
| | | | | | | | | | GTC | |
| 39 | SpyCas9- | NRN | aAG | | − | 3 | GATGGTCAg | 19443 | catgggtatggcctcta | 19474 |
| | SpRY | | | | | | cacagcct | | aaaacatggccccagca | |
| | | | | | | | | | gcttcagtccctttcTC | |
| | | | | | | | | | GTC | |
| 40 | SpyCas9-NG | NG | tG | cA | + | 3 | AAGGGACTg | 19444 | tctgcttctctcccctc | 19475 |
| | | | | | | | aagctgct | | caggccgtgcataaggc | |
| | | | | | | | | | tgtgctgaccatcgaTG | |
| | | | | | | | | | AGA | |
| 44 | SpyCas9- | NRN | tGT | | + | 3 | AAGGGACTg | 19445 | tctgcttctctcccctc | 19476 |
| | SpRY | | | | | | aagctgct | | caggccgtgcataaggc | |
| | | | | | | | | | tgtgctgaccatcgaCG | |
| | | | | | | | | | AGA | |
| 51 | SauriCas9- | NNRG | CaAG | CgAA | − | 4 | ATGGTCAGC | 19446 | catgggtatggcctcta | 19477 |
| | KKH | | | | | | acagcctt | | aaaacatggccccagca | |
| | | | | | | | | | gcttcagtcccttttTC | |
| | | | | | | | | | GTCG | |
| 56 | ScaCas9- | NNG | TtG | TcA | + | 4 | AGGGACTGa | 19447 | tctgcttctctcccctc | 19478 |
| | Sc++ | | | | | | agctgctg | | caggccgtgcataaggc | |
| | | | | | | | | | tgtgctgaccatcgaTG | |
| | | | | | | | | | AGAA | |
| 59 | St1Cas9 | NNAGA | CaAGAA | CgAAAAG | − | 4 | ATGGTCAGc | 19448 | catgggtatggcctcta | 19479 |
| | | AW | A | | | | acagcctt | | aaaacatggccccagca | |
| | | | | | | | | | gcttcagtcccctttTC | |
| | | | | | | | | | GTCG | |
| 89 | BlatCas9 | NNNNC | TCGACa | TCGATgA | − | 8 | TCAGCACAg | 19449 | catgggtatggcctcta | 19480 |
| | | NDD | AG | G | | | ccttatgc | | aaaacatggccccagca | |
| | | | | | | | | | gcttcagtccctttcTC | |
| | | | | | | | | | ATCGATGG | |
| 90 | BlatCas9 | NNNNC | TCGAC | TCGAT | − | 8 | TCAGCACAg | 19450 | catgggtatggcctcta | 19481 |
| | | | | | | | ccttatgc | | aaaacatggccccagca | |
| | | | | | | | | | gcttcagtccctttcTC | |
| | | | | | | | | | ATCGATGG | |
| 94 | BlatCas9 | NNNNC | CTTTCTt | CTTTTTcG | + | 9 | CTGAAGCTg | 19451 | tctgcttctctcccctc | 19482 |
| | | NDD | G | | | | ctggggcc | | caggccgtgcataaggc | |
| | | | | | | | | | tgtgctgaccatcgaCG | |
| | | | | | | | | | AAAAAGGGA | |
| 95 | BlatCas9 | NNNNC | CTTTC | CTTTT | + | 9 | CTGAAGCTg | 19452 | tctgcttctctcccctc | 19483 |
| | | | | | | | ctggggcc | | caggccgtgcataaggc | |
| | | | | | | | | | tgtgctgaccatcgaCG | |
| | | | | | | | | | AAAAAGGGA | |
| 104 | BlatCas9 | NNNNC | CCATC | CCATT | − | 11 | GCACAGCCt | 19453 | catgggtatggcctcta | 19484 |
| | | | | | | | tatgcacg | | aaaacatggccccagca | |
| | | | | | | | | | gcttcagtccctttcTC | |
| | | | | | | | | | GTCAATGGTCA | |
| 116 | SpyCas9-NG | NG | TG | TC | − | 14 | CAGCCTTAt | 19454 | catgggtatggcctcta | 19485 |
| | | | | | | | gcacggcc | | aaaacatggccccagca | |
| | | | | | | | | | gcttcagtccctttcTC | |
| | | | | | | | | | GTCGATGGTGAGCA | |
| 125 | BlatCas9 | NNNNC | TGACC | TGACA | − | 14 | CAGCCTTAt | 19455 | catgggtatggcctcta | 19486 |
| | | | | | | | gcacggcc | | aaaacatggccccagca | |
| | | | | | | | | | gcttcagtccctttcTC | |
| | | | | | | | | | GTCGATTGTCAGCA | |
| 130 | Nme2Cas9 | NNNNC | CAGTCC | CAGTGC | + | 15 | CTGCTGGGg | 19456 | tctgcttctctcccctc | 19487 |
| | | C | | | | | ccatgttt | | caggccgtgcataaggc | |
| | | | | | | | | | tgtgctgaccatcgaCG | |
| | | | | | | | | | AGAAAGGCACTGAAG | |
| 131 | Nme2Cas9 | NNNNC | CTGACC | CTGACA | | 15 | AGCCTTATg | 19457 | catgggtatggcctcta | 19488 |
| | | C | | | | | cacggcct | | aaaacatggccccagca | |
| | | | | | | | | | gcttcagtccctttcTC | |
| | | | | | | | | | GTCGATTGTCAGC | |
| | | | | | | | | | AC | |
| 138 | ScaCas9- | NNG | CTG | CTC | − | 15 | AGCCTTATg | 19458 | catgggtatggcctcta | 19489 |
| | Sc++ | | | | | | cacggcct | | aaaacatggccccagca | |
| | | | | | | | | | gcttcagtccctttcTC | |
| | | | | | | | | | GTCGATGGTGAGCAC | |
| 141 | BlatCas9 | NNNNC | CAGTC | CAGTG | + | 15 | CTGCTGGGg | 19459 | tctgcttctctcccctc | 19490 |
| | | | | | | | ccatgttt | | caggccgtgcataaggc | |
| | | | | | | | | | tgtgctgaccatcgaCG | |
| | | | | | | | | | AGAAAGGCACTGAAG | |
| 207 | SpyCas9 | NGG | AGG | AAG | − | 23 | GCACGGCCt | 19460 | catgggtatggcctcta | 19491 |
| | | | | | | | ggagggga | | aaaacatggccccagca | |
| | | | | | | | | | gcttcagtccctttcTC | |
| | | | | | | | | | GTCGATGGTCAGCACAG | |
| | | | | | | | | | CTTTAT | |
| 283 | SpyCas9 | NGG | TGG | TAG | + | 30 | TTTTAGAGg | 19461 | tctgcttctctcccctc | 19492 |
| | | | | | | | ccataccc | | caggccgtgcataaggc | |
| | | | | | | | | | tgtgctgaccatcgaCG | |
| | | | | | | | | | AGAAAGGGACTGAAGCT | |
| | | | | | | | | | GCTGGGGCTATGT | |
| 333 | SpyCas9 | NGG | AGG | AAG | − | 35 | GGGGAGAGa | 19462 | catgggtatggcctcta | 19493 |
| | | | | | | | agcagaga | | aaaacatggccccagca | |
| | | | | | | | | | gcttcagtccctttcTC | |
| | | | | | | | | | GTCGATGGTCAGCACAG | |
| | | | | | | | | | CCTTATGCACGGCTTGG | |
| | | | | | | | | | A | |

[0530] Herein, when an RNA sequence (e.g., a template RNA sequence) is said to comprise a particular sequence (e.g., a sequence of Table 5 or a portion thereof) that comprises thymine (T), it is of course understood that the RNA sequence may (and frequently does) comprise uracil (U) in place of T. For instance, the RNA sequence may comprise U at every position shown as T in the sequence in Table 5. More specifically, the present disclosure provides an RNA sequence according to every template sequence shown in Table 5, wherein the RNA sequence has a U in place of each T in the sequence of Table 5.

[0531] In some embodiments, a gRNA scaffold described herein comprises a nucleic acid sequence comprising, in the 5′ to 3′ direction, a crRNA of Table 6A, a tetraloop from the same row of Table 6A, and a tracrRNA from the same row of Table 6A, or a sequence having at least 70%, 80%, 85%, 90%, 95%, or 99% identity thereto. In some embodiments, the gRNA or template RNA having a sequence according to Table 6A is comprised by a system that further comprises a gene modifying polypeptide, and a spacer, wherein the spacer comprises a gRNA spacer described in the same row of Table 6A.

TABLE 6A
Exemplary spacer and scaffold pairs.

| | gRNA | SEQ ID | | SEQ ID | Tetra | | SEQ ID | | SEQ ID |
|---|---|---|---|---|---|---|---|---|---|
| Name | Spacer | NO | crRNA | NO | loop | tracrRNA | NO | Full Scaffold | NO |
| pU6- | CTGTGC | 19951 | GTTTT | 20070 | GAA | TAGCAAGTTAA | 20308 | GTTTTAGAGCTAGAAATAGCAAGTTAAAATAAGGC | 20427 |
| Spy- | TGACCA | | AGAGC | | A | AATAAGGCTAG | | TAGTCCGTTATCAACTTGAAAAAGTGGCACCGAGT | |
| A1AT- | TCGACA | | TA | | | TCCGTTATCAA | | CGGTGC | |
| sgRNA- | AG | | | | | CTTGAAAAAGT | | | |
| 1 | | | | | | GGCACCGAGTC | | | |
| | | | | | | GGTGC | | | |
| pU6- | GCTGTG | 19952 | GTTTT | 20071 | GAA | TAGCAAGTTAA | 20309 | GTTTTAGAGCTAGAAATAGCAAGTTAAAATAAGGC | 20428 |
| Spy- | CTGACC | | AGAGC | | A | AATAAGGCTAG | | TAGTCCGTTATCAACTTGAAAAAGTGGCACCGAGT | |
| A1AT- | ATCGAC | | TA | | | TCCGTTATCAA | | CGGTGC | |
| sgRNA- | AAG | | | | | CTTGAAAAAGT | | | |
| 1G | | | | | | GGCACCGAGTC | | | |
| | | | | | | GGTGC | | | |
| pU6- | CAGCTT | 19953 | GTTTT | 20072 | GAA | TAGCAAGTTAA | 20310 | GTTTTAGAGCTAGAAATAGCAAGTTAAAATAAGGC | 20429 |
| Spy- | CAGTCC | | AGAGC | | A | AATAAGGCTAG | | TAGTCCGTTATCAACTTGAAAAAGTGGCACCGAGT | |
| A1AT- | CTTTCT | | TA | | | TCCGTTATCAA | | CGGTGC | |
| sgRNA- | TG | | | | | CTTGAAAAAGT | | | |
| 2 | | | | | | GGCACCGAGTC | | | |
| | | | | | | GGTGC | | | |
| pU6- | GCAGCT | 19954 | GTTTT | 20073 | GAA | TAGCAAGTTAA | 20311 | GTTTTAGAGCTAGAAATAGCAAGTTAAAATAAGGC | 20430 |
| Spy- | TCAGTC | | AGAGC | | A | AATAAGGCTAG | | TAGTCCGTTATCAACTTGAAAAAGTGGCACCGAGT | |
| A1AT- | CCTTTC | | TA | | | TCCGTTATCAA | | CGGTGC | |
| sgRNA- | TTG | | | | | CTTGAAAAAGT | | | |
| 2G | | | | | | GGCACCGAGTC | | | |
| | | | | | | GGTGC | | | |
| pU6- | GGCTGT | 19955 | GTTTT | 20074 | GAA | TAGCAAGTTAA | 20312 | GTTTTAGAGCTAGAAATAGCAAGTTAAAATAAGGC | 20431 |
| Spy- | GCTGAC | | AGAGC | | A | AATAAGGCTAG | | TAGTCCGTTATCAACTTGAAAAAGTGGCACCGAGT | |
| A1AT- | CATCGA | | TA | | | TCCGTTATCAA | | CGGTGC | |
| sgRNA- | CA | | | | | CTTGAAAAAGT | | | |
| 3 | | | | | | GGCACCGAGTC | | | |
| | | | | | | GGTGC | | | |
| pU6- | AGGCTG | 19956 | GTTTT | 20075 | GAA | TAGCAAGTTAA | 20313 | GTTTTAGAGCTAGAAATAGCAAGTTAAAATAAGGC | 20432 |
| Spy- | TGCTGA | | AGAGC | | A | AATAAGGCTAG | | TAGTCCGTTATCAACTTGAAAAAGTGGCACCGAGT | |
| A1AT- | CCATCG | | TA | | | TCCGTTATCAA | | CGGTGC | |
| sgRNA- | AC | | | | | CTTGAAAAAGT | | | |
| 4 | | | | | | GGCACCGAGTC | | | |
| | | | | | | GGTGC | | | |
| pU6- | GAGGCT | 19957 | GTTTT | 20076 | GAA | TAGCAAGTTAA | 20314 | GTTTTAGAGCTAGAAATAGCAAGTTAAAATAAGGC | 20433 |
| Spy- | GTGCTG | | AGAGC | | A | AATAAGGCTAG | | TAGTCCGTTATCAACTTGAAAAAGTGGCACCGAGT | |
| A1AT- | ACCATC | | TA | | | TCCGTTATCAA | | CGGTGC | |
| sgRNA- | GAC | | | | | CTTGAAAAAGT | | | |
| 4G | | | | | | GGCACCGAGTC | | | |
| | | | | | | GGTGC | | | |
| pU6- | AGCAGC | 19958 | GTTTT | 20077 | GAA | TAGCAAGTTAA | 20315 | GTTTTAGAGCTAGAAATAGCAAGTTAAAATAAGGC | 20434 |
| Spy- | TTCAGT | | AGAGC | | A | AATAAGGCTAG | | TAGTCCGTTATCAACTTGAAAAAGTGGCACCGAGT | |
| A1AT- | CCCTTT | | TA | | | TCCGTTATCAA | | CGGTGC | |
| sgRNA- | CT | | | | | CTTGAAAAAGT | | | |
| 5 | | | | | | GGCACCGAGTC | | | |
| | | | | | | GGTGC | | | |
| pU6- | GAGCAG | 19959 | GTTTT | 20078 | GAA | TAGCAAGTTAA | 20316 | GTTTTAGAGCTAGAAATAGCAAGTTAAAATAAGGC | 20435 |
| Spy- | CTTCAG | | AGAGC | | A | AATAAGGCTAG | | TAGTCCGTTATCAACTTGAAAAAGTGGCACCGAGT | |
| A1AT- | TCCCTT | | TA | | | TCCGTTATCAA | | CGGTGC | |
| sgRNA- | TCT | | | | | CTTGAAAAAGT | | | |
| 5G | | | | | | GGCACCGAGTC | | | |
| | | | | | | GGTGC | | | |
| pU6- | GGCCGT | 19960 | GTTTT | 20079 | GAA | TAGCAAGTTAA | 20317 | GTTTTAGAGCTAGAAATAGCAAGTTAAAATAAGGC | 20436 |
| Spy- | GCATAA | | AGAGC | | A | AATAAGGCTAG | | TAGTCCGTTATCAACTTGAAAAAGTGGCACCGAGT | |
| A1AT- | GGCTGT | | TA | | | TCCGTTATCAA | | CGGTGC | |
| sgRNA- | GC | | | | | CTTGAAAAAGT | | | |
| 6 | | | | | | GGCACCGAGTC | | | |
| | | | | | | GGTGC | | | |
| pU6- | CCAGGC | 19961 | GTTTT | 20080 | GAA | TAGCAAGTTAA | 20318 | GTTTTAGAGCTAGAAATAGCAAGTTAAAATAAGGC | 20437 |
| Spy- | CGTGCA | | AGAGC | | A | AATAAGGCTAG | | TAGTCCGTTATCAACTTGAAAAAGTGGCACCGAGT | |
| A1AT- | TAAGGC | | TA | | | TCCGTTATCAA | | CGGTGC | |
| sgRNA- | TG | | | | | CTTGAAAAAGT | | | |
| 7 | | | | | | GGCACCGAGTC | | | |
| | | | | | | GGTGC | | | |
| pU6- | GCCAGG | 19962 | GTTTT | 20081 | GAA | TAGCAAGTTAA | 20319 | GTTTTAGAGCTAGAAATAGCAAGTTAAAATAAGGC | 20438 |
| Spy- | CCGTGC | | AGAGC | | A | AATAAGGCTAG | | TAGTCCGTTATCAACTTGAAAAAGTGGCACCGAGT | |
| A1AT- | ATAAGG | | TA | | | TCCGTTATCAA | | CGGTGC | |
| sgRNA- | CTG | | | | | CTTGAAAAAGT | | | |
| 7G | | | | | | GGCACCGAGTC | | | |
| | | | | | | GGTGC | | | |
| pU6- | CAGCAG | 19963 | GTTTT | 20082 | GAA | TAGCAAGTTAA | 20320 | GTTTTAGAGCTAGAAATAGCAAGTTAAAATAAGGC | 20439 |
| Spy- | CTTCAG | | AGAGC | | A | AATAAGGCTAG | | TAGTCCGTTATCAACTTGAAAAAGTGGCACCGAGT | |
| A1AT- | TCCCTT | | TA | | | TCCGTTATCAA | | CGGTGC | |
| sgRNA- | TC | | | | | CTTGAAAAAGT | | | |
| 8 | | | | | | GGCACCGAGTC | | | |
| | | | | | | GGTGC | | | |
| pU6- | GCAGCA | 19964 | GTTTT | 20083 | GAA | TAGCAAGTTAA | 20321 | GTTTTAGAGCTAGAAATAGCAAGTTAAAATAAGGC | 20440 |
| Spy- | GCTTCA | | AGAGC | | A | AATAAGGCTAG | | TAGTCCGTTATCAACTTGAAAAAGTGGCACCGAGT | |
| A1AT- | GTCCCT | | TA | | | TCCGTTATCAA | | CGGTGC | |
| sgRNA- | TTC | | | | | CTTGAAAAAGT | | | |
| 8G | | | | | | GGCACCGAGTC | | | |
| | | | | | | GGTGC | | | |
| pU6- | AGGCCG | 19965 | GTTTT | 20084 | GAA | TAGCAAGTTAA | 20322 | GTTTTAGAGCTAGAAATAGCAAGTTAAAATAAGGC | 20441 |
| Spy- | TGCATA | | AGAGC | | A | AATAAGGCTAG | | TAGTCCGTTATCAACTTGAAAAAGTGGCACCGAGT | |
| A1AT- | AGGCTG | | TA | | | TCCGTTATCAA | | CGGTGC | |
| sgRNA- | TG | | | | | CTTGAAAAAGT | | | |
| 9 | | | | | | GGCACCGAGTC | | | |
| | | | | | | GGTGC | | | |
| pU6- | GAGGCC | 19966 | GTTTT | 20085 | GAA | TAGCAAGTTAA | 20323 | GTTTTAGAGCTAGAAATAGCAAGTTAAAATAAGGC | 20442 |
| Spy- | GTGCAT | | AGAGC | | A | AATAAGGCTAG | | TAGTCCGTTATCAACTTGAAAAAGTGGCACCGAGT | |
| A1AT- | AAGGCT | | TA | | | TCCGTTATCAA | | CGGTGC | |
| sgRNA- | GTG | | | | | CTTGAAAAAGT | | | |
| 9G | | | | | | GGCACCGAGTC | | | |
| | | | | | | GGTGC | | | |
| pU6- | TCCAGG | 19967 | GTTTT | 20086 | GAA | TAGCAAGTTAA | 20324 | GTTTTAGAGCTAGAAATAGCAAGTTAAAATAAGGC | 20443 |
| Spy- | CCGTGC | | AGAGC | | A | AATAAGGCTAG | | TAGTCCGTTATCAACTTGAAAAAGTGGCACCGAGT | |
| A1AT- | ATAAGG | | TA | | | TCCGTTATCAA | | CGGTGC | |
| sgRNA- | CT | | | | | CTTGAAAAAGT | | | |
| 10 | | | | | | GGCACCGAGTC | | | |
| | | | | | | GGTGC | | | |
| pU6- | GTCCAG | 19968 | GTTTT | 20087 | GAA | TAGCAAGTTAA | 20325 | GTTTTAGAGCTAGAAATAGCAAGTTAAAATAAGGC | 20444 |
| Spy- | GCCGTG | | AGAGC | | A | AATAAGGCTAG | | TAGTCCGTTATCAACTTGAAAAAGTGGCACCGAGT | |
| A1AT- | CATAAG | | TA | | | TCCGTTATCAA | | CGGTGC | |
| sgRNA- | GCT | | | | | CTTGAAAAAGT | | | |
| 10G | | | | | | GGCACCGAGTC | | | |
| | | | | | | GGTGC | | | |
| pU6- | ACCTCG | 19969 | GTTTT | 20088 | GAA | TAGCAAGTTAA | 20326 | GTTTTAGAGCTAGAAATAGCAAGTTAAAATAAGGC | 20445 |
| Spy- | GGGGGG | | AGAGC | | A | AATAAGGCTAG | | TAGTCCGTTATCAACTTGAAAAAGTGGCACCGAGT | |
| A1AT- | ATAGAC | | TA | | | TCCGTTATCAA | | CGGTGC | |
| sgRNA- | AT | | | | | CTTGAAAAAGT | | | |
| 11 | | | | | | GGCACCGAGTC | | | |
| | | | | | | GGTGC | | | |
| pU6- | GACCTC | 19970 | GTTTT | 20089 | GAA | TAGCAAGTTAA | 20327 | GTTTTAGAGCTAGAAATAGCAAGTTAAAATAAGGC | 20446 |
| Spy- | GGGGGG | | AGAGC | | A | AATAAGGCTAG | | TAGTCCGTTATCAACTTGAAAAAGTGGCACCGAGT | |
| A1AT- | GATAGA | | TA | | | TCCGTTATCAA | | CGGTGC | |
| sgRNA- | CAT | | | | | CTTGAAAAAGT | | | |
| 11G | | | | | | GGCACCGAGTC | | | |
| | | | | | | GGTGC | | | |
| pU6- | TGTTGA | 19971 | GTTTT | 20090 | GAA | TAGCAAGTTAA | 20328 | GTTTTAGAGCTAGAAATAGCAAGTTAAAATAAGGC | 20447 |
| Spy- | ACTTGA | | AGAGC | | A | AATAAGGCTAG | | TAGTCCGTTATCAACTTGAAAAAGTGGCACCGAGT | |
| A1AT- | CCTCGG | | TA | | | TCCGTTATCAA | | CGGTGC | |
| sgRNA- | GG | | | | | CTTGAAAAAGT | | | |
| 12 | | | | | | GGCACCGAGTC | | | |
| | | | | | | GGTGC | | | |
| pU6- | GTGTTG | 19972 | GTTTT | 20091 | GAA | TAGCAAGTTAA | 20329 | GTTTTAGAGCTAGAAATAGCAAGTTAAAATAAGGC | 20448 |
| Spy- | AACTTG | | AGAGC | | A | AATAAGGCTAG | | TAGTCCGTTATCAACTTGAAAAAGTGGCACCGAGT | |
| A1AT- | ACCTCG | | TA | | | TCCGTTATCAA | | CGGTGC | |
| sgRNA- | GGG | | | | | CTTGAAAAAGT | | | |
| 12G | | | | | | GGCACCGAGTC | | | |
| | | | | | | GGTGC | | | |
| pU6- | AAGGCT | 19973 | GTTTT | 20092 | GAA | CAGAATCTACT | 20330 | GTTTTAGTACTCTGGAAACAGAATCTACTAAAACA | 20449 |
| Sau- | GTGCTG | | AGTAC | | A | AAAACAAGGCA | | AGGCAAAATGCCGTGTTTATCTCGTCAACTTGTTG | |
| A1AT- | ACCATC | | TCTG | | | AAATGCCGTGT | | GCGAGA | |
| sgRNA- | GAC | | | | | TTATCTCGTCA | | | |
| 1 | | | | | | ACTTGTTGGCG | | | |
| | | | | | | AGA | | | |
| pU6- | GAAGGC | 19974 | GTTTT | 20093 | GAA | CAGAATCTACT | 20331 | GTTTTAGTACTCTGGAAACAGAATCTACTAAAACA | 20450 |
| Sau- | TGTGCT | | AGTAC | | A | AAAACAAGGCA | | AGGCAAAATGCCGTGTTTATCTCGTCAACTTGTTG | |
| A1AT- | GACCAT | | TCTG | | | AAATGCCGTGT | | GCGAGA | |
| sgRNA- | CGAC | | | | | TTATCTCGTCA | | | |
| 1G | | | | | | ACTTGTTGGCG | | | |
| | | | | | | AGA | | | |
| pU6- | AGCAGC | 19975 | GTTTT | 20094 | GAA | CAGAATCTACT | 20332 | GTTTTAGTACTCTGGAAACAGAATCTACTAAAACA | 20451 |
| Sau- | TTCAGT | | AGTAC | | A | AAAACAAGGCA | | AGGCAAAATGCCGTGTTTATCTCGTCAACTTGTTG | |
| A1AT- | CCCTTT | | TCTG | | | AAATGCCGTGT | | GCGAGA | |
| sgRNA- | CTT | | | | | TTATCTCGTCA | | | |
| 2 | | | | | | ACTTGTTGGCG | | | |
| | | | | | | AGA | | | |
| pU6- | GAGCAG | 19976 | GTTTT | 20095 | GAA | CAGAATCTACT | 20333 | GTTTTAGTACTCTGGAAACAGAATCTACTAAAACA | 20452 |
| Sau- | CTTCAG | | AGTAC | | A | AAAACAAGGCA | | AGGCAAAATGCCGTGTTTATCTCGTCAACTTGTTG | |
| A1AT- | TCCCTT | | TCTG | | | AAATGCCGTGT | | GCGAGA | |
| sgRNA- | TCTTCC | | | | | TTATCTCGTCA | | | |
| 2G | AGGC | | | | | ACTTGTTGGCG | | | |
| | | | | | | AGA | | | |
| pU6- | CGTGCA | 19977 | GTTTT | 20096 | GAA | CAGAATCTACT | 20334 | GTTTTAGTACTCTGGAAACAGAATCTACTAAAACA | 20453 |
| Sau- | TAAGGC | | AGTAC | | A | AAAACAAGGCA | | AGGCAAAATGCCGTGTTTATCTCGTCAACTTGTTG | |
| A1AT- | TGT | | TCTG | | | AAATGCCGTGT | | GCGAGA | |
| sgRNA- | | | | | | TTATCTCGTCA | | | |
| 3 | | | | | | ACTTGTTGGCG | | | |
| | | | | | | AGA | | | |
| pU6- | GCCAGG | 19978 | GTTTT | 20097 | GAA | CAGAATCTACT | 20335 | GTTTTAGTACTCTGGAAACAGAATCTACTAAAACA | 20454 |
| Sau- | CCGTGC | | AGTAC | | A | AAAACAAGGCA | | AGGCAAAATGCCGTGTTTATCTCGTCAACTTGTTG | |
| A1AT- | ATAAGG | | TCTG | | | AAATGCCGTGT | | GCGAGA | |
| sgRNA- | CTGT | | | | | TTATCTCGTCA | | | |
| 3G | | | | | | ACTTGTTGGCG | | | |
| | | | | | | AGA | | | |
| pU6- | TAAAAA | 19979 | GTTTT | 20098 | GAA | CAGAATCTACT | 20336 | GTTTTAGTACTCTGGAAACAGAATCTACTAAAACA | 20455 |
| Sau- | CATGGC | | AGTAC | | A | AAAACAAGGCA | | AGGCAAAATGCCGTGTTTATCTCGTCAACTTGTTG | |
| A1AT- | CCCAGC | | TCTG | | | AAATGCCGTGT | | GCGAGA | |
| sgRNA- | AGC | | | | | TTATCTCGTCA | | | |
| 4 | | | | | | ACTTGTTGGCG | | | |
| | | | | | | AGA | | | |
| pU6- | GTAAAA | 19980 | GTTTT | 20099 | GAA | CAGAATCTACT | 20337 | GTTTTAGTACTCTGGAAACAGAATCTACTAAAACA | 20456 |
| Sau- | ACATGG | | AGTAC | | A | AAAACAAGGCA | | AGGCAAAATGCCGTGTTTATCTCGTCAACTTGTTG | |
| A1AT- | CCCCAG | | TCTG | | | AAATGCCGTGT | | GCGAGA | |
| sgRNA- | CAGC | | | | | TTATCTCGTCA | | | |
| 4G | | | | | | ACTTGTTGGCG | | | |
| | | | | | | AGA | | | |
| pU6- | GGCCTC | 19981 | GTTTT | 20100 | GAA | CAGAATCTACT | 20338 | GTTTTAGTACTCTGGAAACAGAATCTACTAAAACA | 20457 |
| Sau- | TAAAAA | | AGTAC | | A | AAAACAAGGCA | | AGGCAAAATGCCGTGTTTATCTCGTCAACTTGTTG | |
| A1AT- | CATGGC | | TCTG | | | AAATGCCGTGT | | GCGAGA | |
| sgRNA- | CCC | | | | | TTATCTCGTCA | | | |
| 5 | | | | | | ACTTGTTGGCG | | | |
| | | | | | | AGA | | | |
| pU6- | TATGGC | 19982 | GTTTT | 20101 | GAA | CAGAATCTACT | 20339 | GTTTTAGTACTCTGGAAACAGAATCTACTAAAACA | 20458 |
| Sau- | CTCTAA | | AGTAC | | A | AAAACAAGGCA | | AGGCAAAATGCCGTGTTTATCTCGTCAACTTGTTG | |
| A1AT- | AAACAT | | TCTG | | | AAATGCCGTGT | | GCGAGA | |
| sgRNA- | GGC | | | | | TTATCTCGTCA | | | |
| 6 | | | | | | ACTTGTTGGCG | | | |
| | | | | | | AGA | | | |
| pU6- | GTATGG | 19983 | GTTTT | 20102 | GAA | CAGAATCTACT | 20340 | GTTTTAGTACTCTGGAAACAGAATCTACTAAAACA | 20459 |
| Sau- | CCTCTA | | AGTAC | | A | AAAACAAGGCA | | AGGCAAAATGCCGTGTTTATCTCGTCAACTTGTTG | |
| A1AT- | AAAACA | | TCTG | | | AAATGCCGTGT | | GCGAGA | |
| sgRNA- | TGGC | | | | | TTATCTCGTCA | | | |
| 6G | | | | | | ACTTGTTGGCG | | | |
| | | | | | | AGA | | | |
| pU6- | TTGACC | 19984 | GTTTT | 20103 | GAA | CAGAATCTACT | 20341 | GTTTTAGTACTCTGGAAACAGAATCTACTAAAACA | 20460 |
| Sau- | TCGGGG | | AGTAC | | A | AAAACAAGGCA | | AGGCAAAATGCCGTGTTTATCTCGTCAACTTGTTG | |
| A1AT- | GGGATA | | TCTG | | | AAATGCCGTGT | | GCGAGA | |
| sgRNA- | GAC | | | | | TTATCTCGTCA | | | |
| 7 | | | | | | ACTTGTTGGCG | | | |
| | | | | | | AGA | | | |
| pU6- | GTTGAC | 19985 | GTTTT | 20104 | GAA | CAGAATCTACT | 20342 | GTTTTAGTACTCTGGAAACAGAATCTACTAAAACA | 20461 |
| Sau- | CTCGGG | | AGTAC | | A | AAAACAAGGCA | | AGGCAAAATGCCGTGTTTATCTCGTCAACTTGTTG | |
| A1AT- | GGGGAT | | TCTG | | | AAATGCCGTGT | | GCGAGA | |
| sgRNA- | AGAC | | | | | TTATCTCGTCA | | | |
| 7G | | | | | | ACTTGTTGGCG | | | |
| | | | | | | AGA | | | |
| pU6- | TTTGTT | 19986 | GTTTT | 20105 | GAA | CAGAATCTACT | 20343 | GTTTTAGTACTCTGGAAACAGAATCTACTAAAACA | 20462 |
| Sau- | GAACTT | | AGTAC | | A | AAAACAAGGCA | | AGGCAAAATGCCGTGTTTATCTCGTCAACTTGTTG | |
| A1AT- | GACCTC | | TCTG | | | AAATGCCGTGT | | GCGAGA | |
| sgRNA- | GGG | | | | | TTATCTCGTCA | | | |
| 8 | | | | | | ACTTGTTGGCG | | | |
| | | | | | | AGA | | | |
| pU6- | GTTTGT | 19987 | GTTTT | 20106 | GAA | CAGAATCTACT | 20344 | GTTTTAGTACTCTGGAAACAGAATCTACTAAAACA | 20463 |
| Sau- | TGAACT | | AGTAC | | A | AAAACAAGGCA | | AGGCAAAATGCCGTGTTTATCTCGTCAACTTGTTG | |
| A1AT- | TGACCT | | TCTG | | | AAATGCCGTGT | | GCGAGA | |
| sgRNA- | CGGG | | | | | TTATCTCGTCA | | | |
| 8G | | | | | | ACTTGTTGGCG | | | |
| | | | | | | AGA | | | |
| pU6- | ACGTGA | 19988 | GTTTT | 20107 | GAA | CAGAATCTACT | 20345 | GTTTTAGTACTCTGGAAACAGAATCTACTAAAACA | 20464 |
| Sau- | GCCTTG | | AGTAC | | A | AAAACAAGGCA | | AGGCAAAATGCCGTGTTTATCTCGTCAACTTGTTG | |
| A1AT- | CTCGAG | | TCTG | | | AAATGCCGTGT | | GCGAGA | |
| sgRNA- | GCC | | | | | TTATCTCGTCA | | | |
| 9 | | | | | | ACTTGTTGGCG | | | |
| | | | | | | AGA | | | |
| pU6- | GACGTG | 19989 | GTTTT | 20108 | GAA | CAGAATCTACT | 20346 | GTTTTAGTACTCTGGAAACAGAATCTACTAAAACA | 20465 |
| Sau- | AGCCTT | | AGTAC | | A | AAAACAAGGCA | | AGGCAAAATGCCGTGTTTATCTCGTCAACTTGTTG | |
| A1AT- | GCTCGA | | TCTG | | | AAATGCCGTGT | | GCGAGA | |
| sgRNA- | GGCC | | | | | TTATCTCGTCA | | | |
| 9G | | | | | | ACTTGTTGGCG | | | |
| | | | | | | AGA | | | |
| pU6- | ATTAAG | 19990 | GTTTT | 20109 | GAA | CAGAATCTACT | 20347 | GTTTTAGTACTCTGGAAACAGAATCTACTAAAACA | 20466 |
| Sau- | AAGACA | | AGTAC | | A | AAAACAAGGCA | | AGGCAAAATGCCGTGTTTATCTCGTCAACTTGTTG | |
| A1AT- | AAGGGT | | TCTG | | | AAATGCCGTGT | | GCGAGA | |
| sgRNA- | TTG | | | | | TTATCTCGTCA | | | |
| 10 | | | | | | ACTTGTTGGCG | | | |
| | | | | | | AGA | | | |
| pU6- | GATTAA | 19991 | GTTTT | 20110 | GAA | CAGAATCTACT | 20348 | GTTTTAGTACTCTGGAAACAGAATCTACTAAAACA | 20467 |
| Sau- | GAAGAC | | AGTAC | | A | AAAACAAGGCA | | AGGCAAAATGCCGTGTTTATCTCGTCAACTTGTTG | |
| A1AT- | AAAGGG | | TCTG | | | AAATGCCGTGT | | GCGAGA | |
| sgRNA- | TTTG | | | | | TTATCTCGTCA | | | |
| 10G | | | | | | ACTTGTTGGCG | | | |
| | | | | | | AGA | | | |
| pU6- | AGGTGT | 19992 | GTTTT | 20111 | GAA | CAGAATCTACT | 20349 | GTTTTAGTACTCTGGAAACAGAATCTACTAAAACA | 20468 |
| Sau- | CCACGT | | AGTAC | | A | AAAACAAGGCA | | AGGCAAAATGCCGTGTTTATCTCGTCAACTTGTTG | |
| A1AT- | GAGCCT | | TCTG | | | AAATGCCGTGT | | GCGAGA | |
| sgRNA- | TGC | | | | | TTATCTCGTCA | | | |
| 11 | | | | | | ACTTGTTGGCG | | | |
| | | | | | | AGA | | | |
| pU6- | GAGGTG | 19993 | GTTTT | 20112 | GAA | CAGAATCTACT | 20350 | GTTTTAGTACTCTGGAAACAGAATCTACTAAAACA | 20469 |
| Sau- | TCCACG | | AGTAC | | A | AAAACAAGGCA | | AGGCAAAATGCCGTGTTTATCTCGTCAACTTGTTG | |
| A1AT- | TGAGCC | | TCTG | | | AAATGCCGTGT | | GCGAGA | |
| sgRNA- | TTGC | | | | | TTATCTCGTCA | | | |
| 11G | | | | | | ACTTGTTGGCG | | | |
| | | | | | | AGA | | | |
| pU6- | TGTTCA | 19994 | GTTTT | 20113 | GAA | CAGAATCTACT | 20351 | GTTTTAGTACTCTGGAAACAGAATCTACTAAAACA | 20470 |
| Sau- | ATCATT | | AGTAC | | A | AAAACAAGGCA | | AGGCAAAATGCCGTGTTTATCTCGTCAACTTGTTG | |
| A1AT- | AAGAA | | TCTG | | | AAATGCCGTGT | | GCGAGA | |
| sgRNA- | GACA | | | | | TTATCTCGTCA | | | |
| 12 | | | | | | ACTTGTTGGCG | | | |
| | | | | | | AGA | | | |
| pU6- | GTGTTC | 19995 | GTTTT | 20114 | GAA | CAGAATCTACT | 20352 | GTTTTAGTACTCTGGAAACAGAATCTACTAAAACA | 20471 |
| Sau- | AATCAT | | AGTAC | | A | AAAACAAGGCA | | AGGCAAAATGCCGTGTTTATCTCGTCAACTTGTTG | |
| A1AT- | TAAGAA | | TCTG | | | AAATGCCGTGT | | GCGAGA | |
| sgRNA- | GACA | | | | | TTATCTCGTCA | | | |
| 12G | | | | | | ACTTGTTGGCG | | | |
| | | | | | | AGA | | | |
| pU6- | CGCTTC | 19996 | GTTTT | 20115 | GAA | CAGAATCTACT | 20353 | GTTTTAGTACTCTGGAAACAGAATCTACTAAAACA | 20472 |
| Sau- | CTGGGA | | AGTAC | | A | AAAACAAGGCA | | AGGCAAAATGCCGTGTTTATCTCGTCAACTTGTTG | |
| A1AT- | GGTGTC | | TCTG | | | AAATGCCGTGT | | GCGAGA | |
| sgRNA- | CAC | | | | | TTATCTCGTCA | | | |
| 13 | | | | | | ACTTGTTGGCG | | | |
| | | | | | | AGA | | | |
| pU6- | GCGCTT | 19997 | GTTTT | 20116 | GAA | CAGAATCTACT | 20354 | GTTTTAGTACTCTGGAAACAGAATCTACTAAAACA | 20473 |
| Sau- | CCTGGG | | AGTAC | | A | AAAACAAGGCA | | AGGCAAAATGCCGTGTTTATCTCGTCAACTTGTTG | |
| A1AT- | AGGTGT | | TCTG | | | AAATGCCGTGT | | GCGAGA | |
| sgRNA- | CCAC | | | | | TTATCTCGTCA | | | |
| 13G | | | | | | ACTTGTTGGCG | | | |
| | | | | | | AGA | | | |
| pU6- | TCTCCC | 19998 | GTTTT | 20117 | GAA | CAGAATCTACT | 20355 | GTTTTAGTACTCTGGAAACAGAATCTACTAAAACA | 20474 |
| Sauri- | CTCCAG | | AGTAC | | A | AAAACAAGGCA | | AGGCAAAATGCCGTGTTTATCTCGTCAACTTGTTG | |
| A1AT- | GCCGTG | | TCTG | | | AAATGCCGTGT | | GCGAGA | |
| sgRNA- | CAT | | | | | TTATCTCGTCA | | | |
| 1 | | | | | | ACTTGTTGGCG | | | |
| | | | | | | AGA | | | |
| pU6- | GTCTCC | 19999 | GTTTT | 20118 | GAA | CAGAATCTACT | 20356 | GTTTTAGTACTCTGGAAACAGAATCTACTAAAACA | 20475 |
| Sauri- | CCTCCA | | AGTAC | | A | AAAACAAGGCA | | AGGCAAAATGCCGTGTTTATCTCGTCAACTTGTTG | |
| A1AT- | GGCCGT | | TCTG | | | AAATGCCGTGT | | GCGAGA | |
| sgRNA- | GCAT | | | | | TTATCTCGTCA | | | |
| 1G | | | | | | ACTTGTTGGCG | | | |
| | | | | | | AGA | | | |
| pU6- | ATGGGT | 20000 | GTTTT | 20119 | GAA | CAGAATCTACT | 20357 | GTTTTAGTACTCTGGAAACAGAATCTACTAAAACA | 20476 |
| Sauri- | ATGGCC | | AGTAC | | A | AAAACAAGGCA | | AGGCAAAATGCCGTGTTTATCTCGTCAACTTGTTG | |
| A1AT- | TCTAAA | | TCTG | | | AAATGCCGTGT | | GCGAGA | |
| sgRNA- | AAC | | | | | TTATCTCGTCA | | | |
| 2 | | | | | | ACTTGTTGGCG | | | |
| | | | | | | AGA | | | |
| pU6- | GATGGG | 20001 | GTTTT | 20120 | GAA | CAGAATCTACT | 20358 | GTTTTAGTACTCTGGAAACAGAATCTACTAAAACA | 20477 |
| Sauri- | TATGGC | | AGTAC | | A | AAAACAAGGCA | | AGGCAAAATGCCGTGTTTATCTCGTCAACTTGTTG | |
| A1AT- | CTCTAA | | TCTG | | | AAATGCCGTGT | | GCGAGA | |
| sgRNA- | AAAC | | | | | TTATCTCGTCA | | | |
| 2G | | | | | | ACTTGTTGGCG | | | |
| pU6- | | | | | | AGA | | | |
| Sauri- | TAAGGC | 20002 | GTTTT | 20121 | GAA | CAGAATCTACT | 20359 | GTTTTAGTACTCTGGAAACAGAATCTACTAAAACA | 20478 |
| A1AT- | TGTGCT | | AGTAC | | A | AAAACAAGGCA | | AGGCAAAATGCCGTGTTTATCTCGTCAACTTGTTG | |
| sgRNA- | GACCAT | | TCTG | | | AAATGCCGTGT | | GCGAGA | |
| 3 | CGA | | | | | TTATCTCGTCA | | | |
| | | | | | | ACTTGTTGGCG | | | |
| | | | | | | AGA | | | |
| pU6- | GTAAGG | 20003 | GTTTT | 20122 | GAA | CAGAATCTACT | 20360 | GTTTTAGTACTCTGGAAACAGAATCTACTAAAACA | 20479 |
| Sauri- | CTGTGC | | AGTAC | | A | AAAACAAGGCA | | AGGCAAAATGCCGTGTTTATCTCGTCAACTTGTTG | |
| A1AT- | TGACCA | | TCTG | | | AAATGCCGTGT | | GCGAGA | |
| sgRNA- | TCGA | | | | | TTATCTCGTCA | | | |
| 3G | | | | | | ACTTGTTGGCG | | | |
| | | | | | | AGA | | | |
| pU6- | AAAAAC | 20004 | GTTTT | 20123 | GAA | CAGAATCTACT | 20361 | GTTTTAGTACTCTGGAAACAGAATCTACTAAAACA | 20480 |
| Sauri- | ATGGCC | | AGTAC | | A | AAAACAAGGCA | | AGGCAAAATGCCGTGTTTATCTCGTCAACTTGTTG | |
| A1AT- | CCAGCA | | TCTG | | | AAATGCCGTGT | | GCGAGA | |
| sgRNA- | GCT | | | | | TTATCTCGTCA | | | |
| 4 | | | | | | ACTTGTTGGCG | | | |
| | | | | | | AGA | | | |

| | | | | | | | | | |
|---|---|---|---|---|---|---|---|---|---|
| pU6- | GAAAAA | 20005 | GTTTT | 20124 | GAA | CAGAATCTACT | 20362 | GTTTTAGTACTCTGGAAACAGAATCTACTAAAACA | 20481 |
| Sauri- | CATGGC | | AGTAC | | A | AAAACAAGGCA | | AGGCAAAATGCCGTGTTTATCTCGTCAACTTGTTG | |
| A1AT- | CCCAGC | | TCTG | | | AAATGCCGTGT | | GCGAGA | |
| sgRNA- | AGCT | | | | | TTATCTCGTCA | | | |
| 4G | | | | | | ACTTGTTGGCG | | | |
| | | | | | | AGA | | | |
| pU6- | GCCTCT | 20006 | GTTTT | 20125 | GAA | CAGAATCTACT | 20363 | GTTTTAGTACTCTGGAAACAGAATCTACTAAAACA | 20482 |
| Sauri- | AAAAAC | | AGTAC | | A | AAAACAAGGCA | | AGGCAAAATGCCGTGTTTATCTCGTCAACTTGTTG | |
| A1AT- | ATGGCC | | TCTG | | | AAATGCCGTGT | | GCGAGA | |
| sgRNA- | CCA | | | | | TTATCTCGTCA | | | |
| 5 | | | | | | ACTTGTTGGCG | | | |
| | | | | | | AGA | | | |
| pU6- | ATGGCC | 20007 | GTTTT | 20126 | GAA | CAGAATCTACT | 20364 | GTTTTAGTACTCTGGAAACAGAATCTACTAAAACA | 20483 |
| Sauri- | TCTAAA | | AGTAC | | A | AAAACAAGGCA | | AGGCAAAATGCCGTGTTTATCTCGTCAACTTGTTG | |
| A1AT- | AACATG | | TCTG | | | AAATGCCGTGT | | GCGAGA | |
| sgRNA- | GCC | | | | | TTATCTCGTCA | | | |
| 6 | | | | | | ACTTGTTGGCG | | | |
| | | | | | | AGA | | | |
| pU6- | GATGGC | 20008 | GTTTT | 20127 | GAA | CAGAATCTACT | 20365 | GTTTTAGTACTCTGGAAACAGAATCTACTAAAACA | 20484 |
| Sauri- | CTCTAA | | AGTAC | | A | AAAACAAGGCA | | AGGCAAAATGCCGTGTTTATCTCGTCAACTTGTTG | |
| A1AT- | AAACAT | | TCTG | | | AAATGCCGTGT | | GCGAGA | |
| sgRNA- | GGCC | | | | | TTATCTCGTCA | | | |
| 6G | | | | | | ACTTGTTGGCG | | | |
| | | | | | | AGA | | | |
| pU6- | CTCTCC | 20009 | GTTTT | 20128 | GAA | CAGAATCTACT | 20366 | GTTTTAGTACTCTGGAAACAGAATCTACTAAAACA | 20485 |
| Sauri- | CCTCCA | | AGTAC | | A | AAAACAAGGCA | | AGGCAAAATGCCGTGTTTATCTCGTCAACTTGTTG | |
| A1AT- | GGCCGT | | TCTG | | | AAATGCCGTGT | | GCGAGA | |
| sgRNA- | GCA | | | | | TTATCTCGTCA | | | |
| 7 | | | | | | ACTTGTTGGCG | | | |
| | | | | | | AGA | | | |
| pU6- | GCTCTC | 20010 | GTTTT | 20129 | GAA | CAGAATCTACT | 20367 | GTTTTAGTACTCTGGAAACAGAATCTACTAAAACA | 20486 |
| Sauri- | CCCTCC | | AGTAC | | A | AAAACAAGGCA | | AGGCAAAATGCCGTGTTTATCTCGTCAACTTGTTG | |
| A1AT- | AGGCCG | | TCTG | | | AAATGCCGTGT | | GCGAGA | |
| sgRNA- | TGCA | | | | | TTATCTCGTCA | | | |
| 7G | | | | | | ACTTGTTGGCG | | | |
| | | | | | | AGA | | | |
| pU6- | TGTCTC | 20011 | GTTTT | 20130 | GAA | CAGAATCTACT | 20368 | GTTTTAGTACTCTGGAAACAGAATCTACTAAAACA | 20487 |
| Sauri- | TGCTTC | | AGTAC | | A | AAAACAAGGCA | | AGGCAAAATGCCGTGTTTATCTCGTCAACTTGTTG | |
| A1AT- | TCTCCC | | TCTG | | | AAATGCCGTGT | | GCGAGA | |
| sgRNA- | CTC | | | | | TTATCTCGTCA | | | |
| 8 | | | | | | ACTTGTTGGCG | | | |
| | | | | | | AGA | | | |
| pU6- | GTGTCT | 20012 | GTTTT | 20131 | GAA | CAGAATCTACT | 20369 | GTTTTAGTACTCTGGAAACAGAATCTACTAAAACA | 20488 |
| Sauri- | CTGCTT | | AGTAC | | A | AAAACAAGGCA | | AGGCAAAATGCCGTGTTTATCTCGTCAACTTGTTG | |
| A1AT- | CTCTCC | | TCTG | | | AAATGCCGTGT | | GCGAGA | |
| sgRNA- | CCTC | | | | | TTATCTCGTCA | | | |
| 8G | | | | | | ACTTGTTGGCG | | | |
| | | | | | | AGA | | | |
| pU6- | TGACCT | 20013 | GTTTT | 20132 | GAA | CAGAATCTACT | 20370 | GTTTTAGTACTCTGGAAACAGAATCTACTAAAACA | 20489 |
| Sauri- | CGGGGG | | AGTAC | | A | AAAACAAGGCA | | AGGCAAAATGCCGTGTTTATCTCGTCAACTTGTTG | |
| A1AT- | GGATAG | | TCTG | | | AAATGCCGTGT | | GCGAGA | |
| sgRNA- | ACA | | | | | TTATCTCGTCA | | | |
| 9 | | | | | | ACTTGTTGGCG | | | |
| | | | | | | AGA | | | |
| pU6- | GTGACC | 20014 | GTTTT | 20133 | GAA | CAGAATCTACT | 20371 | GTTTTAGTACTCTGGAAACAGAATCTACTAAAACA | 20490 |
| Sauri- | TCGGGG | | AGTAC | | A | AAAACAAGGCA | | AGGCAAAATGCCGTGTTTATCTCGTCAACTTGTTG | |
| A1AT- | GGGATA | | TCTG | | | AAATGCCGTGT | | GCGAGA | |
| sgRNA- | GACA | | | | | TTATCTCGTCA | | | |
| 9G | | | | | | ACTTGTTGGCG | | | |
| | | | | | | AGA | | | |
| pU6- | AAGGGT | 20015 | GTTTT | 20134 | GAA | CAGAATCTACT | 20372 | GTTTTAGTACTCTGGAAACAGAATCTACTAAAACA | 20491 |
| Sauri- | TTGTTG | | AGTAC | | A | AAAACAAGGCA | | AGGCAAAATGCCGTGTTTATCTCGTCAACTTGTTG | |
| A1AT- | AACTTG | | TCTG | | | AAATGCCGTGT | | GCGAGA | |
| sgRNA- | ACC | | | | | TTATCTCGTCA | | | |
| 10 | | | | | | ACTTGTTGGCG | | | |
| | | | | | | AGA | | | |
| pU6- | GAAGGG | 20016 | GTTTT | 20135 | GAA | CAGAATCTACT | 20373 | GTTTTAGTACTCTGGAAACAGAATCTACTAAAACA | 20492 |
| Sauri- | TTTGTT | | AGTAC | | A | AAAACAAGGCA | | AGGCAAAATGCCGTGTTTATCTCGTCAACTTGTTG | |
| A1AT- | GAACTT | | TCTG | | | AAATGCCGTGT | | GCGAGA | |
| sgRNA- | GACC | | | | | TTATCTCGTCA | | | |
| 10G | | | | | | ACTTGTTGGCG | | | |
| | | | | | | AGA | | | |
| pU6- | GTGTCC | 20017 | GTTTT | 20136 | GAA | CAGAATCTACT | 20374 | GTTTTAGTACTCTGGAAACAGAATCTACTAAAACA | 20493 |
| Sauri- | ACGTGA | | AGTAC | | A | AAAACAAGGCA | | AGGCAAAATGCCGTGTTTATCTCGTCAACTTGTTG | |
| A1AT- | GCCTTG | | TCTG | | | AAATGCCGTGT | | GCGAGA | |
| sgRNA- | CTC | | | | | TTATCTCGTCA | | | |
| 11 | | | | | | ACTTGTTGGCG | | | |
| | | | | | | AGA | | | |
| pU6- | GTTCAA | 20018 | GTTTT | 20137 | GAA | CAGAATCTACT | 20375 | GTTTTAGTACTCTGGAAACAGAATCTACTAAAACA | 20494 |
| Sauri- | TCATTA | | AGTAC | | A | AAAACAAGGCA | | AGGCAAAATGCCGTGTTTATCTCGTCAACTTGTTG | |
| A1AT- | AGAAG | | TCTG | | | AAATGCCGTGT | | GCGAGA | |
| sgRNA- | ACAA | | | | | TTATCTCGTCA | | | |
| 12 | | | | | | ACTTGTTGGCG | | | |
| | | | | | | AGA | | | |
| pU6- | GTAAAA | 20019 | GTTGT | 20138 | GAA | CGAAATGAGAA | 20376 | GTTGTAGCTCCCTTTCTCATTTCGGAAACGAAATG | 20495 |
| Nme2- | ACATGG | | AGCTC | | A | CCGTTGCTACA | | AGAACCGTTGCTACAATAAGGCCGTCTGAAAAGAT | |
| A1AT- | CCCCAG | | CCTTT | | | ATAAGGCCGTC | | GTGCCGCAACGCTCTGCCCCTTAAAGCTTCTGCTT | |
| sgRNA- | CAGCTT | | CTCAT | | | TGAAAAGATGT | | TAAGGGGCATCGTTTA | |
| 1 | | | TTCG | | | GCCGCAACGCT | | | |
| | | | | | | CTGCCCCTTAA | | | |
| | | | | | | AGCTTCTGCTT | | | |
| | | | | | | TAAGGGGCATC | | | |
| | | | | | | GTTTA | | | |
| pU6- | GTCCAG | 20020 | GTTGT | 20139 | GAA | CGAAATGAGAA | 20377 | GTTGTAGCTCCCTTTCTCATTTCGGAAACGAAATG | 20496 |
| Nme2- | GCCGTG | | AGCTC | | A | CCGTTGCTACA | | AGAACCGTTGCTACAATAAGGCCGTCTGAAAAGAT | |
| A1AT- | CATAAG | | CCTTT | | | ATAAGGCCGTC | | GTGCCGCAACGCTCTGCCCCTTAAAGCTTCTGCTT | |
| sgRNA- | GCTGTG | | CTCAT | | | TGAAAAGATGT | | TAAGGGGCATCGTTTA | |
| 2 | | | TTCG | | | GCCGCAACGCT | | | |
| | | | | | | CTGCCCCTTAA | | | |
| | | | | | | AGCTTCTGCTT | | | |
| | | | | | | TAAGGGGCATC | | | |
| | | | | | | GTTTA | | | |
| pU6- | GCATGG | 20021 | GTTGT | 20140 | GAA | CGAAATGAGAA | 20378 | GTTGTAGCTCCCTTTCTCATTTCGGAAACGAAATG | 20497 |
| Nme2- | GTATGG | | AGCTC | | A | CCGTTGCTACA | | AGAACCGTTGCTACAATAAGGCCGTCTGAAAAGAT | |
| A1AT- | CCTCTA | | CCTTT | | | ATAAGGCCGTC | | GTGCCGCAACGCTCTGCCCCTTAAAGCTTCTGCTT | |
| sgRNA- | AAAACA | | CTCAT | | | TGAAAAGATGT | | TAAGGGGCATCGTTTA | |
| 3 | | | TTCG | | | GCCGCAACGCT | | | |
| | | | | | | CTGCCCCTTAA | | | |
| | | | | | | AGCTTCTGCTT | | | |
| | | | | | | TAAGGGGCATC | | | |
| | | | | | | GTTTA | | | |
| pU6- | GACATG | 20022 | GTTGT | 20141 | GAA | CGAAATGAGAA | 20379 | GTTGTAGCTCCCTTTCTCATTTCGGAAACGAAATG | 20498 |
| Nme2- | GGTATG | | AGCTC | | A | CCGTTGCTACA | | AGAACCGTTGCTACAATAAGGCCGTCTGAAAAGAT | |
| A1AT- | GCCTCT | | CCTTT | | | ATAAGGCCGTC | | GTGCCGCAACGCTCTGCCCCTTAAAGCTTCTGCTT | |
| sgRNA- | AAAAAC | | CTCAT | | | TGAAAAGATGT | | TAAGGGGCATCGTTTA | |
| 4 | | | TTCG | | | GCCGCAACGCT | | | |
| | | | | | | CTGCCCCTTAA | | | |
| | | | | | | AGCTTCTGCTT | | | |
| | | | | | | TAAGGGGCATC | | | |
| | | | | | | GTTTA | | | |
| pU6- | GCGTGT | 20023 | GTTGT | 20142 | GAA | CGAAATGAGAA | 20380 | GTTGTAGCTCCCTTTCTCATTTCGGAAACGAAATG | 20499 |
| Nme2- | CTCTGC | | AGCTC | | A | CCGTTGCTACA | | AGAACCGTTGCTACAATAAGGCCGTCTGAAAAGAT | |
| A1AT- | TTCTCT | | CCTTT | | | ATAAGGCCGTC | | GTGCCGCAACGCTCTGCCCCTTAAAGCTTCTGCTT | |
| sgRNA- | CCCCTC | | CTCAT | | | TGAAAAGATGT | | TAAGGGGCATCGTTTA | |
| 5 | | | TTCG | | | GCCGCAACGCT | | | |
| | | | | | | CTGCCCCTTAA | | | |
| | | | | | | AGCTTCTGCTT | | | |
| | | | | | | TAAGGGGCATC | | | |
| | | | | | | GTTTA | | | |
| pU6- | GCCTTA | 20024 | GTTGT | 20143 | GAA | CGAAATGAGAA | 20381 | GTTGTAGCTCCCTTTCTCATTTCGGAAACGAAATG | 20500 |
| Nme2- | CAACGT | | AGCTC | | A | CCGTTGCTACA | | AGAACCGTTGCTACAATAAGGCCGTCTGAAAAGAT | |
| A1AT- | GTCTCT | | CCTTT | | | ATAAGGCCGTC | | GTGCCGCAACGCTCTGCCCCTTAAAGCTTCTGCTT | |
| sgRNA- | GCTTCT | | CTCAT | | | TGAAAAGATGT | | TAAGGGGCATCGTTTA | |
| 6 | | | TTCG | | | GCCGCAACGCT | | | |
| | | | | | | CTGCCCCTTAA | | | |
| | | | | | | AGCTTCTGCTT | | | |
| | | | | | | TAAGGGGCATC | | | |
| | | | | | | GTTTA | | | |
| pU6- | GCCTCG | 20025 | GTTGT | 20144 | GAA | CGAAATGAGAA | 20382 | GTTGTAGCTCCCTTTCTCATTTCGGAAACGAAATG | 20501 |
| Nme2- | GGGGGG | | AGCTC | | A | CCGTTGCTACA | | AGAACCGTTGCTACAATAAGGCCGTCTGAAAAGAT | |
| A1AT- | ATAGAC | | CCTTT | | | ATAAGGCCGTC | | GTGCCGCAACGCTCTGCCCCTTAAAGCTTCTGCTT | |
| sgRNA- | ATGGGT | | CTCAT | | | TGAAAAGATGT | | TAAGGGGCATCGTTTA | |
| 7 | | | TTCG | | | GCCGCAACGCT | | | |
| | | | | | | CTGCCCCTTAA | | | |
| | | | | | | AGCTTCTGCTT | | | |
| | | | | | | TAAGGGGCATC | | | |
| | | | | | | GTTTA | | | |
| pU6- | GTGAGC | 20026 | GTTGT | 20145 | GAA | CGAAATGAGAA | 20383 | GTTGTAGCTCCCTTTCTCATTTCGGAAACGAAATG | 20502 |
| Nme2- | CTTGCT | | AGCTC | | A | CCGTTGCTACA | | AGAACCGTTGCTACAATAAGGCCGTCTGAAAAGAT | |
| A1AT- | CGAGGC | | CCTTT | | | ATAAGGCCGTC | | GTGCCGCAACGCTCTGCCCCTTAAAGCTTCTGCTT | |
| sgRNA- | CTGGGA | | CTCAT | | | TGAAAAGATGT | | TAAGGGGCATCGTTTA | |
| 8 | | | TTCG | | | GCCGCAACGCT | | | |
| | | | | | | CTGCCCCTTAA | | | |
| | | | | | | AGCTTCTGCTT | | | |
| | | | | | | TAAGGGGCATC | | | |
| | | | | | | GTTTA | | | |
| pU6- | GAGAAG | 20027 | GTTGT | 20146 | GAA | CGAAATGAGAA | 20384 | GTTGTAGCTCCCTTTCTCATTTCGGAAACGAAATG | 20503 |
| Nme2- | ACAAAG | | AGCTC | | A | CCGTTGCTACA | | AGAACCGTTGCTACAATAAGGCCGTCTGAAAAGAT | |
| A1AT- | GGTTTG | | CCTTT | | | ATAAGGCCGTC | | GTGCCGCAACGCTCTGCCCCTTAAAGCTTCTGCTT | |
| sgRNA- | TTGAAC | | CTCAT | | | TGAAAAGATGT | | TAAGGGGCATCGTTTA | |
| 9 | | | TTCG | | | GCCGCAACGCT | | | |
| | | | | | | CTGCCCCTTAA | | | |
| | | | | | | AGCTTCTGCTT | | | |
| | | | | | | TAAGGGGCATC | | | |
| | | | | | | GTTTA | | | |
| pU6- | GAGGTG | 20028 | GTTGT | 20147 | GAA | CGAAATGAGAA | 20385 | GTTGTAGCTCCCTTTCTCATTTCGGAAACGAAATG | 20504 |
| Nme2- | TCCACG | | AGCTC | | A | CCGTTGCTACA | | AGAACCGTTGCTACAATAAGGCCGTCTGAAAAGAT | |
| A1AT- | TGAGCC | | CCTTT | | | ATAAGGCCGTC | | GTGCCGCAACGCTCTGCCCCTTAAAGCTTCTGCTT | |
| sgRNA- | TTGCTC | | CTCAT | | | TGAAAAGATGT | | TAAGGGGCATCGTTTA | |
| 10 | | | TTCG | | | GCCGCAACGCT | | | |
| | | | | | | CTGCCCCTTAA | | | |
| | | | | | | AGCTTCTGCTT | | | |
| | | | | | | TAAGGGGCATC | | | |
| | | | | | | GTTTA | | | |
| pU6- | TGCATA | 20029 | GCTAT | 20148 | GAA | GGTAAGTTGCT | 20386 | GCTATAGTTCCTTACTGAAAGGTAAGTTGCTATAG | 20505 |
| Blat- | AGGCTG | | AGTTC | | A | ATAGTAAGGGC | | TAAGGGCAACAGACCCGAGGCGTTGGGGATCGCCT | |
| A1AT- | TGCTGA | | CTTAC | | | AACAGACCCGA | | AGCCCGTGTTTACGGGCTCTCCCCATATTCAAAAT | |
| sgRNA- | CCA | | T | | | GGCGTTGGGGA | | AATGACAGACGAGCACCTTGGAGCATTTATCTCCG | |
| 1 | | | | | | TCGCCTAGCCC | | AGGTGCT | |
| | | | | | | GTGTTTACGGG | | | |
| | | | | | | CTCTCCCCATA | | | |
| | | | | | | TTCAAAATAAT | | | |
| | | | | | | GACAGACGAGC | | | |
| | | | | | | ACCTTGGAGCA | | | |
| | | | | | | TTTATCTCCGA | | | |
| | | | | | | GGTGCT | | | |
| pU6- | GTGCAT | 20030 | GCTAT | 20149 | GAA | GGTAAGTTGCT | 20387 | GCTATAGTTCCTTACTGAAAGGTAAGTTGCTATAG | 20506 |
| Blat- | AAGGCT | | AGTTC | | A | ATAGTAAGGGC | | TAAGGGCAACAGACCCGAGGCGTTGGGGATCGCCT | |
| A1AT- | GTGCTG | | CTTAC | | | AACAGACCCGA | | AGCCCGTGTTTACGGGCTCTCCCCATATTCAAAAT | |
| sgRNA- | ACCA | | T | | | GGCGTTGGGGA | | AATGACAGACGAGCACCTTGGAGCATTTATCTCCG | |
| 1G | | | | | | TCGCCTAGCCC | | AGGTGCT | |
| | | | | | | GTGTTTACGGG | | | |
| | | | | | | CTCTCCCCATA | | | |
| | | | | | | TTCAAAATAAT | | | |
| | | | | | | GACAGACGAGC | | | |
| | | | | | | ACCTTGGAGCA | | | |
| | | | | | | TTTATCTCCGA | | | |
| | | | | | | GGTGCT | | | |
| pU6- | TGGCCC | 20031 | GCTAT | 20150 | GAA | GGTAAGTTGCT | 20388 | GCTATAGTTCCTTACTGAAAGGTAAGTTGCTATAG | 20507 |
| Blat- | CAGCAG | | AGTTC | | A | ATAGTAAGGGC | | TAAGGGCAACAGACCCGAGGCGTTGGGGATCGCCT | |
| A1AT- | CTTCAG | | CTTAC | | | AACAGACCCGA | | AGCCCGTGTTTACGGGCTCTCCCCATATTCAAAAT | |
| sgRNA- | TCC | | T | | | GGCGTTGGGGA | | AATGACAGACGAGCACCTTGGAGCATTTATCTCCG | |
| 2 | | | | | | TCGCCTAGCCC | | AGGTGCT | |
| | | | | | | GTGTTTACGGG | | | |
| | | | | | | CTCTCCCCATA | | | |
| | | | | | | TTCAAAATAAT | | | |
| | | | | | | GACAGACGAGC | | | |
| | | | | | | ACCTTGGAGCA | | | |
| | | | | | | TTTATCTCCGA | | | |
| | | | | | | GGTGCT | | | |
| pU6- | GTGGCC | 20032 | GCTAT | 20151 | GAA | GGTAAGTTGCT | 20389 | GCTATAGTTCCTTACTGAAAGGTAAGTTGCTATAG | 20508 |
| Blat- | CCAGCA | | AGTTC | | A | ATAGTAAGGGC | | TAAGGGCAACAGACCCGAGGCGTTGGGGATCGCCT | |
| A1AT- | GCTTCA | | CTTAC | | | AACAGACCCGA | | AGCCCGTGTTTACGGGCTCTCCCCATATTCAAAAT | |
| sgRNA- | GTCC | | T | | | GGCGTTGGGGA | | AATGACAGACGAGCACCTTGGAGCATTTATCTCCG | |
| 2G | | | | | | TCGCCTAGCCC | | AGGTGCT | |
| | | | | | | GTGTTTACGGG | | | |
| | | | | | | CTCTCCCCATA | | | |
| | | | | | | TTCAAAATAAT | | | |
| | | | | | | GACAGACGAGC | | | |
| | | | | | | ACCTTGGAGCA | | | |
| | | | | | | TTTATCTCCGA | | | |
| | | | | | | GGTGCT | | | |
| pU6- | CCGTGC | 20033 | GCTAT | 20152 | GAA | GGTAAGTTGCT | 20390 | GCTATAGTTCCTTACTGAAAGGTAAGTTGCTATAG | 20509 |
| Blat- | ATAAGG | | AGTTC | | A | ATAGTAAGGGC | | TAAGGGCAACAGACCCGAGGCGTTGGGGATCGCCT | |
| A1AT- | CTGTGC | | CTTAC | | | AACAGACCCGA | | AGCCCGTGTTTACGGGCTCTCCCCATATTCAAAAT | |
| sgRNA- | TGA | | T | | | GGCGTTGGGGA | | AATGACAGACGAGCACCTTGGAGCATTTATCTCCG | |
| 3 | | | | | | TCGCCTAGCCC | | AGGTGCT | |
| | | | | | | GTGTTTACGGG | | | |
| | | | | | | CTCTCCCCATA | | | |
| | | | | | | TTCAAAATAAT | | | |
| | | | | | | GACAGACGAGC | | | |
| | | | | | | ACCTTGGAGCA | | | |
| | | | | | | TTTATCTCCGA | | | |
| | | | | | | GGTGCT | | | |
| pU6- | GCCGTG | 20034 | GCTAT | 20153 | GAA | GGTAAGTTGCT | 20391 | GCTATAGTTCCTTACTGAAAGGTAAGTTGCTATAG | 20510 |
| Blat- | CATAAG | | AGTTC | | A | ATAGTAAGGGC | | TAAGGGCAACAGACCCGAGGCGTTGGGGATCGCCT | |
| A1AT- | GCTGTG | | CTTAC | | | AACAGACCCGA | | AGCCCGTGTTTACGGGCTCTCCCCATATTCAAAAT | |
| sgRNA- | CTGA | | T | | | GGCGTTGGGGA | | AATGACAGACGAGCACCTTGGAGCATTTATCTCCG | |
| 3G | | | | | | TCGCCTAGCCC | | AGGTGCT | |
| | | | | | | GTGTTTACGGG | | | |
| | | | | | | CTCTCCCCATA | | | |
| | | | | | | TTCAAAATAAT | | | |
| | | | | | | GACAGACGAGC | | | |
| | | | | | | ACCTTGGAGCA | | | |
| | | | | | | TTTATCTCCGA | | | |
| | | | | | | GGTGCT | | | |
| pU6- | AGGCCG | 20035 | GCTAT | 20154 | GAA | GGTAAGTTGCT | 20392 | GCTATAGTTCCTTACTGAAAGGTAAGTTGCTATAG | 20511 |
| Blat- | TGCATA | | AGTTC | | A | ATAGTAAGGGC | | TAAGGGCAACAGACCCGAGGCGTTGGGGATCGCCT | |
| A1AT- | AGGCTG | | CTTAC | | | AACAGACCCGA | | AGCCCGTGTTTACGGGCTCTCCCCATATTCAAAAT | |
| sgRNA- | TGC | | T | | | GGCGTTGGGGA | | AATGACAGACGAGCACCTTGGAGCATTTATCTCCG | |
| 4 | | | | | | TCGCCTAGCCC | | AGGTGCT | |
| | | | | | | GTGTTTACGGG | | | |
| | | | | | | CTCTCCCCATA | | | |
| | | | | | | TTCAAAATAAT | | | |
| | | | | | | GACAGACGAGC | | | |
| | | | | | | ACCTTGGAGCA | | | |
| | | | | | | TTTATCTCCGA | | | |
| | | | | | | GGTGCT | | | |
| pU6- | GAGGC | 20036 | GCTAT | 20155 | GAA | GGTAAGTTGCT | 20393 | GCTATAGTTCCTTACTGAAAGGTAAGTTGCTATAG | 20512 |
| Blat- | CGTGCA | | AGTTC | | A | ATAGTAAGGGC | | TAAGGGCAACAGACCCGAGGCGTTGGGGATCGCCT | |
| A1AT- | TAAGGC | | CTTAC | | | AACAGACCCGA | | AGCCCGTGTTTACGGGCTCTCCCCATATTCAAAAT | |
| sgRNA- | TGTGC | | T | | | GGCGTTGGGGA | | AATGACAGACGAGCACCTTGGAGCATTTATCTCCG | |
| 4G | | | | | | TCGCCTAGCCC | | AGGTGCT | |
| | | | | | | GTGTTTACGGG | | | |
| | | | | | | CTCTCCCCATA | | | |
| | | | | | | TTCAAAATAAT | | | |
| | | | | | | GACAGACGAGC | | | |
| | | | | | | ACCTTGGAGCA | | | |
| | | | | | | TTTATCTCCGA | | | |
| | | | | | | GGTGCT | | | |
| pU6- | AAAACA | 20037 | GCTAT | 20156 | GAA | GGTAAGTTGCT | 20394 | GCTATAGTTCCTTACTGAAAGGTAAGTTGCTATAG | 20513 |
| Blat- | TGGCCC | | AGTTC | | A | ATAGTAAGGGC | | TAAGGGCAACAGACCCGAGGCGTTGGGGATCGCCT | |
| A1AT- | CAGCAG | | CTTAC | | | AACAGACCCGA | | AGCCCGTGTTTACGGGCTCTCCCCATATTCAAAAT | |
| sgRNA- | CTT | | T | | | GGCGTTGGGGA | | AATGACAGACGAGCACCTTGGAGCATTTATCTCCG | |
| 5 | | | | | | TCGCCTAGCCC | | AGGTGCT | |
| | | | | | | GTGTTTACGGG | | | |
| | | | | | | CTCTCCCCATA | | | |
| | | | | | | TTCAAAATAAT | | | |
| | | | | | | GACAGACGAGC | | | |
| | | | | | | ACCTTGGAGCA | | | |
| | | | | | | TTTATCTCCGA | | | |
| | | | | | | GGTGCT | | | |
| pU6- | GAAAAC | 20038 | GCTAT | 20157 | GAA | GGTAAGTTGCT | 20395 | GCTATAGTTCCTTACTGAAAGGTAAGTTGCTATAG | 20514 |
| Blat- | ATGGCC | | AGTTC | | A | ATAGTAAGGGC | | TAAGGGCAACAGACCCGAGGCGTTGGGGATCGCCT | |
| A1AT- | CCAGCA | | CTTAC | | | AACAGACCCGA | | AGCCCGTGTTTACGGGCTCTCCCCATATTCAAAAT | |
| sgRNA- | GCTT | | T | | | GGCGTTGGGGA | | AATGACAGACGAGCACCTTGGAGCATTTATCTCCG | |
| 5G | | | | | | TCGCCTAGCCC | | AGGTGCT | |
| | | | | | | GTGTTTACGGG | | | |
| | | | | | | CTCTCCCCATA | | | |
| | | | | | | TTCAAAATAAT | | | |
| | | | | | | GACAGACGAGC | | | |
| | | | | | | ACCTTGGAGCA | | | |
| | | | | | | TTTATCTCCGA | | | |
| | | | | | | GGTGCT | | | |
| pU6- | GGGGGG | 20039 | GCTAT | 20158 | GAA | GGTAAGTTGCT | 20396 | GCTATAGTTCCTTACTGAAAGGTAAGTTGCTATAG | 20515 |
| Blat- | ATAGAC | | AGTTC | | A | ATAGTAAGGGC | | TAAGGGCAACAGACCCGAGGCGTTGGGGATCGCCT | |
| A1AT- | ATGGGT | | CTTAC | | | AACAGACCCGA | | AGCCCGTGTTTACGGGCTCTCCCCATATTCAAAAT | |
| sgRNA- | ATG | | T | | | GGCGTTGGGGA | | AATGACAGACGAGCACCTTGGAGCATTTATCTCCG | |
| 6 | | | | | | TCGCCTAGCCC | | AGGTGCT | |
| | | | | | | GTGTTTACGGG | | | |
| | | | | | | CTCTCCCCATA | | | |
| | | | | | | TTCAAAATAAT | | | |
| | | | | | | GACAGACGAGC | | | |
| | | | | | | ACCTTGGAGCA | | | |
| | | | | | | TTTATCTCCGA | | | |
| | | | | | | GGTGCT | | | |
| pU6- | TGAACT | 20040 | GCTAT | 20159 | GAA | GGTAAGTTGCT | 20397 | GCTATAGTTCCTTACTGAAAGGTAAGTTGCTATAG | 20516 |
| Blat- | TGACCT | | AGTTC | | A | ATAGTAAGGGC | | TAAGGGCAACAGACCCGAGGCGTTGGGGATCGCCT | |
| A1AT- | CGGGGG | | CTTAC | | | AACAGACCCGA | | AGCCCGTGTTTACGGGCTCTCCCCATATTCAAAAT | |
| sgRNA- | GGA | | T | | | GGCGTTGGGGA | | AATGACAGACGAGCACCTTGGAGCATTTATCTCCG | |
| 7 | | | | | | TCGCCTAGCCC | | AGGTGCT | |
| | | | | | | GTGTTTACGGG | | | |
| | | | | | | CTCTCCCCATA | | | |
| | | | | | | TTCAAAATAAT | | | |
| | | | | | | GACAGACGAGC | | | |
| | | | | | | ACCTTGGAGCA | | | |
| | | | | | | TTTATCTCCGA | | | |
| | | | | | | GGTGCT | | | |
| pU6- | GTGAAC | 20041 | GCTAT | 20160 | GAA | GGTAAGTTGCT | 20398 | GCTATAGTTCCTTACTGAAAGGTAAGTTGCTATAG | 20517 |
| Blat- | TTGACC | | AGTTC | | A | ATAGTAAGGGC | | TAAGGGCAACAGACCCGAGGCGTTGGGGATCGCCT | |
| A1AT- | TCGGGG | | CTTAC | | | AACAGACCCGA | | AGCCCGTGTTTACGGGCTCTCCCCATATTCAAAAT | |
| sgRNA- | GGGA | | T | | | GGCGTTGGGGA | | AATGACAGACGAGCACCTTGGAGCATTTATCTCCG | |
| 7G | | | | | | TCGCCTAGCCC | | AGGTGCT | |
| | | | | | | GTGTTTACGGG | | | |
| | | | | | | CTCTCCCCATA | | | |
| | | | | | | TTCAAAATAAT | | | |
| | | | | | | GACAGACGAGC | | | |
| | | | | | | ACCTTGGAGCA | | | |
| | | | | | | TTTATCTCCGA | | | |
| | | | | | | GGTGCT | | | |
| pU6- | TCGAGG | 20042 | GCTAT | 20161 | GAA | GGTAAGTTGCT | 20399 | GCTATAGTTCCTTACTGAAAGGTAAGTTGCTATAG | 20518 |
| Blat- | CCTGGG | | AGTTC | | A | ATAGTAAGGGC | | TAAGGGCAACAGACCCGAGGCGTTGGGGATCGCCT | |
| A1AT- | ATCAGC | | CTTAC | | | AACAGACCCGA | | AGCCCGTGTTTACGGGCTCTCCCCATATTCAAAAT | |
| sgRNA- | CTT | | T | | | GGCGTTGGGGA | | AATGACAGACGAGCACCTTGGAGCATTTATCTCCG | |
| 8 | | | | | | TCGCCTAGCCC | | AGGTGCT | |
| | | | | | | GTGTTTACGGG | | | |
| | | | | | | CTCTCCCCATA | | | |
| | | | | | | TTCAAAATAAT | | | |
| | | | | | | GACAGACGAGC | | | |
| | | | | | | ACCTTGGAGCA | | | |
| | | | | | | TTTATCTCCGA | | | |
| | | | | | | GGTGCT | | | |
| pU6- | GTCGAG | 20043 | GCTAT | 20162 | GAA | GGTAAGTTGCT | 20400 | GCTATAGTTCCTTACTGAAAGGTAAGTTGCTATAG | 20519 |
| Blat- | GCCTGG | | AGTTC | | A | ATAGTAAGGGC | | TAAGGGCAACAGACCCGAGGCGTTGGGGATCGCCT | |
| A1AT- | GATCAG | | CTTAC | | | AACAGACCCGA | | AGCCCGTGTTTACGGGCTCTCCCCATATTCAAAAT | |
| sgRNA- | CCTT | | T | | | GGCGTTGGGGA | | AATGACAGACGAGCACCTTGGAGCATTTATCTCCG | |
| 8G | | | | | | TCGCCTAGCCC | | AGGTGCT | |
| | | | | | | GTGTTTACGGG | | | |
| | | | | | | CTCTCCCCATA | | | |
| | | | | | | TTCAAAATAAT | | | |
| | | | | | | GACAGACGAGC | | | |
| | | | | | | ACCTTGGAGCA | | | |
| | | | | | | TTTATCTCCGA | | | |
| | | | | | | GGTGCT | | | |
| pU6- | ACAAAG | 20044 | GCTAT | 20163 | GAA | GGTAAGTTGCT | 20401 | GCTATAGTTCCTTACTGAAAGGTAAGTTGCTATAG | 20520 |
| Blat- | GGTTTG | | AGTTC | | A | ATAGTAAGGGC | | TAAGGGCAACAGACCCGAGGCGTTGGGGATCGCCT | |
| A1AT- | TTGAAC | | CTTAC | | | AACAGACCCGA | | AGCCCGTGTTTACGGGCTCTCCCCATATTCAAAAT | |
| sgRNA- | TTG | | T | | | GGCGTTGGGGA | | AATGACAGACGAGCACCTTGGAGCATTTATCTCCG | |
| 9 | | | | | | TCGCCTAGCCC | | AGGTGCT | |
| | | | | | | GTGTTTACGGG | | | |
| | | | | | | CTCTCCCCATA | | | |
| | | | | | | TTCAAAATAAT | | | |
| | | | | | | GACAGACGAGC | | | |
| | | | | | | ACCTTGGAGCA | | | |
| | | | | | | TTTATCTCCGA | | | |
| | | | | | | GGTGCT | | | |
| pU6- | GACAAA | 20045 | GCTAT | 20164 | GAA | GGTAAGTTGCT | 20402 | GCTATAGTTCCTTACTGAAAGGTAAGTTGCTATAG | 20521 |
| Blat- | GGGTTT | | AGTTC | | A | ATAGTAAGGGC | | TAAGGGCAACAGACCCGAGGCGTTGGGGATCGCCT | |
| A1AT- | GTTGAA | | CTTAC | | | AACAGACCCGA | | AGCCCGTGTTTACGGGCTCTCCCCATATTCAAAAT | |
| sgRNA- | CTTG | | T | | | GGCGTTGGGGA | | AATGACAGACGAGCACCTTGGAGCATTTATCTCCG | |
| 9G | | | | | | TCGCCTAGCCC | | AGGTGCT | |
| | | | | | | GTGTTTACGGG | | | |
| | | | | | | CTCTCCCCATA | | | |
| | | | | | | TTCAAAATAAT | | | |
| | | | | | | GACAGACGAGC | | | |
| | | | | | | ACCTTGGAGCA | | | |
| | | | | | | TTTATCTCCGA | | | |
| | | | | | | GGTGCT | | | |
| pU6- | GCCTTG | 20046 | GCTAT | 20165 | GAA | GGTAAGTTGCT | 20403 | GCTATAGTTCCTTACTGAAAGGTAAGTTGCTATAG | 20522 |
| Blat- | CTCGAG | | AGTTC | | A | ATAGTAAGGGC | | TAAGGGCAACAGACCCGAGGCGTTGGGGATCGCCT | |
| A1AT- | GCCTGG | | CTTAC | | | AACAGACCCGA | | AGCCCGTGTTTACGGGCTCTCCCCATATTCAAAAT | |
| sgRNA- | GAT | | T | | | GGCGTTGGGGA | | AATGACAGACGAGCACCTTGGAGCATTTATCTCCG | |
| 10 | | | | | | TCGCCTAGCCC | | AGGTGCT | |
| | | | | | | GTGTTTACGGG | | | |
| | | | | | | CTCTCCCCATA | | | |
| | | | | | | TTCAAAATAAT | | | |
| | | | | | | GACAGACGAGC | | | |
| | | | | | | ACCTTGGAGCA | | | |
| | | | | | | TTTATCTCCGA | | | |
| | | | | | | GGTGCT | | | |
| pU6- | AAAGGG | 20047 | GTTGT | 20166 | GAA | GCGAAATGAAA | 20404 | GTTGTAGCTCCCTTTTTCATTTCGCGAAAGCGAAA | 20523 |
| Ppn- | ACTGAA | | AGCTC | | A | AACGTTGTTAC | | TGAAAAACGTTGTTACAATAAGAGATGAATTTCTC | |
| A1AT- | GCTGCT | | CCTTT | | | AATAAGAGATG | | GCAAAGCTCTGCCTCTTGAAATTTCGGTTTCAAGA | |
| sgRNA- | GGGG | | TTCAT | | | AATTTCTCGCA | | GGCATC | |
| 1 | | | TTCGC | | | AAGCTCTGCCT | | | |
| | | | | | | CTTGAAATTTC | | | |
| | | | | | | GGTTTCAAGAG | | | |
| | | | | | | GCATC | | | |
| pU6- | GAAAGG | 20048 | GTTGT | 20167 | GAA | GCGAAATGAAA | 20405 | GTTGTAGCTCCCTTTTTCATTTCGCGAAAGCGAAA | 20524 |
| Ppn- | GACTGA | | AGCTC | | A | AACGTTGTTAC | | TGAAAAACGTTGTTACAATAAGAGATGAATTTCTC | |
| A1AT- | AGCTGC | | CCTTT | | | AATAAGAGATG | | GCAAAGCTCTGCCTCTTGAAATTTCGGTTTCAAGA | |
| sgRNA- | TGGGG | | TTCAT | | | AATTTCTCGCA | | GGCATC | |
| 1G | | | TTCGC | | | AAGCTCTGCCT | | | |
| | | | | | | CTTGAAATTTC | | | |
| | | | | | | GGTTTCAAGAG | | | |
| | | | | | | GCATC | | | |
| pU6- | CCTGGA | 20049 | GTTGT | 20168 | GAA | GCGAAATGAAA | 20406 | GTTGTAGCTCCCTTTTTCATTTCGCGAAAGCGAAA | 20525 |
| Ppn- | GGGGAG | | AGCTC | | A | AACGTTGTTAC | | TGAAAAACGTTGTTACAATAAGAGATGAATTTCTC | |
| A1AT- | AGAAGC | | CCTTT | | | AATAAGAGATG | | GCAAAGCTCTGCCTCTTGAAATTTCGGTTTCAAGA | |
| sgRNA- | AGAG | | TTCAT | | | AATTTCTCGCA | | GGCATC | |
| 2 | | | TTCGC | | | AAGCTCTGCCT | | | |
| | | | | | | CTTGAAATTTC | | | |
| | | | | | | GGTTTCAAGAG | | | |
| | | | | | | GCATC | | | |
| pU6- | GCCTGG | 20050 | GTTGT | 20169 | GAA | GCGAAATGAAA | 20407 | GTTGTAGCTCCCTTTTTCATTTCGCGAAAGCGAAA | 20526 |
| Ppn- | AGGGGA | | AGCTC | | A | AACGTTGTTAC | | TGAAAAACGTTGTTACAATAAGAGATGAATTTCTC | |
| A1AT- | GAGAAG | | CCTTT | | | AATAAGAGATG | | GCAAAGCTCTGCCTCTTGAAATTTCGGTTTCAAGA | |
| sgRNA- | CAGAG | | TTCAT | | | AATTTCTCGCA | | GGCATC | |
| 2G | | | TTCGC | | | AAGCTCTGCCT | | | |
| | | | | | | CTTGAAATTTC | | | |
| | | | | | | GGTTTCAAGAG | | | |
| | | | | | | GCATC | | | |
| pU6- | CCCATG | 20051 | GTTGT | 20170 | GAA | GCGAAATGAAA | 20408 | GTTGTAGCTCCCTTTTTCATTTCGCGAAAGCGAAA | 20527 |
| Ppn- | TCTATC | | AGCTC | | A | AACGTTGTTAC | | TGAAAAACGTTGTTACAATAAGAGATGAATTTCTC | |
| A1AT- | CCCCCC | | CCTTT | | | AATAAGAGATG | | GCAAAGCTCTGCCTCTTGAAATTTCGGTTTCAAGA | |
| sgRNA- | GAGG | | TTCAT | | | AATTTCTCGCA | | GGCATC | |
| 3 | | | TTCGC | | | AAGCTCTGCCT | | | |
| | | | | | | CTTGAAATTTC | | | |
| | | | | | | GGTTTCAAGAG | | | |
| | | | | | | GCATC | | | |
| pU6- | GCCCAT | 20052 | GTTGT | 20171 | GAA | GCGAAATGAAA | 20409 | GTTGTAGCTCCCTTTTTCATTTCGCGAAAGCGAAA | 20528 |
| Ppn- | GTCTAT | | AGCTC | | A | AACGTTGTTAC | | TGAAAAACGTTGTTACAATAAGAGATGAATTTCTC | |
| A1AT- | CCCCCC | | CCTTT | | | AATAAGAGATG | | GCAAAGCTCTGCCTCTTGAAATTTCGGTTTCAAGA | |
| sgRNA- | CGAGG | | TTCAT | | | AATTTCTCGCA | | GGCATC | |
| 3G | | | TTCGC | | | AAGCTCTGCCT | | | |
| | | | | | | CTTGAAATTTC | | | |
| | | | | | | GGTTTCAAGAG | | | |
| | | | | | | GCATC | | | |
| pU6- | TCAATC | 20053 | GTTGT | 20172 | GAA | GCGAAATGAAA | 20410 | GTTGTAGCTCCCTTTTTCATTTCGCGAAAGCGAAA | 20529 |
| Ppn- | ATTAAG | | AGCTC | | A | AACGTTGTTAC | | TGAAAAACGTTGTTACAATAAGAGATGAATTTCTC | |
| A1AT- | AAGACA | | CCTTT | | | AATAAGAGATG | | GCAAAGCTCTGCCTCTTGAAATTTCGGTTTCAAGA | |
| sgRNA- | AAGG | | TTCAT | | | AATTTCTCGCA | | GGCATC | |
| 4 | | | TTCGC | | | AAGCTCTGCCT | | | |
| | | | | | | CTTGAAATTTC | | | |
| | | | | | | GGTTTCAAGAG | | | |
| | | | | | | GCATC | | | |
| pU6- | GTCAAT | 20054 | GTTGT | 20173 | GAA | GCGAAATGAAA | 20411 | GTTGTAGCTCCCTTTTTCATTTCGCGAAAGCGAAA | 20530 |
| Ppn- | CATTAA | | AGCTC | | A | AACGTTGTTAC | | TGAAAAACGTTGTTACAATAAGAGATGAATTTCTC | |
| A1AT- | GAAGAC | | CCTTT | | | AATAAGAGATG | | GCAAAGCTCTGCCTCTTGAAATTTCGGTTTCAAGA | |
| sgRNA- | AAAGG | | TTCAT | | | AATTTCTCGCA | | GGCATC | |
| 4G | | | TTCGC | | | AAGCTCTGCCT | | | |
| | | | | | | CTTGAAATTTC | | | |
| | | | | | | GGTTTCAAGAG | | | |
| | | | | | | GCATC | | | |
| pU6- | TTGTTC | 20055 | GTTGT | 20174 | GAA | GCGAAATGAAA | 20412 | GTTGTAGCTCCCTTTTTCATTTCGCGAAAGCGAAA | 20531 |
| Ppn- | AATCAT | | AGCTC | | A | AACGTTGTTAC | | TGAAAAACGTTGTTACAATAAGAGATGAATTTCTC | |
| A1AT- | TAAGAA | | CCTTT | | | AATAAGAGATG | | GCAAAGCTCTGCCTCTTGAAATTTCGGTTTCAAGA | |
| sgRNA- | GACA | | TTCAT | | | AATTTCTCGCA | | GGCATC | |
| 5 | | | TTCGC | | | AAGCTCTGCCT | | | |
| | | | | | | CTTGAAATTTC | | | |
| | | | | | | GGTTTCAAGAG | | | |
| | | | | | | GCATC | | | |
| pU6- | GTTGTT | 20056 | GTTGT | 20175 | GAA | GCGAAATGAAA | 20413 | GTTGTAGCTCCCTTTTTCATTTCGCGAAAGCGAAA | 20532 |
| Ppn- | CAATCA | | AGCTC | | A | AACGTTGTTAC | | TGAAAAACGTTGTTACAATAAGAGATGAATTTCTC | |
| A1AT- | TTAAGA | | CCTTT | | | AATAAGAGATG | | GCAAAGCTCTGCCTCTTGAAATTTCGGTTTCAAGA | |
| sgRNA- | AGACA | | TTCAT | | | AATTTCTCGCA | | GGCATC | |
| 5G | | | TTCGC | | | AAGCTCTGCCT | | | |
| | | | | | | CTTGAAATTTC | | | |
| | | | | | | GGTTTCAAGAG | | | |
| | | | | | | GCATC | | | |
| pU6- | TCAACA | 20057 | GTTGT | 20176 | GAA | GCGAAATGAAA | 20414 | GTTGTAGCTCCCTTTTTCATTTCGCGAAAGCGAAA | 20533 |
| Ppn- | AACCCT | | AGCTC | | A | AACGTTGTTAC | | TGAAAAACGTTGTTACAATAAGAGATGAATTTCTC | |
| A1AT- | TTGTCT | | CCTTT | | | AATAAGAGATG | | GCAAAGCTCTGCCTCTTGAAATTTCGGTTTCAAGA | |
| sgRNA- | TCTT | | TTCAT | | | AATTTCTCGCA | | GGCATC | |
| 6 | | | TTCGC | | | AAGCTCTGCCT | | | |
| | | | | | | CTTGAAATTTC | | | |
| | | | | | | GGTTTCAAGAG | | | |
| | | | | | | GCATC | | | |
| pU6- | GTCAAC | 20058 | GTTGT | 20177 | GAA | GCGAAATGAAA | 20415 | GTTGTAGCTCCCTTTTTCATTTCGCGAAAGCGAAA | 20534 |
| Ppn- | AAACCC | | AGCTC | | A | AACGTTGTTAC | | TGAAAAACGTTGTTACAATAAGAGATGAATTTCTC | |
| A1AT- | TTTGTC | | CCTTT | | | AATAAGAGATG | | GCAAAGCTCTGCCTCTTGAAATTTCGGTTTCAAGA | |
| sgRNA- | TTCTT | | TTCAT | | | AATTTCTCGCA | | GGCATC | |
| 6G | | | TTCGC | | | AAGCTCTGCCT | | | |
| | | | | | | CTTGAAATTTC | | | |
| | | | | | | GGTTTCAAGAG | | | |
| | | | | | | GCATC | | | |
| pU6- | GGGGAG | 20059 | GTTGT | 20178 | GAA | GCGAAATGAAA | 20416 | GTTGTAGCTCCCTTTTTCATTTCGCGAAAGCGAAA | 20535 |
| Ppn- | ACTTGG | | AGCTC | | A | AACGTTGTTAC | | TGAAAAACGTTGTTACAATAAGAGATGAATTTCTC | |
| A1AT- | TATTTT | | CCTTT | | | AATAAGAGATG | | GCAAAGCTCTGCCTCTTGAAATTTCGGTTTCAAGA | |
| sgRNA- | GTTC | | TTCAT | | | AATTTCTCGCA | | GGCATC | |
| 7 | | | TTCGC | | | AAGCTCTGCCT | | | |
| | | | | | | CTTGAAATTTC | | | |
| | | | | | | GGTTTCAAGAG | | | |
| | | | | | | GCATC | | | |
| pU6- | CATGAA | 20060 | GTTGT | 20179 | GAA | GCGAAATGAAA | 20417 | GTTGTAGCTCCCTTTTTCATTTCGCGAAAGCGAAA | 20536 |
| Ppn- | GAGGGG | | AGCTC | | A | AACGTTGTTAC | | TGAAAAACGTTGTTACAATAAGAGATGAATTTCTC | |
| A1AT- | AGACTT | | CCTTT | | | AATAAGAGATG | | GCAAAGCTCTGCCTCTTGAAATTTCGGTTTCAAGA | |
| sgRNA- | GGTA | | TTCAT | | | AATTTCTCGCA | | GGCATC | |
| 8 | | | TTCGC | | | AAGCTCTGCCT | | | |
| | | | | | | CTTGAAATTTC | | | |
| | | | | | | GGTTTCAAGAG | | | |
| | | | | | | GCATC | | | |
| pU6- | GCATGA | 20061 | GTTGT | 20180 | GAA | GCGAAATGAAA | 20418 | GTTGTAGCTCCCTTTTTCATTTCGCGAAAGCGAAA | 20537 |
| Ppn- | AGAGGG | | AGCTC | | A | AACGTTGTTAC | | TGAAAAACGTTGTTACAATAAGAGATGAATTTCTC | |
| A1AT- | GAGACT | | CCTTT | | | AATAAGAGATG | | GCAAAGCTCTGCCTCTTGAAATTTCGGTTTCAAGA | |
| sgRNA- | TGGTA | | TTCAT | | | AATTTCTCGCA | | GGCATC | |
| 8G | | | TTCGC | | | AAGCTCTGCCT | | | |
| | | | | | | CTTGAAATTTC | | | |
| | | | | | | GGTTTCAAGAG | | | |
| | | | | | | GCATC | | | |
| pU6- | TTTCCC | 20062 | GTTG | 20181 | GAA | GCGAAATGAAA | 20419 | GTTGTAGCTCCCTTTTTCATTTCGCGAAAGCGAAA | 20538 |
| Ppn- | ATGAAG | | TAGC | | A | AACGTTGTTAC | | TGAAAAACGTTGTTACAATAAGAGATGAATTTCTC | |
| A1AT- | AGGGGA | | TCCCT | | | AATAAGAGATG | | GCAAAGCTCTGCCTCTTGAAATTTCGGTTTCAAGA | |
| sgRNA- | GACT | | TTTTC | | | AATTTCTCGCA | | GGCATC | |
| 9 | | | ATTTC | | | AAGCTCTGCCT | | | |
| | | | GC | | | CTTGAAATTTC | | | |
| | | | | | | GGTTTCAAGAG | | | |
| | | | | | | GCATC | | | |
| pU6- | GTTTCC | 20063 | GTTGT | 20182 | GAA | GCGAAATGAAA | 20420 | GTTGTAGCTCCCTTTTTCATTTCGCGAAAGCGAAA | 20539 |
| Ppn- | CATGAA | | AGCTC | | A | AACGTTGTTAC | | TGAAAAACGTTGTTACAATAAGAGATGAATTTCTC | |
| A1AT- | GAGGGG | | CCTTT | | | AATAAGAGATG | | GCAAAGCTCTGCCTCTTGAAATTTCGGTTTCAAGA | |
| sgRNA- | AGACT | | TTCAT | | | AATTTCTCGCA | | GGCATC | |
| 9G | | | TTCGC | | | AAGCTCTGCCT | | | |
| | | | | | | CTTGAAATTTC | | | |
| | | | | | | GGTTTCAAGAG | | | |
| | | | | | | GCATC | | | |
| pU6- | AAGGCT | 20064 | GTCTT | 20183 | GTA | CAGAAGCTACA | 20421 | GTCTTTGTACTCTGGTACCAGAAGCTACAAAGATA | 20540 |
| St1- | GTGCTG | | TGTAC | | C | AAGATAAGGCT | | AGGCTTCATGCCGAAATCAACACCCTGTCATTTTA | |
| A1AT- | ACCATC | | TCTG | | | TCATGCCGAAA | | TGGCAGGGTGTTTT | |
| sgRNA- | GA | | | | | TCAACACCCTG | | | |
| 1 | | | | | | TCATTTTATGG | | | |
| | | | | | | CAGGGTGTTTT | | | |
| pU6- | GAAGGC | 20065 | GTCTT | 20184 | GTA | CAGAAGCTACA | 20422 | GTCTTTGTACTCTGGTACCAGAAGCTACAAAGATA | 20541 |
| St1- | TGTGCT | | TGTAC | | C | AAGATAAGGCT | | AGGCTTCATGCCGAAATCAACACCCTGTCATTTTA | |
| A1AT- | GACCAT | | TCTG | | | TCATGCCGAAA | | TGGCAGGGTGTTTT | |
| sgRNA- | CGA | | | | | TCAACACCCTG | | | |
| 1G | | | | | | TCATTTTATGG | | | |
| | | | | | | CAGGGTGTTTT | | | |
| pU6- | AAGGCT | 20066 | GTCTT | 20185 | GTA | CAGAAGCTACA | 20423 | GTCTTTGTACTCTGGTACCAGAAGCTACAAAGATA | 20542 |
| St1- | CACGTG | | TGTAC | | C | AAGATAAGGCT | | AGGCTTCATGCCGAAATCAACACCCTGTCATTTTA | |
| A1AT- | GACACC | | TCTG | | | TCATGCCGAAA | | TGGCAGGGTGTTTT | |
| sgRNA- | TC | | | | | TCAACACCCTG | | | |
| 2 | | | | | | TCATTTTATGG | | | |
| | | | | | | CAGGGTGTTTT | | | |
| pU6- | GAAGGC | 20067 | GTCTT | 20186 | GTA | CAGAAGCTACA | 20424 | GTCTTTGTACTCTGGTACCAGAAGCTACAAAGATA | 20543 |
| St1- | TCACGT | | TGTAC | | C | AAGATAAGGCT | | AGGCTTCATGCCGAAATCAACACCCTGTCATTTTA | |
| A1AT- | GGACAC | | TCTG | | | TCATGCCGAAA | | TGGCAGGGTGTTTT | |
| sgRNA- | CTC | | | | | TCAACACCCTG | | | |
| 2G | | | | | | TCATTTTATGG | | | |
| | | | | | | CAGGGTGTTTT | | | |
| pU6- | TACCAA | 20068 | GTCTT | 20187 | GTA | CAGAAGCTACA | 20425 | GTCTTTGTACTCTGGTACCAGAAGCTACAAAGATA | 20544 |
| St1- | GTCTCC | | TGTAC | | C | AAGATAAGGCT | | AGGCTTCATGCCGAAATCAACACCCTGTCATTTTA | |
| A1AT- | CCTCTT | | TCTG | | | TCATGCCGAAA | | TGGCAGGGTGTTTT | |
| sgRNA- | CA | | | | | TCAACACCCTG | | | |
| 3 | | | | | | TCATTTTATGG | | | |
| | | | | | | CAGGGTGTTTT | | | |
| pU6- | GTACCA | 20069 | GTCTT | 20188 | GTA | CAGAAGCTACA | 20426 | GTCTTTGTACTCTGGTACCAGAAGCTACAAAGATA | 20545 |
| St1- | AGTCTC | | TGTAC | | C | AAGATAAGGCT | | AGGCTTCATGCCGAAATCAACACCCTGTCATTTTA | |
| A1AT- | CCCTCT | | TCTG | | | TCATGCCGAAA | | TGGCAGGGTGTTTT | |
| sgRNA- | TCA | | | | | TCAACACCCTG | | | |
| 3G | | | | | | TCATTTTATGG | | | |
| | | | | | | CAGGGTGTTTT | | | |

[0532] In some embodiments, the systems and methods provided herein may comprise a template sequence, or component thereof, listed in Table 6B, or a sequence having at least 70%, 75%, 80%, 85%, 90%, 95%, 96%, 97%, 98%, or 99% identity thereto. Table 6B provides exemplary template RNA sequences designed to be paired with a gene modifying polypeptide to correct a mutation in the SERPINA1 gene.

TABLE 6B
Exemplary template RNA sequences
Table 6B provides design of exemplary DNA components of gene modifying systems for correcting the pathogenic E342K mutation in
SERPINA1 to the wild-type form. This table details the sequence of a complete template RNA for use in exemplary gene modifying systems
comprising a gene modifying polypeptide.

| | | SEQ ID | | SEQ | | SEQ ID | | SEQ ID |
|---|---|---|---|---|---|---|---|---|
| Name | Spacer | NO | PBS | ID NO | RT | NO | tgRNA sequence | NO |
| pU6_A1AT_ | CTGTGC | 20546 | GTCGATGG | 21356 | ACATGGCCC | 22166 | CTGTGCTGACCATCGACAAGGTTTTAGAGCTA | 22976 |
| SpRY_ | TGACCA | | TCAGCACA | | CAGCAGCTT | | GAAATAGCAAGTTAAAATAAGGCTAGTCCGTT | |
| ED0- | TCGACA | | G | | CAGTCCCTT | | ATCAACTTGAAAAAGTGGCACCGAGTCGGTGC | |
| _G_30FE_ | AG | | | | TCTC | | ACATGGCCCCAGCAGCTTCAGTCCCTTTCTCGT | |
| PB17 | | | | | | | CGATGGTCAGCACAG | |
| pU6_A1AT_ | CTGTGC | 20547 | GTCGATGG | 21357 | ACATGGCCC | 22167 | CTGTGCTGACCATCGACAAGGTTTTAGAGCTA | 22977 |
| SpRY_ | TGACCA | | TCAGCACA | | CAGCAGCTT | | GAAATAGCAAGTTAAAATAAGGCTAGTCCGTT | |
| ED0- | TCGACA | | | | CAGTCCCTT | | ATCAACTTGAAAAAGTGGCACCGAGTCGGTGC | |
| _G_30FE_ | AG | | | | TCTC | | ACATGGCCCCAGCAGCTTCAGTCCCTTTCTCGT | |
| PB16 | | | | | | | CGATGGTCAGCACA | |
| pU6_A1AT_ | CTGTGC | 20548 | GTCGATGG | 21358 | ACATGGCCC | 22168 | CTGTGCTGACCATCGACAAGGTTTTAGAGCTA | 22978 |
| SpRY_ | TGACCA | | TCAGCAC | | CAGCAGCTT | | GAAATAGCAAGTTAAAATAAGGCTAGTCCGTT | |
| ED0- | TCGACA | | | | CAGTCCCTT | | ATCAACTTGAAAAAGTGGCACCGAGTCGGTGC | |
| _G_30FE_ | AG | | | | TCTC | | ACATGGCCCCAGCAGCTTCAGTCCCTTTCTCGT | |
| PB15 | | | | | | | CGATGGTCAGCAC | |
| pU6_A1AT_ | CTGTGC | 20549 | GTCGATGG | 21359 | ACATGGCCC | 22169 | CTGTGCTGACCATCGACAAGGTTTTAGAGCTA | 22979 |
| SpRY_ | TGACCA | | TCAGCA | | CAGCAGCTT | | GAAATAGCAAGTTAAAATAAGGCTAGTCCGTT | |
| ED0- | TCGACA | | | | CAGTCCCTT | | ATCAACTTGAAAAAGTGGCACCGAGTCGGTGC | |
| _G_30FE_ | AG | | | | TCTC | | ACATGGCCCCAGCAGCTTCAGTCCCTTTCTCGT | |
| PB14 | | | | | | | CGATGGTCAGCA | |
| pU6_A1AT_ | CTGTGC | 20550 | GTCGATGG | 21360 | ACATGGCCC | 22170 | CTGTGCTGACCATCGACAAGGTTTTAGAGCTA | 22980 |
| SpRY_ | TGACCA | | TCAGC | | CAGCAGCTT | | GAAATAGCAAGTTAAAATAAGGCTAGTCCGTT | |
| ED0- | TCGACA | | | | CAGTCCCTT | | ATCAACTTGAAAAAGTGGCACCGAGTCGGTGC | |
| _G_30FE_ | AG | | | | TCTC | | ACATGGCCCCAGCAGCTTCAGTCCCTTTCTCGT | |
| PB13 | | | | | | | CGATGGTCAGC | |
| pU6_A1AT_ | CTGTGC | 20551 | GTCGATGG | 21361 | ACATGGCCC | 22171 | CTGTGCTGACCATCGACAAGGTTTTAGAGCTA | 22981 |
| SpRY_ | TGACCA | | TCAG | | CAGCAGCTT | | GAAATAGCAAGTTAAAATAAGGCTAGTCCGTT | |
| ED0- | TCGACA | | | | CAGTCCCTT | | ATCAACTTGAAAAAGTGGCACCGAGTCGGTGC | |
| _G_30FE_ | AG | | | | TCTC | | ACATGGCCCCAGCAGCTTCAGTCCCTTTCTCGT | |
| PB12 | | | | | | | CGATGGTCAG | |
| pU6_A1AT_ | CTGTGC | 20552 | GTCGATGG | 21362 | ACATGGCCC | 22172 | CTGTGCTGACCATCGACAAGGTTTTAGAGCTA | 22982 |
| SpRY_ | TGACCA | | TCA | | CAGCAGCTT | | GAAATAGCAAGTTAAAATAAGGCTAGTCCGTT | |
| ED0- | TCGACA | | | | CAGTCCCTT | | ATCAACTTGAAAAAGTGGCACCGAGTCGGTGC | |
| _G_30FE_ | AG | | | | TCTC | | ACATGGCCCCAGCAGCTTCAGTCCCTTTCTCGT | |
| PB11 | | | | | | | CGATGGTCA | |
| pU6_A1AT_ | CTGTGC | 20553 | GTCGATGG | 21363 | ACATGGCCC | 22173 | CTGTGCTGACCATCGACAAGGTTTTAGAGCTA | 22983 |
| SpRY_ | TGACCA | | TC | | CAGCAGCTT | | GAAATAGCAAGTTAAAATAAGGCTAGTCCGTT | |
| ED0- | TCGACA | | | | CAGTCCCTT | | ATCAACTTGAAAAAGTGGCACCGAGTCGGTGC | |
| G_30FE_ | AG | | | | TCTC | | ACATGGCCCCAGCAGCTTCAGTCCCTTTCTCGT | |
| PB10 | | | | | | | CGATGGTC | |
| pU6_A1AT_ | CTGTGC | 20554 | GTCGATGG | | ACATGGCCC | 22174 | CTGTGCTGACCATCGACAAGGTTTTAGAGCTA | 22984 |
| SpRY_ | TGACCA | | T | | CAGCAGCTT | | GAAATAGCAAGTTAAAATAAGGCTAGTCCGTT | |
| ED0- | TCGACA | | | | CAGTCCCTT | | ATCAACTTGAAAAAGTGGCACCGAGTCGGTGC | |
| G_30FE_ | AG | | | | TCTC | | ACATGGCCCCAGCAGCTTCAGTCCCTTTCTCGT | |
| PB9 | | | | | | | CGATGGT | |
| pU6_A1AT_ | CTGTGC | 20555 | GTCGATGG | | ACATGGCCC | 22175 | CTGTGCTGACCATCGACAAGGTTTTAGAGCTA | 22985 |
| SpRY_ | TGACCA | | | | CAGCAGCTT | | GAAATAGCAAGTTAAAATAAGGCTAGTCCGTT | |
| ED0- | TCGACA | | | | CAGTCCCTT | | ATCAACTTGAAAAAGTGGCACCGAGTCGGTGC | |
| _G_30FE_ | AG | | | | TCTC | | ACATGGCCCCAGCAGCTTCAGTCCCTTTCTCGT | |
| PB8 | | | | | | | CGATGG | |
| pU6_A1AT_ | CTGTGC | 20556 | GTCGATGG | 21366 | GCCCCAGCA | 22176 | CTGTGCTGACCATCGACAAGGTTTTAGAGCTA | 22986 |
| SpRY_ | TGACCA | | TCAGCACA | | GCTTCAGTC | | GAAATAGCAAGTTAAAATAAGGCTAGTCCGTT | |
| ED0- | TCGACA | | G | | CCTTTCTC | | ATCAACTTGAAAAAGTGGCACCGAGTCGGTGC | |
| _G_25FE_ | AG | | | | | | GCCCCAGCAGCTTCAGTCCCTTTCTCGTCGATG | |
| PB17 | | | | | | | GTCAGCACAG | |
| pU6_A1AT_ | CTGTGC | 20557 | GTCGATGG | 21367 | GCCCCAGCA | 22177 | CTGTGCTGACCATCGACAAGGTTTTAGAGCTA | 22987 |
| SpRY_ | TGACCA | | TCAGCACA | | GCTTCAGTC | | GAAATAGCAAGTTAAAATAAGGCTAGTCCGTT | |
| ED0- | TCGACA | | | | CCTTTCTC | | ATCAACTTGAAAAAGTGGCACCGAGTCGGTGC | |
| _G_25FE_ | AG | | | | | | GCCCCAGCAGCTTCAGTCCCTTTCTCGTCGATG | |
| PB16 | | | | | | | GTCAGCACA | |
| pU6_A1AT_ | CTGTGC | 20558 | GTCGATGG | 21368 | GCCCCAGCA | 22178 | CTGTGCTGACCATCGACAAGGTTTTAGAGCTA | 22988 |
| SpRY_ | TGACCA | | TCAGCAC | | GCTTCAGTC | | GAAATAGCAAGTTAAAATAAGGCTAGTCCGTT | |
| ED0- | TCGACA | | | | CCTTTCTC | | ATCAACTTGAAAAAGTGGCACCGAGTCGGTGC | |
| _G_25FE_ | AG | | | | | | GCCCCAGCAGCTTCAGTCCCTTTCTCGTCGATG | |
| PB15 | | | | | | | GTCAGCAC | |
| pU6_A1AT_ | CTGTGC | 20559 | GTCGATGG | 21369 | GCCCCAGCA | 22179 | CTGTGCTGACCATCGACAAGGTTTTAGAGCTA | |
| SpRY_ | TGACCA | | TCAGCA | | GCTTCAGTC | | GAAATAGCAAGTTAAAATAAGGCTAGTCCGTT | 22989 |
| ED0- | TCGACA | | | | CCTTTCTC | | ATCAACTTGAAAAAGTGGCACCGAGTCGGTGC | |
| G_25FE_ | AG | | | | | | GCCCCAGCAGCTTCAGTCCCTTTCTCGTCGATG | |
| PB14 | | | | | | | GTCAGCA | |
| pU6_A1AT_ | CTGTGC | 20560 | GTCGATGG | 21370 | GCCCCAGCA | 22180 | CTGTGCTGACCATCGACAAGGTTTTAGAGCTA | 22990 |
| SpRY_ | TGACCA | | TCAGC | | GCTTCAGTC | | GAAATAGCAAGTTAAAATAAGGCTAGTCCGTT | |
| ED0- | TCGACA | | | | CCTTTCTC | | ATCAACTTGAAAAAGTGGCACCGAGTCGGTGC | |
| _G_25FE_ | AG | | | | | | GCCCCAGCAGCTTCAGTCCCTTTCTCGTCGATG | |
| PB13 | | | | | | | GTCAGC | |
| pU6_A1AT_ | CTGTGC | 20561 | GTCGATGG | 21371 | GCCCCAGCA | 22181 | CTGTGCTGACCATCGACAAGGTTTTAGAGCTA | 22991 |
| SpRY_ | TGACCA | | TCAG | | GCTTCAGTC | | GAAATAGCAAGTTAAAATAAGGCTAGTCCGTT | |
| ED0- | TCGACA | | | | CCTTTCTC | | ATCAACTTGAAAAAGTGGCACCGAGTCGGTGC | |
| _G_25FE_ | AG | | | | | | GCCCCAGCAGCTTCAGTCCCTTTCTCGTCGATG | |
| PB12 | | | | | | | GTCAG | |
| pU6_A1AT_ | CTGTGC | 20562 | GTCGATGG | 21372 | GCCCCAGCA | 22182 | CTGTGCTGACCATCGACAAGGTTTTAGAGCTA | 22992 |
| SpRY_ | TGACCA | | TCA | | GCTTCAGTC | | GAAATAGCAAGTTAAAATAAGGCTAGTCCGTT | |
| ED0- | TCGACA | | | | CCTTTCTC | | ATCAACTTGAAAAAGTGGCACCGAGTCGGTGC | |
| _G_25FE_ | AG | | | | | | GCCCCAGCAGCTTCAGTCCCTTTCTCGTCGATG | |
| PB11 | | | | | | | GTCA | |
| pU6_A1 | CTGTGC | 20563 | GTCGATGG | 21373 | GCCCCAGCA | 22183 | CTGTGCTGACCATCGACAAGGTTTTAGAGCTA | 22993 |
| AT_SpR | TGACCA | | TC | | GCTTCAGTC | | GAAATAGCAAGTTAAAATAAGGCTAGTCCGTT | |
| Y_ED0- | TCGACA | | | | CCTTTCTC | | ATCAACTTGAAAAAGTGGCACCGAGTCGGTGC | |
| _G_25F | AG | | | | | | GCCCCAGCAGCTTCAGTCCCTTTCTCGTCGATG | |
| E_PB10 | | | | | | | GTC | |
| pU6_A1AT_ | CTGTGC | 20564 | GTCGATGG | | GCCCCAGCA | 22184 | CTGTGCTGACCATCGACAAGGTTTTAGAGCTA | 22994 |
| SpRY_ | TGACCA | | T | | GCTTCAGTC | | GAAATAGCAAGTTAAAATAAGGCTAGTCCGTT | |
| ED0- | TCGACA | | | | CCTTTCTC | | ATCAACTTGAAAAAGTGGCACCGAGTCGGTGC | |
| _G_25FE_ | AG | | | | | | GCCCCAGCAGCTTCAGTCCCTTTCTCGTCGATG | |
| PB9 | | | | | | | GT | |
| pU6_A1AT_ | CTGTGC | 20565 | GTCGATGG | | GCCCCAGCA | 22185 | CTGTGCTGACCATCGACAAGGTTTTAGAGCTA | 22995 |
| SpRY_ | TGACCA | | | | GCTTCAGTC | | GAAATAGCAAGTTAAAATAAGGCTAGTCCGTT | |
| ED0- | TCGACA | | | | CCTTTCTC | | ATCAACTTGAAAAAGTGGCACCGAGTCGGTGC | |
| _G_25FE_ | AG | | | | | | GCCCCAGCAGCTTCAGTCCCTTTCTCGTCGATG | |
| PB8 | | | | | | | G | |
| pU6_A1AT_ | CTGTGC | 20566 | GTCGATGG | 21376 | AGCAGCTTC | 22186 | CTGTGCTGACCATCGACAAGGTTTTAGAGCTA | 22996 |
| SpRY_ | TGACCA | | TCAGCACA | | AGTCCCTTT | | GAAATAGCAAGTTAAAATAAGGCTAGTCCGTT | |
| ED0- | TCGACA | | G | | CTC | | ATCAACTTGAAAAAGTGGCACCGAGTCGGTGC | |
| _G_20FE_ | AG | | | | | | AGCAGCTTCAGTCCCTTTCTCGTCGATGGTCAG | |
| PB17 | | | | | | | CACAG | |
| pU6_A1AT_ | CTGTGC | 20567 | GTCGATGG | 21377 | AGCAGCTTC | 22187 | CTGTGCTGACCATCGACAAGGTTTTAGAGCTA | 22997 |
| SpRY_ | TGACCA | | TCAGCACA | | AGTCCCTTT | | GAAATAGCAAGTTAAAATAAGGCTAGTCCGTT | |
| ED0- | TCGACA | | | | CTC | | ATCAACTTGAAAAAGTGGCACCGAGTCGGTGC | |
| _G_20FE_ | AG | | | | | | AGCAGCTTCAGTCCCTTTCTCGTCGATGGTCAG | |
| PB16 | | | | | | | CACA | |
| pU6_A1AT_ | CTGTGC | 20568 | GTCGATGG | 21378 | AGCAGCTTC | 22188 | CTGTGCTGACCATCGACAAGGTTTTAGAGCTA | 22998 |
| SpRY_ | TGACCA | | TCAGCAC | | AGTCCCTTT | | GAAATAGCAAGTTAAAATAAGGCTAGTCCGTT | |
| ED0- | TCGACA | | | | CTC | | ATCAACTTGAAAAAGTGGCACCGAGTCGGTGC | |
| _G_20FE_ | AG | | | | | | AGCAGCTTCAGTCCCTTTCTCGTCGATGGTCAG | |
| PB15 | | | | | | | CAC | |
| pU6_A1 | CTGTGC | 20569 | GTCGATGG | 21379 | AGCAGCTTC | 22189 | CTGTGCTGACCATCGACAAGGTTTTAGAGCTA | 22999 |
| AT_SpR | TGACCA | | TCAGCA | | AGTCCCTTT | | GAAATAGCAAGTTAAAATAAGGCTAGTCCGTT | |
| Y_ED0- | TCGACA | | | | CTC | | ATCAACTTGAAAAAGTGGCACCGAGTCGGTGC | |
| G_20F | AG | | | | | | AGCAGCTTCAGTCCCTTTCTCGTCGATGGTCAG | |
| E_PB14 | | | | | | | CA | |
| pU6_A1AT_ | CTGTGC | 20570 | GTCGATGG | 21380 | AGCAGCTTC | 22190 | CTGTGCTGACCATCGACAAGGTTTTAGAGCTA | 23000 |
| SpRY_ | TGACCA | | TCAGC | | AGTCCCTTT | | GAAATAGCAAGTTAAAATAAGGCTAGTCCGTT | |
| ED0- | TCGACA | | | | CTC | | ATCAACTTGAAAAAGTGGCACCGAGTCGGTGC | |
| _G_20FE_ | AG | | | | | | AGCAGCTTCAGTCCCTTTCTCGTCGATGGTCAG | |
| PB13 | | | | | | | C | |
| pU6_A1AT_ | CTGTGC | 20571 | GTCGATGG | 21381 | AGCAGCTTC | 22191 | CTGTGCTGACCATCGACAAGGTTTTAGAGCTA | 23001 |
| SpRY_ | TGACCA | | TCAG | | AGTCCCTTT | | GAAATAGCAAGTTAAAATAAGGCTAGTCCGTT | |
| ED0- | TCGACA | | | | CTC | | ATCAACTTGAAAAAGTGGCACCGAGTCGGTGC | |
| _G_20FE_ | AG | | | | | | AGCAGCTTCAGTCCCTTTCTCGTCGATGGTCAG | |
| PB12 | | | | | | | | |
| pU6_A1AT_ | CTGTGC | 20572 | GTCGATGG | 21382 | AGCAGCTTC | 22192 | CTGTGCTGACCATCGACAAGGTTTTAGAGCTA | 23002 |
| SpRY_ | TGACCA | | TCA | | AGTCCCTTT | | GAAATAGCAAGTTAAAATAAGGCTAGTCCGTT | |
| ED0- | TCGACA | | | | CTC | | ATCAACTTGAAAAAGTGGCACCGAGTCGGTGC | |
| _G_20FE_ | AG | | | | | | AGCAGCTTCAGTCCCTTTCTCGTCGATGGTCA | |
| PB11 | | | | | | | | |
| pU6_A1AT_ | CTGTGC | 20573 | GTCGATGG | 21383 | AGCAGCTTC | 22193 | CTGTGCTGACCATCGACAAGGTTTTAGAGCTA | 23003 |
| SpRY_ | TGACCA | | TC | | AGTCCCTTT | | GAAATAGCAAGTTAAAATAAGGCTAGTCCGTT | |
| ED0- | TCGACA | | | | CTC | | ATCAACTTGAAAAAGTGGCACCGAGTCGGTGC | |
| _G_20FE_ | AG | | | | | | AGCAGCTTCAGTCCCTTTCTCGTCGATGGTC | |
| PB10 | | | | | | | | |
| pU6_A1AT_ | CTGTGC | 20574 | GTCGATGG | | AGCAGCTTC | 22194 | CTGTGCTGACCATCGACAAGGTTTTAGAGCTA | 23004 |
| SpRY_ | TGACCA | | T | | AGTCCCTTT | | GAAATAGCAAGTTAAAATAAGGCTAGTCCGTT | |
| ED0- | TCGACA | | | | CTC | | ATCAACTTGAAAAAGTGGCACCGAGTCGGTGC | |
| _G_20FE_ | AG | | | | | | AGCAGCTTCAGTCCCTTTCTCGTCGATGGT | |
| PB9 | | | | | | | | |
| pU6_A1AT_ | CTGTGC | 20575 | GTCGATGG | | AGCAGCTTC | 22195 | CTGTGCTGACCATCGACAAGGTTTTAGAGCTA | 23005 |
| SpRY_ | TGACCA | | | | AGTCCCTTT | | GAAATAGCAAGTTAAAATAAGGCTAGTCCGTT | |
| ED0- | TCGACA | | | | CTC | | ATCAACTTGAAAAAGTGGCACCGAGTCGGTGC | |
| _G_20FE_ | AG | | | | | | AGCAGCTTCAGTCCCTTTCTCGTCGATGG | |
| PB8 | | | | | | | | |
| pU6_A1AT_ | CTGTGC | 20576 | GTCGATGG | 21386 | TTCAGTCCC | 22196 | CTGTGCTGACCATCGACAAGGTTTTAGAGCTA | 23006 |
| SpRY_ | TGACCA | | TCAGCACA | | TTTCTC | | GAAATAGCAAGTTAAAATAAGGCTAGTCCGTT | |
| ED0- | TCGACA | | G | | | | ATCAACTTGAAAAAGTGGCACCGAGTCGGTGC | |
| _G_14FE_ | AG | | | | | | TTCAGTCCCTTTCTCGTCGATGGTCAGCACAG | |
| PB17 | | | | | | | | |
| pU6_A1AT_ | CTGTGC | 20577 | GTCGATGG | 21387 | TTCAGTCCC | 22197 | CTGTGCTGACCATCGACAAGGTTTTAGAGCTA | 23007 |
| SpRY_ | TGACCA | | TCAGCACA | | TTTCTC | | GAAATAGCAAGTTAAAATAAGGCTAGTCCGTT | |
| ED0- | TCGACA | | | | | | ATCAACTTGAAAAAGTGGCACCGAGTCGGTGC | |
| _G_14FE_ | AG | | | | | | TTCAGTCCCTTTCTCGTCGATGGTCAGCACA | |
| PB16 | | | | | | | | |
| pU6_A1AT_ | CTGTGC | 20578 | GTCGATGG | 21388 | TTCAGTCCC | 22198 | CTGTGCTGACCATCGACAAGGTTTTAGAGCTA | 23008 |
| SpRY_ | TGACCA | | TCAGCAC | | TTTCTC | | GAAATAGCAAGTTAAAATAAGGCTAGTCCGTT | |
| ED0- | TCGACA | | | | | | ATCAACTTGAAAAAGTGGCACCGAGTCGGTGC | |
| _G_14F | AG | | | | | | TTCAGTCCCTTTCTCGTCGATGGTCAGCAC | |
| E_PB15 | | | | | | | | |
| pU6_A1AT_ | CTGTGC | 20579 | GTCGATGG | 21389 | TTCAGTCCC | 22199 | CTGTGCTGACCATCGACAAGGTTTTAGAGCTA | 23009 |
| SpRY_ | TGACCA | | TCAGCA | | TTTCTC | | GAAATAGCAAGTTAAAATAAGGCTAGTCCGTT | |
| ED0- | TCGACA | | | | | | ATCAACTTGAAAAAGTGGCACCGAGTCGGTGC | |
| _G_14FE_ | AG | | | | | | TTCAGTCCCTTTCTCGTCGATGGTCAGCA | |
| PB14 | | | | | | | | |
| pU6_A1AT_ | CTGTGC | 20580 | GTCGATGG | 21390 | TTCAGTCCC | 22200 | CTGTGCTGACCATCGACAAGGTTTTAGAGCTA | 23010 |
| SpRY_ | TGACCA | | TCAGC | | TTTCTC | | GAAATAGCAAGTTAAAATAAGGCTAGTCCGTT | |
| ED0- | TCGACA | | | | | | ATCAACTTGAAAAAGTGGCACCGAGTCGGTGC | |
| _G_14FE_ | AG | | | | | | TTCAGTCCCTTTCTCGTCGATGGTCAGC | |
| PB13 | | | | | | | | |
| pU6_A1AT_ | CTGTGC | 20581 | GTCGATGG | 21391 | TTCAGTCCC | 22201 | CTGTGCTGACCATCGACAAGGTTTTAGAGCTA | 23011 |
| SpRY_ | TGACCA | | TCAG | | TTTCTC | | GAAATAGCAAGTTAAAATAAGGCTAGTCCGTT | |
| ED0- | TCGACA | | | | | | ATCAACTTGAAAAAGTGGCACCGAGTCGGTGC | |
| _G_14FE_ | AG | | | | | | TTCAGTCCCTTTCTCGTCGATGGTCAG | |
| PB12 | | | | | | | | |
| pU6_A1AT_ | CTGTGC | 20582 | GTCGATGG | 21392 | TTCAGTCCC | 22202 | CTGTGCTGACCATCGACAAGGTTTTAGAGCTA | 23012 |
| SpRY_ | TGACCA | | TCA | | TTTCTC | | GAAATAGCAAGTTAAAATAAGGCTAGTCCGTT | |
| ED0- | TCGACA | | | | | | ATCAACTTGAAAAAGTGGCACCGAGTCGGTGC | |
| _G_14FE_ | AG | | | | | | TTCAGTCCCTTTCTCGTCGATGGTCA | |
| PB11 | | | | | | | | |
| pU6_A1AT_ | CTGTGC | 20583 | GTCGATGG | 21393 | TTCAGTCCC | 22203 | CTGTGCTGACCATCGACAAGGTTTTAGAGCTA | 23013 |
| SpRY_ | TGACCA | | TC | | TTTCTC | | GAAATAGCAAGTTAAAATAAGGCTAGTCCGTT | |
| ED0- | TCGACA | | | | | | ATCAACTTGAAAAAGTGGCACCGAGTCGGTGC | |
| _G_14FE_ | AG | | | | | | TTCAGTCCCTTTCTCGTCGATGGTC | |
| PB10 | | | | | | | | |
| pU6_A1AT_ | CTGTGC | 20584 | GTCGATGG | | TTCAGTCCC | 22204 | CTGTGCTGACCATCGACAAGGTTTTAGAGCTA | 23014 |
| SpRY_ | TGACCA | | T | | TTTCTC | | GAAATAGCAAGTTAAAATAAGGCTAGTCCGTT | |
| ED0- | TCGACA | | | | | | ATCAACTTGAAAAAGTGGCACCGAGTCGGTGC | |
| _G_14FE_ | AG | | | | | | TTCAGTCCCTTTCTCGTCGATGGT | |
| PB9 | | | | | | | | |
| pU6_A1AT_ | CTGTGC | 20585 | GTCGATGG | | TTCAGTCCC | 22205 | CTGTGCTGACCATCGACAAGGTTTTAGAGCTA | 23015 |
| SpRY_ | TGACCA | | | | TTTCTC | | GAAATAGCAAGTTAAAATAAGGCTAGTCCGTT | |
| ED0- | TCGACA | | | | | | ATCAACTTGAAAAAGTGGCACCGAGTCGGTGC | |
| _G_14FE_ | AG | | | | | | TTCAGTCCCTTTCTCGTCGATGG | |
| PB8 | | | | | | | | |
| pU6_A1 | CTGTGC | 20586 | GTCGATGG | 21396 | AGTCCCTTT | 22206 | CTGTGCTGACCATCGACAAGGTTTTAGAGCTA | 23016 |
| AT_SpR | TGACCA | | TCAGCACA | | CTC | | GAAATAGCAAGTTAAAATAAGGCTAGTCCGTT | |
| Y_ED0- | TCGACA | | G | | | | ATCAACTTGAAAAAGTGGCACCGAGTCGGTGC | |
| G 11F | AG | | | | | | AGTCCCTTTCTCGTCGATGGTCAGCACAG | |
| E_PB17 | | | | | | | | |
| pU6_A1AT_ | CTGTGC | 20587 | GTCGATGG | 21397 | AGTCCCTTT | 22207 | CTGTGCTGACCATCGACAAGGTTTTAGAGCTA | 23017 |
| SpRY_ | TGACCA | | TCAGCACA | | CTC | | GAAATAGCAAGTTAAAATAAGGCTAGTCCGTT | |
| ED0- | TCGACA | | | | | | ATCAACTTGAAAAAGTGGCACCGAGTCGGTGC | |
| _G_11FE_ | AG | | | | | | AGTCCCTTTCTCGTCGATGGTCAGCACA | |
| PB16 | | | | | | | | |
| pU6_A1AT_ | CTGTGC | 20588 | GTCGATGG | 21398 | AGTCCCTTT | 22208 | CTGTGCTGACCATCGACAAGGTTTTAGAGCTA | 23018 |
| SpRY_ | TGACCA | | TCAGCAC | | CTC | | GAAATAGCAAGTTAAAATAAGGCTAGTCCGTT | |
| ED0- | TCGACA | | | | | | ATCAACTTGAAAAAGTGGCACCGAGTCGGTGC | |
| _G_11FE_ | AG | | | | | | AGTCCCTTTCTCGTCGATGGTCAGCAC | |
| PB15 | | | | | | | | |
| pU6_A1AT_ | CTGTGC | 20589 | GTCGATGG | 21399 | AGTCCCTTT | 22209 | CTGTGCTGACCATCGACAAGGTTTTAGAGCTA | 23019 |
| SpRY_ | TGACCA | | TCAGCA | | CTC | | GAAATAGCAAGTTAAAATAAGGCTAGTCCGTT | |
| ED0- | TCGACA | | | | | | ATCAACTTGAAAAAGTGGCACCGAGTCGGTGC | |
| _G_11FE_ | AG | | | | | | AGTCCCTTTCTCGTCGATGGTCAGCA | |
| PB14 | | | | | | | | |
| pU6_A1AT_ | CTGTGC | 20590 | GTCGATGG | 21400 | AGTCCCTTT | 22210 | CTGTGCTGACCATCGACAAGGTTTTAGAGCTA | 23020 |
| SpRY_ | TGACCA | | TCAGC | | CTC | | GAAATAGCAAGTTAAAATAAGGCTAGTCCGTT | |
| ED0- | TCGACA | | | | | | ATCAACTTGAAAAAGTGGCACCGAGTCGGTGC | |
| _G_11FE_ | AG | | | | | | AGTCCCTTTCTCGTCGATGGTCAGC | |
| PB13 | | | | | | | | |
| pU6_A1AT_ | CTGTGC | 20591 | GTCGATGG | 21401 | AGTCCCTTT | 22211 | CTGTGCTGACCATCGACAAGGTTTTAGAGCTA | 23021 |
| SpRY_ | TGACCA | | TCAG | | CTC | | GAAATAGCAAGTTAAAATAAGGCTAGTCCGTT | |
| ED0- | TCGACA | | | | | | ATCAACTTGAAAAAGTGGCACCGAGTCGGTGC | |
| _G_11FE_ | AG | | | | | | AGTCCCTTTCTCGTCGATGGTCAG | |
| PB12 | | | | | | | | |
| pU6_A1AT_ | CTGTGC | 20592 | GTCGATGG | 21402 | AGTCCCTTT | 22212 | CTGTGCTGACCATCGACAAGGTTTTAGAGCTA | 23022 |
| SpRY_ | TGACCA | | TCA | | CTC | | GAAATAGCAAGTTAAAATAAGGCTAGTCCGTT | |
| ED0- | TCGACA | | | | | | ATCAACTTGAAAAAGTGGCACCGAGTCGGTGC | |
| _G_11FE_ | AG | | | | | | AGTCCCTTTCTCGTCGATGGTCA | |
| PB11 | | | | | | | | |
| pU6_A1AT_ | CTGTGC | 20593 | GTCGATGG | 21403 | AGTCCCTTT | 22213 | CTGTGCTGACCATCGACAAGGTTTTAGAGCTA | 23023 |
| SpR | TGACCA | | TC | | CTC | | GAAATAGCAAGTTAAAATAAGGCTAGTCCGTT | |
| Y_ED0- | TCGACA | | | | | | ATCAACTTGAAAAAGTGGCACCGAGTCGGTGC | |
| _G_11FE_ | AG | | | | | | AGTCCCTTTCTCGTCGATGGTC | |
| PB10 | | | | | | | | |
| pU6_A1AT_ | CTGTGC | 20594 | GTCGATGG | | AGTCCCTTT | 22214 | CTGTGCTGACCATCGACAAGGTTTTAGAGCTA | 23024 |
| SpRY_ | TGACCA | | T | | CTC | | GAAATAGCAAGTTAAAATAAGGCTAGTCCGTT | |
| ED0- | TCGACA | | | | | | ATCAACTTGAAAAAGTGGCACCGAGTCGGTGC | |
| _G_11FE_ | AG | | | | | | AGTCCCTTTCTCGTCGATGGT | |
| PB9 | | | | | | | | |
| pU6_A1AT_ | CTGTGC | 20595 | GTCGATGG | | AGTCCCTTT | 22215 | CTGTGCTGACCATCGACAAGGTTTTAGAGCTA | 23025 |
| SpRY_ | TGACCA | | | | CTC | | GAAATAGCAAGTTAAAATAAGGCTAGTCCGTT | |
| ED0- | TCGACA | | | | | | ATCAACTTGAAAAAGTGGCACCGAGTCGGTGC | |
| _G_11FE_ | AG | | | | | | AGTCCCTTTCTCGTCGATGG | |
| PB8 | | | | | | | | |
| pU6_A1AT_ | CTGTGC | 20596 | GTCGATGG | 21406 | TCCCTTTCTC | 22216 | CTGTGCTGACCATCGACAAGGTTTTAGAGCTA | 23026 |
| SpRY_ | TGACCA | | TCAGCACA | | | | GAAATAGCAAGTTAAAATAAGGCTAGTCCGTT | |
| ED0- | TCGACA | | G | | | | ATCAACTTGAAAAAGTGGCACCGAGTCGGTGC | |
| _G_9FE_ | AG | | | | | | TCCCTTTCTCGTCGATGGTCAGCACAG | |
| PB17 | | | | | | | | |
| pU6_A1AT_ | CTGTGC | 20597 | GTCGATGG | 21407 | TCCCTTTCTC | 22217 | CTGTGCTGACCATCGACAAGGTTTTAGAGCTA | 23027 |
| SpRY_ | TGACCA | | TCAGCACA | | | | GAAATAGCAAGTTAAAATAAGGCTAGTCCGTT | |
| ED0- | TCGACA | | | | | | ATCAACTTGAAAAAGTGGCACCGAGTCGGTGC | |
| _G_9FE_ | AG | | | | | | TCCCTTTCTCGTCGATGGTCAGCACA | |
| PB16 | | | | | | | | |
| pU6_A1AT_ | CTGTGC | 20598 | GTCGATGG | 21408 | TCCCTTTCTC | 22218 | CTGTGCTGACCATCGACAAGGTTTTAGAGCTA | 23028 |
| SpRY_ | TGACCA | | TCAGCAC | | | | GAAATAGCAAGTTAAAATAAGGCTAGTCCGTT | |
| ED0- | TCGACA | | | | | | ATCAACTTGAAAAAGTGGCACCGAGTCGGTGC | |
| _G_9FE_ | AG | | | | | | TCCCTTTCTCGTCGATGGTCAGCAC | |
| PB15 | | | | | | | | |
| pU6_A1AT_ | CTGTGC | 20599 | GTCGATGG | 21409 | TCCCTTTCTC | 22219 | CTGTGCTGACCATCGACAAGGTTTTAGAGCTA | 23029 |
| SpRY_ | TGACCA | | TCAGCA | | | | GAAATAGCAAGTTAAAATAAGGCTAGTCCGTT | |
| ED0- | TCGACA | | | | | | ATCAACTTGAAAAAGTGGCACCGAGTCGGTGC | |
| _G_9FE_ | AG | | | | | | TCCCTTTCTCGTCGATGGTCAGCA | |
| PB14 | | | | | | | | |
| pU6_A1AT_ | CTGTGC | 20600 | GTCGATGG | 21410 | TCCCTTTCTC | 22220 | CTGTGCTGACCATCGACAAGGTTTTAGAGCTA | 23030 |
| SpRY_ | TGACCA | | TCAGC | | | | GAAATAGCAAGTTAAAATAAGGCTAGTCCGTT | |
| ED0- | TCGACA | | | | | | ATCAACTTGAAAAAGTGGCACCGAGTCGGTGC | |
| _G_9FE_ | AG | | | | | | TCCCTTTCTCGTCGATGGTCAGC | |
| PB13 | | | | | | | | |
| pU6_A1AT_ | CTGTGC | 20601 | GTCGATGG | 21411 | TCCCTTTCTC | 22221 | CTGTGCTGACCATCGACAAGGTTTTAGAGCTA | 23031 |
| SpRY_ | TGACCA | | TCAG | | | | GAAATAGCAAGTTAAAATAAGGCTAGTCCGTT | |
| ED0- | TCGACA | | | | | | ATCAACTTGAAAAAGTGGCACCGAGTCGGTGC | |
| _G_9FE_ | AG | | | | | | TCCCTTTCTCGTCGATGGTCAG | |
| PB12 | | | | | | | | |
| pU6_A1AT_ | CTGTGC | 20602 | GTCGATGG | 21412 | TCCCTTTCTC | 22222 | CTGTGCTGACCATCGACAAGGTTTTAGAGCTA | 23032 |
| SpRY_ | TGACCA | | TCA | | | | GAAATAGCAAGTTAAAATAAGGCTAGTCCGTT | |
| ED0- | TCGACA | | | | | | ATCAACTTGAAAAAGTGGCACCGAGTCGGTGC | |
| _G_9FE_ | AG | | | | | | TCCCTTTCTCGTCGATGGTCA | |
| PB11 | | | | | | | | |
| pU6_A1AT_ | CTGTGC | 20603 | GTCGATGG | 21413 | TCCCTTTCTC | 22223 | CTGTGCTGACCATCGACAAGGTTTTAGAGCTA | 23033 |
| SpRY_ | TGACCA | | TC | | | | GAAATAGCAAGTTAAAATAAGGCTAGTCCGTT | |
| ED0- | TCGACA | | | | | | ATCAACTTGAAAAAGTGGCACCGAGTCGGTGC | |
| _G_9FE_ | AG | | | | | | TCCCTTTCTCGTCGATGGTC | |
| PB10 | | | | | | | | |
| pU6_A1AT_ | CTGTGC | 20604 | GTCGATGG | | TCCCTTTCTC | 22224 | CTGTGCTGACCATCGACAAGGTTTTAGAGCTA | 23034 |
| SpRY_ | TGACCA | | T | | | | GAAATAGCAAGTTAAAATAAGGCTAGTCCGTT | |
| ED0- | TCGACA | | | | | | ATCAACTTGAAAAAGTGGCACCGAGTCGGTGC | |
| _G_9FE_ | AG | | | | | | TCCCTTTCTCGTCGATGGT | |
| PB9 | | | | | | | | |
| pU6_A1AT_ | CTGTGC | 20605 | GTCGATGG | | TCCCTTTCTC | 22225 | CTGTGCTGACCATCGACAAGGTTTTAGAGCTA | 23035 |
| SpRY_ | TGACCA | | | | | | GAAATAGCAAGTTAAAATAAGGCTAGTCCGTT | |
| ED0- | TCGACA | | | | | | ATCAACTTGAAAAAGTGGCACCGAGTCGGTGC | |
| _G_9FE_ | AG | | | | | | TCCCTTTCTCGTCGATGG | |
| PB8 | | | | | | | | |
| pU6_A1AT_ | CTGTGC | 20606 | GTCGATGG | 21416 | CCTTTCTC | | CTGTGCTGACCATCGACAAGGTTTTAGAGCTA | 23036 |
| SpRY_ | TGACCA | | TCAGCACA | | | | GAAATAGCAAGTTAAAATAAGGCTAGTCCGTT | |
| ED0- | TCGACA | | G | | | | ATCAACTTGAAAAAGTGGCACCGAGTCGGTGC | |
| _G_7FE_ | AG | | | | | | CCTTTCTCGTCGATGGTCAGCACAG | |
| PB17 | | | | | | | | |
| pU6_A1AT_ | CTGTGC | 20607 | GTCGATGG | 21417 | CCTTTCTC | | CTGTGCTGACCATCGACAAGGTTTTAGAGCTA | 23037 |
| SpRY_ | TGACCA | | TCAGCACA | | | | GAAATAGCAAGTTAAAATAAGGCTAGTCCGTT | |
| ED0- | TCGACA | | | | | | ATCAACTTGAAAAAGTGGCACCGAGTCGGTGC | |
| _G_7FE_ | AG | | | | | | CCTTTCTCGTCGATGGTCAGCACA | |
| PB16 | | | | | | | | |
| pU6_A1AT_ | CTGTGC | 20608 | GTCGATGG | 21418 | CCTTTCTC | | CTGTGCTGACCATCGACAAGGTTTTAGAGCTA | 23038 |
| SpRY_ | TGACCA | | TCAGCAC | | | | GAAATAGCAAGTTAAAATAAGGCTAGTCCGTT | |
| ED0- | TCGACA | | | | | | ATCAACTTGAAAAAGTGGCACCGAGTCGGTGC | |
| _G_7FE_ | AG | | | | | | CCTTTCTCGTCGATGGTCAGCAC | |
| PB15 | | | | | | | | |
| pU6_A1AT_ | CTGTGC | 20609 | GTCGATGG | 21419 | CCTTTCTC | | CTGTGCTGACCATCGACAAGGTTTTAGAGCTA | 23039 |
| SpRY_ | TGACCA | | TCAGCA | | | | GAAATAGCAAGTTAAAATAAGGCTAGTCCGTT | |
| ED0- | TCGACA | | | | | | ATCAACTTGAAAAAGTGGCACCGAGTCGGTGC | |
| _G_7FE_ | AG | | | | | | CCTTTCTCGTCGATGGTCAGCA | |
| PB14 | | | | | | | | |
| pU6_A1AT_ | CTGTGC | 20610 | GTCGATGG | 21420 | CCTTTCTC | | CTGTGCTGACCATCGACAAGGTTTTAGAGCTA | 23040 |
| SpRY_ | TGACCA | | TCAGC | | | | GAAATAGCAAGTTAAAATAAGGCTAGTCCGTT | |
| ED0- | TCGACA | | | | | | ATCAACTTGAAAAAGTGGCACCGAGTCGGTGC | |
| _G_7FE_ | AG | | | | | | CCTTTCTCGTCGATGGTCAGC | |
| PB13 | | | | | | | | |
| pU6_A1AT_ | CTGTGC | 20611 | GTCGATGG | 21421 | CCTTTCTC | | CTGTGCTGACCATCGACAAGGTTTTAGAGCTA | 23041 |
| SpRY_ | TGACCA | | TCAG | | | | GAAATAGCAAGTTAAAATAAGGCTAGTCCGTT | |
| ED0- | TCGACA | | | | | | ATCAACTTGAAAAAGTGGCACCGAGTCGGTGC | |
| _G_7FE_ | AG | | | | | | CCTTTCTCGTCGATGGTCAG | |
| PB12 | | | | | | | | |
| pU6_A1AT_ | CTGTGC | 20612 | GTCGATGG | 21422 | CCTTTCTC | | CTGTGCTGACCATCGACAAGGTTTTAGAGCTA | 23042 |
| SpRY_ | TGACCA | | TCA | | | | GAAATAGCAAGTTAAAATAAGGCTAGTCCGTT | |
| ED0- | TCGACA | | | | | | ATCAACTTGAAAAAGTGGCACCGAGTCGGTGC | |
| _G_7FE_ | AG | | | | | | CCTTTCTCGTCGATGGTCA | |
| PB11 | | | | | | | | |
| pU6_A1AT_ | CTGTGC | 20613 | GTCGATGG | 21423 | CCTTTCTC | | CTGTGCTGACCATCGACAAGGTTTTAGAGCTA | 23043 |
| SpRY_ | TGACCA | | TC | | | | GAAATAGCAAGTTAAAATAAGGCTAGTCCGTT | |
| ED0- | TCGACA | | | | | | ATCAACTTGAAAAAGTGGCACCGAGTCGGTGC | |
| _G_7FE_ | AG | | | | | | CCTTTCTCGTCGATGGTC | |
| PB10 | | | | | | | | |
| pU6_A1AT_ | CTGTGC | 20614 | GTCGATGG | | CCTTTCTC | | CTGTGCTGACCATCGACAAGGTTTTAGAGCTA | 23044 |
| SpR | TGACCA | | T | | | | GAAATAGCAAGTTAAAATAAGGCTAGTCCGTT | |
| Y_ED0- | TCGACA | | | | | | ATCAACTTGAAAAAGTGGCACCGAGTCGGTGC | |
| _G_7FE_ | AG | | | | | | CCTTTCTCGTCGATGGT | |
| PB9 | | | | | | | | |
| pU6_A1AT_ | CTGTGC | 20615 | GTCGATGG | | CCTTTCTC | | CTGTGCTGACCATCGACAAGGTTTTAGAGCTA | 23045 |
| SpRY_ | TGACCA | | | | | | GAAATAGCAAGTTAAAATAAGGCTAGTCCGTT | |
| ED0- | TCGACA | | | | | | ATCAACTTGAAAAAGTGGCACCGAGTCGGTGC | |
| _G_7FE_ | AG | | | | | | CCTTTCTCGTCGATGG | |
| PB8 | | | | | | | | |
| pU6_A1AT_ | CTGTGC | 20616 | GTCGATGG | 21426 | TTTCTC | | CTGTGCTGACCATCGACAAGGTTTTAGAGCTA | 23046 |
| SpRY_ | TGACCA | | TCAGCACA | | | | GAAATAGCAAGTTAAAATAAGGCTAGTCCGTT | |
| ED0- | TCGACA | | G | | | | ATCAACTTGAAAAAGTGGCACCGAGTCGGTGC | |
| _G_5FE_ | AG | | | | | | TTTCTCGTCGATGGTCAGCACAG | |
| PB17 | | | | | | | | |
| pU6_A1AT_ | CTGTGC | 20617 | GTCGATGG | 21427 | TTTCTC | | CTGTGCTGACCATCGACAAGGTTTTAGAGCTA | 23047 |
| SpRY_ | TGACCA | | TCAGCACA | | | | GAAATAGCAAGTTAAAATAAGGCTAGTCCGTT | |
| ED0- | TCGACA | | | | | | ATCAACTTGAAAAAGTGGCACCGAGTCGGTGC | |
| _G_5FE_ | AG | | | | | | TTTCTCGTCGATGGTCAGCACA | |
| PB16 | | | | | | | | |
| pU6_A1AT_ | CTGTGC | 20618 | GTCGATGG | 21428 | TTTCTC | | CTGTGCTGACCATCGACAAGGTTTTAGAGCTA | 23048 |
| SpRY_ | TGACCA | | TCAGCAC | | | | GAAATAGCAAGTTAAAATAAGGCTAGTCCGTT | |
| ED0- | TCGACA | | | | | | ATCAACTTGAAAAAGTGGCACCGAGTCGGTGC | |
| _G_5FE_ | AG | | | | | | TTTCTCGTCGATGGTCAGCAC | |
| PB15 | | | | | | | | |
| pU6_A1AT_ | CTGTGC | 20619 | GTCGATGG | 21429 | TTTCTC | | CTGTGCTGACCATCGACAAGGTTTTAGAGCTA | 23049 |
| SpRY_ | TGACCA | | TCAGCA | | | | GAAATAGCAAGTTAAAATAAGGCTAGTCCGTT | |
| ED0- | TCGACA | | | | | | ATCAACTTGAAAAAGTGGCACCGAGTCGGTGC | |
| _G_5FE_ | AG | | | | | | TTTCTCGTCGATGGTCAGCA | |
| PB14 | | | | | | | | |
| pU6_A1AT_ | CTGTGC | 20620 | GTCGATGG | 21430 | TTTCTC | | CTGTGCTGACCATCGACAAGGTTTTAGAGCTA | 23050 |
| SpRY_ | TGACCA | | TCAGC | | | | GAAATAGCAAGTTAAAATAAGGCTAGTCCGTT | |
| ED0- | TCGACA | | | | | | ATCAACTTGAAAAAGTGGCACCGAGTCGGTGC | |
| _G_5FE_ | AG | | | | | | TTTCTCGTCGATGGTCAGC | |
| PB13 | | | | | | | | |
| pU6_A1AT_ | CTGTGC | 20621 | GTCGATGG | 21431 | TTTCTC | | CTGTGCTGACCATCGACAAGGTTTTAGAGCTA | 23051 |
| SpRY_ | TGACCA | | TCAG | | | | GAAATAGCAAGTTAAAATAAGGCTAGTCCGTT | |
| ED0- | TCGACA | | | | | | ATCAACTTGAAAAAGTGGCACCGAGTCGGTGC | |
| _G_5FE_ | AG | | | | | | TTTCTCGTCGATGGTCAG | |
| PB12 | | | | | | | | |
| pU6_A1AT_ | CTGTGC | 20622 | GTCGATGG | 21432 | TTTCTC | | CTGTGCTGACCATCGACAAGGTTTTAGAGCTA | 23052 |
| SpRY_ | TGACCA | | TCA | | | | GAAATAGCAAGTTAAAATAAGGCTAGTCCGTT | |
| ED0- | TCGACA | | | | | | ATCAACTTGAAAAAGTGGCACCGAGTCGGTGC | |
| _G_5FE_ | AG | | | | | | TTTCTCGTCGATGGTCA | |
| PB11 | | | | | | | | |
| pU6_A1AT_ | CTGTGC | 20623 | GTCGATGG | 21433 | TTTCTC | | CTGTGCTGACCATCGACAAGGTTTTAGAGCTA | 23053 |
| SpRY_ | TGACCA | | TC | | | | GAAATAGCAAGTTAAAATAAGGCTAGTCCGTT | |
| ED0- | TCGACA | | | | | | ATCAACTTGAAAAAGTGGCACCGAGTCGGTGC | |
| _G_5FE_ | AG | | | | | | TTTCTCGTCGATGGTC | |
| PB10 | | | | | | | | |
| pU6_A1AT_ | CTGTGC | 20624 | GTCGATGG | | TTTCTC | | CTGTGCTGACCATCGACAAGGTTTTAGAGCTA | 23054 |
| SpRY_ | TGACCA | | T | | | | GAAATAGCAAGTTAAAATAAGGCTAGTCCGTT | |
| ED0- | TCGACA | | | | | | ATCAACTTGAAAAAGTGGCACCGAGTCGGTGC | |
| _G_5FE_ | AG | | | | | | TTTCTCGTCGATGGT | |
| PB9 | | | | | | | | |
| pU6_A1AT_ | CTGTGC | 20625 | GTCGATGG | | TTTCTC | | CTGTGCTGACCATCGACAAGGTTTTAGAGCTA | 23055 |
| SpRY_ | TGACCA | | | | | | GAAATAGCAAGTTAAAATAAGGCTAGTCCGTT | |
| ED0- | TCGACA | | | | | | ATCAACTTGAAAAAGTGGCACCGAGTCGGTGC | |
| _G_5FE_ | AG | | | | | | TTTCTCGTCGATGG | |
| _PB8 | | | | | | | | |
| pU6_A1AT_ | CTGTGC | 20626 | GTCGATGG | 21436 | TCTC | | CTGTGCTGACCATCGACAAGGTTTTAGAGCTA | 23056 |
| SpRY_ | TGACCA | | TCAGCACA | | | | GAAATAGCAAGTTAAAATAAGGCTAGTCCGTT | |
| ED0- | TCGACA | | G | | | | ATCAACTTGAAAAAGTGGCACCGAGTCGGTGC | |
| _G_3FE_ | AG | | | | | | TCTCGTCGATGGTCAGCACAG | |
| PB17 | | | | | | | | |
| pU6_A1AT_ | CTGTGC | 20627 | GTCGATGG | 21437 | TCTC | | CTGTGCTGACCATCGACAAGGTTTTAGAGCTA | 23057 |
| SpRY_ | TGACCA | | TCAGCACA | | | | GAAATAGCAAGTTAAAATAAGGCTAGTCCGTT | |
| ED0- | TCGACA | | | | | | ATCAACTTGAAAAAGTGGCACCGAGTCGGTGC | |
| _G_3FE_ | AG | | | | | | TCTCGTCGATGGTCAGCACA | |
| PB16 | | | | | | | | |
| pU6_A1AT_ | CTGTGC | 20628 | GTCGATGG | 21438 | TCTC | | CTGTGCTGACCATCGACAAGGTTTTAGAGCTA | 23058 |
| SpRY_ | TGACCA | | TCAGCAC | | | | GAAATAGCAAGTTAAAATAAGGCTAGTCCGTT | |
| ED0- | TCGACA | | | | | | ATCAACTTGAAAAAGTGGCACCGAGTCGGTGC | |
| _G_3FE_ | AG | | | | | | TCTCGTCGATGGTCAGCAC | |
| PB15 | | | | | | | | |
| pU6_A1AT_ | CTGTGC | 20629 | GTCGATGG | 21439 | TCTC | | CTGTGCTGACCATCGACAAGGTTTTAGAGCTA | 23059 |
| SpRY_ | TGACCA | | TCAGCA | | | | GAAATAGCAAGTTAAAATAAGGCTAGTCCGTT | |
| ED0- | TCGACA | | | | | | ATCAACTTGAAAAAGTGGCACCGAGTCGGTGC | |
| _G_3FE_ | AG | | | | | | TCTCGTCGATGGTCAGCA | |
| _PB14 | | | | | | | | |
| pU6_A1AT_ | CTGTGC | 20630 | GTCGATGG | 21440 | TCTC | | CTGTGCTGACCATCGACAAGGTTTTAGAGCTA | 23060 |
| SpRY_ | TGACCA | | TCAGC | | | | GAAATAGCAAGTTAAAATAAGGCTAGTCCGTT | |
| ED0- | TCGACA | | | | | | ATCAACTTGAAAAAGTGGCACCGAGTCGGTGC | |
| _G_3FE_ | AG | | | | | | TCTCGTCGATGGTCAGC | |
| PB13 | | | | | | | | |
| pU6_A1AT_ | CTGTGC | 20631 | GTCGATGG | 21441 | TCTC | | CTGTGCTGACCATCGACAAGGTTTTAGAGCTA | 23061 |
| SpRY_ | TGACCA | | TCAG | | | | GAAATAGCAAGTTAAAATAAGGCTAGTCCGTT | |
| ED0- | TCGACA | | | | | | ATCAACTTGAAAAAGTGGCACCGAGTCGGTGC | |
| _G_3FE_ | AG | | | | | | TCTCGTCGATGGTCAG | |
| PB12 | | | | | | | | |
| pU6_A1AT_ | CTGTGC | 20632 | GTCGATGG | 21442 | TCTC | | CTGTGCTGACCATCGACAAGGTTTTAGAGCTA | 23062 |
| SpRY_ | TGACCA | | TCA | | | | GAAATAGCAAGTTAAAATAAGGCTAGTCCGTT | |
| ED0- | TCGACA | | | | | | ATCAACTTGAAAAAGTGGCACCGAGTCGGTGC | |
| _G_3FE_ | AG | | | | | | TCTCGTCGATGGTCA | |
| PB11 | | | | | | | | |
| pU6_A1AT_ | CTGTGC | 20633 | GTCGATGG | 21443 | TCTC | | CTGTGCTGACCATCGACAAGGTTTTAGAGCTA | 23063 |
| SpRY_ | TGACCA | | TC | | | | GAAATAGCAAGTTAAAATAAGGCTAGTCCGTT | |
| ED0- | TCGACA | | | | | | ATCAACTTGAAAAAGTGGCACCGAGTCGGTGC | |
| _G_3FE_ | AG | | | | | | TCTCGTCGATGGTC | |
| PB10 | | | | | | | | |
| pU6_A1AT_ | CTGTGC | 20634 | GTCGATGG | | TCTC | | CTGTGCTGACCATCGACAAGGTTTTAGAGCTA | 23064 |
| SpRY_ | TGACCA | | T | | | | GAAATAGCAAGTTAAAATAAGGCTAGTCCGTT | |
| ED0- | TCGACA | | | | | | ATCAACTTGAAAAAGTGGCACCGAGTCGGTGC | |
| _G_3FE_ | AG | | | | | | TCTCGTCGATGGT | |
| PB9 | | | | | | | | |
| pU6_A1AT_ | CTGTGC | 20635 | GTCGATGG | | TCTC | | CTGTGCTGACCATCGACAAGGTTTTAGAGCTA | 23065 |
| SpRY_ | TGACCA | | | | | | GAAATAGCAAGTTAAAATAAGGCTAGTCCGTT | |
| ED0- | TCGACA | | | | | | ATCAACTTGAAAAAGTGGCACCGAGTCGGTGC | |
| _G_3FE_ | AG | | | | | | TCTCGTCGATGG | |
| PB8 | | | | | | | | |
| pU6_A1AT_ | GGCTGT | 20636 | CGATGGTC | 21446 | ACATGGCCC | 22256 | GGCTGTGCTGACCATCGACAGTTTTAGAGCTA | 23066 |
| SpRY_ | GCTGAC | | AGCACAGC | | CAGCAGCTT | | GAAATAGCAAGTTAAAATAAGGCTAGTCCGTT | |
| ED2- | CATCGA | | C | | CAGTCCCTT | | ATCAACTTGAAAAAGTGGCACCGAGTCGGTGC | |
| _30FE_ | CA | | | | TCTCGT | | ACATGGCCCCAGCAGCTTCAGTCCCTTTCTCGT | |
| PB17 | | | | | | | CGATGGTCAGCACAGCC | |
| pU6_A1AT_ | GGCTGT | 20637 | CGATGGTC | 21447 | ACATGGCCC | 22257 | GGCTGTGCTGACCATCGACAGTTTTAGAGCTA | 23067 |
| SpRY_ | GCTGAC | | AGCACAGC | | CAGCAGCTT | | GAAATAGCAAGTTAAAATAAGGCTAGTCCGTT | |
| ED2- | CATCGA | | | | CAGTCCCTT | | ATCAACTTGAAAAAGTGGCACCGAGTCGGTGC | |
| _30FE_ | CA | | | | TCTCGT | | ACATGGCCCCAGCAGCTTCAGTCCCTTTCTCGT | |
| PB16 | | | | | | | CGATGGTCAGCACAGC | |
| pU6_A1AT_ | GGCTGT | 20638 | CGATGGTC | 21448 | ACATGGCCC | 22258 | GGCTGTGCTGACCATCGACAGTTTTAGAGCTA | 23068 |
| SpRY_ | GCTGAC | | AGCACAG | | CAGCAGCTT | | GAAATAGCAAGTTAAAATAAGGCTAGTCCGTT | |
| ED2- | CATCGA | | | | CAGTCCCTT | | ATCAACTTGAAAAAGTGGCACCGAGTCGGTGC | |
| _30FE_ | CA | | | | TCTCGT | | ACATGGCCCCAGCAGCTTCAGTCCCTTTCTCGT | |
| PB15 | | | | | | | CGATGGTCAGCACAG | |
| pU6_A1AT_ | GGCTGT | 20639 | CGATGGTC | 21449 | ACATGGCCC | 22259 | GGCTGTGCTGACCATCGACAGTTTTAGAGCTA | 23069 |
| SpRY_ | GCTGAC | | AGCACA | | CAGCAGCTT | | GAAATAGCAAGTTAAAATAAGGCTAGTCCGTT | |
| ED2- | CATCGA | | | | CAGTCCCTT | | ATCAACTTGAAAAAGTGGCACCGAGTCGGTGC | |
| _30FE_ | CA | | | | TCTCGT | | ACATGGCCCCAGCAGCTTCAGTCCCTTTCTCGT | |
| PB14 | | | | | | | CGATGGTCAGCACA | |
| pU6_A1AT_ | GGCTGT | 20640 | CGATGGTC | 21450 | ACATGGCCC | 22260 | GGCTGTGCTGACCATCGACAGTTTTAGAGCTA | 23070 |
| SpRY_ | GCTGAC | | AGCAC | | CAGCAGCTT | | GAAATAGCAAGTTAAAATAAGGCTAGTCCGTT | |
| ED2- | CATCGA | | | | CAGTCCCTT | | ATCAACTTGAAAAAGTGGCACCGAGTCGGTGC | |
| _30FE_ | CA | | | | TCTCGT | | ACATGGCCCCAGCAGCTTCAGTCCCTTTCTCGT | |
| PB13 | | | | | | | CGATGGTCAGCAC | |
| pU6_A1AT_ | GGCTGT | 20641 | CGATGGTC | 21451 | ACATGGCCC | 22261 | GGCTGTGCTGACCATCGACAGTTTTAGAGCTA | 23071 |
| SpRY_ | GCTGAC | | AGCA | | CAGCAGCTT | | GAAATAGCAAGTTAAAATAAGGCTAGTCCGTT | |
| ED2- | CATCGA | | | | CAGTCCCTT | | ATCAACTTGAAAAAGTGGCACCGAGTCGGTGC | |
| _30FE_ | CA | | | | TCTCGT | | ACATGGCCCCAGCAGCTTCAGTCCCTTTCTCGT | |
| PB12 | | | | | | | CGATGGTCAGCA | |
| pU6_A1AT_ | GGCTGT | 20642 | CGATGGTC | 21452 | ACATGGCCC | 22262 | GGCTGTGCTGACCATCGACAGTTTTAGAGCTA | 23072 |
| SpRY_ | GCTGAC | | AGC | | CAGCAGCTT | | GAAATAGCAAGTTAAAATAAGGCTAGTCCGTT | |
| ED2- | CATCGA | | | | CAGTCCCTT | | ATCAACTTGAAAAAGTGGCACCGAGTCGGTGC | |
| _30FE_ | CA | | | | TCTCGT | | ACATGGCCCCAGCAGCTTCAGTCCCTTTCTCGT | |
| PB11 | | | | | | | CGATGGTCAGC | |
| pU6_A1AT_ | GGCTGT | 20643 | CGATGGTC | 21453 | ACATGGCCC | 22263 | GGCTGTGCTGACCATCGACAGTTTTAGAGCTA | 23073 |
| SpRY_ | GCTGAC | | AG | | CAGCAGCTT | | GAAATAGCAAGTTAAAATAAGGCTAGTCCGTT | |
| ED2- | CATCGA | | | | CAGTCCCTT | | ATCAACTTGAAAAAGTGGCACCGAGTCGGTGC | |
| _30FE_ | CA | | | | TCTCGT | | ACATGGCCCCAGCAGCTTCAGTCCCTTTCTCGT | |
| BP10 | | | | | | | CGATGGTCAG | |
| pU6_A1AT_ | GGCTGT | 20644 | CGATGGTC | | ACATGGCCC | 22264 | GGCTGTGCTGACCATCGACAGTTTTAGAGCTA | 23074 |
| SpRY_ | GCTGAC | | A | | CAGCAGCTT | | GAAATAGCAAGTTAAAATAAGGCTAGTCCGTT | |
| ED2- | CATCGA | | | | CAGTCCCTT | | ATCAACTTGAAAAAGTGGCACCGAGTCGGTGC | |
| _30FE_ | CA | | | | TCTCGT | | ACATGGCCCCAGCAGCTTCAGTCCCTTTCTCGT | |
| PB9 | | | | | | | CGATGGTCA | |
| pU6_A1AT_ | GGCTGT | 20645 | CGATGGTC | | ACATGGCCC | 22265 | GGCTGTGCTGACCATCGACAGTTTTAGAGCTA | 23075 |
| SpRY_ | GCTGAC | | | | CAGCAGCTT | | GAAATAGCAAGTTAAAATAAGGCTAGTCCGTT | |
| ED2- | CATCGA | | | | CAGTCCCTT | | ATCAACTTGAAAAAGTGGCACCGAGTCGGTGC | |
| _30FE_ | CA | | | | TCTCGT | | ACATGGCCCCAGCAGCTTCAGTCCCTTTCTCGT | |
| PB8 | | | | | | | CGATGGTC | |
| pU6_A1AT_ | GGCTGT | 20646 | CGATGGTC | 21456 | GCCCCAGCA | 22266 | GGCTGTGCTGACCATCGACAGTTTTAGAGCTA | 23076 |
| SpRY_ | GCTGAC | | AGCACAGC | | GCTTCAGTC | | GAAATAGCAAGTTAAAATAAGGCTAGTCCGTT | |
| ED2- | CATCGA | | C | | CCTTTCTCG | | ATCAACTTGAAAAAGTGGCACCGAGTCGGTGC | |
| _25FE_ | CA | | | | T | | GCCCCAGCAGCTTCAGTCCCTTTCTCGTCGATG | |
| BP17 | | | | | | | GTCAGCACAGCC | |
| pU6_A1AT_ | GGCTGT | 20647 | CGATGGTC | 21457 | GCCCCAGCA | 22267 | GGCTGTGCTGACCATCGACAGTTTTAGAGCTA | 23077 |
| SpRY_ | GCTGAC | | AGCACAGC | | GCTTCAGTC | | GAAATAGCAAGTTAAAATAAGGCTAGTCCGTT | |
| ED2- | CATCGA | | | | CCTTTCTCG | | ATCAACTTGAAAAAGTGGCACCGAGTCGGTGC | |
| _25FE_ | CA | | | | T | | GCCCCAGCAGCTTCAGTCCCTTTCTCGTCGATG | |
| PB16 | | | | | | | GTCAGCACAGC | |
| pU6_A1AT_ | GGCTGT | 20648 | CGATGGTC | 21458 | GCCCCAGCA | 22268 | GGCTGTGCTGACCATCGACAGTTTTAGAGCTA | 23078 |
| SpRY_ | GCTGAC | | AGCACAG | | GCTTCAGTC | | GAAATAGCAAGTTAAAATAAGGCTAGTCCGTT | |
| ED2- | CATCGA | | | | CCTTTCTCG | | ATCAACTTGAAAAAGTGGCACCGAGTCGGTGC | |
| _25FE_ | CA | | | | T | | GCCCCAGCAGCTTCAGTCCCTTTCTCGTCGATG | |
| PB15 | | | | | | | GTCAGCACAG | |
| pU6_A1AT_ | GGCTGT | 20649 | CGATGGTC | 21459 | GCCCCAGCA | 22269 | GGCTGTGCTGACCATCGACAGTTTTAGAGCTA | 23079 |
| SpRY_ | GCTGAC | | AGCACA | | GCTTCAGTC | | GAAATAGCAAGTTAAAATAAGGCTAGTCCGTT | |
| ED2- | CATCGA | | | | CCTTTCTCG | | ATCAACTTGAAAAAGTGGCACCGAGTCGGTGC | |
| _25FE_ | CA | | | | T | | GCCCCAGCAGCTTCAGTCCCTTTCTCGTCGATG | |
| PB14 | | | | | | | GTCAGCACA | |
| pU6_A1AT_ | GGCTGT | 20650 | CGATGGTC | 21460 | GCCCCAGCA | 22270 | GGCTGTGCTGACCATCGACAGTTTTAGAGCTA | 23080 |
| SpRY_ | GCTGAC | | AGCAC | | GCTTCAGTC | | GAAATAGCAAGTTAAAATAAGGCTAGTCCGTT | |
| ED2- | CATCGA | | | | CCTTTCTCG | | ATCAACTTGAAAAAGTGGCACCGAGTCGGTGC | |
| _25FE_ | CA | | | | T | | GCCCCAGCAGCTTCAGTCCCTTTCTCGTCGATG | |
| PB13 | | | | | | | GTCAGCAC | |
| pU6_A1AT_ | GGCTGT | 20651 | CGATGGTC | 21461 | GCCCCAGCA | 22271 | GGCTGTGCTGACCATCGACAGTTTTAGAGCTA | 23081 |
| SpRY_ | GCTGAC | | AGCA | | GCTTCAGTC | | GAAATAGCAAGTTAAAATAAGGCTAGTCCGTT | |
| ED2- | CATCGA | | | | CCTTTCTCG | | ATCAACTTGAAAAAGTGGCACCGAGTCGGTGC | |
| _25FE_ | CA | | | | T | | GCCCCAGCAGCTTCAGTCCCTTTCTCGTCGATG | |
| PB12 | | | | | | | GTCAGCA | |
| pU6_A1AT_ | GGCTGT | 20652 | CGATGGTC | 21462 | GCCCCAGCA | 22272 | GGCTGTGCTGACCATCGACAGTTTTAGAGCTA | 23082 |
| SpRY_ | GCTGAC | | AGC | | GCTTCAGTC | | GAAATAGCAAGTTAAAATAAGGCTAGTCCGTT | |
| ED2- | CATCGA | | | | CCTTTCTCG | | ATCAACTTGAAAAAGTGGCACCGAGTCGGTGC | |
| _25FE_ | CA | | | | T | | GCCCCAGCAGCTTCAGTCCCTTTCTCGTCGATG | |
| PB11 | | | | | | | GTCAGC | |
| pU6_A1AT_ | GGCTGT | 20653 | CGATGGTC | 21463 | GCCCCAGCA | 22273 | GGCTGTGCTGACCATCGACAGTTTTAGAGCTA | 23083 |
| SpRY_ | GCTGAC | | AG | | GCTTCAGTC | | GAAATAGCAAGTTAAAATAAGGCTAGTCCGTT | |
| ED2- | CATCGA | | | | CCTTTCTCG | | ATCAACTTGAAAAAGTGGCACCGAGTCGGTGC | |
| _25FE_ | CA | | | | T | | GCCCCAGCAGCTTCAGTCCCTTTCTCGTCGATG | |
| PB10 | | | | | | | GTCAG | |
| pU6_A1AT_ | GGCTGT | 20654 | CGATGGTC | | GCCCCAGCA | 22274 | GGCTGTGCTGACCATCGACAGTTTTAGAGCTA | 23084 |
| SpRY_ | GCTGAC | | A | | GCTTCAGTC | | GAAATAGCAAGTTAAAATAAGGCTAGTCCGTT | |
| ED2- | CATCGA | | | | CCTTTCTCG | | ATCAACTTGAAAAAGTGGCACCGAGTCGGTGC | |
| _25FE_ | CA | | | | T | | GCCCCAGCAGCTTCAGTCCCTTTCTCGTCGATG | |
| PB9 | | | | | | | GTCA | |
| pU6_A1AT_ | GGCTGT | 20655 | CGATGGTC | | GCCCCAGCA | 22275 | GGCTGTGCTGACCATCGACAGTTTTAGAGCTA | 23085 |
| SpRY_ | GCTGAC | | | | GCTTCAGTC | | GAAATAGCAAGTTAAAATAAGGCTAGTCCGTT | |
| ED2- | CATCGA | | | | CCTTTCTCG | | ATCAACTTGAAAAAGTGGCACCGAGTCGGTGC | |
| _25FE_ | CA | | | | T | | GCCCCAGCAGCTTCAGTCCCTTTCTCGTCGATG | |
| PB8 | | | | | | | GTC | |
| pU6_A1AT_ | GGCTGT | 20656 | CGATGGTC | 21466 | AGCAGCTTC | 22276 | GGCTGTGCTGACCATCGACAGTTTTAGAGCTA | 23086 |
| SpRY_ | GCTGAC | | AGCACAGC | | AGTCCCTTT | | GAAATAGCAAGTTAAAATAAGGCTAGTCCGTT | |
| ED2- | CATCGA | | C | | CTCGT | | ATCAACTTGAAAAAGTGGCACCGAGTCGGTGC | |
| _20FE_ | CA | | | | | | AGCAGCTTCAGTCCCTTTCTCGTCGATGGTCAG | |
| PB17 | | | | | | | CACAGCC | |
| pU6_A1AT_ | GGCTGT | 20657 | CGATGGTC | 21467 | AGCAGCTTC | 22277 | GGCTGTGCTGACCATCGACAGTTTTAGAGCTA | 23087 |
| SpRY_ | GCTGAC | | AGCACAGC | | AGTCCCTTT | | GAAATAGCAAGTTAAAATAAGGCTAGTCCGTT | |
| ED2- | CATCGA | | | | CTCGT | | ATCAACTTGAAAAAGTGGCACCGAGTCGGTGC | |
| _20FE_ | CA | | | | | | AGCAGCTTCAGTCCCTTTCTCGTCGATGGTCAG | |
| PB16 | | | | | | | CACAGC | |
| pU6_A1AT_ | GGCTGT | 20658 | CGATGGTC | 21468 | AGCAGCTTC | 22278 | GGCTGTGCTGACCATCGACAGTTTTAGAGCTA | 23088 |
| SpRY_ | GCTGAC | | AGCACAG | | AGTCCCTTT | | GAAATAGCAAGTTAAAATAAGGCTAGTCCGTT | |
| ED2- | CATCGA | | | | CTCGT | | ATCAACTTGAAAAAGTGGCACCGAGTCGGTGC | |
| _20FE_ | CA | | | | | | AGCAGCTTCAGTCCCTTTCTCGTCGATGGTCAG | |
| PB15 | | | | | | | CACAG | |
| pU6_A1AT_ | GGCTGT | 20659 | CGATGGTC | 21469 | AGCAGCTTC | 22279 | GGCTGTGCTGACCATCGACAGTTTTAGAGCTA | 23089 |
| SpRY_ | GCTGAC | | AGCACA | | AGTCCCTTT | | GAAATAGCAAGTTAAAATAAGGCTAGTCCGTT | |
| ED2- | CATCGA | | | | CTCGT | | ATCAACTTGAAAAAGTGGCACCGAGTCGGTGC | |
| _20FE_ | CA | | | | | | AGCAGCTTCAGTCCCTTTCTCGTCGATGGTCAG | |
| PB14 | | | | | | | CACA | |
| pU6_A1 | GGCTGT | 20660 | CGATGGTC | 21470 | AGCAGCTTC | 22280 | GGCTGTGCTGACCATCGACAGTTTTAGAGCTA | 23090 |
| AT_SpR | GCTGAC | | AGCAC | | AGTCCCTTT | | GAAATAGCAAGTTAAAATAAGGCTAGTCCGTT | |
| Y_ED2- | CATCGA | | | | CTCGT | | ATCAACTTGAAAAAGTGGCACCGAGTCGGTGC | |
| 20FE_P | CA | | | | | | AGCAGCTTCAGTCCCTTTCTCGTCGATGGTCAG | |
| B13 | | | | | | | CAC | |
| pU6_A1AT_ | GGCTGT | 20661 | CGATGGTC | 21471 | AGCAGCTTC | 22281 | GGCTGTGCTGACCATCGACAGTTTTAGAGCTA | 23091 |
| SpRY_ | GCTGAC | | AGCA | | AGTCCCTTT | | GAAATAGCAAGTTAAAATAAGGCTAGTCCGTT | |
| ED2- | CATCGA | | | | CTCGT | | ATCAACTTGAAAAAGTGGCACCGAGTCGGTGC | |
| _20FE_ | CA | | | | | | AGCAGCTTCAGTCCCTTTCTCGTCGATGGTCAG | |
| PB12 | | | | | | | CA | |
| pU6_A1AT_ | GGCTGT | 20662 | CGATGGTC | 21472 | AGCAGCTTC | 22282 | GGCTGTGCTGACCATCGACAGTTTTAGAGCTA | 23092 |
| SpRY_ | GCTGAC | | AGC | | AGTCCCTTT | | GAAATAGCAAGTTAAAATAAGGCTAGTCCGTT | |
| ED2- | CATCGA | | | | CTCGT | | ATCAACTTGAAAAAGTGGCACCGAGTCGGTGC | |
| _20FE_ | CA | | | | | | AGCAGCTTCAGTCCCTTTCTCGTCGATGGTCAG | |
| PB11 | | | | | | | C | |
| pU6_A1AT_ | GGCTGT | 20663 | CGATGGTC | 21473 | AGCAGCTTC | 22283 | GGCTGTGCTGACCATCGACAGTTTTAGAGCTA | 23093 |
| SpRY_ | GCTGAC | | AG | | AGTCCCTTT | | GAAATAGCAAGTTAAAATAAGGCTAGTCCGTT | |
| ED2- | CATCGA | | | | CTCGT | | ATCAACTTGAAAAAGTGGCACCGAGTCGGTGC | |
| _20FE_ | CA | | | | | | AGCAGCTTCAGTCCCTTTCTCGTCGATGGTCAG | |
| PB10 | | | | | | | | |
| pU6_A1AT_ | GGCTGT | 20664 | CGATGGTC | | AGCAGCTTC | 22284 | GGCTGTGCTGACCATCGACAGTTTTAGAGCTA | 23094 |
| SpRY_ | GCTGAC | | A | | AGTCCCTTT | | GAAATAGCAAGTTAAAATAAGGCTAGTCCGTT | |
| ED2- | CATCGA | | | | CTCGT | | ATCAACTTGAAAAAGTGGCACCGAGTCGGTGC | |
| _20FE_ | CA | | | | | | AGCAGCTTCAGTCCCTTTCTCGTCGATGGTCA | |
| PB9 | | | | | | | | |
| pU6_A1AT_ | GGCTGT | 20665 | CGATGGTC | | AGCAGCTTC | 22285 | GGCTGTGCTGACCATCGACAGTTTTAGAGCTA | 23095 |
| SpRY_ | GCTGAC | | | | AGTCCCTTT | | GAAATAGCAAGTTAAAATAAGGCTAGTCCGTT | |
| ED2- | CATCGA | | | | CTCGT | | ATCAACTTGAAAAAGTGGCACCGAGTCGGTGC | |
| _20FE_ | CA | | | | | | AGCAGCTTCAGTCCCTTTCTCGTCGATGGTC | |
| PB8 | | | | | | | | |
| pU6_A1AT_ | GGCTGT | 20666 | CGATGGTC | 21476 | TTCAGTCCC | 22286 | GGCTGTGCTGACCATCGACAGTTTTAGAGCTA | 23096 |
| SpRY_ | GCTGAC | | AGCACAGC | | TTTCTCGT | | GAAATAGCAAGTTAAAATAAGGCTAGTCCGTT | |
| ED2- | CATCGA | | C | | | | ATCAACTTGAAAAAGTGGCACCGAGTCGGTGC | |
| _14FE_ | CA | | | | | | TTCAGTCCCTTTCTCGTCGATGGTCAGCACAGC | |
| PB17 | | | | | | | C | |
| pU6_A1AT_ | GGCTGT | 20667 | CGATGGTC | 21477 | TTCAGTCCC | 22287 | GGCTGTGCTGACCATCGACAGTTTTAGAGCTA | 23097 |
| SpRY_ | GCTGAC | | AGCACAGC | | TTTCTCGT | | GAAATAGCAAGTTAAAATAAGGCTAGTCCGTT | |
| ED2- | CATCGA | | | | | | ATCAACTTGAAAAAGTGGCACCGAGTCGGTGC | |
| _14FE_ | CA | | | | | | TTCAGTCCCTTTCTCGTCGATGGTCAGCACAGC | |
| PB16 | | | | | | | | |
| pU6_A1AT_ | GGCTGT | 20668 | CGATGGTC | 21478 | TTCAGTCCC | 22288 | GGCTGTGCTGACCATCGACAGTTTTAGAGCTA | 23098 |
| SpRY_ | GCTGAC | | AGCACAG | | TTTCTCGT | | GAAATAGCAAGTTAAAATAAGGCTAGTCCGTT | |
| ED2- | CATCGA | | | | | | ATCAACTTGAAAAAGTGGCACCGAGTCGGTGC | |
| _14FE_ | CA | | | | | | TTCAGTCCCTTTCTCGTCGATGGTCAGCACAG | |
| PB15 | | | | | | | | |
| pU6_A1AT_ | GGCTGT | 20669 | CGATGGTC | 21479 | TTCAGTCCC | 22289 | GGCTGTGCTGACCATCGACAGTTTTAGAGCTA | 23099 |
| SpRY_ | GCTGAC | | AGCACA | | TTTCTCGT | | GAAATAGCAAGTTAAAATAAGGCTAGTCCGTT | |
| ED2- | CATCGA | | | | | | ATCAACTTGAAAAAGTGGCACCGAGTCGGTGC | |
| _14FE_ | CA | | | | | | TTCAGTCCCTTTCTCGTCGATGGTCAGCACA | |
| PB14 | | | | | | | | |
| pU6_A1AT_ | GGCTGT | 20670 | CGATGGTC | 21480 | TTCAGTCCC | 22290 | GGCTGTGCTGACCATCGACAGTTTTAGAGCTA | 23100 |
| SpRY_ | GCTGAC | | AGCAC | | TTTCTCGT | | GAAATAGCAAGTTAAAATAAGGCTAGTCCGTT | |
| ED2- | CATCGA | | | | | | ATCAACTTGAAAAAGTGGCACCGAGTCGGTGC | |
| _14FE_ | CA | | | | | | TTCAGTCCCTTTCTCGTCGATGGTCAGCAC | |
| PB13 | | | | | | | | |
| pU6_A1AT_ | GGCTGT | 20671 | CGATGGTC | 21481 | TTCAGTCCC | 22291 | GGCTGTGCTGACCATCGACAGTTTTAGAGCTA | 23101 |
| SpRY_ | GCTGAC | | AGCA | | TTTCTCGT | | GAAATAGCAAGTTAAAATAAGGCTAGTCCGTT | |
| ED2- | CATCGA | | | | | | ATCAACTTGAAAAAGTGGCACCGAGTCGGTGC | |
| _14FE_ | CA | | | | | | TTCAGTCCCTTTCTCGTCGATGGTCAGCA | |
| PB12 | | | | | | | | |
| pU6_A1AT_ | GGCTGT | 20672 | CGATGGTC | 21482 | TTCAGTCCC | 22292 | GGCTGTGCTGACCATCGACAGTTTTAGAGCTA | 23102 |
| SpRY_ | GCTGAC | | AGC | | TTTCTCGT | | GAAATAGCAAGTTAAAATAAGGCTAGTCCGTT | |
| ED2- | CATCGA | | | | | | ATCAACTTGAAAAAGTGGCACCGAGTCGGTGC | |
| _14FE_ | CA | | | | | | TTCAGTCCCTTTCTCGTCGATGGTCAGC | |
| PB11 | | | | | | | | |
| pU6_A1AT_ | GGCTGT | 20673 | CGATGGTC | 21483 | TTCAGTCCC | 22293 | GGCTGTGCTGACCATCGACAGTTTTAGAGCTA | 23103 |
| SpRY_ | GCTGAC | | AG | | TTTCTCGT | | GAAATAGCAAGTTAAAATAAGGCTAGTCCGTT | |
| ED2- | CATCGA | | | | | | ATCAACTTGAAAAAGTGGCACCGAGTCGGTGC | |
| _14FE_ | CA | | | | | | TTCAGTCCCTTTCTCGTCGATGGTCAG | |
| PB10 | | | | | | | | |
| pU6_A1AT_ | GGCTGT | 20674 | CGATGGTC | | TTCAGTCCC | 22294 | GGCTGTGCTGACCATCGACAGTTTTAGAGCTA | 23104 |
| SpRY_ | GCTGAC | | A | | TTTCTCGT | | GAAATAGCAAGTTAAAATAAGGCTAGTCCGTT | |
| ED2- | CATCGA | | | | | | ATCAACTTGAAAAAGTGGCACCGAGTCGGTGC | |
| _14FE_ | CA | | | | | | TTCAGTCCCTTTCTCGTCGATGGTCA | |
| PB9 | | | | | | | | |
| pU6_A1AT_ | GGCTGT | 20675 | CGATGGTC | | TTCAGTCCC | 22295 | GGCTGTGCTGACCATCGACAGTTTTAGAGCTA | 23105 |
| SpRY_ | GCTGAC | | | | TTTCTCGT | | GAAATAGCAAGTTAAAATAAGGCTAGTCCGTT | |
| ED2- | CATCGA | | | | | | ATCAACTTGAAAAAGTGGCACCGAGTCGGTGC | |
| _14FE_ | CA | | | | | | TTCAGTCCCTTTCTCGTCGATGGTC | |
| PB8 | | | | | | | | |
| pU6_A1AT_ | GGCTGT | 20676 | CGATGGTC | 21486 | AGTCCCTTT | 22296 | GGCTGTGCTGACCATCGACAGTTTTAGAGCTA | 23106 |
| SpRY_ | GCTGAC | | AGCACAGC | | CTCGT | | GAAATAGCAAGTTAAAATAAGGCTAGTCCGTT | |
| ED2- | CATCGA | | C | | | | ATCAACTTGAAAAAGTGGCACCGAGTCGGTGC | |
| _11FE_ | CA | | | | | | AGTCCCTTTCTCGTCGATGGTCAGCACAGCC | |
| PB17 | | | | | | | | |
| pU6_A1AT_ | GGCTGT | 20677 | CGATGGTC | 21487 | AGTCCCTTT | 22297 | GGCTGTGCTGACCATCGACAGTTTTAGAGCTA | 23107 |
| SpRY_ | GCTGAC | | AGCACAGC | | CTCGT | | GAAATAGCAAGTTAAAATAAGGCTAGTCCGTT | |
| ED2- | CATCGA | | | | | | ATCAACTTGAAAAAGTGGCACCGAGTCGGTGC | |
| _11FE_ | CA | | | | | | AGTCCCTTTCTCGTCGATGGTCAGCACAGC | |
| PB16 | | | | | | | | |
| pU6_A1AT_ | GGCTGT | 20678 | CGATGGTC | 21488 | AGTCCCTTT | 22298 | GGCTGTGCTGACCATCGACAGTTTTAGAGCTA | 23108 |
| SpRY_ | GCTGAC | | AGCACAG | | CTCGT | | GAAATAGCAAGTTAAAATAAGGCTAGTCCGTT | |
| ED2- | CATCGA | | | | | | ATCAACTTGAAAAAGTGGCACCGAGTCGGTGC | |
| _11FE_ | CA | | | | | | AGTCCCTTTCTCGTCGATGGTCAGCACAG | |
| PB15 | | | | | | | | |
| pU6_A1AT_ | GGCTGT | 20679 | CGATGGTC | 21489 | AGTCCCTTT | 22299 | GGCTGTGCTGACCATCGACAGTTTTAGAGCTA | 23109 |
| SpRY_ | GCTGAC | | AGCACA | | CTCGT | | GAAATAGCAAGTTAAAATAAGGCTAGTCCGTT | |
| ED2- | CATCGA | | | | | | ATCAACTTGAAAAAGTGGCACCGAGTCGGTGC | |
| _11FE_ | CA | | | | | | AGTCCCTTTCTCGTCGATGGTCAGCACA | |
| PB14 | | | | | | | | |
| pU6_A1AT_ | GGCTGT | 20680 | CGATGGTC | 21490 | AGTCCCTTT | 22300 | GGCTGTGCTGACCATCGACAGTTTTAGAGCTA | 23110 |
| SpRY_ | GCTGAC | | AGCAC | | CTCGT | | GAAATAGCAAGTTAAAATAAGGCTAGTCCGTT | |
| ED2- | CATCGA | | | | | | ATCAACTTGAAAAAGTGGCACCGAGTCGGTGC | |
| _11FE_ | CA | | | | | | AGTCCCTTTCTCGTCGATGGTCAGCAC | |
| PB13 | | | | | | | | |
| pU6_A1AT_ | GGCTGT | 20681 | CGATGGTC | 21491 | AGTCCCTTT | 22301 | GGCTGTGCTGACCATCGACAGTTTTAGAGCTA | 23111 |
| SpRY_ | GCTGAC | | AGCA | | CTCGT | | GAAATAGCAAGTTAAAATAAGGCTAGTCCGTT | |
| ED2- | CATCGA | | | | | | ATCAACTTGAAAAAGTGGCACCGAGTCGGTGC | |
| _11FE_ | CA | | | | | | AGTCCCTTTCTCGTCGATGGTCAGCA | |
| PB12 | | | | | | | | |
| pU6_A1AT_ | GGCTGT | 20682 | CGATGGTC | 21492 | AGTCCCTTT | 22302 | GGCTGTGCTGACCATCGACAGTTTTAGAGCTA | 23112 |
| SpRY_ | GCTGAC | | AGC | | CTCGT | | GAAATAGCAAGTTAAAATAAGGCTAGTCCGTT | |
| ED2- | CATCGA | | | | | | ATCAACTTGAAAAAGTGGCACCGAGTCGGTGC | |
| _11FE_ | CA | | | | | | AGTCCCTTTCTCGTCGATGGTCAGC | |
| PB11 | | | | | | | | |
| pU6_A1AT_ | GGCTGT | 20683 | CGATGGTC | 21493 | AGTCCCTTT | 22303 | GGCTGTGCTGACCATCGACAGTTTTAGAGCTA | 23113 |
| SpRY_ | GCTGAC | | AG | | CTCGT | | GAAATAGCAAGTTAAAATAAGGCTAGTCCGTT | |
| ED2- | CATCGA | | | | | | ATCAACTTGAAAAAGTGGCACCGAGTCGGTGC | |
| _11FE_ | CA | | | | | | AGTCCCTTTCTCGTCGATGGTCAG | |
| PB10 | | | | | | | | |
| pU6_A1AT_ | GGCTGT | 20684 | CGATGGTC | | AGTCCCTTT | 22304 | GGCTGTGCTGACCATCGACAGTTTTAGAGCTA | 23114 |
| SpRY_ | GCTGAC | | A | | CTCGT | | GAAATAGCAAGTTAAAATAAGGCTAGTCCGTT | |
| ED2- | CATCGA | | | | | | ATCAACTTGAAAAAGTGGCACCGAGTCGGTGC | |
| _11FE_ | CA | | | | | | AGTCCCTTTCTCGTCGATGGTCA | |
| PB9 | | | | | | | | |
| pU6_A1AT_ | GGCTGT | 20685 | CGATGGTC | | AGTCCCTTT | 22305 | GGCTGTGCTGACCATCGACAGTTTTAGAGCTA | 23115 |
| SpRY_ | GCTGAC | | | | CTCGT | | GAAATAGCAAGTTAAAATAAGGCTAGTCCGTT | |
| ED2- | CATCGA | | | | | | ATCAACTTGAAAAAGTGGCACCGAGTCGGTGC | |
| _11FE_ | CA | | | | | | AGTCCCTTTCTCGTCGATGGTC | |
| PB8 | | | | | | | | |
| pU6_A1AT_ | GGCTGT | 20686 | CGATGGTC | 21496 | TCCCTTTCTC | 22306 | GGCTGTGCTGACCATCGACAGTTTTAGAGCTA | 23116 |
| SpRY_ | GCTGAC | | AGCACAGC | | GT | | GAAATAGCAAGTTAAAATAAGGCTAGTCCGTT | |
| ED2- | CATCGA | | C | | | | ATCAACTTGAAAAAGTGGCACCGAGTCGGTGC | |
| _9FE_ | CA | | | | | | TCCCTTTCTCGTCGATGGTCAGCACAGCC | |
| PB17 | | | | | | | | |
| pU6_A1AT_ | GGCTGT | 20687 | CGATGGTC | 21497 | TCCCTTTCTC | 22307 | GGCTGTGCTGACCATCGACAGTTTTAGAGCTA | 23117 |
| SpRY_ | GCTGAC | | AGCACAGC | | GT | | GAAATAGCAAGTTAAAATAAGGCTAGTCCGTT | |
| ED2- | CATCGA | | | | | | ATCAACTTGAAAAAGTGGCACCGAGTCGGTGC | |
| _9FE_ | CA | | | | | | TCCCTTTCTCGTCGATGGTCAGCACAGC | |
| PB16 | | | | | | | | |
| pU6_A1AT_ | GGCTGT | 20688 | CGATGGTC | 21498 | TCCCTTTCTC | 22308 | GGCTGTGCTGACCATCGACAGTTTTAGAGCTA | 23118 |
| SpRY_ | GCTGAC | | AGCACAG | | GT | | GAAATAGCAAGTTAAAATAAGGCTAGTCCGTT | |
| ED2- | CATCGA | | | | | | ATCAACTTGAAAAAGTGGCACCGAGTCGGTGC | |
| _9FE_ | CA | | | | | | TCCCTTTCTCGTCGATGGTCAGCACAG | |
| PB15 | | | | | | | | |
| pU6_A1AT_ | GGCTGT | 20689 | CGATGGTC | 21499 | TCCCTTTCTC | 22309 | GGCTGTGCTGACCATCGACAGTTTTAGAGCTA | 23119 |
| SpRY_ | GCTGAC | | AGCACA | | GT | | GAAATAGCAAGTTAAAATAAGGCTAGTCCGTT | |
| ED2- | CATCGA | | | | | | ATCAACTTGAAAAAGTGGCACCGAGTCGGTGC | |
| _9FE_ | CA | | | | | | TCCCTTTCTCGTCGATGGTCAGCACA | |
| PB14 | | | | | | | | |
| pU6_A1AT_ | GGCTGT | 20690 | CGATGGTC | 21500 | TCCCTTTCTC | 22310 | GGCTGTGCTGACCATCGACAGTTTTAGAGCTA | 23120 |
| SpRY_ | GCTGAC | | AGCAC | | GT | | GAAATAGCAAGTTAAAATAAGGCTAGTCCGTT | |
| ED2- | CATCGA | | | | | | ATCAACTTGAAAAAGTGGCACCGAGTCGGTGC | |
| _9FE_ | CA | | | | | | TCCCTTTCTCGTCGATGGTCAGCAC | |
| PB13 | | | | | | | | |
| pU6_A1AT_ | GGCTGT | 20691 | CGATGGTC | 21501 | TCCCTTTCTC | 22311 | GGCTGTGCTGACCATCGACAGTTTTAGAGCTA | 23121 |
| SpRY_ | GCTGAC | | AGCA | | GT | | GAAATAGCAAGTTAAAATAAGGCTAGTCCGTT | |
| ED2- | CATCGA | | | | | | ATCAACTTGAAAAAGTGGCACCGAGTCGGTGC | |
| _9FE_ | CA | | | | | | TCCCTTTCTCGTCGATGGTCAGCA | |
| PB12 | | | | | | | | |
| pU6_A1AT_ | GGCTGT | 20692 | CGATGGTC | 21502 | TCCCTTTCTC | 22312 | GGCTGTGCTGACCATCGACAGTTTTAGAGCTA | 23122 |
| SpRY_ | GCTGAC | | AGC | | GT | | GAAATAGCAAGTTAAAATAAGGCTAGTCCGTT | |
| ED2- | CATCGA | | | | | | ATCAACTTGAAAAAGTGGCACCGAGTCGGTGC | |
| _9FE_ | CA | | | | | | TCCCTTTCTCGTCGATGGTCAGC | |
| PB11 | | | | | | | | |
| pU6_A1AT_ | GGCTGT | 20693 | CGATGGTC | 21503 | TCCCTTTCTC | 22313 | GGCTGTGCTGACCATCGACAGTTTTAGAGCTA | 23123 |
| SpRY_ | GCTGAC | | AG | | GT | | GAAATAGCAAGTTAAAATAAGGCTAGTCCGTT | |
| ED2- | CATCGA | | | | | | ATCAACTTGAAAAAGTGGCACCGAGTCGGTGC | |
| _9FE_ | CA | | | | | | TCCCTTTCTCGTCGATGGTCAG | |
| PB10 | | | | | | | | |
| pU6_A1AT_ | GGCTGT | 20694 | CGATGGTC | | TCCCTTTCTC | 22314 | GGCTGTGCTGACCATCGACAGTTTTAGAGCTA | 23124 |
| SpRY_ | GCTGAC | | A | | GT | | GAAATAGCAAGTTAAAATAAGGCTAGTCCGTT | |
| ED2- | CATCGA | | | | | | ATCAACTTGAAAAAGTGGCACCGAGTCGGTGC | |
| _9FE_ | CA | | | | | | TCCCTTTCTCGTCGATGGTCA | |
| PB9 | | | | | | | | |
| pU6_A1AT_ | GGCTGT | 20695 | CGATGGTC | | TCCCTTTCTC | 22315 | GGCTGTGCTGACCATCGACAGTTTTAGAGCTA | 23125 |
| SpRY_ | GCTGAC | | | | GT | | GAAATAGCAAGTTAAAATAAGGCTAGTCCGTT | |
| ED2- | CATCGA | | | | | | ATCAACTTGAAAAAGTGGCACCGAGTCGGTGC | |
| _9FE_ | CA | | | | | | TCCCTTTCTCGTCGATGGTC | |
| PB8 | | | | | | | | |
| pU6_A1AT_ | GGCTGT | 20696 | CGATGGTC | 21506 | CCTTTCTCG | 22316 | GGCTGTGCTGACCATCGACAGTTTTAGAGCTA | 23126 |
| SpR | GCTGAC | | AGCACAGC | | T | | GAAATAGCAAGTTAAAATAAGGCTAGTCCGTT | |
| Y_ED2- | CATCGA | | C | | | | ATCAACTTGAAAAAGTGGCACCGAGTCGGTGC | |
| _7FE_ | CA | | | | | | CCTTTCTCGTCGATGGTCAGCACAGCC | |
| PB17 | | | | | | | | |
| pU6_A1AT_ | GGCTGT | 20697 | CGATGGTC | 21507 | CCTTTCTCG | 22317 | GGCTGTGCTGACCATCGACAGTTTTAGAGCTA | 23127 |
| SpRY_ | GCTGAC | | AGCACAGC | | T | | GAAATAGCAAGTTAAAATAAGGCTAGTCCGTT | |
| ED2- | CATCGA | | | | | | ATCAACTTGAAAAAGTGGCACCGAGTCGGTGC | |
| _7FE_ | CA | | | | | | CCTTTCTCGTCGATGGTCAGCACAGC | |
| PB16 | | | | | | | | |
| pU6_A1AT_ | GGCTGT | 20698 | CGATGGTC | 21508 | CCTTTCTCG | 22318 | GGCTGTGCTGACCATCGACAGTTTTAGAGCTA | 23128 |
| SpRY_ | GCTGAC | | AGCACAG | | T | | GAAATAGCAAGTTAAAATAAGGCTAGTCCGTT | |
| ED2- | CATCGA | | | | | | ATCAACTTGAAAAAGTGGCACCGAGTCGGTGC | |
| _7FE_ | CA | | | | | | CCTTTCTCGTCGATGGTCAGCACAG | |
| PB15 | | | | | | | | |
| pU6_A1AT_ | GGCTGT | 20699 | CGATGGTC | 21509 | CCTTTCTCG | 22319 | GGCTGTGCTGACCATCGACAGTTTTAGAGCTA | 23129 |
| SpRY_ | GCTGAC | | AGCACA | | T | | GAAATAGCAAGTTAAAATAAGGCTAGTCCGTT | |
| ED2- | CATCGA | | | | | | ATCAACTTGAAAAAGTGGCACCGAGTCGGTGC | |
| _7FE_ | CA | | | | | | CCTTTCTCGTCGATGGTCAGCACA | |
| PB14 | | | | | | | | |
| pU6_A1AT_ | GGCTGT | 20700 | CGATGGTC | 21510 | CCTTTCTCG | 22320 | GGCTGTGCTGACCATCGACAGTTTTAGAGCTA | 23130 |
| SpRY_ | GCTGAC | | AGCAC | | T | | GAAATAGCAAGTTAAAATAAGGCTAGTCCGTT | |
| ED2- | CATCGA | | | | | | ATCAACTTGAAAAAGTGGCACCGAGTCGGTGC | |
| _7FE_ | CA | | | | | | CCTTTCTCGTCGATGGTCAGCAC | |
| PB13 | | | | | | | | |
| pU6_A1AT_ | GGCTGT | 20701 | CGATGGTC | 21511 | CCTTTCTCG | 22321 | GGCTGTGCTGACCATCGACAGTTTTAGAGCTA | 23131 |
| SpRY_ | GCTGAC | | AGCA | | T | | GAAATAGCAAGTTAAAATAAGGCTAGTCCGTT | |
| ED2- | CATCGA | | | | | | ATCAACTTGAAAAAGTGGCACCGAGTCGGTGC | |
| _7FE_ | CA | | | | | | CCTTTCTCGTCGATGGTCAGCA | |
| PB12 | | | | | | | | |
| pU6_A1AT_ | GGCTGT | 20702 | CGATGGTC | 21512 | CCTTTCTCG | 22322 | GGCTGTGCTGACCATCGACAGTTTTAGAGCTA | 23132 |
| SpRY_ | GCTGAC | | AGC | | T | | GAAATAGCAAGTTAAAATAAGGCTAGTCCGTT | |
| ED2- | CATCGA | | | | | | ATCAACTTGAAAAAGTGGCACCGAGTCGGTGC | |
| _7FE_ | CA | | | | | | CCTTTCTCGTCGATGGTCAGC | |
| PB11 | | | | | | | | |
| pU6_A1AT_ | GGCTGT | 20703 | CGATGGTC | 21513 | CCTTTCTCG | 22323 | GGCTGTGCTGACCATCGACAGTTTTAGAGCTA | 23133 |
| SpRY_ | GCTGAC | | AG | | T | | GAAATAGCAAGTTAAAATAAGGCTAGTCCGTT | |
| ED2- | CATCGA | | | | | | ATCAACTTGAAAAAGTGGCACCGAGTCGGTGC | |
| _7FE_ | CA | | | | | | CCTTTCTCGTCGATGGTCAG | |
| PB10 | | | | | | | | |
| pU6_A1AT_ | GGCTGT | 20704 | CGATGGTC | | CCTTTCTCG | 22324 | GGCTGTGCTGACCATCGACAGTTTTAGAGCTA | 23134 |
| SpRY_ | GCTGAC | | A | | T | | GAAATAGCAAGTTAAAATAAGGCTAGTCCGTT | |
| ED2- | CATCGA | | | | | | ATCAACTTGAAAAAGTGGCACCGAGTCGGTGC | |
| _7FE_ | CA | | | | | | CCTTTCTCGTCGATGGTCA | |
| PB9 | | | | | | | | |
| pU6_A1AT_ | GGCTGT | 20705 | CGATGGTC | | CCTTTCTCG | 22325 | GGCTGTGCTGACCATCGACAGTTTTAGAGCTA | 23135 |
| SpRY_ | GCTGAC | | | | T | | GAAATAGCAAGTTAAAATAAGGCTAGTCCGTT | |
| ED2- | CATCGA | | | | | | ATCAACTTGAAAAAGTGGCACCGAGTCGGTGC | |
| _7FE_ | CA | | | | | | CCTTTCTCGTCGATGGTC | |
| PB8 | | | | | | | | |
| pU6_A1AT_ | GGCTGT | 20706 | CGATGGTC | 21516 | TTTCTCGT | | GGCTGTGCTGACCATCGACAGTTTTAGAGCTA | 23136 |
| SpRY_ | GCTGAC | | AGCACAGC | | | | GAAATAGCAAGTTAAAATAAGGCTAGTCCGTT | |
| ED2- | CATCGA | | C | | | | ATCAACTTGAAAAAGTGGCACCGAGTCGGTGC | |
| _5FE_ | CA | | | | | | TTTCTCGTCGATGGTCAGCACAGCC | |
| PB17 | | | | | | | | |
| pU6_A1AT_ | GGCTGT | 20707 | CGATGGTC | 21517 | TTTCTCGT | | GGCTGTGCTGACCATCGACAGTTTTAGAGCTA | 23137 |
| SpRY_ | GCTGAC | | AGCACAGC | | | | GAAATAGCAAGTTAAAATAAGGCTAGTCCGTT | |
| ED2- | CATCGA | | | | | | ATCAACTTGAAAAAGTGGCACCGAGTCGGTGC | |
| _5FE_ | CA | | | | | | TTTCTCGTCGATGGTCAGCACAGC | |
| PB16 | | | | | | | | |
| pU6_A1AT_ | GGCTGT | 20708 | CGATGGTC | 21518 | TTTCTCGT | | GGCTGTGCTGACCATCGACAGTTTTAGAGCTA | 23138 |
| SpRY_ | GCTGAC | | AGCACAG | | | | GAAATAGCAAGTTAAAATAAGGCTAGTCCGTT | |
| ED2- | CATCGA | | | | | | ATCAACTTGAAAAAGTGGCACCGAGTCGGTGC | |
| _5FE_ | CA | | | | | | TTTCTCGTCGATGGTCAGCACAG | |
| PB15 | | | | | | | | |
| pU6_A1AT_ | GGCTGT | 20709 | CGATGGTC | 21519 | TTTCTCGT | | GGCTGTGCTGACCATCGACAGTTTTAGAGCTA | 23139 |
| SpRY_ | GCTGAC | | AGCACA | | | | GAAATAGCAAGTTAAAATAAGGCTAGTCCGTT | |
| ED2- | CATCGA | | | | | | ATCAACTTGAAAAAGTGGCACCGAGTCGGTGC | |
| _5FE_ | CA | | | | | | TTTCTCGTCGATGGTCAGCACA | |
| PB14 | | | | | | | | |
| pU6_A1AT_ | GGCTGT | 20710 | CGATGGTC | 21520 | TTTCTCGT | | GGCTGTGCTGACCATCGACAGTTTTAGAGCTA | 23140 |
| SpRY_ | GCTGAC | | AGCAC | | | | GAAATAGCAAGTTAAAATAAGGCTAGTCCGTT | |
| ED2- | CATCGA | | | | | | ATCAACTTGAAAAAGTGGCACCGAGTCGGTGC | |
| _5FE_ | CA | | | | | | TTTCTCGTCGATGGTCAGCAC | |
| PB13 | | | | | | | | |
| pU6_A1AT_ | GGCTGT | 20711 | CGATGGTC | 21521 | TTTCTCGT | | GGCTGTGCTGACCATCGACAGTTTTAGAGCTA | 23141 |
| SpRY_ | GCTGAC | | AGCA | | | | GAAATAGCAAGTTAAAATAAGGCTAGTCCGTT | |
| ED2- | CATCGA | | | | | | ATCAACTTGAAAAAGTGGCACCGAGTCGGTGC | |
| _5FE_ | CA | | | | | | TTTCTCGTCGATGGTCAGCA | |
| PB12 | | | | | | | | |
| pU6_A1AT_ | GGCTGT | 20712 | CGATGGTC | 21522 | TTTCTCGT | | GGCTGTGCTGACCATCGACAGTTTTAGAGCTA | 23142 |
| SpRY_ | GCTGAC | | AGC | | | | GAAATAGCAAGTTAAAATAAGGCTAGTCCGTT | |
| ED2- | CATCGA | | | | | | ATCAACTTGAAAAAGTGGCACCGAGTCGGTGC | |
| _5FE_ | CA | | | | | | TTTCTCGTCGATGGTCAGC | |
| PB11 | | | | | | | | |
| pU6_A1AT_ | GGCTGT | 20713 | CGATGGTC | 21523 | TTTCTCGT | | GGCTGTGCTGACCATCGACAGTTTTAGAGCTA | 23143 |
| SpRY_ | GCTGAC | | AG | | | | GAAATAGCAAGTTAAAATAAGGCTAGTCCGTT | |
| ED2- | CATCGA | | | | | | ATCAACTTGAAAAAGTGGCACCGAGTCGGTGC | |
| _5FE_ | CA | | | | | | TTTCTCGTCGATGGTCAG | |
| PB10 | | | | | | | | |
| pU6_A1AT_ | GGCTGT | 20714 | CGATGGTC | | TTTCTCGT | | GGCTGTGCTGACCATCGACAGTTTTAGAGCTA | 23144 |
| SpRY_ | GCTGAC | | A | | | | GAAATAGCAAGTTAAAATAAGGCTAGTCCGTT | |
| ED2- | CATCGA | | | | | | ATCAACTTGAAAAAGTGGCACCGAGTCGGTGC | |
| _5FE_ | CA | | | | | | TTTCTCGTCGATGGTCA | |
| PB9 | | | | | | | | |
| pU6_A1AT_ | GGCTGT | 20715 | CGATGGTC | | TTTCTCGT | | GGCTGTGCTGACCATCGACAGTTTTAGAGCTA | 23145 |
| SpRY_ | GCTGAC | | | | | | GAAATAGCAAGTTAAAATAAGGCTAGTCCGTT | |
| ED2- | CATCGA | | | | | | ATCAACTTGAAAAAGTGGCACCGAGTCGGTGC | |
| _5FE_ | CA | | | | | | TTTCTCGTCGATGGTC | |
| PB8 | | | | | | | | |
| pU6_A1AT_ | GGCTGT | 20716 | CGATGGTC | 21526 | TCTCGT | | GGCTGTGCTGACCATCGACAGTTTTAGAGCTA | 23146 |
| SpRY_ | GCTGAC | | AGCACAGC | | | | GAAATAGCAAGTTAAAATAAGGCTAGTCCGTT | |
| ED2- | CATCGA | | C | | | | ATCAACTTGAAAAAGTGGCACCGAGTCGGTGC | |
| _3FE_ | CA | | | | | | TCTCGTCGATGGTCAGCACAGCC | |
| PB17 | | | | | | | | |
| pU6_A1AT_ | GGCTGT | 20717 | CGATGGTC | 21527 | TCTCGT | | GGCTGTGCTGACCATCGACAGTTTTAGAGCTA | 23147 |
| SpRY_ | GCTGAC | | AGCACAGC | | | | GAAATAGCAAGTTAAAATAAGGCTAGTCCGTT | |
| ED2- | CATCGA | | | | | | ATCAACTTGAAAAAGTGGCACCGAGTCGGTGC | |
| _3FE_ | CA | | | | | | TCTCGTCGATGGTCAGCACAGC | |
| PB16 | | | | | | | | |
| pU6_A1AT_ | GGCTGT | 20718 | CGATGGTC | 21528 | TCTCGT | | GGCTGTGCTGACCATCGACAGTTTTAGAGCTA | 23148 |
| SpRY_ | GCTGAC | | AGCACAG | | | | GAAATAGCAAGTTAAAATAAGGCTAGTCCGTT | |
| ED2- | CATCGA | | | | | | ATCAACTTGAAAAAGTGGCACCGAGTCGGTGC | |
| _3FE_ | CA | | | | | | TCTCGTCGATGGTCAGCACAG | |
| PB15 | | | | | | | | |
| pU6_A1AT_ | GGCTGT | 20719 | CGATGGTC | 21529 | TCTCGT | | GGCTGTGCTGACCATCGACAGTTTTAGAGCTA | 23149 |
| SpRY_ | GCTGAC | | AGCACA | | | | GAAATAGCAAGTTAAAATAAGGCTAGTCCGTT | |
| ED2- | CATCGA | | | | | | ATCAACTTGAAAAAGTGGCACCGAGTCGGTGC | |
| _3FE_ | CA | | | | | | TCTCGTCGATGGTCAGCACA | |
| PB14 | | | | | | | | |
| pU6_A1AT_ | GGCTGT | 20720 | CGATGGTC | 21530 | TCTCGT | | GGCTGTGCTGACCATCGACAGTTTTAGAGCTA | 23150 |
| SpRY_ | GCTGAC | | AGCAC | | | | GAAATAGCAAGTTAAAATAAGGCTAGTCCGTT | |
| ED2- | CATCGA | | | | | | ATCAACTTGAAAAAGTGGCACCGAGTCGGTGC | |
| _3FE_ | CA | | | | | | TCTCGTCGATGGTCAGCAC | |
| PB13 | | | | | | | | |
| pU6_A1AT_ | GGCTGT | 20721 | CGATGGTC | 21531 | TCTCGT | | GGCTGTGCTGACCATCGACAGTTTTAGAGCTA | 23151 |
| SpRY_ | GCTGAC | | AGCA | | | | GAAATAGCAAGTTAAAATAAGGCTAGTCCGTT | |
| ED2- | CATCGA | | | | | | ATCAACTTGAAAAAGTGGCACCGAGTCGGTGC | |
| _3FE_ | CA | | | | | | TCTCGTCGATGGTCAGCA | |
| PB12 | | | | | | | | |
| pU6_A1AT_ | GGCTGT | 20722 | CGATGGTC | 21532 | TCTCGT | | GGCTGTGCTGACCATCGACAGTTTTAGAGCTA | 23152 |
| SpRY_ | GCTGAC | | AGC | | | | GAAATAGCAAGTTAAAATAAGGCTAGTCCGTT | |
| ED2- | CATCGA | | | | | | ATCAACTTGAAAAAGTGGCACCGAGTCGGTGC | |
| _3FE_ | CA | | | | | | TCTCGTCGATGGTCAGC | |
| PB11 | | | | | | | | |
| pU6_A1AT_ | GGCTGT | 20723 | CGATGGTC | 21533 | TCTCGT | | GGCTGTGCTGACCATCGACAGTTTTAGAGCTA | 23153 |
| SpRY_ | GCTGAC | | AG | | | | GAAATAGCAAGTTAAAATAAGGCTAGTCCGTT | |
| ED2- | CATCGA | | | | | | ATCAACTTGAAAAAGTGGCACCGAGTCGGTGC | |
| _3FE_ | CA | | | | | | TCTCGTCGATGGTCAG | |
| PB10 | | | | | | | | |
| pU6_A1AT_ | GGCTGT | 20724 | CGATGGTC | | TCTCGT | | GGCTGTGCTGACCATCGACAGTTTTAGAGCTA | 23154 |
| SpRY_ | GCTGAC | | A | | | | GAAATAGCAAGTTAAAATAAGGCTAGTCCGTT | |
| ED2- | CATCGA | | | | | | ATCAACTTGAAAAAGTGGCACCGAGTCGGTGC | |
| _3FE_ | CA | | | | | | TCTCGTCGATGGTCA | |
| PB9 | | | | | | | | |
| pU6_A1AT_ | GGCTGT | 20725 | CGATGGTC | | TCTCGT | | GGCTGTGCTGACCATCGACAGTTTTAGAGCTA | 23155 |
| SpRY_ | GCTGAC | | | | | | GAAATAGCAAGTTAAAATAAGGCTAGTCCGTT | |
| ED2- | CATCGA | | | | | | ATCAACTTGAAAAAGTGGCACCGAGTCGGTGC | |
| _3FE_ | CA | | | | | | TCTCGTCGATGGTC | |
| PB8 | | | | | | | | |
| pU6_A1AT_ | AGGCTG | 20726 | GATGGTCA | 21536 | ACATGGCCC | 22346 | AGGCTGTGCTGACCATCGACGTTTTAGAGCTA | 23156 |
| ScaCas9++_ | TGCTGA | | GCACAGCC | | CAGCAGCTT | | GAAATAGCAAGTTAAAATAAGGCTAGTCCGTT | |
| SpRY_ED3- | CCATCG | | T | | CAGTCCCTT | | ATCAACTTGAAAAAGTGGCACCGAGTCGGTGC | |
| _30FE_ | AC | | | | TCTcGTC | | ACATGGCCCCAGCAGCTTCAGTCCCTTTCTcGT | |
| PB17 | | | | | | | CGATGGTCAGCACAGCCT | |
| pU6_A1AT_ | AGGCTG | 20727 | GATGGTCA | 21537 | ACATGGCCC | 22347 | AGGCTGTGCTGACCATCGACGTTTTAGAGCTA | 23157 |
| ScaCas9++_ | TGCTGA | | GCACAGCC | | CAGCAGCTT | | GAAATAGCAAGTTAAAATAAGGCTAGTCCGTT | |
| SpRY_ | CCATCG | | | | CAGTCCCTT | | ATCAACTTGAAAAAGTGGCACCGAGTCGGTGC | |
| ED3- | AC | | | | TCTcGTC | | ACATGGCCCCAGCAGCTTCAGTCCCTTTCTcGT | |
| _30FE_ | | | | | | | CGATGGTCAGCACAGCC | |
| PB16 | | | | | | | | |
| pU6_A1AT_ | AGGCTG | 20728 | GATGGTCA | 21538 | ACATGGCCC | 22348 | AGGCTGTGCTGACCATCGACGTTTTAGAGCTA | 23158 |
| ScaCas9++_ | TGCTGA | | GCACAGC | | CAGCAGCTT | | GAAATAGCAAGTTAAAATAAGGCTAGTCCGTT | |
| SpRY_ | CCATCG | | | | CAGTCCCTT | | ATCAACTTGAAAAAGTGGCACCGAGTCGGTGC | |
| ED3- | AC | | | | TCTcGTC | | ACATGGCCCCAGCAGCTTCAGTCCCTTTCTcGT | |
| _30FE_ | | | | | | | CGATGGTCAGCACAGC | |
| PB15 | | | | | | | | |
| pU6_A1AT_ | AGGCTG | 20729 | GATGGTCA | 21539 | ACATGGCCC | 22349 | AGGCTGTGCTGACCATCGACGTTTTAGAGCTA | 23159 |
| ScaCas9++_ | TGCTGA | | GCACAG | | CAGCAGCTT | | GAAATAGCAAGTTAAAATAAGGCTAGTCCGTT | |
| SpRY_ | CCATCG | | | | CAGTCCCTT | | ATCAACTTGAAAAAGTGGCACCGAGTCGGTGC | |
| ED3- | AC | | | | TCTcGTC | | ACATGGCCCCAGCAGCTTCAGTCCCTTTCTcGT | |
| _30FE_ | | | | | | | CGATGGTCAGCACAG | |
| PB14 | | | | | | | | |
| pU6_A1AT_ | AGGCTG | 20730 | GATGGTCA | 21540 | ACATGGCCC | 22350 | AGGCTGTGCTGACCATCGACGTTTTAGAGCTA | 23160 |
| ScaCas9++_ | TGCTGA | | GCACA | | CAGCAGCTT | | GAAATAGCAAGTTAAAATAAGGCTAGTCCGTT | |
| SpRY_ | CCATCG | | | | CAGTCCCTT | | ATCAACTTGAAAAAGTGGCACCGAGTCGGTGC | |
| ED3- | AC | | | | TCTcGTC | | ACATGGCCCCAGCAGCTTCAGTCCCTTTCTcGT | |
| _30FE_ | | | | | | | CGATGGTCAGCACA | |
| PB13 | | | | | | | | |
| pU6_A1AT_ | AGGCTG | 20731 | GATGGTCA | 21541 | ACATGGCCC | 22351 | AGGCTGTGCTGACCATCGACGTTTTAGAGCTA | 23161 |
| ScaCas9++_ | TGCTGA | | GCAC | | CAGCAGCTT | | GAAATAGCAAGTTAAAATAAGGCTAGTCCGTT | |
| SpRY_ | CCATCG | | | | CAGTCCCTT | | ATCAACTTGAAAAAGTGGCACCGAGTCGGTGC | |
| ED3- | AC | | | | TCTcGTC | | ACATGGCCCCAGCAGCTTCAGTCCCTTTCTcGT | |
| _30FE_ | | | | | | | CGATGGTCAGCAC | |
| PB12 | | | | | | | | |
| pU6_A1AT_ | AGGCTG | 20732 | GATGGTCA | 21542 | ACATGGCCC | 22352 | AGGCTGTGCTGACCATCGACGTTTTAGAGCTA | 23162 |
| ScaCas9++_ | TGCTGA | | GCA | | CAGCAGCTT | | GAAATAGCAAGTTAAAATAAGGCTAGTCCGTT | |
| SpRY_ | CCATCG | | | | CAGTCCCTT | | ATCAACTTGAAAAAGTGGCACCGAGTCGGTGC | |
| ED3- | AC | | | | TCTcGTC | | ACATGGCCCCAGCAGCTTCAGTCCCTTTCTcGT | |
| _30FE_ | | | | | | | CGATGGTCAGCA | |
| PB11 | | | | | | | | |
| pU6_A1AT_ | AGGCTG | 20733 | GATGGTCA | 21543 | ACATGGCCC | 22353 | AGGCTGTGCTGACCATCGACGTTTTAGAGCTA | 23163 |
| ScaCas9++_ | TGCTGA | | GC | | CAGCAGCTT | | GAAATAGCAAGTTAAAATAAGGCTAGTCCGTT | |
| SpRY_ | CCATCG | | | | CAGTCCCTT | | ATCAACTTGAAAAAGTGGCACCGAGTCGGTGC | |
| ED3- | AC | | | | TCTcGTC | | ACATGGCCCCAGCAGCTTCAGTCCCTTTCTcGT | |
| _30FE_ | | | | | | | CGATGGTCAGC | |
| PB10 | | | | | | | | |
| pU6_A1AT_ | AGGCTG | 20734 | GATGGTCA | | ACATGGCCC | 22354 | AGGCTGTGCTGACCATCGACGTTTTAGAGCTA | 23164 |
| ScaCas9++_ | TGCTGA | | G | | CAGCAGCTT | | GAAATAGCAAGTTAAAATAAGGCTAGTCCGTT | |
| SpRY_ | CCATCG | | | | CAGTCCCTT | | ATCAACTTGAAAAAGTGGCACCGAGTCGGTGC | |
| ED3- | AC | | | | TCTcGTC | | ACATGGCCCCAGCAGCTTCAGTCCCTTTCTcGT | |
| _30FE_ | | | | | | | CGATGGTCAG | |
| PB9 | | | | | | | | |
| pU6_A1AT_ | AGGCTG | 20735 | GATGGTCA | | ACATGGCCC | 22355 | AGGCTGTGCTGACCATCGACGTTTTAGAGCTA | 23165 |
| ScaCas9++_ | TGCTGA | | | | CAGCAGCTT | | GAAATAGCAAGTTAAAATAAGGCTAGTCCGTT | |
| SpRY_ | CCATCG | | | | CAGTCCCTT | | ATCAACTTGAAAAAGTGGCACCGAGTCGGTGC | |
| ED3- | AC | | | | TCTcGTC | | ACATGGCCCCAGCAGCTTCAGTCCCTTTCTcGT | |
| _30FE_ | | | | | | | CGATGGTCA | |
| PB8 | | | | | | | | |
| pU6_A1AT_ | AGGCTG | 20736 | GATGGTCA | 21546 | GCCCCAGCA | 22356 | AGGCTGTGCTGACCATCGACGTTTTAGAGCTA | 23166 |
| ScaCas9++_ | TGCTGA | | GCACAGCC | | GCTTCAGTC | | GAAATAGCAAGTTAAAATAAGGCTAGTCCGTT | |
| SpRY_ | CCATCG | | T | | CCTTTCTcGT | | ATCAACTTGAAAAAGTGGCACCGAGTCGGTGC | |
| ED3- | AC | | | | C | | GCCCCAGCAGCTTCAGTCCCTTTCTcGTCGATG | |
| _25FE_ | | | | | | | GTCAGCACAGCCT | |
| PB17 | | | | | | | | |
| pU6_A1AT_ | AGGCTG | 20737 | GATGGTCA | 21547 | GCCCCAGCA | 22357 | AGGCTGTGCTGACCATCGACGTTTTAGAGCTA | 23167 |
| ScaCas9++_ | TGCTGA | | GCACAGCC | | GCTTCAGTC | | GAAATAGCAAGTTAAAATAAGGCTAGTCCGTT | |
| SpRY_ | CCATCG | | | | CCTTTCTcGT | | ATCAACTTGAAAAAGTGGCACCGAGTCGGTGC | |
| ED3- | AC | | | | C | | GCCCCAGCAGCTTCAGTCCCTTTCTcGTCGATG | |
| _25FE_ | | | | | | | GTCAGCACAGCC | |
| PB16 | | | | | | | | |
| pU6_A1AT_ | AGGCTG | 20738 | GATGGTCA | 21548 | GCCCCAGCA | 22358 | AGGCTGTGCTGACCATCGACGTTTTAGAGCTA | 23168 |
| ScaCas9++_ | TGCTGA | | GCACAGC | | GCTTCAGTC | | GAAATAGCAAGTTAAAATAAGGCTAGTCCGTT | |
| SpRY_ | CCATCG | | | | CCTTTCTcGT | | ATCAACTTGAAAAAGTGGCACCGAGTCGGTGC | |
| ED3- | AC | | | | C | | GCCCCAGCAGCTTCAGTCCCTTTCTcGTCGATG | |
| _25FE_ | | | | | | | GTCAGCACAGC | |
| PB15 | | | | | | | | |
| pU6_A1AT_ | AGGCTG | 20739 | GATGGTCA | 21549 | GCCCCAGCA | 22359 | AGGCTGTGCTGACCATCGACGTTTTAGAGCTA | 23169 |
| ScaCas9++_ | TGCTGA | | GCACAG | | GCTTCAGTC | | GAAATAGCAAGTTAAAATAAGGCTAGTCCGTT | |
| SpRY_ | CCATCG | | | | CCTTTCTcGT | | ATCAACTTGAAAAAGTGGCACCGAGTCGGTGC | |
| ED3- | AC | | | | C | | GCCCCAGCAGCTTCAGTCCCTTTCTcGTCGATG | |
| _25FE_ | | | | | | | GTCAGCACAG | |
| PB14 | | | | | | | | |
| pU6_A1AT_ | AGGCTG | 20740 | GATGGTCA | 21550 | GCCCCAGCA | 22360 | AGGCTGTGCTGACCATCGACGTTTTAGAGCTA | 23170 |
| ScaCas9++_ | TGCTGA | | GCACA | | GCTTCAGTC | | GAAATAGCAAGTTAAAATAAGGCTAGTCCGTT | |
| SpRY_ | CCATCG | | | | CCTTTCTcGT | | ATCAACTTGAAAAAGTGGCACCGAGTCGGTGC | |
| ED3- | AC | | | | C | | GCCCCAGCAGCTTCAGTCCCTTTCTcGTCGATG | |
| _25FE_ | | | | | | | GTCAGCACA | |
| PB13 | | | | | | | | |
| pU6_A1AT_ | AGGCTG | 20741 | GATGGTCA | 21551 | GCCCCAGCA | 22361 | AGGCTGTGCTGACCATCGACGTTTTAGAGCTA | 23171 |
| ScaCas9++_ | TGCTGA | | GCAC | | GCTTCAGTC | | GAAATAGCAAGTTAAAATAAGGCTAGTCCGTT | |
| SpRY_ | CCATCG | | | | CCTTTCTcGT | | ATCAACTTGAAAAAGTGGCACCGAGTCGGTGC | |
| ED3- | AC | | | | C | | GCCCCAGCAGCTTCAGTCCCTTTCTcGTCGATG | |
| _25FE_ | | | | | | | GTCAGCAC | |
| PB12 | | | | | | | | |
| pU6_A1AT_ | AGGCTG | 20742 | GATGGTCA | 21552 | GCCCCAGCA | 22362 | AGGCTGTGCTGACCATCGACGTTTTAGAGCTA | 23172 |
| ScaCas9++_ | TGCTGA | | GCA | | GCTTCAGTC | | GAAATAGCAAGTTAAAATAAGGCTAGTCCGTT | |
| SpRY_ | CCATCG | | | | CCTTTCTcGT | | ATCAACTTGAAAAAGTGGCACCGAGTCGGTGC | |
| ED3- | AC | | | | C | | GCCCCAGCAGCTTCAGTCCCTTTCTcGTCGATG | |
| _25FE_ | | | | | | | GTCAGCA | |
| PB11 | | | | | | | | |
| pU6_A1AT_ | AGGCTG | 20743 | GATGGTCA | 21553 | GCCCCAGCA | 22363 | AGGCTGTGCTGACCATCGACGTTTTAGAGCTA | 23173 |
| ScaCas9++_ | TGCTGA | | GC | | GCTTCAGTC | | GAAATAGCAAGTTAAAATAAGGCTAGTCCGTT | |
| SpRY_ | CCATCG | | | | CCTTTCTcGT | | ATCAACTTGAAAAAGTGGCACCGAGTCGGTGC | |
| ED3- | AC | | | | C | | GCCCCAGCAGCTTCAGTCCCTTTCTcGTCGATG | |
| _25FE_ | | | | | | | GTCAGC | |
| PB10 | | | | | | | | |
| pU6_A1AT_ | AGGCTG | 20744 | GATGGTCA | | GCCCCAGCA | 22364 | AGGCTGTGCTGACCATCGACGTTTTAGAGCTA | 23174 |
| ScaCas9++_ | TGCTGA | | G | | GCTTCAGTC | | GAAATAGCAAGTTAAAATAAGGCTAGTCCGTT | |
| SpRY_ | CCATCG | | | | CCTTTCTcGT | | ATCAACTTGAAAAAGTGGCACCGAGTCGGTGC | |
| ED3- | AC | | | | C | | GCCCCAGCAGCTTCAGTCCCTTTCTcGTCGATG | |
| _25FE_ | | | | | | | GTCAG | |
| PB9 | | | | | | | | |
| pU6_A1AT_ | AGGCTG | 20745 | GATGGTCA | | GCCCCAGCA | 22365 | AGGCTGTGCTGACCATCGACGTTTTAGAGCTA | 23175 |
| ScaCas9++_ | TGCTGA | | | | GCTTCAGTC | | GAAATAGCAAGTTAAAATAAGGCTAGTCCGTT | |
| SpRY_ | CCATCG | | | | CCTTTCTcGT | | ATCAACTTGAAAAAGTGGCACCGAGTCGGTGC | |
| ED3- | AC | | | | C | | GCCCCAGCAGCTTCAGTCCCTTTCTcGTCGATG | |
| _25FE_ | | | | | | | GTCA | |
| PB8 | | | | | | | | |
| pU6_A1AT_ | AGGCTG | 20746 | GATGGTCA | 21556 | AGCAGCTTC | 22366 | AGGCTGTGCTGACCATCGACGTTTTAGAGCTA | 23176 |
| ScaCas9++_ | TGCTGA | | GCACAGCC | | AGTCCCTTT | | GAAATAGCAAGTTAAAATAAGGCTAGTCCGTT | |
| SpRY_ | CCATCG | | T | | CTcGTC | | ATCAACTTGAAAAAGTGGCACCGAGTCGGTGC | |
| ED3- | AC | | | | | | AGCAGCTTCAGTCCCTTTCTcGTCGATGGTCAG | |
| _20FE_ | | | | | | | CACAGCCT | |
| PB17 | | | | | | | | |
| pU6_A1AT_ | AGGCTG | 20747 | GATGGTCA | 21557 | AGCAGCTTC | 22367 | AGGCTGTGCTGACCATCGACGTTTTAGAGCTA | 23177 |
| ScaCas9++_ | TGCTGA | | GCACAGCC | | AGTCCCTTT | | GAAATAGCAAGTTAAAATAAGGCTAGTCCGTT | |
| SpRY_ | CCATCG | | | | CTcGTC | | ATCAACTTGAAAAAGTGGCACCGAGTCGGTGC | |
| ED3- | AC | | | | | | AGCAGCTTCAGTCCCTTTCTcGTCGATGGTCAG | |
| _20FE_ | | | | | | | CACAGCC | |
| PB16 | | | | | | | | |
| pU6_A1AT_ | AGGCTG | 20748 | GATGGTCA | 21558 | AGCAGCTTC | 22368 | AGGCTGTGCTGACCATCGACGTTTTAGAGCTA | 23178 |
| ScaCas9++_ | TGCTGA | | GCACAGC | | AGTCCCTTT | | GAAATAGCAAGTTAAAATAAGGCTAGTCCGTT | |
| SpRY_ | CCATCG | | | | CTcGTC | | ATCAACTTGAAAAAGTGGCACCGAGTCGGTGC | |
| ED3- | AC | | | | | | AGCAGCTTCAGTCCCTTTCTcGTCGATGGTCAG | |
| _20FE_ | | | | | | | CACAGC | |
| PB15 | | | | | | | | |
| pU6_A1AT_ | AGGCTG | 20749 | GATGGTCA | 21559 | AGCAGCTTC | 22369 | AGGCTGTGCTGACCATCGACGTTTTAGAGCTA | 23179 |
| ScaCas9++_ | TGCTGA | | GCACAG | | AGTCCCTTT | | GAAATAGCAAGTTAAAATAAGGCTAGTCCGTT | |
| SpRY_ | CCATCG | | | | CTcGTC | | ATCAACTTGAAAAAGTGGCACCGAGTCGGTGC | |
| ED3- | AC | | | | | | AGCAGCTTCAGTCCCTTTCTcGTCGATGGTCAG | |
| _20FE_ | | | | | | | CACAG | |
| PB14 | | | | | | | | |
| pU6_A1AT_ | AGGCTG | 20750 | GATGGTCA | 21560 | AGCAGCTTC | 22370 | AGGCTGTGCTGACCATCGACGTTTTAGAGCTA | 23180 |
| ScaCas9++_ | TGCTGA | | GCACA | | AGTCCCTTT | | GAAATAGCAAGTTAAAATAAGGCTAGTCCGTT | |
| SpRY_ | CCATCG | | | | CTcGTC | | ATCAACTTGAAAAAGTGGCACCGAGTCGGTGC | |
| ED3- | AC | | | | | | AGCAGCTTCAGTCCCTTTCTcGTCGATGGTCAG | |
| _20FE_ | | | | | | | CACA | |
| PB13 | | | | | | | | |
| pU6_A1AT_ | AGGCTG | 20751 | GATGGTCA | 21561 | AGCAGCTTC | 22371 | AGGCTGTGCTGACCATCGACGTTTTAGAGCTA | 23181 |
| ScaCas9++_ | TGCTGA | | GCAC | | AGTCCCTTT | | GAAATAGCAAGTTAAAATAAGGCTAGTCCGTT | |
| SpRY_ | CCATCG | | | | CTcGTC | | ATCAACTTGAAAAAGTGGCACCGAGTCGGTGC | |
| ED3- | AC | | | | | | AGCAGCTTCAGTCCCTTTCTcGTCGATGGTCAG | |
| _20FE_ | | | | | | | CAC | |
| PB12 | | | | | | | | |
| pU6_A1AT_ | AGGCTG | 20752 | GATGGTCA | 21562 | AGCAGCTTC | 22372 | AGGCTGTGCTGACCATCGACGTTTTAGAGCTA | 23182 |
| ScaCas9++_ | TGCTGA | | GCA | | AGTCCCTTT | | GAAATAGCAAGTTAAAATAAGGCTAGTCCGTT | |
| SpRY_ | CCATCG | | | | CTcGTC | | ATCAACTTGAAAAAGTGGCACCGAGTCGGTGC | |
| ED3- | AC | | | | | | AGCAGCTTCAGTCCCTTTCTcGTCGATGGTCAG | |
| _20FE_ | | | | | | | CA | |
| PB11 | | | | | | | | |
| pU6_A1AT_ | AGGCTG | 20753 | GATGGTCA | 21563 | AGCAGCTTC | 22373 | AGGCTGTGCTGACCATCGACGTTTTAGAGCTA | 23183 |
| ScaCas9++_ | TGCTGA | | GC | | AGTCCCTTT | | GAAATAGCAAGTTAAAATAAGGCTAGTCCGTT | |
| SpRY_ | CCATCG | | | | CTcGTC | | ATCAACTTGAAAAAGTGGCACCGAGTCGGTGC | |
| ED3- | AC | | | | | | AGCAGCTTCAGTCCCTTTCTcGTCGATGGTCAG | |
| _20FE_ | | | | | | | C | |
| PB10 | | | | | | | | |
| pU6_A1AT_ | AGGCTG | 20754 | GATGGTCA | | AGCAGCTTC | 22374 | AGGCTGTGCTGACCATCGACGTTTTAGAGCTA | 23184 |
| ScaCas9++_ | TGCTGA | | G | | AGTCCCTTT | | GAAATAGCAAGTTAAAATAAGGCTAGTCCGTT | |
| SpRY_ | CCATCG | | | | CTcGTC | | ATCAACTTGAAAAAGTGGCACCGAGTCGGTGC | |
| ED3- | AC | | | | | | AGCAGCTTCAGTCCCTTTCTcGTCGATGGTCAG | |
| _20FE_ | | | | | | | | |
| PB9 | | | | | | | | |
| pU6_A1AT_ | AGGCTG | 20755 | GATGGTCA | | AGCAGCTTC | 22375 | AGGCTGTGCTGACCATCGACGTTTTAGAGCTA | 23185 |
| ScaCas9++_ | TGCTGA | | | | AGTCCCTTT | | GAAATAGCAAGTTAAAATAAGGCTAGTCCGTT | |
| SpRY_ | CCATCG | | | | CTcGTC | | ATCAACTTGAAAAAGTGGCACCGAGTCGGTGC | |
| ED3- | AC | | | | | | AGCAGCTTCAGTCCCTTTCTcGTCGATGGTCA | |
| _20FE_ | | | | | | | | |
| PB8 | | | | | | | | |
| pU6_A1AT_ | AGGCTG | 20756 | GATGGTCA | 21566 | TTCAGTCCC | 22376 | AGGCTGTGCTGACCATCGACGTTTTAGAGCTA | 23186 |
| ScaCas9++_ | TGCTGA | | GCACAGCC | | TTTCTcGTC | | GAAATAGCAAGTTAAAATAAGGCTAGTCCGTT | |
| SpRY_ | CCATCG | | T | | | | ATCAACTTGAAAAAGTGGCACCGAGTCGGTGC | |
| ED3- | AC | | | | | | TTCAGTCCCTTTCTcGTCGATGGTCAGCACAGC | |
| _14FE_ | | | | | | | CT | |
| PB17 | | | | | | | | |
| pU6_A1AT_ | AGGCTG | 20757 | GATGGTCA | 21567 | TTCAGTCCC | 22377 | AGGCTGTGCTGACCATCGACGTTTTAGAGCTA | 23187 |
| ScaCas9++_ | TGCTGA | | GCACAGCC | | TTTCTCGTC | | GAAATAGCAAGTTAAAATAAGGCTAGTCCGTT | |
| SpRY_ | CCATCG | | | | | | ATCAACTTGAAAAAGTGGCACCGAGTCGGTGC | |
| ED3- | AC | | | | | | TTCAGTCCCTTTCTcGTCGATGGTCAGCACAGC | |
| _14FE_ | | | | | | | C | |
| PB16 | | | | | | | | |
| pU6_A1AT_ | AGGCTG | 20758 | GATGGTCA | 21568 | TTCAGTCCC | 22378 | AGGCTGTGCTGACCATCGACGTTTTAGAGCTA | 23188 |
| ScaCas9++_ | TGCTGA | | GCACAGC | | TTTCTCGTC | | GAAATAGCAAGTTAAAATAAGGCTAGTCCGTT | |
| SpRY_ | CCATCG | | | | | | ATCAACTTGAAAAAGTGGCACCGAGTCGGTGC | |
| ED3- | AC | | | | | | TTCAGTCCCTTTCTcGTCGATGGTCAGCACAGC | |
| _14FE_ | | | | | | | | |
| PB15 | | | | | | | | |
| pU6_A1AT_ | AGGCTG | 20759 | GATGGTCA | 21569 | TTCAGTCCC | 22379 | AGGCTGTGCTGACCATCGACGTTTTAGAGCTA | 23189 |
| ScaCas9++_ | TGCTGA | | GCACAG | | TTTCTcGTC | | GAAATAGCAAGTTAAAATAAGGCTAGTCCGTT | |
| SpRY_ | CCATCG | | | | | | ATCAACTTGAAAAAGTGGCACCGAGTCGGTGC | |
| ED3- | AC | | | | | | TTCAGTCCCTTTCTcGTCGATGGTCAGCACAG | |
| _14FE_ | | | | | | | | |
| PB14 | | | | | | | | |
| pU6_A1AT_ | AGGCTG | 20760 | GATGGTCA | 21570 | TTCAGTCCC | 22380 | AGGCTGTGCTGACCATCGACGTTTTAGAGCTA | 23190 |
| ScaCas9++_ | TGCTGA | | GCACA | | TTTCTcGTC | | GAAATAGCAAGTTAAAATAAGGCTAGTCCGTT | |
| SpRY_ | CCATCG | | | | | | ATCAACTTGAAAAAGTGGCACCGAGTCGGTGC | |
| ED3- | AC | | | | | | TTCAGTCCCTTTCTcGTCGATGGTCAGCACA | |
| _14FE_ | | | | | | | | |
| PB13 | | | | | | | | |
| pU6_A1AT_ | AGGCTG | 20761 | GATGGTCA | 21571 | TTCAGTCCC | 22381 | AGGCTGTGCTGACCATCGACGTTTTAGAGCTA | 23191 |
| ScaCas9++_ | TGCTGA | | GCAC | | TTTCTcGTC | | GAAATAGCAAGTTAAAATAAGGCTAGTCCGTT | |
| SpRY_ | CCATCG | | | | | | ATCAACTTGAAAAAGTGGCACCGAGTCGGTGC | |
| ED3- | AC | | | | | | TTCAGTCCCTTTCTcGTCGATGGTCAGCAC | |
| _14FE_ | | | | | | | | |
| PB12 | | | | | | | | |
| pU6_A1AT_ | AGGCTG | 20762 | GATGGTCA | 21572 | TTCAGTCCC | 22382 | AGGCTGTGCTGACCATCGACGTTTTAGAGCTA | 23192 |
| ScaCas9++_ | TGCTGA | | GCA | | TTTCTcGTC | | GAAATAGCAAGTTAAAATAAGGCTAGTCCGTT | |
| SpRY_ | CCATCG | | | | | | ATCAACTTGAAAAAGTGGCACCGAGTCGGTGC | |
| ED3- | AC | | | | | | TTCAGTCCCTTTCTcGTCGATGGTCAGCA | |
| _14FE_ | | | | | | | | |
| PB11 | | | | | | | | |
| pU6_A1AT_ | AGGCTG | 20763 | GATGGTCA | 21573 | TTCAGTCCC | 22383 | AGGCTGTGCTGACCATCGACGTTTTAGAGCTA | 23193 |
| ScaCas9++_ | TGCTGA | | GC | | TTTCTcGTC | | GAAATAGCAAGTTAAAATAAGGCTAGTCCGTT | |
| SpRY_ | CCATCG | | | | | | ATCAACTTGAAAAAGTGGCACCGAGTCGGTGC | |
| ED3- | AC | | | | | | TTCAGTCCCTTTCTcGTCGATGGTCAGC | |
| _14FE_ | | | | | | | | |
| PB10 | | | | | | | | |
| pU6_A1AT_ | AGGCTG | 20764 | GATGGTCA | | TTCAGTCCC | 22384 | AGGCTGTGCTGACCATCGACGTTTTAGAGCTA | 23194 |
| ScaCas9++_ | TGCTGA | | G | | TTTCTCGTC | | GAAATAGCAAGTTAAAATAAGGCTAGTCCGTT | |
| SpRY_ | CCATCG | | | | | | ATCAACTTGAAAAAGTGGCACCGAGTCGGTGC | |
| ED3- | AC | | | | | | TTCAGTCCCTTTCTcGTCGATGGTCAG | |
| _14FE_ | | | | | | | | |
| PB9 | | | | | | | | |
| pU6_A1AT_ | AGGCTG | 20765 | GATGGTCA | | TTCAGTCCC | 22385 | AGGCTGTGCTGACCATCGACGTTTTAGAGCTA | 23195 |
| ScaCas9++_ | TGCTGA | | | | TTTCTcGTC | | GAAATAGCAAGTTAAAATAAGGCTAGTCCGTT | |
| SpRY_ | CCATCG | | | | | | ATCAACTTGAAAAAGTGGCACCGAGTCGGTGC | |
| ED3- | AC | | | | | | TTCAGTCCCTTTCTcGTCGATGGTCA | |
| _14FE_ | | | | | | | | |
| PB8 | | | | | | | | |
| pU6_A1AT_ | AGGCTG | 20766 | GATGGTCA | 21576 | AGTCCCTTT | 22386 | AGGCTGTGCTGACCATCGACGTTTTAGAGCTA | 23196 |
| ScaCas9++_ | TGCTGA | | GCACAGCC | | CTcGTC | | GAAATAGCAAGTTAAAATAAGGCTAGTCCGTT | |
| SpRY_ | CCATCG | | T | | | | ATCAACTTGAAAAAGTGGCACCGAGTCGGTGC | |
| ED3- | AC | | | | | | AGTCCCTTTCTcGTCGATGGTCAGCACAGCCT | |
| _11FE_ | | | | | | | | |
| PB17 | | | | | | | | |
| pU6_A1AT_ | AGGCTG | 20767 | GATGGTCA | 21577 | AGTCCCTTT | 22387 | AGGCTGTGCTGACCATCGACGTTTTAGAGCTA | 23197 |
| ScaCas9++_ | TGCTGA | | GCACAGCC | | CTcGTC | | GAAATAGCAAGTTAAAATAAGGCTAGTCCGTT | |
| SpRY_ | CCATCG | | | | | | ATCAACTTGAAAAAGTGGCACCGAGTCGGTGC | |
| ED3- | AC | | | | | | AGTCCCTTTCTcGTCGATGGTCAGCACAGCC | |
| _11FE_ | | | | | | | | |
| PB16 | | | | | | | | |
| pU6_A1AT_ | AGGCTG | 20768 | GATGGTCA | 21578 | AGTCCCTTT | 22388 | AGGCTGTGCTGACCATCGACGTTTTAGAGCTA | 23198 |
| ScaCas9++_ | TGCTGA | | GCACAGC | | CTcGTC | | GAAATAGCAAGTTAAAATAAGGCTAGTCCGTT | |
| SpRY_ | CCATCG | | | | | | ATCAACTTGAAAAAGTGGCACCGAGTCGGTGC | |
| ED3- | AC | | | | | | AGTCCCTTTCTcGTCGATGGTCAGCACAGC | |
| _11FE_ | | | | | | | | |
| PB15 | | | | | | | | |
| pU6_A1AT_ | AGGCTG | 20769 | GATGGTCA | 21579 | AGTCCCTTT | 22389 | AGGCTGTGCTGACCATCGACGTTTTAGAGCTA | 23199 |
| ScaCas9++_ | TGCTGA | | GCACAG | | CTcGTC | | GAAATAGCAAGTTAAAATAAGGCTAGTCCGTT | |
| SpRY_ | CCATCG | | | | | | ATCAACTTGAAAAAGTGGCACCGAGTCGGTGC | |
| ED3- | AC | | | | | | AGTCCCTTTCTcGTCGATGGTCAGCACAG | |
| _11FE_ | | | | | | | | |
| PB14 | | | | | | | | |
| pU6_A1AT_ | AGGCTG | 20770 | GATGGTCA | 21580 | AGTCCCTTT | 22390 | AGGCTGTGCTGACCATCGACGTTTTAGAGCTA | 23200 |
| ScaCas9++_ | TGCTGA | | GCACA | | CTcGTC | | GAAATAGCAAGTTAAAATAAGGCTAGTCCGTT | |
| SpRY_ | CCATCG | | | | | | ATCAACTTGAAAAAGTGGCACCGAGTCGGTGC | |
| ED3- | AC | | | | | | AGTCCCTTTCTcGTCGATGGTCAGCACA | |
| _11FE_ | | | | | | | | |
| PB13 | | | | | | | | |
| pU6_A1AT_ | AGGCTG | 20771 | GATGGTCA | 21581 | AGTCCCTTT | 22391 | AGGCTGTGCTGACCATCGACGTTTTAGAGCTA | 23201 |
| ScaCas9++_ | TGCTGA | | GCAC | | CTcGTC | | GAAATAGCAAGTTAAAATAAGGCTAGTCCGTT | |
| SpRY_ | CCATCG | | | | | | ATCAACTTGAAAAAGTGGCACCGAGTCGGTGC | |
| ED3- | AC | | | | | | AGTCCCTTTCTcGTCGATGGTCAGCAC | |
| _11FE_ | | | | | | | | |
| PB12 | | | | | | | | |
| pU6_A1AT_ | AGGCTG | 20772 | GATGGTCA | 21582 | AGTCCCTTT | 22392 | AGGCTGTGCTGACCATCGACGTTTTAGAGCTA | 23202 |
| ScaCas9++_ | TGCTGA | | GCA | | CTcGTC | | GAAATAGCAAGTTAAAATAAGGCTAGTCCGTT | |
| SpRY_ | CCATCG | | | | | | ATCAACTTGAAAAAGTGGCACCGAGTCGGTGC | |
| ED3- | AC | | | | | | AGTCCCTTTCTcGTCGATGGTCAGCA | |
| _11FE_ | | | | | | | | |
| PB11 | | | | | | | | |
| pU6_A1AT_ | AGGCTG | 20773 | GATGGTCA | 21583 | AGTCCCTTT | 22393 | AGGCTGTGCTGACCATCGACGTTTTAGAGCTA | 23203 |
| ScaCas9++_ | TGCTGA | | GC | | CTcGTC | | GAAATAGCAAGTTAAAATAAGGCTAGTCCGTT | |
| SpRY_ | CCATCG | | | | | | ATCAACTTGAAAAAGTGGCACCGAGTCGGTGC | |
| ED3- | AC | | | | | | AGTCCCTTTCTcGTCGATGGTCAGC | |
| _11FE_ | | | | | | | | |
| PB10 | | | | | | | | |
| pU6_A1AT_ | AGGCTG | 20774 | GATGGTCA | | AGTCCCTTT | 22394 | AGGCTGTGCTGACCATCGACGTTTTAGAGCTA | 23204 |
| ScaCas9++_ | TGCTGA | | G | | CTcGTC | | GAAATAGCAAGTTAAAATAAGGCTAGTCCGTT | |
| SpRY_ | CCATCG | | | | | | ATCAACTTGAAAAAGTGGCACCGAGTCGGTGC | |
| ED3- | AC | | | | | | AGTCCCTTTCTcGTCGATGGTCAG | |
| _11FE_ | | | | | | | | |
| PB9 | | | | | | | | |
| pU6_A1AT_ | AGGCTG | 20775 | GATGGTCA | | AGTCCCTTT | 22395 | AGGCTGTGCTGACCATCGACGTTTTAGAGCTA | 23205 |
| ScaCas9++_ | TGCTGA | | | | CTcGTC | | GAAATAGCAAGTTAAAATAAGGCTAGTCCGTT | |
| SpRY_ | CCATCG | | | | | | ATCAACTTGAAAAAGTGGCACCGAGTCGGTGC | |
| ED3- | AC | | | | | | AGTCCCTTTCTcGTCGATGGTCA | |
| _11FE_ | | | | | | | | |
| PB8 | | | | | | | | |
| pU6_A1AT_ | AGGCTG | 20776 | GATGGTCA | 21586 | TCCCTTTCTc | 22396 | AGGCTGTGCTGACCATCGACGTTTTAGAGCTA | 23206 |
| ScaCas9++_ | TGCTGA | | GCACAGCC | | GTC | | GAAATAGCAAGTTAAAATAAGGCTAGTCCGTT | |
| SpRY_ | CCATCG | | T | | | | ATCAACTTGAAAAAGTGGCACCGAGTCGGTGC | |
| ED3- | AC | | | | | | TCCCTTTCTcGTCGATGGTCAGCACAGCCT | |
| _9FE_ | | | | | | | | |
| PB17 | | | | | | | | |
| pU6_A1AT_ | AGGCTG | 20777 | GATGGTCA | 21587 | TCCCTTTCTc | 22397 | AGGCTGTGCTGACCATCGACGTTTTAGAGCTA | 23207 |
| ScaCas9++_ | TGCTGA | | GCACAGCC | | GTC | | GAAATAGCAAGTTAAAATAAGGCTAGTCCGTT | |
| SpRY_ | CCATCG | | | | | | ATCAACTTGAAAAAGTGGCACCGAGTCGGTGC | |
| ED3- | AC | | | | | | TCCCTTTCTcGTCGATGGTCAGCACAGCC | |
| _9FE_ | | | | | | | | |
| PB16 | | | | | | | | |
| pU6_A1AT_ | AGGCTG | 20778 | GATGGTCA | 21588 | TCCCTTTCTc | 22398 | AGGCTGTGCTGACCATCGACGTTTTAGAGCTA | 23208 |
| ScaCas9++_ | TGCTGA | | GCACAGC | | GTC | | GAAATAGCAAGTTAAAATAAGGCTAGTCCGTT | |
| SpRY_ | CCATCG | | | | | | ATCAACTTGAAAAAGTGGCACCGAGTCGGTGC | |
| ED3- | AC | | | | | | TCCCTTTCTcGTCGATGGTCAGCACAGC | |
| _9FE_ | | | | | | | | |
| PB15 | | | | | | | | |
| pU6_A1AT_ | AGGCTG | 20779 | GATGGTCA | 21589 | TCCCTTTCTc | 22399 | AGGCTGTGCTGACCATCGACGTTTTAGAGCTA | 23209 |
| ScaCas9++_ | TGCTGA | | GCACAG | | GTC | | GAAATAGCAAGTTAAAATAAGGCTAGTCCGTT | |
| SpRY_ | CCATCG | | | | | | ATCAACTTGAAAAAGTGGCACCGAGTCGGTGC | |
| ED3- | AC | | | | | | TCCCTTTCTcGTCGATGGTCAGCACAG | |
| _9FE_ | | | | | | | | |
| PB14 | | | | | | | | |
| pU6_A1AT_ | AGGCTG | 20780 | GATGGTCA | 21590 | TCCCTTTCTc | 22400 | AGGCTGTGCTGACCATCGACGTTTTAGAGCTA | 23210 |
| ScaCas9++_ | TGCTGA | | GCACA | | GTC | | GAAATAGCAAGTTAAAATAAGGCTAGTCCGTT | |
| SpRY_ | CCATCG | | | | | | ATCAACTTGAAAAAGTGGCACCGAGTCGGTGC | |
| ED3- | AC | | | | | | TCCCTTTCTcGTCGATGGTCAGCACA | |
| _9FE_ | | | | | | | | |
| PB13 | | | | | | | | |
| pU6_A1AT_ | AGGCTG | 20781 | GATGGTCA | 21591 | TCCCTTTCTc | 22401 | AGGCTGTGCTGACCATCGACGTTTTAGAGCTA | 23211 |
| ScaCas9++_ | TGCTGA | | GCAC | | GTC | | GAAATAGCAAGTTAAAATAAGGCTAGTCCGTT | |
| SpRY_ | CCATCG | | | | | | ATCAACTTGAAAAAGTGGCACCGAGTCGGTGC | |
| ED3- | AC | | | | | | TCCCTTTCTcGTCGATGGTCAGCAC | |
| _9FE_ | | | | | | | | |
| PB12 | | | | | | | | |
| pU6_A1AT_ | AGGCTG | 20782 | GATGGTCA | 21592 | TCCCTTTCTC | 22402 | AGGCTGTGCTGACCATCGACGTTTTAGAGCTA | 23212 |
| ScaCas9++_ | TGCTGA | | GCA | | GTC | | GAAATAGCAAGTTAAAATAAGGCTAGTCCGTT | |
| SpRY_ | CCATCG | | | | | | ATCAACTTGAAAAAGTGGCACCGAGTCGGTGC | |
| ED3- | AC | | | | | | TCCCTTTCTcGTCGATGGTCAGCA | |
| _9FE_ | | | | | | | | |
| PB11 | | | | | | | | |
| pU6_A1AT_ | AGGCTG | 20783 | GATGGTCA | 21593 | TCCCTTTCTc | 22403 | AGGCTGTGCTGACCATCGACGTTTTAGAGCTA | 23213 |
| ScaCas9++_ | TGCTGA | | GC | | GTC | | GAAATAGCAAGTTAAAATAAGGCTAGTCCGTT | |
| SpRY_ | CCATCG | | | | | | ATCAACTTGAAAAAGTGGCACCGAGTCGGTGC | |
| ED3- | AC | | | | | | TCCCTTTCTcGTCGATGGTCAGC | |
| _9FE_ | | | | | | | | |
| PB10 | | | | | | | | |
| pU6_A1AT_ | AGGCTG | 20784 | GATGGTCA | | TCCCTTTCTc | 22404 | AGGCTGTGCTGACCATCGACGTTTTAGAGCTA | 23214 |
| ScaCas9++_ | TGCTGA | | G | | GTC | | GAAATAGCAAGTTAAAATAAGGCTAGTCCGTT | |
| SpRY_ | CCATCG | | | | | | ATCAACTTGAAAAAGTGGCACCGAGTCGGTGC | |
| ED3- | AC | | | | | | TCCCTTTCTcGTCGATGGTCAG | |
| _9FE_ | | | | | | | | |
| PB9 | | | | | | | | |
| pU6_A1AT_ | AGGCTG | 20785 | GATGGTCA | | TCCCTTTCTC | 22405 | AGGCTGTGCTGACCATCGACGTTTTAGAGCTA | 23215 |
| ScaCas9++_ | TGCTGA | | | | GTC | | GAAATAGCAAGTTAAAATAAGGCTAGTCCGTT | |
| SpRY_ | CCATCG | | | | | | ATCAACTTGAAAAAGTGGCACCGAGTCGGTGC | |
| ED3- | AC | | | | | | TCCCTTTCTcGTCGATGGTCA | |
| _9FE_ | | | | | | | | |
| PB8 | | | | | | | | |
| pU6_A1AT_ | AGGCTG | 20786 | GATGGTCA | 21596 | CCTTTCTcGT | 22406 | AGGCTGTGCTGACCATCGACGTTTTAGAGCTA | 23216 |
| ScaCas9++_ | TGCTGA | | GCACAGCC | | C | | GAAATAGCAAGTTAAAATAAGGCTAGTCCGTT | |
| SpRY_ | CCATCG | | T | | | | ATCAACTTGAAAAAGTGGCACCGAGTCGGTGC | |
| ED3- | AC | | | | | | CCTTTCTcGTCGATGGTCAGCACAGCCT | |
| _7FE_ | | | | | | | | |
| PB17 | | | | | | | | |
| pU6_A1AT_ | AGGCTG | 20787 | GATGGTCA | 21597 | CCTTTCTcGT | 22407 | AGGCTGTGCTGACCATCGACGTTTTAGAGCTA | 23217 |
| ScaCas9++_ | TGCTGA | | GCACAGCC | | C | | GAAATAGCAAGTTAAAATAAGGCTAGTCCGTT | |
| SpRY_ | CCATCG | | | | | | ATCAACTTGAAAAAGTGGCACCGAGTCGGTGC | |
| ED3- | AC | | | | | | CCTTTCTcGTCGATGGTCAGCACAGCC | |
| _7FE_ | | | | | | | | |
| PB16 | | | | | | | | |
| pU6_A1AT_ | AGGCTG | 20788 | GATGGTCA | 21598 | CCTTTCTcGT | 22408 | AGGCTGTGCTGACCATCGACGTTTTAGAGCTA | 23218 |
| ScaCas9++_ | TGCTGA | | GCACAGC | | C | | GAAATAGCAAGTTAAAATAAGGCTAGTCCGTT | |
| SpRY_ | CCATCG | | | | | | ATCAACTTGAAAAAGTGGCACCGAGTCGGTGC | |
| ED3- | AC | | | | | | CCTTTCTcGTCGATGGTCAGCACAGC | |
| _7FE_ | | | | | | | | |
| PB15 | | | | | | | | |
| pU6_A1AT_ | AGGCTG | 20789 | GATGGTCA | 21599 | CCTTTCTCGT | 22409 | AGGCTGTGCTGACCATCGACGTTTTAGAGCTA | 23219 |
| ScaCas9++_ | TGCTGA | | GCACAG | | C | | GAAATAGCAAGTTAAAATAAGGCTAGTCCGTT | |
| SpRY_ | CCATCG | | | | | | ATCAACTTGAAAAAGTGGCACCGAGTCGGTGC | |
| ED3- | AC | | | | | | CCTTTCTcGTCGATGGTCAGCACAG | |
| _7FE_ | | | | | | | | |
| PB14 | | | | | | | | |
| pU6_A1AT_ | AGGCTG | 20790 | GATGGTCA | 21600 | CCTTTCTcGT | 22410 | AGGCTGTGCTGACCATCGACGTTTTAGAGCTA | 23220 |
| ScaCas9++_ | TGCTGA | | GCACA | | C | | GAAATAGCAAGTTAAAATAAGGCTAGTCCGTT | |
| SpRY_ | CCATCG | | | | | | ATCAACTTGAAAAAGTGGCACCGAGTCGGTGC | |
| ED3- | AC | | | | | | CCTTTCTcGTCGATGGTCAGCACA | |
| _7FE_ | | | | | | | | |
| PB13 | | | | | | | | |
| pU6_A1AT_ | AGGCTG | 20791 | GATGGTCA | 21601 | CCTTTCTcGT | 22411 | AGGCTGTGCTGACCATCGACGTTTTAGAGCTA | 23221 |
| ScaCas9++_ | TGCTGA | | GCAC | | C | | GAAATAGCAAGTTAAAATAAGGCTAGTCCGTT | |
| SpRY_ | CCATCG | | | | | | ATCAACTTGAAAAAGTGGCACCGAGTCGGTGC | |
| ED3- | AC | | | | | | CCTTTCTcGTCGATGGTCAGCAC | |
| _7FE_ | | | | | | | | |
| PB12 | | | | | | | | |
| pU6_A1AT_ | AGGCTG | 20792 | GATGGTCA | 21602 | CCTTTCTcGT | 22412 | AGGCTGTGCTGACCATCGACGTTTTAGAGCTA | 23222 |
| ScaCas9++_ | TGCTGA | | GCA | | C | | GAAATAGCAAGTTAAAATAAGGCTAGTCCGTT | |
| SpRY_ | CCATCG | | | | | | ATCAACTTGAAAAAGTGGCACCGAGTCGGTGC | |
| ED3- | AC | | | | | | CCTTTCTcGTCGATGGTCAGCA | |
| _7FE_ | | | | | | | | |
| PB11 | | | | | | | | |
| pU6_A1AT_ | AGGCTG | 20793 | GATGGTCA | 21603 | CCTTTCTcGT | 22413 | AGGCTGTGCTGACCATCGACGTTTTAGAGCTA | 23223 |
| ScaCas9++_ | TGCTGA | | GC | | C | | GAAATAGCAAGTTAAAATAAGGCTAGTCCGTT | |
| SpRY_ | CCATCG | | | | | | ATCAACTTGAAAAAGTGGCACCGAGTCGGTGC | |
| ED3- | AC | | | | | | CCTTTCTcGTCGATGGTCAGC | |
| _7FE_ | | | | | | | | |
| PB10 | | | | | | | | |
| pU6_A1AT_ | AGGCTG | 20794 | GATGGTCA | | CCTTTCTcGT | 22414 | AGGCTGTGCTGACCATCGACGTTTTAGAGCTA | 23224 |
| ScaCas9++_ | TGCTGA | | G | | C | | GAAATAGCAAGTTAAAATAAGGCTAGTCCGTT | |
| SpRY_ | CCATCG | | | | | | ATCAACTTGAAAAAGTGGCACCGAGTCGGTGC | |
| ED3- | AC | | | | | | CCTTTCTcGTCGATGGTCAG | |
| _7FE_ | | | | | | | | |
| PB9 | | | | | | | | |
| pU6_A1AT_ | AGGCTG | 20795 | GATGGTCA | | CCTTTCTcGT | 22415 | AGGCTGTGCTGACCATCGACGTTTTAGAGCTA | 23225 |
| ScaCas9++_ | TGCTGA | | | | C | | GAAATAGCAAGTTAAAATAAGGCTAGTCCGTT | |
| SpRY_ | CCATCG | | | | | | ATCAACTTGAAAAAGTGGCACCGAGTCGGTGC | |
| ED3- | AC | | | | | | CCTTTCTcGTCGATGGTCA | |
| _7FE_ | | | | | | | | |
| PB8 | | | | | | | | |
| pU6_A1AT_ | AGGCTG | 20796 | GATGGTCA | 21606 | TTTCTcGTC | | AGGCTGTGCTGACCATCGACGTTTTAGAGCTA | 23226 |
| ScaCas9++_ | TGCTGA | | GCACAGCC | | | | GAAATAGCAAGTTAAAATAAGGCTAGTCCGTT | |
| SpRY_ | CCATCG | | T | | | | ATCAACTTGAAAAAGTGGCACCGAGTCGGTGC | |
| ED3- | AC | | | | | | TTTCTCGTCGATGGTCAGCACAGCCT | |
| _5FE_ | | | | | | | | |
| PB17 | | | | | | | | |
| pU6_A1AT_ | AGGCTG | 20797 | GATGGTCA | 21607 | TTTCTcGTC | | AGGCTGTGCTGACCATCGACGTTTTAGAGCTA | 23227 |
| ScaCas9++_ | TGCTGA | | GCACAGCC | | | | GAAATAGCAAGTTAAAATAAGGCTAGTCCGTT | |
| SpRY_ | CCATCG | | | | | | ATCAACTTGAAAAAGTGGCACCGAGTCGGTGC | |
| ED3- | AC | | | | | | TTTCTCGTCGATGGTCAGCACAGCC | |
| _5FE_ | | | | | | | | |
| PB16 | | | | | | | | |
| pU6_A1AT_ | AGGCTG | 20798 | GATGGTCA | 21608 | TTTCTcGTC | | AGGCTGTGCTGACCATCGACGTTTTAGAGCTA | 23228 |
| ScaCas9++_ | TGCTGA | | GCACAGC | | | | GAAATAGCAAGTTAAAATAAGGCTAGTCCGTT | |
| SpRY_ | CCATCG | | | | | | ATCAACTTGAAAAAGTGGCACCGAGTCGGTGC | |
| ED3- | AC | | | | | | TTTCTCGTCGATGGTCAGCACAGC | |
| _5FE_ | | | | | | | | |
| PB15 | | | | | | | | |
| pU6_A1AT_ | AGGCTG | 20799 | GATGGTCA | 21609 | TTTCTCGTC | | AGGCTGTGCTGACCATCGACGTTTTAGAGCTA | 23229 |
| ScaCas9++_ | TGCTGA | | GCACAG | | | | GAAATAGCAAGTTAAAATAAGGCTAGTCCGTT | |
| SpRY_ | CCATCG | | | | | | ATCAACTTGAAAAAGTGGCACCGAGTCGGTGC | |
| ED3- | AC | | | | | | TTTCTCGTCGATGGTCAGCACAG | |
| _5FE_ | | | | | | | | |
| PB14 | | | | | | | | |
| pU6_A1AT_ | AGGCTG | 20800 | GATGGTCA | 21610 | TTTCTcGTC | | AGGCTGTGCTGACCATCGACGTTTTAGAGCTA | 23230 |
| ScaCas9++_ | TGCTGA | | GCACA | | | | GAAATAGCAAGTTAAAATAAGGCTAGTCCGTT | |
| SpRY_ | CCATCG | | | | | | ATCAACTTGAAAAAGTGGCACCGAGTCGGTGC | |
| ED3- | AC | | | | | | TTTCTcGTCGATGGTCAGCACA | |
| _5FE_ | | | | | | | | |
| PB13 | | | | | | | | |
| pU6_A1AT_ | AGGCTG | 20801 | GATGGTCA | 21611 | TTTCTCGTC | | AGGCTGTGCTGACCATCGACGTTTTAGAGCTA | 23231 |
| ScaCas9++_ | TGCTGA | | GCAC | | | | GAAATAGCAAGTTAAAATAAGGCTAGTCCGTT | |
| SpRY_ | CCATCG | | | | | | ATCAACTTGAAAAAGTGGCACCGAGTCGGTGC | |
| ED3- | AC | | | | | | TTTCTCGTCGATGGTCAGCAC | |
| _5FE_ | | | | | | | | |
| PB12 | | | | | | | | |
| pU6_A1AT_ | AGGCTG | 20802 | GATGGTCA | 21612 | TTTCTcGTC | | AGGCTGTGCTGACCATCGACGTTTTAGAGCTA | 23232 |
| ScaCas9++_ | TGCTGA | | GCA | | | | GAAATAGCAAGTTAAAATAAGGCTAGTCCGTT | |
| SpRY_E | CCATCG | | | | | | ATCAACTTGAAAAAGTGGCACCGAGTCGGTGC | |
| D3- | AC | | | | | | TTTCTCGTCGATGGTCAGCA | |
| _5FE_ | | | | | | | | |
| PB11 | | | | | | | | |
| pU6_A1AT_ | AGGCTG | 20803 | GATGGTCA | 21613 | TTTCTcGTC | | AGGCTGTGCTGACCATCGACGTTTTAGAGCTA | 23233 |
| ScaCas9++_ | TGCTGA | | GC | | | | GAAATAGCAAGTTAAAATAAGGCTAGTCCGTT | |
| SpRY_ | CCATCG | | | | | | ATCAACTTGAAAAAGTGGCACCGAGTCGGTGC | |
| ED3- | AC | | | | | | TTTCTcGTCGATGGTCAGC | |
| _5FE_ | | | | | | | | |
| PB10 | | | | | | | | |
| pU6_A1AT_ | AGGCTG | 20804 | GATGGTCA | | TTTCTCGTC | | AGGCTGTGCTGACCATCGACGTTTTAGAGCTA | 23234 |
| ScaCas9++_ | TGCTGA | | G | | | | GAAATAGCAAGTTAAAATAAGGCTAGTCCGTT | |
| SpRY_ | CCATCG | | | | | | ATCAACTTGAAAAAGTGGCACCGAGTCGGTGC | |
| ED3- | AC | | | | | | TTTCTcGTCGATGGTCAG | |
| _5FE_ | | | | | | | | |
| PB9 | | | | | | | | |
| pU6_A1AT_ | AGGCTG | 20805 | GATGGTCA | | TTTCTcGTC | | AGGCTGTGCTGACCATCGACGTTTTAGAGCTA | 23235 |
| ScaCas9++_ | TGCTGA | | | | | | GAAATAGCAAGTTAAAATAAGGCTAGTCCGTT | |
| SpRY_ | CCATCG | | | | | | ATCAACTTGAAAAAGTGGCACCGAGTCGGTGC | |
| ED3- | AC | | | | | | TTTCTCGTCGATGGTCA | |
| _5FE_ | | | | | | | | |
| PB8 | | | | | | | | |
| pU6_A1AT_ | AGGCTG | 20806 | GATGGTCA | 21616 | TCTcGTC | | AGGCTGTGCTGACCATCGACGTTTTAGAGCTA | 23236 |
| ScaCas9++_ | TGCTGA | | GCACAGCC | | | | GAAATAGCAAGTTAAAATAAGGCTAGTCCGTT | |
| SpRY_ | CCATCG | | T | | | | ATCAACTTGAAAAAGTGGCACCGAGTCGGTGC | |
| ED3- | AC | | | | | | TCTcGTCGATGGTCAGCACAGCCT | |
| _3FE_ | | | | | | | | |
| PB17 | | | | | | | | |
| pU6_A1AT_ | AGGCTG | 20807 | GATGGTCA | 21617 | TCTcGTC | | AGGCTGTGCTGACCATCGACGTTTTAGAGCTA | 23237 |
| ScaCas9++_ | TGCTGA | | GCACAGCC | | | | GAAATAGCAAGTTAAAATAAGGCTAGTCCGTT | |
| SpRY_ | CCATCG | | | | | | ATCAACTTGAAAAAGTGGCACCGAGTCGGTGC | |
| ED3- | AC | | | | | | TCTcGTCGATGGTCAGCACAGCC | |
| _3FE_ | | | | | | | | |
| PB16 | | | | | | | | |
| pU6_A1AT_ | AGGCTG | 20808 | GATGGTCA | 21618 | TCTcGTC | | AGGCTGTGCTGACCATCGACGTTTTAGAGCTA | 23238 |
| ScaCas9++_ | TGCTGA | | GCACAGC | | | | GAAATAGCAAGTTAAAATAAGGCTAGTCCGTT | |
| SpRY_ | CCATCG | | | | | | ATCAACTTGAAAAAGTGGCACCGAGTCGGTGC | |
| ED3- | AC | | | | | | TCTcGTCGATGGTCAGCACAGC | |
| _3FE_ | | | | | | | | |
| PB15 | | | | | | | | |
| pU6_A1AT_ | AGGCTG | 20809 | GATGGTCA | 21619 | TCTcGTC | | AGGCTGTGCTGACCATCGACGTTTTAGAGCTA | 23239 |
| ScaCas9++_ | TGCTGA | | GCACAG | | | | GAAATAGCAAGTTAAAATAAGGCTAGTCCGTT | |
| SpRY_ | CCATCG | | | | | | ATCAACTTGAAAAAGTGGCACCGAGTCGGTGC | |
| ED3- | AC | | | | | | TCTcGTCGATGGTCAGCACAG | |
| _3FE_ | | | | | | | | |
| PB14 | | | | | | | | |
| pU6_A1AT_ | AGGCTG | 20810 | GATGGTCA | 21620 | TCTcGTC | | AGGCTGTGCTGACCATCGACGTTTTAGAGCTA | 23240 |
| ScaCas9++_ | TGCTGA | | GCACA | | | | GAAATAGCAAGTTAAAATAAGGCTAGTCCGTT | |
| SpRY_ | CCATCG | | | | | | ATCAACTTGAAAAAGTGGCACCGAGTCGGTGC | |
| ED3- | AC | | | | | | TCTcGTCGATGGTCAGCACA | |
| _3FE_ | | | | | | | | |
| PB13 | | | | | | | | |
| pU6_A1AT_ | AGGCTG | 20811 | GATGGTCA | 21621 | TCTcGTC | | AGGCTGTGCTGACCATCGACGTTTTAGAGCTA | 23241 |
| ScaCas9++_ | TGCTGA | | GCAC | | | | GAAATAGCAAGTTAAAATAAGGCTAGTCCGTT | |
| SpRY_ | CCATCG | | | | | | ATCAACTTGAAAAAGTGGCACCGAGTCGGTGC | |
| ED3- | AC | | | | | | TCTcGTCGATGGTCAGCAC | |
| _3FE_ | | | | | | | | |
| PB12 | | | | | | | | |
| pU6_A1AT_ | AGGCTG | 20812 | GATGGTCA | 21622 | TCTcGTC | | AGGCTGTGCTGACCATCGACGTTTTAGAGCTA | 23242 |
| ScaCas9++_ | TGCTGA | | GCA | | | | GAAATAGCAAGTTAAAATAAGGCTAGTCCGTT | |
| SpRY_ | CCATCG | | | | | | ATCAACTTGAAAAAGTGGCACCGAGTCGGTGC | |
| ED3- | AC | | | | | | TCTcGTCGATGGTCAGCA | |
| _3FE_ | | | | | | | | |
| PB11 | | | | | | | | |
| pU6_A1AT_ | AGGCTG | 20813 | GATGGTCA | 21623 | TCTcGTC | | AGGCTGTGCTGACCATCGACGTTTTAGAGCTA | 23243 |
| ScaCas9++_ | TGCTGA | | GC | | | | GAAATAGCAAGTTAAAATAAGGCTAGTCCGTT | |
| SpRY_ | CCATCG | | | | | | ATCAACTTGAAAAAGTGGCACCGAGTCGGTGC | |
| ED3- | AC | | | | | | TCTcGTCGATGGTCAGC | |
| _3FE_ | | | | | | | | |
| PB10 | | | | | | | | |
| pU6_A1AT_ | AGGCTG | 20814 | GATGGTCA | | TCTcGTC | | AGGCTGTGCTGACCATCGACGTTTTAGAGCTA | 23244 |
| ScaCas9++_ | TGCTGA | | G | | | | GAAATAGCAAGTTAAAATAAGGCTAGTCCGTT | |
| SpRY_ | CCATCG | | | | | | ATCAACTTGAAAAAGTGGCACCGAGTCGGTGC | |
| ED3- | AC | | | | | | TCTcGTCGATGGTCAG | |
| _3FE_ | | | | | | | | |
| PB9 | | | | | | | | |
| pU6_A1AT_ | AGGCTG | 20815 | GATGGTCA | | TCTcGTC | | AGGCTGTGCTGACCATCGACGTTTTAGAGCTA | 23245 |
| ScaCas9++_ | TGCTGA | | | | | | GAAATAGCAAGTTAAAATAAGGCTAGTCCGTT | |
| SpRY_ | CCATCG | | | | | | ATCAACTTGAAAAAGTGGCACCGAGTCGGTGC | |
| ED3- | AC | | | | | | TCTcGTCGATGGTCA | |
| _3FE_ | | | | | | | | |
| PB8 | | | | | | | | |
| pU6_A1AT_ | AAGGCT | 20816 | ATGGTCAG | 21626 | ACATGGCCC | 22436 | AAGGCTGTGCTGACCATCGAGTCTTTGTACTCT | 23246 |
| St1_ | GTGCTG | | CACAGCCT | | CAGCAGCTT | | GGTACCAGAAGCTACAAAGATAAGGCTTCATG | |
| ED4- | ACCATC | | T | | CAGTCCCTT | | CCGAAATCAACACCCTGTCATTTTATGGCAGG | |
| _G_30FE_ | GA | | | | TCTcGTCG | | GTGTTTTACATGGCCCCAGCAGCTTCAGTCCCT | |
| PB17 | | | | | | | TTCTcGTCGATGGTCAGCACAGCCTT | |
| pU6_A1AT_ | AAGGCT | 20817 | ATGGTCAG | 21627 | ACATGGCCC | 22437 | AAGGCTGTGCTGACCATCGAGTCTTTGTACTCT | 23247 |
| St1_ | GTGCTG | | CACAGCCT | | CAGCAGCTT | | GGTACCAGAAGCTACAAAGATAAGGCTTCATG | |
| ED4- | ACCATC | | | | CAGTCCCTT | | CCGAAATCAACACCCTGTCATTTTATGGCAGG | |
| _G_30FE_ | GA | | | | TCTcGTCG | | GTGTTTTACATGGCCCCAGCAGCTTCAGTCCCT | |
| PB16 | | | | | | | TTCTcGTCGATGGTCAGCACAGCCT | |
| pU6_A1AT_ | AAGGCT | 20818 | ATGGTCAG | 21628 | ACATGGCCC | 22438 | AAGGCTGTGCTGACCATCGAGTCTTTGTACTCT | 23248 |
| St1_ | GTGCTG | | CACAGCC | | CAGCAGCTT | | GGTACCAGAAGCTACAAAGATAAGGCTTCATG | |
| ED4- | ACCATC | | | | CAGTCCCTT | | CCGAAATCAACACCCTGTCATTTTATGGCAGG | |
| _G_30FE_ | GA | | | | TCTcGTCG | | GTGTTTTACATGGCCCCAGCAGCTTCAGTCCCT | |
| PB15 | | | | | | | TTCTcGTCGATGGTCAGCACAGCC | |
| pU6_A1AT_ | AAGGCT | 20819 | ATGGTCAG | 21629 | ACATGGCCC | 22439 | AAGGCTGTGCTGACCATCGAGTCTTTGTACTCT | 23249 |
| St1_ | GTGCTG | | CACAGC | | CAGCAGCTT | | GGTACCAGAAGCTACAAAGATAAGGCTTCATG | |
| ED4- | ACCATC | | | | CAGTCCCTT | | CCGAAATCAACACCCTGTCATTTTATGGCAGG | |
| _G_30FE_ | GA | | | | TCTcGTCG | | GTGTTTTACATGGCCCCAGCAGCTTCAGTCCCT | |
| PB14 | | | | | | | TTCTcGTCGATGGTCAGCACAGC | |
| pU6_A1AT_ | AAGGCT | 20820 | ATGGTCAG | 21630 | ACATGGCCC | 22440 | AAGGCTGTGCTGACCATCGAGTCTTTGTACTCT | 23250 |
| St1_ | GTGCTG | | CACAG | | CAGCAGCTT | | GGTACCAGAAGCTACAAAGATAAGGCTTCATG | |
| ED4- | ACCATC | | | | CAGTCCCTT | | CCGAAATCAACACCCTGTCATTTTATGGCAGG | |
| _G_30FE_ | GA | | | | TCTcGTCG | | GTGTTTTACATGGCCCCAGCAGCTTCAGTCCCT | |
| PB13 | | | | | | | TTCTcGTCGATGGTCAGCACAG | |
| pU6_A1AT_ | AAGGCT | 20821 | ATGGTCAG | 21631 | ACATGGCCC | 22441 | AAGGCTGTGCTGACCATCGAGTCTTTGTACTCT | 23251 |
| St1_ | GTGCTG | | CACA | | CAGCAGCTT | | GGTACCAGAAGCTACAAAGATAAGGCTTCATG | |
| ED4- | ACCATC | | | | CAGTCCCTT | | CCGAAATCAACACCCTGTCATTTTATGGCAGG | |
| _G_30FE_ | GA | | | | TCTcGTCG | | GTGTTTTACATGGCCCCAGCAGCTTCAGTCCCT | |
| PB12 | | | | | | | TTCTcGTCGATGGTCAGCACA | |
| pU6_A1AT_ | AAGGCT | 20822 | ATGGTCAG | 21632 | ACATGGCCC | 22442 | AAGGCTGTGCTGACCATCGAGTCTTTGTACTCT | 23252 |
| St1_ | GTGCTG | | CAC | | CAGCAGCTT | | GGTACCAGAAGCTACAAAGATAAGGCTTCATG | |
| ED4- | ACCATC | | | | CAGTCCCTT | | CCGAAATCAACACCCTGTCATTTTATGGCAGG | |
| _G_30FE_ | GA | | | | TCTcGTCG | | GTGTTTTACATGGCCCCAGCAGCTTCAGTCCCT | |
| PB11 | | | | | | | TTCTcGTCGATGGTCAGCAC | |
| pU6_A1AT_ | AAGGCT | 20823 | ATGGTCAG | 21633 | ACATGGCCC | 22443 | AAGGCTGTGCTGACCATCGAGTCTTTGTACTCT | 23253 |
| St1_ | GTGCTG | | CA | | CAGCAGCTT | | GGTACCAGAAGCTACAAAGATAAGGCTTCATG | |
| ED4- | ACCATC | | | | CAGTCCCTT | | CCGAAATCAACACCCTGTCATTTTATGGCAGG | |
| _G_30FE_ | GA | | | | TCTcGTCG | | GTGTTTTACATGGCCCCAGCAGCTTCAGTCCCT | |
| PB10 | | | | | | | TTCTcGTCGATGGTCAGCA | |
| pU6_A1 | AAGGCT | 20824 | ATGGTCAG | | ACATGGCCC | 22444 | AAGGCTGTGCTGACCATCGAGTCTTTGTACTCT | 23254 |
| AT_St1 | GTGCTG | | C | | CAGCAGCTT | | GGTACCAGAAGCTACAAAGATAAGGCTTCATG | |
| ED4- | ACCATC | | | | CAGTCCCTT | | CCGAAATCAACACCCTGTCATTTTATGGCAGG | |
| G_30F | GA | | | | TCTcGTCG | | GTGTTTTACATGGCCCCAGCAGCTTCAGTCCCT | |
| E PB9 | | | | | | | TTCTcGTCGATGGTCAGC | |
| pU6_A1 | AAGGCT | 20825 | ATGGTCAG | | ACATGGCCC | 22445 | AAGGCTGTGCTGACCATCGAGTCTTTGTACTCT | 23255 |
| AT_St1 | GTGCTG | | | | CAGCAGCTT | | GGTACCAGAAGCTACAAAGATAAGGCTTCATG | |
| ED4- | ACCATC | | | | CAGTCCCTT | | CCGAAATCAACACCCTGTCATTTTATGGCAGG | |
| _G_30F | GA | | | | TCTcGTCG | | GTGTTTTACATGGCCCCAGCAGCTTCAGTCCCT | |
| E PB8 | | | | | | | TTCTcGTCGATGGTCAG | |
| pU6_A1AT_ | AAGGCT | 20826 | ATGGTCAG | 21636 | GCCCCAGCA | 22446 | AAGGCTGTGCTGACCATCGAGTCTTTGTACTCT | 23256 |
| St1_ | GTGCTG | | CACAGCCT | | GCTTCAGTC | | GGTACCAGAAGCTACAAAGATAAGGCTTCATG | |
| ED4- | ACCATC | | T | | CCTTTCTcGT | | CCGAAATCAACACCCTGTCATTTTATGGCAGG | |
| _G_25FE_ | GA | | | | CG | | GTGTTTTGCCCCAGCAGCTTCAGTCCCTTTCTc | |
| PB17 | | | | | | | GTCGATGGTCAGCACAGCCTT | |
| pU6_A1AT_ | AAGGCT | 20827 | ATGGTCAG | 21637 | GCCCCAGCA | 22447 | AAGGCTGTGCTGACCATCGAGTCTTTGTACTCT | 23257 |
| St1_ | GTGCTG | | CACAGCCT | | GCTTCAGTC | | GGTACCAGAAGCTACAAAGATAAGGCTTCATG | |
| ED4- | ACCATC | | | | CCTTTCTcGT | | CCGAAATCAACACCCTGTCATTTTATGGCAGG | |
| _G_25FE_ | GA | | | | CG | | GTGTTTTGCCCCAGCAGCTTCAGTCCCTTTCTc | |
| PB16 | | | | | | | GTCGATGGTCAGCACAGCCT | |
| pU6_A1AT_ | AAGGCT | 20828 | ATGGTCAG | 21638 | GCCCCAGCA | 22448 | AAGGCTGTGCTGACCATCGAGTCTTTGTACTCT | 23258 |
| St1_ | GTGCTG | | CACAGCC | | GCTTCAGTC | | GGTACCAGAAGCTACAAAGATAAGGCTTCATG | |
| ED4- | ACCATC | | | | CCTTTCTCGT | | CCGAAATCAACACCCTGTCATTTTATGGCAGG | |
| _G_25FE_ | GA | | | | CG | | GTGTTTTGCCCCAGCAGCTTCAGTCCCTTTCTc | |
| PB15 | | | | | | | GTCGATGGTCAGCACAGCC | |
| pU6_A1 | AAGGCT | 20829 | ATGGTCAG | 21639 | GCCCCAGCA | 22449 | AAGGCTGTGCTGACCATCGAGTCTTTGTACTCT | 23259 |
| AT_St1 | GTGCTG | | CACAGC | | GCTTCAGTC | | GGTACCAGAAGCTACAAAGATAAGGCTTCATG | |
| ED4- | ACCATC | | | | CCTTTCTcGT | | CCGAAATCAACACCCTGTCATTTTATGGCAGG | |
| _G_25F | GA | | | | CG | | GTGTTTTGCCCCAGCAGCTTCAGTCCCTTTCTc | |
| E_PB14 | | | | | | | GTCGATGGTCAGCACAGC | |
| pU6_A1AT_ | AAGGCT | 20830 | ATGGTCAG | 21640 | GCCCCAGCA | 22450 | AAGGCTGTGCTGACCATCGAGTCTTTGTACTCT | 23260 |
| _St1_ | GTGCTG | | CACAG | | GCTTCAGTC | | GGTACCAGAAGCTACAAAGATAAGGCTTCATG | |
| ED4- | ACCATC | | | | CCTTTCTcGT | | CCGAAATCAACACCCTGTCATTTTATGGCAGG | |
| G_25FE_ | GA | | | | CG | | GTGTTTTGCCCCAGCAGCTTCAGTCCCTTTCTc | |
| PB13 | | | | | | | GTCGATGGTCAGCACAG | |
| pU6_A1 | AAGGCT | 20831 | ATGGTCAG | 21641 | GCCCCAGCA | 22451 | AAGGCTGTGCTGACCATCGAGTCTTTGTACTCT | 23261 |
| AT_St1 | GTGCTG | | CACA | | GCTTCAGTC | | GGTACCAGAAGCTACAAAGATAAGGCTTCATG | |
| ED4- | ACCATC | | | | CCTTTCTCGT | | CCGAAATCAACACCCTGTCATTTTATGGCAGG | |
| _G_25FE_ | GA | | | | CG | | GTGTTTTGCCCCAGCAGCTTCAGTCCCTTTCTc | |
| PB12 | | | | | | | GTCGATGGTCAGCACA | |
| pU6_A1AT_ | AAGGCT | 20832 | ATGGTCAG | 21642 | GCCCCAGCA | 22452 | AAGGCTGTGCTGACCATCGAGTCTTTGTACTCT | 23262 |
| St1_ | GTGCTG | | CAC | | GCTTCAGTC | | GGTACCAGAAGCTACAAAGATAAGGCTTCATG | |
| ED4- | ACCATC | | | | CCTTTCTcGT | | CCGAAATCAACACCCTGTCATTTTATGGCAGG | |
| _G_25FE_ | GA | | | | CG | | GTGTTTTGCCCCAGCAGCTTCAGTCCCTTTCTc | |
| PB11 | | | | | | | GTCGATGGTCAGCAC | |
| pU6_A1 | AAGGCT | 20833 | ATGGTCAG | 21643 | GCCCCAGCA | 22453 | AAGGCTGTGCTGACCATCGAGTCTTTGTACTCT | 23263 |
| AT_St1 | GTGCTG | | CA | | GCTTCAGTC | | GGTACCAGAAGCTACAAAGATAAGGCTTCATG | |
| ED4- | ACCATC | | | | CCTTTCTcGT | | CCGAAATCAACACCCTGTCATTTTATGGCAGG | |
| _G_25F | GA | | | | CG | | GTGTTTTGCCCCAGCAGCTTCAGTCCCTTTCTc | |
| E_PB10 | | | | | | | GTCGATGGTCAGCA | |
| pU6_A1AT_ | AAGGCT | 20834 | ATGGTCAG | | GCCCCAGCA | 22454 | AAGGCTGTGCTGACCATCGAGTCTTTGTACTCT | 23264 |
| St1_ | GTGCTG | | C | | GCTTCAGTC | | GGTACCAGAAGCTACAAAGATAAGGCTTCATG | |
| ED4- | ACCATC | | | | CCTTTCTcGT | | CCGAAATCAACACCCTGTCATTTTATGGCAGG | |
| _G_25FE_ | GA | | | | CG | | GTGTTTTGCCCCAGCAGCTTCAGTCCCTTTCTc | |
| PB9 | | | | | | | GTCGATGGTCAGC | |
| pU6_A1AT_ | AAGGCT | 20835 | ATGGTCAG | | GCCCCAGCA | 22455 | AAGGCTGTGCTGACCATCGAGTCTTTGTACTCT | 23265 |
| St1_ | GTGCTG | | | | GCTTCAGTC | | GGTACCAGAAGCTACAAAGATAAGGCTTCATG | |
| ED4- | ACCATC | | | | CCTTTCTcGT | | CCGAAATCAACACCCTGTCATTTTATGGCAGG | |
| _G_25FE_ | GA | | | | CG | | GTGTTTTGCCCCAGCAGCTTCAGTCCCTTTCTc | |
| PB8 | | | | | | | GTCGATGGTCAG | |
| pU6_A1AT_ | AAGGCT | 20836 | ATGGTCAG | 21646 | AGCAGCTTC | 22456 | AAGGCTGTGCTGACCATCGAGTCTTTGTACTCT | 23266 |
| St1_ | GTGCTG | | CACAGCCT | | AGTCCCTTT | | GGTACCAGAAGCTACAAAGATAAGGCTTCATG | |
| ED4- | ACCATC | | T | | CTcGTCG | | CCGAAATCAACACCCTGTCATTTTATGGCAGG | |
| _G_20FE_ | GA | | | | | | GTGTTTTAGCAGCTTCAGTCCCTTTCTcGTCGAT | |
| PB17 | | | | | | | GGTCAGCACAGCCTT | |
| pU6_A1AT_ | AAGGCT | 20837 | ATGGTCAG | 21647 | AGCAGCTTC | 22457 | AAGGCTGTGCTGACCATCGAGTCTTTGTACTCT | 23267 |
| St1_ | GTGCTG | | CACAGCCT | | AGTCCCTTT | | GGTACCAGAAGCTACAAAGATAAGGCTTCATG | |
| ED4- | ACCATC | | | | CTcGTCG | | CCGAAATCAACACCCTGTCATTTTATGGCAGG | |
| _G_20FE_ | GA | | | | | | GTGTTTTAGCAGCTTCAGTCCCTTTCTcGTCGAT | |
| PB16 | | | | | | | GGTCAGCACAGCCT | |
| pU6_A1AT_ | AAGGCT | 20838 | ATGGTCAG | 21648 | AGCAGCTTC | 22458 | AAGGCTGTGCTGACCATCGAGTCTTTGTACTCT | 23268 |
| St1_ | GTGCTG | | CACAGCC | | AGTCCCTTT | | GGTACCAGAAGCTACAAAGATAAGGCTTCATG | |
| ED4- | ACCATC | | | | CTcGTCG | | CCGAAATCAACACCCTGTCATTTTATGGCAGG | |
| _G_20FE_ | GA | | | | | | GTGTTTTAGCAGCTTCAGTCCCTTTCTcGTCGAT | |
| PB15 | | | | | | | GGTCAGCACAGCC | |
| pU6_A1AT_ | AAGGCT | 20839 | ATGGTCAG | 21649 | AGCAGCTTC | 22459 | AAGGCTGTGCTGACCATCGAGTCTTTGTACTCT | 23269 |
| St1_ | GTGCTG | | CACAGC | | AGTCCCTTT | | GGTACCAGAAGCTACAAAGATAAGGCTTCATG | |
| ED4- | ACCATC | | | | CTcGTCG | | CCGAAATCAACACCCTGTCATTTTATGGCAGG | |
| _G_20FE_ | GA | | | | | | GTGTTTTAGCAGCTTCAGTCCCTTTCTcGTCGAT | |
| PB14 | | | | | | | GGTCAGCACAGC | |
| pU6_A1AT_ | AAGGCT | 20840 | ATGGTCAG | 21650 | AGCAGCTTC | 22460 | AAGGCTGTGCTGACCATCGAGTCTTTGTACTCT | 23270 |
| St1_ | GTGCTG | | CACAG | | AGTCCCTTT | | GGTACCAGAAGCTACAAAGATAAGGCTTCATG | |
| ED4- | ACCATC | | | | CTcGTCG | | CCGAAATCAACACCCTGTCATTTTATGGCAGG | |
| _G_20FE_ | GA | | | | | | GTGTTTTAGCAGCTTCAGTCCCTTTCTcGTCGAT | |
| PB13 | | | | | | | GGTCAGCACAG | |
| pU6_A1AT_ | AAGGCT | 20841 | ATGGTCAG | 21651 | AGCAGCTTC | 22461 | AAGGCTGTGCTGACCATCGAGTCTTTGTACTCT | 23271 |
| St1_ | GTGCTG | | CACA | | AGTCCCTTT | | GGTACCAGAAGCTACAAAGATAAGGCTTCATG | |
| ED4- | ACCATC | | | | CTcGTCG | | CCGAAATCAACACCCTGTCATTTTATGGCAGG | |
| _G_20FE_ | GA | | | | | | GTGTTTTAGCAGCTTCAGTCCCTTTCTcGTCGAT | |
| PB12 | | | | | | | GGTCAGCACA | |
| pU6_A1AT_ | AAGGCT | 20842 | ATGGTCAG | 21652 | AGCAGCTTC | 22462 | AAGGCTGTGCTGACCATCGAGTCTTTGTACTCT | 23272 |
| St1_ | GTGCTG | | CAC | | AGTCCCTTT | | GGTACCAGAAGCTACAAAGATAAGGCTTCATG | |
| ED4- | ACCATC | | | | CTcGTCG | | CCGAAATCAACACCCTGTCATTTTATGGCAGG | |
| _G_20FE_ | GA | | | | | | GTGTTTTAGCAGCTTCAGTCCCTTTCTcGTCGAT | |
| PB11 | | | | | | | GGTCAGCAC | |
| pU6_A1AT_ | AAGGCT | 20843 | ATGGTCAG | 21653 | AGCAGCTTC | 22463 | AAGGCTGTGCTGACCATCGAGTCTTTGTACTCT | 23273 |
| St1_ | GTGCTG | | CA | | AGTCCCTTT | | GGTACCAGAAGCTACAAAGATAAGGCTTCATG | |
| ED4- | ACCATC | | | | CTcGTCG | | CCGAAATCAACACCCTGTCATTTTATGGCAGG | |
| _G_20FE_ | GA | | | | | | GTGTTTTAGCAGCTTCAGTCCCTTTCTcGTCGAT | |
| PB10 | | | | | | | GGTCAGCA | |
| pU6_A1AT_ | AAGGCT | 20844 | ATGGTCAG | | AGCAGCTTC | 22464 | AAGGCTGTGCTGACCATCGAGTCTTTGTACTCT | 23274 |
| St1_ | GTGCTG | | C | | AGTCCCTTT | | GGTACCAGAAGCTACAAAGATAAGGCTTCATG | |
| ED4- | ACCATC | | | | CTcGTCG | | CCGAAATCAACACCCTGTCATTTTATGGCAGG | |
| _G_20FE_ | GA | | | | | | GTGTTTTAGCAGCTTCAGTCCCTTTCTcGTCGAT | |
| PB9 | | | | | | | GGTCAGC | |
| pU6_A1AT_ | AAGGCT | 20845 | ATGGTCAG | | AGCAGCTTC | 22465 | AAGGCTGTGCTGACCATCGAGTCTTTGTACTCT | 23275 |
| St1_ | GTGCTG | | | | AGTCCCTTT | | GGTACCAGAAGCTACAAAGATAAGGCTTCATG | |
| ED4- | ACCATC | | | | CTcGTCG | | CCGAAATCAACACCCTGTCATTTTATGGCAGG | |
| _G_20FE_ | GA | | | | | | GTGTTTTAGCAGCTTCAGTCCCTTTCTcGTCGAT | |
| PB8 | | | | | | | GGTCAG | |
| pU6_A1AT_ | AAGGCT | 20846 | ATGGTCAG | 21656 | TTCAGTCCC | 22466 | AAGGCTGTGCTGACCATCGAGTCTTTGTACTCT | 23276 |
| St1_ | GTGCTG | | CACAGCCT | | TTTCTCGTC | | GGTACCAGAAGCTACAAAGATAAGGCTTCATG | |
| ED4- | ACCATC | | T | | G | | CCGAAATCAACACCCTGTCATTTTATGGCAGG | |
| _G_14FE_ | GA | | | | | | GTGTTTTTTCAGTCCCTTTCTcGTCGATGGTCA | |
| PB17 | | | | | | | GCACAGCCTT | |
| pU6_A1AT_ | AAGGCT | 20847 | ATGGTCAG | 21657 | TTCAGTCCC | 22467 | AAGGCTGTGCTGACCATCGAGTCTTTGTACTCT | 23277 |
| St1_ | GTGCTG | | CACAGCCT | | TTTCTCGTC | | GGTACCAGAAGCTACAAAGATAAGGCTTCATG | |
| ED4- | ACCATC | | | | G | | CCGAAATCAACACCCTGTCATTTTATGGCAGG | |
| _G_14FE_ | GA | | | | | | GTGTTTTTTCAGTCCCTTTCTcGTCGATGGTCA | |
| PB16 | | | | | | | GCACAGCCT | |
| pU6_A1AT_ | AAGGCT | 20848 | ATGGTCAG | 21658 | TTCAGTCCC | 22468 | AAGGCTGTGCTGACCATCGAGTCTTTGTACTCT | 23278 |
| St1_ | GTGCTG | | CACAGCC | | TTTCTcGTC | | GGTACCAGAAGCTACAAAGATAAGGCTTCATG | |
| ED4- | ACCATC | | | | G | | CCGAAATCAACACCCTGTCATTTTATGGCAGG | |
| _G_14FE_ | GA | | | | | | GTGTTTTTTCAGTCCCTTTCTcGTCGATGGTCA | |
| PB15 | | | | | | | GCACAGCC | |
| pU6_A1AT_ | AAGGCT | 20849 | ATGGTCAG | 21659 | TTCAGTCCC | 22469 | AAGGCTGTGCTGACCATCGAGTCTTTGTACTCT | 23279 |
| St1_ | GTGCTG | | CACAGC | | TTTCTCGTC | | GGTACCAGAAGCTACAAAGATAAGGCTTCATG | |
| ED4- | ACCATC | | | | G | | CCGAAATCAACACCCTGTCATTTTATGGCAGG | |
| _G_14FE_ | GA | | | | | | GTGTTTTTTCAGTCCCTTTCTcGTCGATGGTCA | |
| PB14 | | | | | | | GCACAGC | |
| pU6_A1AT_ | AAGGCT | 20850 | ATGGTCAG | 21660 | TTCAGTCCC | 22470 | AAGGCTGTGCTGACCATCGAGTCTTTGTACTCT | 23280 |
| St1_ | GTGCTG | | CACAG | | TTTCTcGTC | | GGTACCAGAAGCTACAAAGATAAGGCTTCATG | |
| ED4- | ACCATC | | | | G | | CCGAAATCAACACCCTGTCATTTTATGGCAGG | |
| _G_14FE_ | GA | | | | | | GTGTTTTTTCAGTCCCTTTCTcGTCGATGGTCA | |
| PB13 | | | | | | | GCACAG | |
| pU6_A1AT_ | AAGGCT | 20851 | ATGGTCAG | 21661 | TTCAGTCCC | 22471 | AAGGCTGTGCTGACCATCGAGTCTTTGTACTCT | 23281 |
| St1 | GTGCTG | | CACA | | TTTCTCGTC | | GGTACCAGAAGCTACAAAGATAAGGCTTCATG | |
| ED4- | ACCATC | | | | G | | CCGAAATCAACACCCTGTCATTTTATGGCAGG | |
| _G_14FE_ | GA | | | | | | GTGTTTTTTCAGTCCCTTTCTcGTCGATGGTCA | |
| PB12 | | | | | | | GCACA | |
| pU6_A1AT_ | AAGGCT | 20852 | ATGGTCAG | 21662 | TTCAGTCCC | 22472 | AAGGCTGTGCTGACCATCGAGTCTTTGTACTCT | 23282 |
| St1_ | GTGCTG | | CAC | | TTTCTCGTC | | GGTACCAGAAGCTACAAAGATAAGGCTTCATG | |
| ED4- | ACCATC | | | | G | | CCGAAATCAACACCCTGTCATTTTATGGCAGG | |
| _G_14FE_ | GA | | | | | | GTGTTTTTTCAGTCCCTTTCTcGTCGATGGTCA | |
| PB11 | | | | | | | GCAC | |
| pU6_A1AT_ | AAGGCT | 20853 | ATGGTCAG | 21663 | TTCAGTCCC | 22473 | AAGGCTGTGCTGACCATCGAGTCTTTGTACTCT | 23283 |
| St1_ | GTGCTG | | CA | | TTTCTcGTC | | GGTACCAGAAGCTACAAAGATAAGGCTTCATG | |
| ED4- | ACCATC | | | | G | | CCGAAATCAACACCCTGTCATTTTATGGCAGG | |
| _G_14FE_ | GA | | | | | | GTGTTTTTTCAGTCCCTTTCTcGTCGATGGTCA | |
| PB10 | | | | | | | GCA | |
| pU6_A1AT_ | AAGGCT | 20854 | ATGGTCAG | | TTCAGTCCC | 22474 | AAGGCTGTGCTGACCATCGAGTCTTTGTACTCT | 23284 |
| St1_ | GTGCTG | | C | | TTTCTCGTC | | GGTACCAGAAGCTACAAAGATAAGGCTTCATG | |
| ED4- | ACCATC | | | | G | | CCGAAATCAACACCCTGTCATTTTATGGCAGG | |
| _G_14FE_ | GA | | | | | | GTGTTTTTTCAGTCCCTTTCTcGTCGATGGTCA | |
| PB9 | | | | | | | GC | |
| pU6_A1AT_ | AAGGCT | 20855 | ATGGTCAG | | TTCAGTCCC | 22475 | AAGGCTGTGCTGACCATCGAGTCTTTGTACTCT | 23285 |
| St1_ | GTGCTG | | | | TTTCTCGTC | | GGTACCAGAAGCTACAAAGATAAGGCTTCATG | |
| ED4- | ACCATC | | | | G | | CCGAAATCAACACCCTGTCATTTTATGGCAGG | |
| _G_14FE_ | GA | | | | | | GTGTTTTTTCAGTCCCTTTCTcGTCGATGGTCA | |
| PB8 | | | | | | | G | |
| pU6_A1AT_ | AAGGCT | 20856 | ATGGTCAG | 21666 | AGTCCCTTT | 22476 | AAGGCTGTGCTGACCATCGAGTCTTTGTACTCT | 23286 |
| St1_ | GTGCTG | | CACAGCCT | | CTcGTCG | | GGTACCAGAAGCTACAAAGATAAGGCTTCATG | |
| ED4- | ACCATC | | T | | | | CCGAAATCAACACCCTGTCATTTTATGGCAGG | |
| _G_11FE_ | GA | | | | | | GTGTTTTAGTCCCTTTCTcGTCGATGGTCAGCA | |
| PB17 | | | | | | | CAGCCTT | |
| pU6_A1AT_ | AAGGCT | 20857 | ATGGTCAG | 21667 | AGTCCCTTT | 22477 | AAGGCTGTGCTGACCATCGAGTCTTTGTACTCT | 23287 |
| St1_ | GTGCTG | | CACAGCCT | | CTcGTCG | | GGTACCAGAAGCTACAAAGATAAGGCTTCATG | |
| ED4- | ACCATC | | | | | | CCGAAATCAACACCCTGTCATTTTATGGCAGG | |
| _G_11FE_ | GA | | | | | | GTGTTTTAGTCCCTTTCTcGTCGATGGTCAGCA | |
| PB16 | | | | | | | CAGCCT | |
| pU6_A1AT_ | AAGGCT | 20858 | ATGGTCAG | 21668 | AGTCCCTTT | 22478 | AAGGCTGTGCTGACCATCGAGTCTTTGTACTCT | 23288 |
| St1_ | GTGCTG | | CACAGCC | | CTcGTCG | | GGTACCAGAAGCTACAAAGATAAGGCTTCATG | |
| ED4- | ACCATC | | | | | | CCGAAATCAACACCCTGTCATTTTATGGCAGG | |
| _G_11FE_ | GA | | | | | | GTGTTTTAGTCCCTTTCTcGTCGATGGTCAGCA | |
| PB15 | | | | | | | CAGCC | |
| pU6_A1AT_ | AAGGCT | 20859 | ATGGTCAG | 21669 | AGTCCCTTT | 22479 | AAGGCTGTGCTGACCATCGAGTCTTTGTACTCT | 23289 |
| St1_ | GTGCTG | | CACAGC | | CTcGTCG | | GGTACCAGAAGCTACAAAGATAAGGCTTCATG | |
| ED4- | ACCATC | | | | | | CCGAAATCAACACCCTGTCATTTTATGGCAGG | |
| _G_11FE_ | GA | | | | | | GTGTTTTAGTCCCTTTCTcGTCGATGGTCAGCA | |
| PB14 | | | | | | | CAGC | |
| pU6_A1AT_ | AAGGCT | 20860 | ATGGTCAG | 21670 | AGTCCCTTT | 22480 | AAGGCTGTGCTGACCATCGAGTCTTTGTACTCT | 23290 |
| St1_ | GTGCTG | | CACAG | | CTcGTCG | | GGTACCAGAAGCTACAAAGATAAGGCTTCATG | |
| ED4- | ACCATC | | | | | | CCGAAATCAACACCCTGTCATTTTATGGCAGG | |
| _G_11FE_ | GA | | | | | | GTGTTTTAGTCCCTTTCTcGTCGATGGTCAGCA | |
| PB13 | | | | | | | CAG | |
| pU6_A1AT_ | AAGGCT | 20861 | ATGGTCAG | 21671 | AGTCCCTTT | 22481 | AAGGCTGTGCTGACCATCGAGTCTTTGTACTCT | 23291 |
| St1_ | GTGCTG | | CACA | | CTcGTCG | | GGTACCAGAAGCTACAAAGATAAGGCTTCATG | |
| ED4- | ACCATC | | | | | | CCGAAATCAACACCCTGTCATTTTATGGCAGG | |
| _G_11FE_ | GA | | | | | | GTGTTTTAGTCCCTTTCTcGTCGATGGTCAGCA | |
| PB12 | | | | | | | CA | |
| pU6_A1AT_ | AAGGCT | 20862 | ATGGTCAG | 21672 | AGTCCCTTT | 22482 | AAGGCTGTGCTGACCATCGAGTCTTTGTACTCT | 23292 |
| St1_ | GTGCTG | | CAC | | CTcGTCG | | GGTACCAGAAGCTACAAAGATAAGGCTTCATG | |
| ED4- | ACCATC | | | | | | CCGAAATCAACACCCTGTCATTTTATGGCAGG | |
| _G_11FE_ | GA | | | | | | GTGTTTTAGTCCCTTTCTcGTCGATGGTCAGCA | |
| PB11 | | | | | | | C | |
| pU6_A1AT_ | AAGGCT | 20863 | ATGGTCAG | 21673 | AGTCCCTTT | 22483 | AAGGCTGTGCTGACCATCGAGTCTTTGTACTCT | 23293 |
| St1_ | GTGCTG | | CA | | CTcGTCG | | GGTACCAGAAGCTACAAAGATAAGGCTTCATG | |
| ED4- | ACCATC | | | | | | CCGAAATCAACACCCTGTCATTTTATGGCAGG | |
| _G_11FE_ | GA | | | | | | GTGTTTTAGTCCCTTTCTcGTCGATGGTCAGCA | |
| PB10 | | | | | | | | |
| pU6_A1AT_ | AAGGCT | 20864 | ATGGTCAG | | AGTCCCTTT | 22484 | AAGGCTGTGCTGACCATCGAGTCTTTGTACTCT | 23294 |
| St1_ | GTGCTG | | C | | CTcGTCG | | GGTACCAGAAGCTACAAAGATAAGGCTTCATG | |
| ED4- | ACCATC | | | | | | CCGAAATCAACACCCTGTCATTTTATGGCAGG | |
| _G_11FE_ | GA | | | | | | GTGTTTTAGTCCCTTTCTcGTCGATGGTCAGC | |
| PB9 | | | | | | | | |
| pU6_A1AT_ | AAGGCT | 20865 | ATGGTCAG | | AGTCCCTTT | 22485 | AAGGCTGTGCTGACCATCGAGTCTTTGTACTCT | 23295 |
| St1_ | GTGCTG | | | | CTcGTCG | | GGTACCAGAAGCTACAAAGATAAGGCTTCATG | |
| ED4- | ACCATC | | | | | | CCGAAATCAACACCCTGTCATTTTATGGCAGG | |
| _G_11FE_ | GA | | | | | | GTGTTTTAGTCCCTTTCTcGTCGATGGTCAG | |
| PB8 | | | | | | | | |
| pU6_A1AT_ | AAGGCT | 20866 | ATGGTCAG | 21676 | TCCCTTTCTc | 22486 | AAGGCTGTGCTGACCATCGAGTCTTTGTACTCT | 23296 |
| St1_ | GTGCTG | | CACAGCCT | | GTCG | | GGTACCAGAAGCTACAAAGATAAGGCTTCATG | |
| ED4- | ACCATC | | T | | | | CCGAAATCAACACCCTGTCATTTTATGGCAGG | |
| _G_9FE_ | GA | | | | | | GTGTTTTTCCCTTTCTcGTCGATGGTCAGCACA | |
| PB17 | | | | | | | GCCTT | |
| pU6_A1AT_ | AAGGCT | 20867 | ATGGTCAG | 21677 | TCCCTTTCTc | 22487 | AAGGCTGTGCTGACCATCGAGTCTTTGTACTCT | 23297 |
| St1_ | GTGCTG | | CACAGCCT | | GTCG | | GGTACCAGAAGCTACAAAGATAAGGCTTCATG | |
| ED4- | ACCATC | | | | | | CCGAAATCAACACCCTGTCATTTTATGGCAGG | |
| _G_9FE_ | GA | | | | | | GTGTTTTTCCCTTTCTcGTCGATGGTCAGCACA | |
| PB16 | | | | | | | GCCT | |
| pU6_A1AT_ | AAGGCT | 20868 | ATGGTCAG | 21678 | TCCCTTTCTc | 22488 | AAGGCTGTGCTGACCATCGAGTCTTTGTACTCT | 23298 |
| St1_ | GTGCTG | | CACAGCC | | GTCG | | GGTACCAGAAGCTACAAAGATAAGGCTTCATG | |
| ED4- | ACCATC | | | | | | CCGAAATCAACACCCTGTCATTTTATGGCAGG | |
| _G_9FE_ | GA | | | | | | GTGTTTTTCCCTTTCTcGTCGATGGTCAGCACA | |
| PB15 | | | | | | | GCC | |
| pU6_A1AT_ | AAGGCT | 20869 | ATGGTCAG | 21679 | TCCCTTTCTc | 22489 | AAGGCTGTGCTGACCATCGAGTCTTTGTACTCT | 23299 |
| St1_ | GTGCTG | | CACAGC | | GTCG | | GGTACCAGAAGCTACAAAGATAAGGCTTCATG | |
| ED4- | ACCATC | | | | | | CCGAAATCAACACCCTGTCATTTTATGGCAGG | |
| _G_9FE_ | GA | | | | | | GTGTTTTTCCCTTTCTcGTCGATGGTCAGCACA | |
| PB14 | | | | | | | GC | |
| pU6_A1AT_ | AAGGCT | 20870 | ATGGTCAG | 21680 | TCCCTTTCTc | 22490 | AAGGCTGTGCTGACCATCGAGTCTTTGTACTCT | 23300 |
| St1_ | GTGCTG | | CACAG | | GTCG | | GGTACCAGAAGCTACAAAGATAAGGCTTCATG | |
| ED4- | ACCATC | | | | | | CCGAAATCAACACCCTGTCATTTTATGGCAGG | |
| _G_9FE_ | GA | | | | | | GTGTTTTTCCCTTTCTcGTCGATGGTCAGCACA | |
| PB13 | | | | | | | G | |
| pU6_A1AT_ | AAGGCT | 20871 | ATGGTCAG | 21681 | TCCCTTTCTc | 22491 | AAGGCTGTGCTGACCATCGAGTCTTTGTACTCT | 23301 |
| St1_ | GTGCTG | | CACA | | GTCG | | GGTACCAGAAGCTACAAAGATAAGGCTTCATG | |
| ED4- | ACCATC | | | | | | CCGAAATCAACACCCTGTCATTTTATGGCAGG | |
| _G_9FE_ | GA | | | | | | GTGTTTTTCCCTTTCTcGTCGATGGTCAGCACA | |
| PB12 | | | | | | | | |
| pU6_A1AT_ | AAGGCT | 20872 | ATGGTCAG | 21682 | TCCCTTTCTc | 22492 | AAGGCTGTGCTGACCATCGAGTCTTTGTACTCT | 23302 |
| St1_ | GTGCTG | | CAC | | GTCG | | GGTACCAGAAGCTACAAAGATAAGGCTTCATG | |
| ED4- | ACCATC | | | | | | CCGAAATCAACACCCTGTCATTTTATGGCAGG | |
| _G_9FE_ | GA | | | | | | GTGTTTTTCCCTTTCTcGTCGATGGTCAGCAC | |
| PB11 | | | | | | | | |
| pU6_A1AT_ | AAGGCT | 20873 | ATGGTCAG | 21683 | TCCCTTTCTc | 22493 | AAGGCTGTGCTGACCATCGAGTCTTTGTACTCT | 23303 |
| St1_ | GTGCTG | | CA | | GTCG | | GGTACCAGAAGCTACAAAGATAAGGCTTCATG | |
| ED4- | ACCATC | | | | | | CCGAAATCAACACCCTGTCATTTTATGGCAGG | |
| _G_9FE_ | GA | | | | | | GTGTTTTTCCCTTTCTcGTCGATGGTCAGCA | |
| PB10 | | | | | | | | |
| pU6_A1AT_ | AAGGCT | 20874 | ATGGTCAG | | TCCCTTTCTc | 22494 | AAGGCTGTGCTGACCATCGAGTCTTTGTACTCT | 23304 |
| St1_ | GTGCTG | | C | | GTCG | | GGTACCAGAAGCTACAAAGATAAGGCTTCATG | |
| ED4- | ACCATC | | | | | | CCGAAATCAACACCCTGTCATTTTATGGCAGG | |
| _G_9FE_ | GA | | | | | | GTGTTTTTCCCTTTCTcGTCGATGGTCAGC | |
| PB9 | | | | | | | | |
| pU6_A1AT_ | AAGGCT | 20875 | ATGGTCAG | | TCCCTTTCTc | 22495 | AAGGCTGTGCTGACCATCGAGTCTTTGTACTCT | 23305 |
| St1_ | GTGCTG | | | | GTCG | | GGTACCAGAAGCTACAAAGATAAGGCTTCATG | |
| ED4- | ACCATC | | | | | | CCGAAATCAACACCCTGTCATTTTATGGCAGG | |
| _G_9FE_ | GA | | | | | | GTGTTTTTCCCTTTCTcGTCGATGGTCAG | |
| PB8 | | | | | | | | |
| pU6_A1AT_ | AAGGCT | 20876 | ATGGTCAG | 21686 | CCTTTCTcGT | 22496 | AAGGCTGTGCTGACCATCGAGTCTTTGTACTCT | 23306 |
| St1_ | GTGCTG | | CACAGCCT | | CG | | GGTACCAGAAGCTACAAAGATAAGGCTTCATG | |
| ED4- | ACCATC | | T | | | | CCGAAATCAACACCCTGTCATTTTATGGCAGG | |
| _G_7FE_ | GA | | | | | | GTGTTTTCCTTTCTcGTCGATGGTCAGCACAGC | |
| PB17 | | | | | | | CTT | |
| pU6_A1AT_ | AAGGCT | 20877 | ATGGTCAG | 21687 | CCTTTCTcGT | 22497 | AAGGCTGTGCTGACCATCGAGTCTTTGTACTCT | 23307 |
| St1_ | GTGCTG | | CACAGCCT | | CG | | GGTACCAGAAGCTACAAAGATAAGGCTTCATG | |
| ED4- | ACCATC | | | | | | CCGAAATCAACACCCTGTCATTTTATGGCAGG | |
| _G_7FE_ | GA | | | | | | GTGTTTTCCTTTCTcGTCGATGGTCAGCACAGC | |
| PB16 | | | | | | | CT | |
| pU6_A1AT_ | AAGGCT | 20878 | ATGGTCAG | 21688 | CCTTTCTcGT | 22498 | AAGGCTGTGCTGACCATCGAGTCTTTGTACTCT | 23308 |
| St1_ | GTGCTG | | CACAGCC | | CG | | GGTACCAGAAGCTACAAAGATAAGGCTTCATG | |
| ED4- | ACCATC | | | | | | CCGAAATCAACACCCTGTCATTTTATGGCAGG | |
| _G_7FE_ | GA | | | | | | GTGTTTTCCTTTCTcGTCGATGGTCAGCACAGC | |
| PB15 | | | | | | | C | |
| pU6_A1AT_ | AAGGCT | 20879 | ATGGTCAG | 21689 | CCTTTCTcGT | 22499 | AAGGCTGTGCTGACCATCGAGTCTTTGTACTCT | 23309 |
| St1_ | GTGCTG | | CACAGC | | CG | | GGTACCAGAAGCTACAAAGATAAGGCTTCATG | |
| ED4- | ACCATC | | | | | | CCGAAATCAACACCCTGTCATTTTATGGCAGG | |
| _G_7FE_ | GA | | | | | | GTGTTTTCCTTTCTcGTCGATGGTCAGCACAGC | |
| PB14 | | | | | | | | |
| pU6_A1AT_ | AAGGCT | 20880 | ATGGTCAG | 21690 | CCTTTCTcGT | 22500 | AAGGCTGTGCTGACCATCGAGTCTTTGTACTCT | 23310 |
| St1_ | GTGCTG | | CACAG | | CG | | GGTACCAGAAGCTACAAAGATAAGGCTTCATG | |
| ED4- | ACCATC | | | | | | CCGAAATCAACACCCTGTCATTTTATGGCAGG | |
| _G_7FE_ | GA | | | | | | GTGTTTTCCTTTCTcGTCGATGGTCAGCACAG | |
| PB13 | | | | | | | | |
| pU6_A1AT_ | AAGGCT | 20881 | ATGGTCAG | 21691 | CCTTTCTcGT | 22501 | AAGGCTGTGCTGACCATCGAGTCTTTGTACTCT | 23311 |
| St1_ | GTGCTG | | CACA | | CG | | GGTACCAGAAGCTACAAAGATAAGGCTTCATG | |
| ED4- | ACCATC | | | | | | CCGAAATCAACACCCTGTCATTTTATGGCAGG | |
| _G_7FE_ | GA | | | | | | GTGTTTTCCTTTCTcGTCGATGGTCAGCACA | |
| PB12 | | | | | | | | |
| pU6_A1AT_ | AAGGCT | 20882 | ATGGTCAG | 21692 | CCTTTCTcGT | 22502 | AAGGCTGTGCTGACCATCGAGTCTTTGTACTCT | 23312 |
| St1_ | GTGCTG | | CAC | | CG | | GGTACCAGAAGCTACAAAGATAAGGCTTCATG | |
| ED4- | ACCATC | | | | | | CCGAAATCAACACCCTGTCATTTTATGGCAGG | |
| _G_7FE_ | GA | | | | | | GTGTTTTCCTTTCTcGTCGATGGTCAGCAC | |
| PB11 | | | | | | | | |
| pU6_A1AT_ | AAGGCT | 20883 | ATGGTCAG | 21693 | CCTTTCTcGT | 22503 | AAGGCTGTGCTGACCATCGAGTCTTTGTACTCT | 23313 |
| St1_ | GTGCTG | | CA | | CG | | GGTACCAGAAGCTACAAAGATAAGGCTTCATG | |
| ED4- | ACCATC | | | | | | CCGAAATCAACACCCTGTCATTTTATGGCAGG | |
| _G_7FE_ | GA | | | | | | GTGTTTTCCTTTCTcGTCGATGGTCAGCA | |
| PB10 | | | | | | | | |
| pU6_A1AT_ | AAGGCT | 20884 | ATGGTCAG | | CCTTTCTcGT | 22504 | AAGGCTGTGCTGACCATCGAGTCTTTGTACTCT | 23314 |
| St1_ | GTGCTG | | C | | CG | | GGTACCAGAAGCTACAAAGATAAGGCTTCATG | |
| ED4- | ACCATC | | | | | | CCGAAATCAACACCCTGTCATTTTATGGCAGG | |
| _G_7FE_ | GA | | | | | | GTGTTTTCCTTTCTcGTCGATGGTCAGC | |
| PB9 | | | | | | | | |
| pU6_A1AT_ | AAGGCT | 20885 | ATGGTCAG | | CCTTTCTcGT | 22505 | AAGGCTGTGCTGACCATCGAGTCTTTGTACTCT | 23315 |
| St1_ | GTGCTG | | | | CG | | GGTACCAGAAGCTACAAAGATAAGGCTTCATG | |
| ED4- | ACCATC | | | | | | CCGAAATCAACACCCTGTCATTTTATGGCAGG | |
| _G_7FE_ | GA | | | | | | GTGTTTTCCTTTCTcGTCGATGGTCAG | |
| PB8 | | | | | | | | |
| pU6_A1AT_ | AAGGCT | 20886 | ATGGTCAG | 21696 | TTTCTcGTC | 22506 | AAGGCTGTGCTGACCATCGAGTCTTTGTACTCT | 23316 |
| St1_ | GTGCTG | | CACAGCCT | | G | | GGTACCAGAAGCTACAAAGATAAGGCTTCATG | |
| ED4- | ACCATC | | T | | | | CCGAAATCAACACCCTGTCATTTTATGGCAGG | |
| _G_5FE_ | GA | | | | | | GTGTTTTTTTCTcGTCGATGGTCAGCACAGCCT | |
| PB17 | | | | | | | T | |
| pU6_A1AT_ | AAGGCT | 20887 | ATGGTCAG | 21697 | TTTCTcGTC | 22507 | AAGGCTGTGCTGACCATCGAGTCTTTGTACTCT | 23317 |
| St1_ | GTGCTG | | CACAGCCT | | G | | GGTACCAGAAGCTACAAAGATAAGGCTTCATG | |
| ED4- | ACCATC | | | | | | CCGAAATCAACACCCTGTCATTTTATGGCAGG | |
| _G_5FE_ | GA | | | | | | GTGTTTTTTTCTcGTCGATGGTCAGCACAGCCT | |
| PB16 | | | | | | | | |
| pU6_A1AT_ | AAGGCT | 20888 | ATGGTCAG | 21698 | TTTCTcGTC | 22508 | AAGGCTGTGCTGACCATCGAGTCTTTGTACTCT | 23318 |
| St1_ | GTGCTG | | CACAGCC | | G | | GGTACCAGAAGCTACAAAGATAAGGCTTCATG | |
| ED4- | ACCATC | | | | | | CCGAAATCAACACCCTGTCATTTTATGGCAGG | |
| _G_5FE_ | GA | | | | | | GTGTTTTTTTCTcGTCGATGGTCAGCACAGCC | |
| PB15 | | | | | | | | |
| pU6_A1AT_ | AAGGCT | 20889 | ATGGTCAG | 21699 | TTTCTcGTC | 22509 | AAGGCTGTGCTGACCATCGAGTCTTTGTACTCT | 23319 |
| St1_ | GTGCTG | | CACAGC | | G | | GGTACCAGAAGCTACAAAGATAAGGCTTCATG | |
| ED4- | ACCATC | | | | | | CCGAAATCAACACCCTGTCATTTTATGGCAGG | |
| _G_5FE_ | GA | | | | | | GTGTTTTTTTCTcGTCGATGGTCAGCACAGC | |
| PB14 | | | | | | | | |
| pU6_A1AT_ | AAGGCT | 20890 | ATGGTCAG | 21700 | TTTCTcGTC | 22510 | AAGGCTGTGCTGACCATCGAGTCTTTGTACTCT | 23320 |
| St1_ | GTGCTG | | CACAG | | G | | GGTACCAGAAGCTACAAAGATAAGGCTTCATG | |
| ED4- | ACCATC | | | | | | CCGAAATCAACACCCTGTCATTTTATGGCAGG | |
| _G_5FE_ | GA | | | | | | GTGTTTTTTTCTcGTCGATGGTCAGCACAG | |
| PB13 | | | | | | | | |
| pU6_A1AT_ | AAGGCT | 20891 | ATGGTCAG | 21701 | TTTCTcGTC | 22511 | AAGGCTGTGCTGACCATCGAGTCTTTGTACTCT | 23321 |
| St1_ | GTGCTG | | CACA | | G | | GGTACCAGAAGCTACAAAGATAAGGCTTCATG | |
| ED4- | ACCATC | | | | | | CCGAAATCAACACCCTGTCATTTTATGGCAGG | |
| _G_5FE_ | GA | | | | | | GTGTTTTTTTCTcGTCGATGGTCAGCACA | |
| PB12 | | | | | | | | |
| pU6_A1AT_ | AAGGCT | 20892 | ATGGTCAG | 21702 | TTTCTcGTC | 22512 | AAGGCTGTGCTGACCATCGAGTCTTTGTACTCT | 23322 |
| St1_ | GTGCTG | | CAC | | G | | GGTACCAGAAGCTACAAAGATAAGGCTTCATG | |
| ED4- | ACCATC | | | | | | CCGAAATCAACACCCTGTCATTTTATGGCAGG | |
| _G_5FE_ | GA | | | | | | GTGTTTTTTTCTcGTCGATGGTCAGCAC | |
| PB11 | | | | | | | | |
| pU6_A1AT_ | AAGGCT | 20893 | ATGGTCAG | 21703 | TTTCTcGTC | 22513 | AAGGCTGTGCTGACCATCGAGTCTTTGTACTCT | 23323 |
| St1_ | GTGCTG | | CA | | G | | GGTACCAGAAGCTACAAAGATAAGGCTTCATG | |
| ED4- | ACCATC | | | | | | CCGAAATCAACACCCTGTCATTTTATGGCAGG | |
| _G_5FE_ | GA | | | | | | GTGTTTTTTTCTcGTCGATGGTCAGCA | |
| PB10 | | | | | | | | |
| pU6_A1AT_ | AAGGCT | 20894 | ATGGTCAG | | TTTCTcGTC | 22514 | AAGGCTGTGCTGACCATCGAGTCTTTGTACTCT | 23324 |
| St1_ | GTGCTG | | C | | G | | GGTACCAGAAGCTACAAAGATAAGGCTTCATG | |
| ED4- | ACCATC | | | | | | CCGAAATCAACACCCTGTCATTTTATGGCAGG | |
| _G_5FE_ | GA | | | | | | GTGTTTTTTTCTcGTCGATGGTCAGC | |
| PB9 | | | | | | | | |
| pU6_A1AT_ | AAGGCT | 20895 | ATGGTCAG | | TTTCTCGTC | 22515 | AAGGCTGTGCTGACCATCGAGTCTTTGTACTCT | 23325 |
| St1_ | GTGCTG | | | | G | | GGTACCAGAAGCTACAAAGATAAGGCTTCATG | |
| ED4- | ACCATC | | | | | | CCGAAATCAACACCCTGTCATTTTATGGCAGG | |
| _G_5FE_ | GA | | | | | | GTGTTTTTTTCTcGTCGATGGTCAG | |
| PB8 | | | | | | | | |
| pU6_A1AT_ | AAGGCT | 20896 | ATGGTCAG | 21706 | TCTcGTCG | | AAGGCTGTGCTGACCATCGAGTCTTTGTACTCT | 23326 |
| St1_ | GTGCTG | | CACAGCCT | | | | GGTACCAGAAGCTACAAAGATAAGGCTTCATG | |
| ED4- | ACCATC | | T | | | | CCGAAATCAACACCCTGTCATTTTATGGCAGG | |
| _G_3FE_ | GA | | | | | | GTGTTTTTCTcGTCGATGGTCAGCACAGCCTT | |
| PB17 | | | | | | | | |
| pU6_A1AT_ | AAGGCT | 20897 | ATGGTCAG | 21707 | TCTcGTCG | | AAGGCTGTGCTGACCATCGAGTCTTTGTACTCT | 23327 |
| St1_ | GTGCTG | | CACAGCCT | | | | GGTACCAGAAGCTACAAAGATAAGGCTTCATG | |
| ED4- | ACCATC | | | | | | CCGAAATCAACACCCTGTCATTTTATGGCAGG | |
| _G_3FE_ | GA | | | | | | GTGTTTTTCTcGTCGATGGTCAGCACAGCCT | |
| PB16 | | | | | | | | |
| pU6_A1AT_ | AAGGCT | 20898 | ATGGTCAG | 21708 | TCTcGTCG | | AAGGCTGTGCTGACCATCGAGTCTTTGTACTCT | 23328 |
| St1_ | GTGCTG | | CACAGCC | | | | GGTACCAGAAGCTACAAAGATAAGGCTTCATG | |
| ED4- | ACCATC | | | | | | CCGAAATCAACACCCTGTCATTTTATGGCAGG | |
| _G_3FE_ | GA | | | | | | GTGTTTTTCTcGTCGATGGTCAGCACAGCC | |
| PB15 | | | | | | | | |
| pU6_A1AT_ | AAGGCT | 20899 | ATGGTCAG | 21709 | TCTcGTCG | | AAGGCTGTGCTGACCATCGAGTCTTTGTACTCT | 23329 |
| St1_ | GTGCTG | | CACAGC | | | | GGTACCAGAAGCTACAAAGATAAGGCTTCATG | |
| ED4- | ACCATC | | | | | | CCGAAATCAACACCCTGTCATTTTATGGCAGG | |
| _G_3FE_ | GA | | | | | | GTGTTTTTCTcGTCGATGGTCAGCACAGC | |
| PB14 | | | | | | | | |
| pU6_A1AT_ | AAGGCT | 20900 | ATGGTCAG | 21710 | TCTcGTCG | | AAGGCTGTGCTGACCATCGAGTCTTTGTACTCT | 23330 |
| St1_ | GTGCTG | | CACAG | | | | GGTACCAGAAGCTACAAAGATAAGGCTTCATG | |
| ED4- | ACCATC | | | | | | CCGAAATCAACACCCTGTCATTTTATGGCAGG | |
| _G_3FE_ | GA | | | | | | GTGTTTTTCTcGTCGATGGTCAGCACAG | |
| PB13 | | | | | | | | |
| pU6_A1AT_ | AAGGCT | 20901 | ATGGTCAG | 21711 | TCTcGTCG | | AAGGCTGTGCTGACCATCGAGTCTTTGTACTCT | 23331 |
| St1_ | GTGCTG | | CACA | | | | GGTACCAGAAGCTACAAAGATAAGGCTTCATG | |
| ED4- | ACCATC | | | | | | CCGAAATCAACACCCTGTCATTTTATGGCAGG | |
| _G_3FE_ | GA | | | | | | GTGTTTTTCTcGTCGATGGTCAGCACA | |
| PB12 | | | | | | | | |
| pU6_A1AT_ | AAGGCT | 20902 | ATGGTCAG | 21712 | TCTcGTCG | | AAGGCTGTGCTGACCATCGAGTCTTTGTACTCT | 23332 |
| St1_ | GTGCTG | | CAC | | | | GGTACCAGAAGCTACAAAGATAAGGCTTCATG | |
| ED4- | ACCATC | | | | | | CCGAAATCAACACCCTGTCATTTTATGGCAGG | |
| _G_3FE_ | GA | | | | | | GTGTTTTTCTcGTCGATGGTCAGCAC | |
| PB11 | | | | | | | | |
| pU6_A1AT_ | AAGGCT | 20903 | ATGGTCAG | 21713 | TCTcGTCG | | AAGGCTGTGCTGACCATCGAGTCTTTGTACTCT | 23333 |
| St1_ | GTGCTG | | CA | | | | GGTACCAGAAGCTACAAAGATAAGGCTTCATG | |
| ED4- | ACCATC | | | | | | CCGAAATCAACACCCTGTCATTTTATGGCAGG | |
| _G_3FE_ | GA | | | | | | GTGTTTTTCTcGTCGATGGTCAGCA | |
| PB10 | | | | | | | | |
| pU6_A1AT_ | AAGGCT | 20904 | ATGGTCAG | | TCTcGTCG | | AAGGCTGTGCTGACCATCGAGTCTTTGTACTCT | 23334 |
| St1_ | GTGCTG | | C | | | | GGTACCAGAAGCTACAAAGATAAGGCTTCATG | |
| ED4- | ACCATC | | | | | | CCGAAATCAACACCCTGTCATTTTATGGCAGG | |
| _G_3FE_ | GA | | | | | | GTGTTTTTCTcGTCGATGGTCAGC | |
| PB9 | | | | | | | | |
| pU6_A1AT_ | AAGGCT | 20905 | ATGGTCAG | | TCTcGTCG | | AAGGCTGTGCTGACCATCGAGTCTTTGTACTCT | 23335 |
| St1_ | GTGCTG | | | | | | GGTACCAGAAGCTACAAAGATAAGGCTTCATG | |
| ED4- | ACCATC | | | | | | CCGAAATCAACACCCTGTCATTTTATGGCAGG | |
| _G_3FE_ | GA | | | | | | GTGTTTTTCTcGTCGATGGTCAG | |
| PB8 | | | | | | | | |
| pU6_A1AT_ | TAAAAA | 20906 | CTGCTGGG | 21716 | GCCGTGCAT | 22526 | TAAAAACATGGCCCCAGCAGCTTGTTGTAGCT | 203336 |
| Nme2_ | CATGGC | | GCCATGTT | | AAGGCTGT | | CCCGAAACGTTGCTACAATAAGGCCGTCTGAA | |
| ED15+_ | CCCAGC | | T | | GCTGACCAT | | AAGATGTGCCGCAACGCTCTGCCCCTTAAAGC | |
| G_30FE_ | AGCTT | | | | CGACgAGAA | | TTCTGCTTTAAGGGGCATCGTTGCCGTGCATAA | |
| PB17 | | | | | AGGGACTG | | GGCTGTGCTGACCATCGACgAGAAAGGGACTG | |
| | | | | | AAG | | AAGCTGCTGGGGCCATGTTT | |
| pU6_A1AT_ | TAAAAA | 20907 | CTGCTGGG | 21717 | GCCGTGCAT | 22527 | TAAAAACATGGCCCCAGCAGCTTGTTGTAGCT | 203337 |
| Nme2_ | CATGGC | | GCCATGTT | | AAGGCTGT | | CCCGAAACGTTGCTACAATAAGGCCGTCTGAA | |
| ED15+_ | CCCAGC | | | | GCTGACCAT | | AAGATGTGCCGCAACGCTCTGCCCCTTAAAGC | |
| G_30FE_ | AGCTT | | | | CGACgAGAA | | TTCTGCTTTAAGGGGCATCGTTGCCGTGCATAA | |
| PB16 | | | | | AGGGACTG | | GGCTGTGCTGACCATCGACgAGAAAGGGACTG | |
| | | | | | AAG | | AAGCTGCTGGGGCCATGTT | |
| pU6_A1AT_ | TAAAAA | 20908 | CTGCTGGG | 21718 | GCCGTGCAT | 22528 | TAAAAACATGGCCCCAGCAGCTTGTTGTAGCT | 203338 |
| Nme2_ | CATGGC | | GCCATGT | | AAGGCTGT | | CCCGAAACGTTGCTACAATAAGGCCGTCTGAA | |
| ED15+_ | CCCAGC | | | | GCTGACCAT | | AAGATGTGCCGCAACGCTCTGCCCCTTAAAGC | |
| G_30FE_ | AGCTT | | | | CGACgAGAA | | TTCTGCTTTAAGGGGCATCGTTGCCGTGCATAA | |
| PB15 | | | | | AGGGACTG | | GGCTGTGCTGACCATCGACgAGAAAGGGACTG | |
| | | | | | AAG | | AAGCTGCTGGGGCCATGT | |
| pU6_A1AT_ | TAAAAA | 20909 | CTGCTGGG | 21719 | GCCGTGCAT | 22529 | TAAAAACATGGCCCCAGCAGCTTGTTGTAGCT | 203339 |
| Nme2_ | CATGGC | | GCCATG | | AAGGCTGT | | CCCGAAACGTTGCTACAATAAGGCCGTCTGAA | |
| ED15+_ | CCCAGC | | | | GCTGACCAT | | AAGATGTGCCGCAACGCTCTGCCCCTTAAAGC | |
| G_30FE_ | AGCTT | | | | CGACgAGAA | | TTCTGCTTTAAGGGGCATCGTTGCCGTGCATAA | |
| PB14 | | | | | AGGGACTG | | GGCTGTGCTGACCATCGACgAGAAAGGGACTG | |
| | | | | | AAG | | AAGCTGCTGGGGCCATG | |
| pU6_A1AT_ | TAAAAA | 20910 | CTGCTGGG | 21720 | GCCGTGCAT | 22530 | TAAAAACATGGCCCCAGCAGCTTGTTGTAGCT | 203340 |
| Nme2_ | CATGGC | | GCCAT | | AAGGCTGT | | CCCGAAACGTTGCTACAATAAGGCCGTCTGAA | |
| ED15+_ | CCCAGC | | | | GCTGACCAT | | AAGATGTGCCGCAACGCTCTGCCCCTTAAAGC | |
| G_30FE_ | AGCTT | | | | CGACgAGAA | | TTCTGCTTTAAGGGGCATCGTTGCCGTGCATAA | |
| PB13 | | | | | AGGGACTG | | GGCTGTGCTGACCATCGACgAGAAAGGGACTG | |
| | | | | | AAG | | AAGCTGCTGGGGCCAT | |
| pU6_A1AT_ | TAAAAA | 20911 | CTGCTGGG | 21721 | GCCGTGCAT | 22531 | TAAAAACATGGCCCCAGCAGCTTGTTGTAGCT | 23341 |
| Nme2_ | CATGGC | | GCCA | | AAGGCTGT | | CCCGAAACGTTGCTACAATAAGGCCGTCTGAA | |
| ED15+_ | CCCAGC | | | | GCTGACCAT | | AAGATGTGCCGCAACGCTCTGCCCCTTAAAGC | |
| G_30FE_ | AGCTT | | | | CGACgAGAA | | TTCTGCTTTAAGGGGCATCGTTGCCGTGCATAA | |
| PB12 | | | | | AGGGACTG | | GGCTGTGCTGACCATCGACgAGAAAGGGACTG | |
| | | | | | AAG | | AAGCTGCTGGGGCCA | |
| pU6_A1AT_ | TAAAAA | 20912 | CTGCTGGG | 21722 | GCCGTGCAT | 22532 | TAAAAACATGGCCCCAGCAGCTTGTTGTAGCT | 23342 |
| Nme2_ | CATGGC | | GCC | | AAGGCTGT | | CCCGAAACGTTGCTACAATAAGGCCGTCTGAA | |
| ED15+_ | CCCAGC | | | | GCTGACCAT | | AAGATGTGCCGCAACGCTCTGCCCCTTAAAGC | |
| G_30FE_ | AGCTT | | | | CGACgAGAA | | TTCTGCTTTAAGGGGCATCGTTGCCGTGCATAA | |
| PB11 | | | | | AGGGACTG | | GGCTGTGCTGACCATCGACgAGAAAGGGACTG | |
| | | | | | AAG | | AAGCTGCTGGGGCC | |
| pU6_A1AT_ | TAAAAA | 20913 | CTGCTGGG | 21723 | GCCGTGCAT | 22533 | TAAAAACATGGCCCCAGCAGCTTGTTGTAGCT | 23343 |
| Nme2_ | CATGGC | | GC | | AAGGCTGT | | CCCGAAACGTTGCTACAATAAGGCCGTCTGAA | |
| ED15+_ | CCCAGC | | | | GCTGACCAT | | AAGATGTGCCGCAACGCTCTGCCCCTTAAAGC | |
| G_30FE_ | AGCTT | | | | CGACgAGAA | | TTCTGCTTTAAGGGGCATCGTTGCCGTGCATAA | |
| PB10 | | | | | AGGGACTG | | GGCTGTGCTGACCATCGACgAGAAAGGGACTG | |
| | | | | | AAG | | AAGCTGCTGGGGC | |
| pU6_A1AT_ | TAAAAA | 20914 | CTGCTGGG | | GCCGTGCAT | 22534 | TAAAAACATGGCCCCAGCAGCTTGTTGTAGCT | 23344 |
| Nme2_ | CATGGC | | G | | AAGGCTGT | | CCCGAAACGTTGCTACAATAAGGCCGTCTGAA | |
| ED15+_ | CCCAGC | | | | GCTGACCAT | | AAGATGTGCCGCAACGCTCTGCCCCTTAAAGC | |
| G_30FE_ | AGCTT | | | | CGACgAGAA | | TTCTGCTTTAAGGGGCATCGTTGCCGTGCATAA | |
| PB9 | | | | | AGGGACTG | | GGCTGTGCTGACCATCGACgAGAAAGGGACTG | |
| | | | | | AAG | | AAGCTGCTGGGG | |
| pU6_A1AT_ | TAAAAA | 20915 | CTGCTGGG | | GCCGTGCAT | 22535 | TAAAAACATGGCCCCAGCAGCTTGTTGTAGCT | 23345 |
| Nme2_ | CATGGC | | | | AAGGCTGT | | CCCGAAACGTTGCTACAATAAGGCCGTCTGAA | |
| ED15+_ | CCCAGC | | | | GCTGACCAT | | AAGATGTGCCGCAACGCTCTGCCCCTTAAAGC | |
| G_30FE_ | AGCTT | | | | CGACgAGAA | | TTCTGCTTTAAGGGGCATCGTTGCCGTGCATAA | |
| PB8 | | | | | AGGGACTG | | GGCTGTGCTGACCATCGACgAGAAAGGGACTG | |
| | | | | | AAG | | AAGCTGCTGGG | |
| pU6_A1AT_ | TAAAAA | 20916 | CTGCTGGG | 21726 | GCATAAGG | 22536 | TAAAAACATGGCCCCAGCAGCTTGTTGTAGCT | 23346 |
| Nme2_ | CATGGC | | GCCATGTT | | CTGTGCTGA | | CCCGAAACGTTGCTACAATAAGGCCGTCTGAA | |
| ED15+_ | CCCAGC | | T | | CCATCGACg | | AAGATGTGCCGCAACGCTCTGCCCCTTAAAGC | |
| G_25FE_ | AGCTT | | | | AGAAAGGG | | TTCTGCTTTAAGGGGCATCGTTGCATAAGGCT | |
| PB17 | | | | | ACTGAAG | | GTGCTGACCATCGACgAGAAAGGGACTGAAG | |
| | | | | | | | CTGCTGGGGCCATGTTT | |
| pU6_A1AT_ | TAAAAA | 20917 | CTGCTGGG | 21727 | GCATAAGG | 22537 | TAAAAACATGGCCCCAGCAGCTTGTTGTAGCT | 23347 |
| Nme2_ | CATGGC | | GCCATGTT | | CTGTGCTGA | | CCCGAAACGTTGCTACAATAAGGCCGTCTGAA | |
| ED15+_ | CCCAGC | | | | CCATCGACg | | AAGATGTGCCGCAACGCTCTGCCCCTTAAAGC | |
| G_25FE_ | AGCTT | | | | AGAAAGGG | | TTCTGCTTTAAGGGGCATCGTTGCATAAGGCT | |
| PB | | | | | ACTGAAG | | GTGCTGACCATCGACgAGAAAGGGACTGAAG | |
| 16 | | | | | | | CTGCTGGGGCCATGTT | |
| pU6_A1AT_ | TAAAAA | 20918 | CTGCTGGG | 21728 | GCATAAGG | 22538 | TAAAAACATGGCCCCAGCAGCTTGTTGTAGCT | 23348 |
| Nme2_ | CATGGC | | GCCATGT | | CTGTGCTGA | | CCCGAAACGTTGCTACAATAAGGCCGTCTGAA | |
| ED15+_ | CCCAGC | | | | CCATCGACg | | AAGATGTGCCGCAACGCTCTGCCCCTTAAAGC | |
| G_25FE_ | AGCTT | | | | AGAAAGGG | | TTCTGCTTTAAGGGGCATCGTTGCATAAGGCT | |
| PB15 | | | | | ACTGAAG | | GTGCTGACCATCGACgAGAAAGGGACTGAAG | |
| | | | | | | | CTGCTGGGGCCATGT | |
| pU6_A1AT_ | TAAAAA | 20919 | CTGCTGGG | 21729 | GCATAAGG | 22539 | TAAAAACATGGCCCCAGCAGCTTGTTGTAGCT | 23349 |
| Nme2_ | CATGGC | | GCCATG | | CTGTGCTGA | | CCCGAAACGTTGCTACAATAAGGCCGTCTGAA | |
| ED15+_ | CCCAGC | | | | CCATCGACg | | AAGATGTGCCGCAACGCTCTGCCCCTTAAAGC | |
| G_25FE_ | AGCTT | | | | AGAAAGGG | | TTCTGCTTTAAGGGGCATCGTTGCATAAGGCT | |
| PB14 | | | | | ACTGAAG | | GTGCTGACCATCGACgAGAAAGGGACTGAAG | |
| | | | | | | | CTGCTGGGGCCATG | |
| pU6_A1AT_ | TAAAAA | 20920 | CTGCTGGG | 21730 | GCATAAGG | 22540 | TAAAAACATGGCCCCAGCAGCTTGTTGTAGCT | 23350 |
| Nme2_ | CATGGC | | GCCAT | | CTGTGCTGA | | CCCGAAACGTTGCTACAATAAGGCCGTCTGAA | |
| ED15+_ | CCCAGC | | | | CCATCGACg | | AAGATGTGCCGCAACGCTCTGCCCCTTAAAGC | |
| G_25FE_ | AGCTT | | | | AGAAAGGG | | TTCTGCTTTAAGGGGCATCGTTGCATAAGGCT | |
| PB13 | | | | | ACTGAAG | | GTGCTGACCATCGACgAGAAAGGGACTGAAG | |
| | | | | | | | CTGCTGGGGCCAT | |
| pU6_A1AT_ | TAAAAA | 20921 | CTGCTGGG | 21731 | GCATAAGG | 22541 | TAAAAACATGGCCCCAGCAGCTTGTTGTAGCT | 23351 |
| Nme2_ | CATGGC | | GCCA | | CTGTGCTGA | | CCCGAAACGTTGCTACAATAAGGCCGTCTGAA | |
| ED15+_ | CCCAGC | | | | CCATCGACg | | AAGATGTGCCGCAACGCTCTGCCCCTTAAAGC | |
| G_25FE_ | AGCTT | | | | AGAAAGGG | | TTCTGCTTTAAGGGGCATCGTTGCATAAGGCT | |
| PB12 | | | | | ACTGAAG | | GTGCTGACCATCGACgAGAAAGGGACTGAAG | |
| | | | | | | | CTGCTGGGGCCA | |
| pU6_A1AT_ | TAAAAA | 20922 | CTGCTGGG | 21732 | GCATAAGG | 22542 | TAAAAACATGGCCCCAGCAGCTTGTTGTAGCT | 23352 |
| Nme2_ | CATGGC | | GCC | | CTGTGCTGA | | CCCGAAACGTTGCTACAATAAGGCCGTCTGAA | |
| ED15+_ | CCCAGC | | | | CCATCGACg | | AAGATGTGCCGCAACGCTCTGCCCCTTAAAGC | |
| G_25FE_ | AGCTT | | | | AGAAAGGG | | TTCTGCTTTAAGGGGCATCGTTGCATAAGGCT | |
| PB11 | | | | | ACTGAAG | | GTGCTGACCATCGACgAGAAAGGGACTGAAG | |
| | | | | | | | CTGCTGGGGCC | |
| pU6_A1AT_ | TAAAAA | 20923 | CTGCTGGG | 21733 | GCATAAGG | 22543 | TAAAAACATGGCCCCAGCAGCTTGTTGTAGCT | 23353 |
| Nme2_ | CATGGC | | GC | | CTGTGCTGA | | CCCGAAACGTTGCTACAATAAGGCCGTCTGAA | |
| ED15+_ | CCCAGC | | | | CCATCGACg | | AAGATGTGCCGCAACGCTCTGCCCCTTAAAGC | |
| G_25FE_ | AGCTT | | | | AGAAAGGG | | TTCTGCTTTAAGGGGCATCGTTGCATAAGGCT | |
| PB10 | | | | | ACTGAAG | | GTGCTGACCATCGACgAGAAAGGGACTGAAG | |
| | | | | | | | CTGCTGGGGC | |
| pU6_A1AT_ | TAAAAA | 20924 | CTGCTGGG | | GCATAAGG | 22544 | TAAAAACATGGCCCCAGCAGCTTGTTGTAGCT | 23354 |
| Nme2_ | CATGGC | | G | | CTGTGCTGA | | CCCGAAACGTTGCTACAATAAGGCCGTCTGAA | |
| ED15+_ | CCCAGC | | | | CCATCGACg | | AAGATGTGCCGCAACGCTCTGCCCCTTAAAGC | |
| G_25FE_ | AGCTT | | | | AGAAAGGG | | TTCTGCTTTAAGGGGCATCGTTGCATAAGGCT | |
| PB9 | | | | | ACTGAAG | | GTGCTGACCATCGACgAGAAAGGGACTGAAG | |
| | | | | | | | CTGCTGGGG | |
| pU6_A1AT_ | TAAAAA | 20925 | CTGCTGGG | | GCATAAGG | 22545 | TAAAAACATGGCCCCAGCAGCTTGTTGTAGCT | 23355 |
| Nme2_ | CATGGC | | | | CTGTGCTGA | | CCCGAAACGTTGCTACAATAAGGCCGTCTGAA | |
| ED15+_ | CCCAGC | | | | CCATCGACg | | AAGATGTGCCGCAACGCTCTGCCCCTTAAAGC | |
| G_25FE_ | AGCTT | | | | AGAAAGGG | | TTCTGCTTTAAGGGGCATCGTTGCATAAGGCT | |
| PB8 | | | | | ACTGAAG | | GTGCTGACCATCGACgAGAAAGGGACTGAAG | |
| | | | | | | | CTGCTGGG | |
| pU6_A1AT_ | TAAAAA | 20926 | CTGCTGGG | 21736 | AGGCTGTGC | 22546 | TAAAAACATGGCCCCAGCAGCTTGTTGTAGCT | 23356 |
| Nme2_ | CATGGC | | GCCATGTT | | TGACCATCG | | CCCGAAACGTTGCTACAATAAGGCCGTCTGAA | |
| ED15+_ | CCCAGC | | T | | ACgAGAAA | | AAGATGTGCCGCAACGCTCTGCCCCTTAAAGC | |
| G_20FE_ | AGCTT | | | | GGGACTGA | | TTCTGCTTTAAGGGGCATCGTTAGGCTGTGCT | |
| PB17 | | | | | AG | | GACCATCGACgAGAAAGGGACTGAAGCTGCT | |
| | | | | | | | GGGGCCATGTTT | |
| pU6_A1AT_ | TAAAAA | 20927 | CTGCTGGG | 21737 | AGGCTGTGC | 22547 | TAAAAACATGGCCCCAGCAGCTTGTTGTAGCT | 23357 |
| Nme2_ | CATGGC | | GCCATGTT | | TGACCATCG | | CCCGAAACGTTGCTACAATAAGGCCGTCTGAA | |
| ED15+_ | CCCAGC | | | | ACgAGAAA | | AAGATGTGCCGCAACGCTCTGCCCCTTAAAGC | |
| G_20FE_ | AGCTT | | | | GGGACTGA | | TTCTGCTTTAAGGGGCATCGTTAGGCTGTGCT | |
| PB16 | | | | | AG | | GACCATCGACgAGAAAGGGACTGAAGCTGCT | |
| | | | | | | | GGGGCCATGTT | |
| pU6_A1AT_ | TAAAAA | 20928 | CTGCTGGG | 21738 | AGGCTGTGC | 22548 | TAAAAACATGGCCCCAGCAGCTTGTTGTAGCT | 23358 |
| Nme2_ | CATGGC | | GCCATGT | | TGACCATCG | | CCCGAAACGTTGCTACAATAAGGCCGTCTGAA | |
| ED15+_ | CCCAGC | | | | ACgAGAAA | | AAGATGTGCCGCAACGCTCTGCCCCTTAAAGC | |
| G_20FE_ | AGCTT | | | | GGGACTGA | | TTCTGCTTTAAGGGGCATCGTTAGGCTGTGCT | |
| PB15 | | | | | AG | | GACCATCGACgAGAAAGGGACTGAAGCTGCT | |
| | | | | | | | GGGGCCATGT | |
| pU6_A1AT_ | TAAAAA | 20929 | CTGCTGGG | 21739 | AGGCTGTGC | 22549 | TAAAAACATGGCCCCAGCAGCTTGTTGTAGCT | 23359 |
| Nme2_ | CATGGC | | GCCATG | | TGACCATCG | | CCCGAAACGTTGCTACAATAAGGCCGTCTGAA | |
| ED15+_ | CCCAGC | | | | ACgAGAAA | | AAGATGTGCCGCAACGCTCTGCCCCTTAAAGC | |
| G_20FE_ | AGCTT | | | | GGGACTGA | | TTCTGCTTTAAGGGGCATCGTTAGGCTGTGCT | |
| PB14 | | | | | AG | | GACCATCGACgAGAAAGGGACTGAAGCTGCT | |
| | | | | | | | GGGGCCATG | |
| pU6_A1AT_ | TAAAAA | 20930 | CTGCTGGG | 21740 | AGGCTGTGC | 22550 | TAAAAACATGGCCCCAGCAGCTTGTTGTAGCT | 23360 |
| Nme2_ | CATGGC | | GCCAT | | TGACCATCG | | CCCGAAACGTTGCTACAATAAGGCCGTCTGAA | |
| ED15+_ | CCCAGC | | | | ACgAGAAA | | AAGATGTGCCGCAACGCTCTGCCCCTTAAAGC | |
| G_20FE_ | AGCTT | | | | GGGACTGA | | TTCTGCTTTAAGGGGCATCGTTAGGCTGTGCT | |
| PB13 | | | | | AG | | GACCATCGACgAGAAAGGGACTGAAGCTGCT | |
| | | | | | | | GGGGCCAT | |
| pU6_A1AT_ | TAAAAA | 20931 | CTGCTGGG | 21741 | AGGCTGTGC | 22551 | TAAAAACATGGCCCCAGCAGCTTGTTGTAGCT | 23361 |
| Nme2_ | CATGGC | | GCCA | | TGACCATCG | | CCCGAAACGTTGCTACAATAAGGCCGTCTGAA | |
| ED15+_ | CCCAGC | | | | ACgAGAAA | | AAGATGTGCCGCAACGCTCTGCCCCTTAAAGC | |
| G_20FE_ | AGCTT | | | | GGGACTGA | | TTCTGCTTTAAGGGGCATCGTTAGGCTGTGCT | |
| PB12 | | | | | AG | | GACCATCGACgAGAAAGGGACTGAAGCTGCT | |
| | | | | | | | GGGGCCA | |
| pU6_A1AT_ | TAAAAA | 20932 | CTGCTGGG | 21742 | AGGCTGTGC | 22552 | TAAAAACATGGCCCCAGCAGCTTGTTGTAGCT | 23362 |
| Nme2_ | CATGGC | | GCC | | TGACCATCG | | CCCGAAACGTTGCTACAATAAGGCCGTCTGAA | |
| ED15+_ | CCCAGC | | | | ACgAGAAA | | AAGATGTGCCGCAACGCTCTGCCCCTTAAAGC | |
| G_20FE_ | AGCTT | | | | GGGACTGA | | TTCTGCTTTAAGGGGCATCGTTAGGCTGTGCT | |
| PB11 | | | | | AG | | GACCATCGACgAGAAAGGGACTGAAGCTGCT | |
| | | | | | | | GGGGCC | |
| pU6_A1AT_ | TAAAAA | 20933 | CTGCTGGG | 21743 | AGGCTGTGC | 22553 | TAAAAACATGGCCCCAGCAGCTTGTTGTAGCT | 23363 |
| Nme2_ | CATGGC | | GC | | TGACCATCG | | CCCGAAACGTTGCTACAATAAGGCCGTCTGAA | |
| ED15+_ | CCCAGC | | | | ACgAGAAA | | AAGATGTGCCGCAACGCTCTGCCCCTTAAAGC | |
| G_20FE_ | AGCTT | | | | GGGACTGA | | TTCTGCTTTAAGGGGCATCGTTAGGCTGTGCT | |
| PB10 | | | | | AG | | GACCATCGACgAGAAAGGGACTGAAGCTGCT | |
| | | | | | | | GGGGC | |
| pU6_A1AT_ | TAAAAA | 20934 | CTGCTGGG | | AGGCTGTGC | 22554 | TAAAAACATGGCCCCAGCAGCTTGTTGTAGCT | 23364 |
| Nme2_ | CATGGC | | G | | TGACCATCG | | CCCGAAACGTTGCTACAATAAGGCCGTCTGAA | |
| ED15+_ | CCCAGC | | | | ACgAGAAA | | AAGATGTGCCGCAACGCTCTGCCCCTTAAAGC | |
| G_20FE_ | AGCTT | | | | GGGACTGA | | TTCTGCTTTAAGGGGCATCGTTAGGCTGTGCT | |
| PB9 | | | | | AG | | GACCATCGACgAGAAAGGGACTGAAGCTGCT | |
| | | | | | | | GGGG | |
| pU6_A1AT_ | TAAAAA | 20935 | CTGCTGGG | | AGGCTGTGC | 22555 | TAAAAACATGGCCCCAGCAGCTTGTTGTAGCT | 23365 |
| Nme2_ | CATGGC | | | | TGACCATCG | | CCCGAAACGTTGCTACAATAAGGCCGTCTGAA | |
| ED15+_ | CCCAGC | | | | ACgAGAAA | | AAGATGTGCCGCAACGCTCTGCCCCTTAAAGC | |
| G_20FE_ | AGCTT | | | | GGGACTGA | | TTCTGCTTTAAGGGGCATCGTTAGGCTGTGCT | |
| PB8 | | | | | AG | | GACCATCGACgAGAAAGGGACTGAAGCTGCT | |
| | | | | | | | GGG | |
| pU6_A1AT_ | TAAAAA | 20936 | CTGCTGGG | 21746 | TGCTGACCA | 22556 | TAAAAACATGGCCCCAGCAGCTTGTTGTAGCT | 23366 |
| Nme2_ | CATGGC | | GCCATGTT | | TCGACgAGA | | CCCGAAACGTTGCTACAATAAGGCCGTCTGAA | |
| ED15+_ | CCCAGC | | T | | AAGGGACT | | AAGATGTGCCGCAACGCTCTGCCCCTTAAAGC | |
| G_14FE_ | AGCTT | | | | GAAG | | TTCTGCTTTAAGGGGCATCGTTTGCTGACCATC | |
| PB17 | | | | | | | GACgAGAAAGGGACTGAAGCTGCTGGGGCCA | |
| | | | | | | | TGTTT | |
| pU6_A1AT_ | TAAAAA | 20937 | CTGCTGGG | 21747 | TGCTGACCA | 22557 | TAAAAACATGGCCCCAGCAGCTTGTTGTAGCT | 23367 |
| Nme2_ | CATGGC | | GCCATGTT | | TCGACgAGA | | CCCGAAACGTTGCTACAATAAGGCCGTCTGAA | |
| ED15+_ | CCCAGC | | | | AAGGGACT | | AAGATGTGCCGCAACGCTCTGCCCCTTAAAGC | |
| G_14FE_ | AGCTT | | | | GAAG | | TTCTGCTTTAAGGGGCATCGTTTGCTGACCATC | |
| PB16 | | | | | | | GACgAGAAAGGGACTGAAGCTGCTGGGGCCA | |
| | | | | | | | TGTT | |
| pU6_A1AT_ | TAAAAA | 20938 | CTGCTGGG | 21748 | TGCTGACCA | 22558 | TAAAAACATGGCCCCAGCAGCTTGTTGTAGCT | 23368 |
| Nme2_ | CATGGC | | GCCATGT | | TCGACgAGA | | CCCGAAACGTTGCTACAATAAGGCCGTCTGAA | |
| ED15+_ | CCCAGC | | | | AAGGGACT | | AAGATGTGCCGCAACGCTCTGCCCCTTAAAGC | |
| G_14FE_ | AGCTT | | | | GAAG | | TTCTGCTTTAAGGGGCATCGTTTGCTGACCATC | |
| PB15 | | | | | | | GACgAGAAAGGGACTGAAGCTGCTGGGGCCA | |
| | | | | | | | TGT | |
| pU6_A1AT_ | TAAAAA | 20939 | CTGCTGGG | 21749 | TGCTGACCA | 22559 | TAAAAACATGGCCCCAGCAGCTTGTTGTAGCT | 23369 |
| Nme2_ | CATGGC | | GCCATG | | TCGACgAGA | | CCCGAAACGTTGCTACAATAAGGCCGTCTGAA | |
| ED15+_ | CCCAGC | | | | AAGGGACT | | AAGATGTGCCGCAACGCTCTGCCCCTTAAAGC | |
| G_14FE_ | AGCTT | | | | GAAG | | TTCTGCTTTAAGGGGCATCGTTTGCTGACCATC | |
| PB14 | | | | | | | GACgAGAAAGGGACTGAAGCTGCTGGGGCCA | |
| | | | | | | | TG | |
| pU6_A1AT_ | TAAAAA | 20940 | CTGCTGGG | 21750 | TGCTGACCA | 22560 | TAAAAACATGGCCCCAGCAGCTTGTTGTAGCT | 23370 |
| Nme2_ | CATGGC | | GCCAT | | TCGACgAGA | | CCCGAAACGTTGCTACAATAAGGCCGTCTGAA | |
| ED15+_ | CCCAGC | | | | AAGGGACT | | AAGATGTGCCGCAACGCTCTGCCCCTTAAAGC | |
| G_14FE_ | AGCTT | | | | GAAG | | TTCTGCTTTAAGGGGCATCGTTTGCTGACCATC | |
| PB13 | | | | | | | GACgAGAAAGGGACTGAAGCTGCTGGGGCCA | |
| | | | | | | | T | |
| pU6_A1AT_ | TAAAAA | 20941 | CTGCTGGG | 21751 | TGCTGACCA | 22561 | TAAAAACATGGCCCCAGCAGCTTGTTGTAGCT | 23371 |
| Nme2_ | CATGGC | | GCCA | | TCGACgAGA | | CCCGAAACGTTGCTACAATAAGGCCGTCTGAA | |
| ED15+_ | CCCAGC | | | | AAGGGACT | | AAGATGTGCCGCAACGCTCTGCCCCTTAAAGC | |
| G_14FE_ | AGCTT | | | | GAAG | | TTCTGCTTTAAGGGGCATCGTTTGCTGACCATC | |
| PB12 | | | | | | | GACgAGAAAGGGACTGAAGCTGCTGGGGCCA | |
| pU6_A1AT_ | TAAAAA | 20942 | CTGCTGGG | 21752 | TGCTGACCA | 22562 | TAAAAACATGGCCCCAGCAGCTTGTTGTAGCT | 23372 |
| Nme2_ | CATGGC | | GCC | | TCGACgAGA | | CCCGAAACGTTGCTACAATAAGGCCGTCTGAA | |
| ED15+_ | CCCAGC | | | | AAGGGACT | | AAGATGTGCCGCAACGCTCTGCCCCTTAAAGC | |
| G_14FE_ | AGCTT | | | | GAAG | | TTCTGCTTTAAGGGGCATCGTTTGCTGACCATC | |
| PB11 | | | | | | | GACgAGAAAGGGACTGAAGCTGCTGGGGCC | |
| pU6_A1AT_ | TAAAAA | 20943 | CTGCTGGG | 21753 | TGCTGACCA | 22563 | TAAAAACATGGCCCCAGCAGCTTGTTGTAGCT | 23373 |
| Nme2_ | CATGGC | | GC | | TCGACgAGA | | CCCGAAACGTTGCTACAATAAGGCCGTCTGAA | |
| ED15+_ | CCCAGC | | | | AAGGGACT | | AAGATGTGCCGCAACGCTCTGCCCCTTAAAGC | |
| G_14FE_ | AGCTT | | | | GAAG | | TTCTGCTTTAAGGGGCATCGTTTGCTGACCATC | |
| PB10 | | | | | | | GACgAGAAAGGGACTGAAGCTGCTGGGGC | |
| pU6_A1AT_ | TAAAAA | 20944 | CTGCTGGG | | TGCTGACCA | 22564 | TAAAAACATGGCCCCAGCAGCTTGTTGTAGCT | 23374 |
| Nme2_ | CATGGC | | G | | TCGACgAGA | | CCCGAAACGTTGCTACAATAAGGCCGTCTGAA | |
| ED15+_ | CCCAGC | | | | AAGGGACT | | AAGATGTGCCGCAACGCTCTGCCCCTTAAAGC | |
| G_14FE_ | AGCTT | | | | GAAG | | TTCTGCTTTAAGGGGCATCGTTTGCTGACCATC | |
| PB9 | | | | | | | GACgAGAAAGGGACTGAAGCTGCTGGGG | |
| pU6_A1AT_ | TAAAAA | 20945 | CTGCTGGG | | TGCTGACCA | 22565 | TAAAAACATGGCCCCAGCAGCTTGTTGTAGCT | 23375 |
| Nme2_ | CATGGC | | | | TCGACgAGA | | CCCGAAACGTTGCTACAATAAGGCCGTCTGAA | |
| ED15+_ | CCCAGC | | | | AAGGGACT | | AAGATGTGCCGCAACGCTCTGCCCCTTAAAGC | |
| G_14FE_ | AGCTT | | | | GAAG | | TTCTGCTTTAAGGGGCATCGTTTGCTGACCATC | |
| PB8 | | | | | | | GACgAGAAAGGGACTGAAGCTGCTGGG | |
| pU6_A1AT_ | TAAAAA | 20946 | CTGCTGGG | 21756 | TGACCATCG | 22566 | TAAAAACATGGCCCCAGCAGCTTGTTGTAGCT | 23376 |
| Nme2_ | CATGGC | | GCCATGTT | | ACgAGAAA | | CCCGAAACGTTGCTACAATAAGGCCGTCTGAA | |
| ED15+_ | CCCAGC | | T | | GGGACTGA | | AAGATGTGCCGCAACGCTCTGCCCCTTAAAGC | |
| G_11FE_ | AGCTT | | | | AG | | TTCTGCTTTAAGGGGCATCGTTTGACCATCGAC | |
| PB17 | | | | | | | gAGAAAGGGACTGAAGCTGCTGGGGCCATGT | |
| | | | | | | | TT | |
| pU6_A1AT_ | TAAAAA | 20947 | CTGCTGGG | 21757 | TGACCATCG | 22567 | TAAAAACATGGCCCCAGCAGCTTGTTGTAGCT | 23377 |
| Nme2_ | CATGGC | | GCCATGTT | | ACgAGAAA | | CCCGAAACGTTGCTACAATAAGGCCGTCTGAA | |
| ED15+_ | CCCAGC | | | | GGGACTGA | | AAGATGTGCCGCAACGCTCTGCCCCTTAAAGC | |
| G_11FE_ | AGCTT | | | | AG | | TTCTGCTTTAAGGGGCATCGTTTGACCATCGAC | |
| PB16 | | | | | | | gAGAAAGGGACTGAAGCTGCTGGGGCCATGT | |
| | | | | | | | T | |
| pU6_A1AT_ | TAAAAA | 20948 | CTGCTGGG | 21758 | TGACCATCG | 22568 | TAAAAACATGGCCCCAGCAGCTTGTTGTAGCT | 23378 |
| Nme2_ | CATGGC | | GCCATGT | | ACgAGAAA | | CCCGAAACGTTGCTACAATAAGGCCGTCTGAA | |
| ED15+_ | CCCAGC | | | | GGGACTGA | | AAGATGTGCCGCAACGCTCTGCCCCTTAAAGC | |
| G_11FE_ | AGCTT | | | | AG | | TTCTGCTTTAAGGGGCATCGTTTGACCATCGAC | |
| PB15 | | | | | | | gAGAAAGGGACTGAAGCTGCTGGGGCCATGT | |
| pU6_A1AT_ | TAAAAA | 20949 | CTGCTGGG | 21759 | TGACCATCG | 22569 | TAAAAACATGGCCCCAGCAGCTTGTTGTAGCT | 23379 |
| Nme2_ | CATGGC | | GCCATG | | ACgAGAAA | | CCCGAAACGTTGCTACAATAAGGCCGTCTGAA | |
| ED15+_ | CCCAGC | | | | GGGACTGA | | AAGATGTGCCGCAACGCTCTGCCCCTTAAAGC | |
| G_11FE_ | AGCTT | | | | AG | | TTCTGCTTTAAGGGGCATCGTTTGACCATCGAC | |
| PB14 | | | | | | | gAGAAAGGGACTGAAGCTGCTGGGGCCATG | |
| pU6_A1AT_ | TAAAAA | 20950 | CTGCTGGG | 21760 | TGACCATCG | 22570 | TAAAAACATGGCCCCAGCAGCTTGTTGTAGCT | 23380 |
| Nme2_ | CATGGC | | GCCAT | | ACgAGAAA | | CCCGAAACGTTGCTACAATAAGGCCGTCTGAA | |
| ED15+_ | CCCAGC | | | | GGGACTGA | | AAGATGTGCCGCAACGCTCTGCCCCTTAAAGC | |
| G_11FE_ | AGCTT | | | | AG | | TTCTGCTTTAAGGGGCATCGTTTGACCATCGAC | |
| PB13 | | | | | | | gAGAAAGGGACTGAAGCTGCTGGGGCCAT | |
| pU6_A1AT_ | TAAAAA | 20951 | CTGCTGGG | 21761 | TGACCATCG | 22571 | TAAAAACATGGCCCCAGCAGCTTGTTGTAGCT | 23381 |
| Nme2_ | CATGGC | | GCCA | | ACgAGAAA | | CCCGAAACGTTGCTACAATAAGGCCGTCTGAA | |
| ED15+_ | CCCAGC | | | | GGGACTGA | | AAGATGTGCCGCAACGCTCTGCCCCTTAAAGC | |
| G_11FE_ | AGCTT | | | | AG | | TTCTGCTTTAAGGGGCATCGTTTGACCATCGAC | |
| PB12 | | | | | | | gAGAAAGGGACTGAAGCTGCTGGGGCCA | |
| pU6_A1AT_ | TAAAAA | 20952 | CTGCTGGG | 21762 | TGACCATCG | 22572 | TAAAAACATGGCCCCAGCAGCTTGTTGTAGCT | 23382 |
| Nme2_ | CATGGC | | GCC | | ACgAGAAA | | CCCGAAACGTTGCTACAATAAGGCCGTCTGAA | |
| ED15+_ | CCCAGC | | | | GGGACTGA | | AAGATGTGCCGCAACGCTCTGCCCCTTAAAGC | |
| G_11FE_ | AGCTT | | | | AG | | TTCTGCTTTAAGGGGCATCGTTTGACCATCGAC | |
| PB11 | | | | | | | gAGAAAGGGACTGAAGCTGCTGGGGCC | |
| pU6_A1AT_ | TAAAAA | 20953 | CTGCTGGG | 21763 | TGACCATCG | 22573 | TAAAAACATGGCCCCAGCAGCTTGTTGTAGCT | 23383 |
| Nme2_ | CATGGC | | GC | | ACgAGAAA | | CCCGAAACGTTGCTACAATAAGGCCGTCTGAA | |
| ED15+_ | CCCAGC | | | | GGGACTGA | | AAGATGTGCCGCAACGCTCTGCCCCTTAAAGC | |
| G_11FE_ | AGCTT | | | | AG | | TTCTGCTTTAAGGGGCATCGTTTGACCATCGAC | |
| PB10 | | | | | | | gAGAAAGGGACTGAAGCTGCTGGGGC | |
| pU6_A1AT_ | TAAAAA | 20954 | CTGCTGGG | | TGACCATCG | 22574 | TAAAAACATGGCCCCAGCAGCTTGTTGTAGCT | 23384 |
| Nme2_ | CATGGC | | G | | ACgAGAAA | | CCCGAAACGTTGCTACAATAAGGCCGTCTGAA | |
| ED15+_ | CCCAGC | | | | GGGACTGA | | AAGATGTGCCGCAACGCTCTGCCCCTTAAAGC | |
| G_11FE_ | AGCTT | | | | AG | | TTCTGCTTTAAGGGGCATCGTTTGACCATCGAC | |
| PB9 | | | | | | | gAGAAAGGGACTGAAGCTGCTGGGG | |
| pU6_A1AT_ | TAAAAA | 20955 | CTGCTGGG | | TGACCATCG | 22575 | TAAAAACATGGCCCCAGCAGCTTGTTGTAGCT | 23385 |
| Nme2_ | CATGGC | | | | ACgAGAAA | | CCCGAAACGTTGCTACAATAAGGCCGTCTGAA | |
| ED15+_ | CCCAGC | | | | GGGACTGA | | AAGATGTGCCGCAACGCTCTGCCCCTTAAAGC | |
| G_11FE_ | AGCTT | | | | AG | | TTCTGCTTTAAGGGGCATCGTTTGACCATCGAC | |
| PB8 | | | | | | | gAGAAAGGGACTGAAGCTGCTGGG | |
| pU6_A1AT_ | TAAAAA | 20956 | CTGCTGGG | 21766 | ACCATCGAC | 22576 | TAAAAACATGGCCCCAGCAGCTTGTTGTAGCT | 23386 |
| Nme2_ | CATGGC | | GCCATGTT | | gAGAAAGG | | CCCGAAACGTTGCTACAATAAGGCCGTCTGAA | |
| ED15+_ | CCCAGC | | T | | GACTGAAG | | AAGATGTGCCGCAACGCTCTGCCCCTTAAAGC | |
| G_9FE_ | AGCTT | | | | | | TTCTGCTTTAAGGGGCATCGTTACCATCGACgA | |
| PB17 | | | | | | | GAAAGGGACTGAAGCTGCTGGGGCCATGTTT | |
| pU6_A1AT_ | TAAAAA | 20957 | CTGCTGGG | 21767 | ACCATCGAC | 22577 | TAAAAACATGGCCCCAGCAGCTTGTTGTAGCT | 23387 |
| Nme2_ | CATGGC | | GCCATGTT | | gAGAAAGG | | CCCGAAACGTTGCTACAATAAGGCCGTCTGAA | |
| ED15+_ | CCCAGC | | | | GACTGAAG | | AAGATGTGCCGCAACGCTCTGCCCCTTAAAGC | |
| G_9FE_ | AGCTT | | | | | | TTCTGCTTTAAGGGGCATCGTTACCATCGACgA | |
| PB16 | | | | | | | GAAAGGGACTGAAGCTGCTGGGGCCATGTT | |
| pU6_A1AT_ | TAAAAA | 20958 | CTGCTGGG | 21768 | ACCATCGAC | 22578 | TAAAAACATGGCCCCAGCAGCTTGTTGTAGCT | 23388 |
| Nme2_ | CATGGC | | GCCATGT | | gAGAAAGG | | CCCGAAACGTTGCTACAATAAGGCCGTCTGAA | |
| ED15+_ | CCCAGC | | | | GACTGAAG | | AAGATGTGCCGCAACGCTCTGCCCCTTAAAGC | |
| G_9FE_ | AGCTT | | | | | | TTCTGCTTTAAGGGGCATCGTTACCATCGACgA | |
| PB15 | | | | | | | GAAAGGGACTGAAGCTGCTGGGGCCATGT | |
| pU6_A1AT_ | TAAAAA | 20959 | CTGCTGGG | 21769 | ACCATCGAC | 22579 | TAAAAACATGGCCCCAGCAGCTTGTTGTAGCT | 23389 |
| Nme2_ | CATGGC | | GCCATG | | gAGAAAGG | | CCCGAAACGTTGCTACAATAAGGCCGTCTGAA | |
| ED15+_ | CCCAGC | | | | GACTGAAG | | AAGATGTGCCGCAACGCTCTGCCCCTTAAAGC | |
| G_9FE_ | AGCTT | | | | | | TTCTGCTTTAAGGGGCATCGTTACCATCGACgA | |
| PB14 | | | | | | | GAAAGGGACTGAAGCTGCTGGGGCCATG | |
| pU6_A1AT_ | TAAAAA | 20960 | CTGCTGGG | 21770 | ACCATCGAC | 22580 | TAAAAACATGGCCCCAGCAGCTTGTTGTAGCT | 23390 |
| Nme2_ | CATGGC | | GCCAT | | gAGAAAGG | | CCCGAAACGTTGCTACAATAAGGCCGTCTGAA | |
| ED15+_ | CCCAGC | | | | GACTGAAG | | AAGATGTGCCGCAACGCTCTGCCCCTTAAAGC | |
| G_9FE_ | AGCTT | | | | | | TTCTGCTTTAAGGGGCATCGTTACCATCGACgA | |
| PB13 | | | | | | | GAAAGGGACTGAAGCTGCTGGGGCCAT | |
| pU6_A1AT_ | TAAAAA | 20961 | CTGCTGGG | 21771 | ACCATCGAC | 22581 | TAAAAACATGGCCCCAGCAGCTTGTTGTAGCT | 23391 |
| Nme2_ | CATGGC | | GCCA | | gAGAAAGG | | CCCGAAACGTTGCTACAATAAGGCCGTCTGAA | |
| ED15+_ | CCCAGC | | | | GACTGAAG | | AAGATGTGCCGCAACGCTCTGCCCCTTAAAGC | |
| G_9FE_ | AGCTT | | | | | | TTCTGCTTTAAGGGGCATCGTTACCATCGACgA | |
| PB12 | | | | | | | GAAAGGGACTGAAGCTGCTGGGGCCA | |
| pU6_A1AT_ | TAAAAA | 20962 | CTGCTGGG | 21772 | ACCATCGAC | 22582 | TAAAAACATGGCCCCAGCAGCTTGTTGTAGCT | 23392 |
| Nme2_ | CATGGC | | GCC | | gAGAAAGG | | CCCGAAACGTTGCTACAATAAGGCCGTCTGAA | |
| ED15+_ | CCCAGC | | | | GACTGAAG | | AAGATGTGCCGCAACGCTCTGCCCCTTAAAGC | |
| G_9FE_ | AGCTT | | | | | | TTCTGCTTTAAGGGGCATCGTTACCATCGACgA | |
| PB11 | | | | | | | GAAAGGGACTGAAGCTGCTGGGGCC | |
| pU6_A1AT_ | TAAAAA | 20963 | CTGCTGGG | 21773 | ACCATCGAC | 22583 | TAAAAACATGGCCCCAGCAGCTTGTTGTAGCT | 23393 |
| Nme2_ | CATGGC | | GC | | gAGAAAGG | | CCCGAAACGTTGCTACAATAAGGCCGTCTGAA | |
| ED15+_ | CCCAGC | | | | GACTGAAG | | AAGATGTGCCGCAACGCTCTGCCCCTTAAAGC | |
| G_9FE_ | AGCTT | | | | | | TTCTGCTTTAAGGGGCATCGTTACCATCGACgA | |
| PB10 | | | | | | | GAAAGGGACTGAAGCTGCTGGGGC | |
| pU6_A1AT_ | TAAAAA | 20964 | CTGCTGGG | | ACCATCGAC | 22584 | TAAAAACATGGCCCCAGCAGCTTGTTGTAGCT | 23394 |
| Nme2_ | CATGGC | | G | | gAGAAAGG | | CCCGAAACGTTGCTACAATAAGGCCGTCTGAA | |
| ED15+_ | CCCAGC | | | | GACTGAAG | | AAGATGTGCCGCAACGCTCTGCCCCTTAAAGC | |
| G_9FE_ | AGCTT | | | | | | TTCTGCTTTAAGGGGCATCGTTACCATCGACgA | |
| PB9 | | | | | | | GAAAGGGACTGAAGCTGCTGGGG | |
| pU6_A1AT_ | TAAAAA | 20965 | CTGCTGGG | | ACCATCGAC | 22585 | TAAAAACATGGCCCCAGCAGCTTGTTGTAGCT | 23395 |
| Nme2_ | CATGGC | | | | gAGAAAGG | | CCCGAAACGTTGCTACAATAAGGCCGTCTGAA | |
| ED15+_ | CCCAGC | | | | GACTGAAG | | AAGATGTGCCGCAACGCTCTGCCCCTTAAAGC | |
| G_9FE_ | AGCTT | | | | | | TTCTGCTTTAAGGGGCATCGTTACCATCGACgA | |
| PB8 | | | | | | | GAAAGGGACTGAAGCTGCTGGG | |
| pU6_A1AT_ | TAAAAA | 20966 | CTGCTGGG | 21776 | ATCGACgAG | 22586 | TAAAAACATGGCCCCAGCAGCTTGTTGTAGCT | 23396 |
| Nme2_ | CATGGC | | GCCATGTT | | AAAGGGAC | | CCCGAAACGTTGCTACAATAAGGCCGTCTGAA | |
| ED15+_ | CCCAGC | | T | | TGAAG | | AAGATGTGCCGCAACGCTCTGCCCCTTAAAGC | |
| G_6FE_ | AGCTT | | | | | | TTCTGCTTTAAGGGGCATCGTTATCGACgAGAA | |
| PB17 | | | | | | | AGGGACTGAAGCTGCTGGGGCCATGTTT | |
| pU6_A1AT_ | TAAAAA | 20967 | CTGCTGGG | 21777 | ATCGACgAG | 22587 | TAAAAACATGGCCCCAGCAGCTTGTTGTAGCT | 23397 |
| Nme2_ | CATGGC | | GCCATGTT | | AAAGGGAC | | CCCGAAACGTTGCTACAATAAGGCCGTCTGAA | |
| ED15+_ | CCCAGC | | | | TGAAG | | AAGATGTGCCGCAACGCTCTGCCCCTTAAAGC | |
| G_6FE_ | AGCTT | | | | | | TTCTGCTTTAAGGGGCATCGTTATCGACgAGAA | |
| PB16 | | | | | | | AGGGACTGAAGCTGCTGGGGCCATGTT | |
| pU6_A1AT_ | TAAAAA | 20968 | CTGCTGGG | 21778 | ATCGACgAG | 22588 | TAAAAACATGGCCCCAGCAGCTTGTTGTAGCT | 23398 |
| Nme2_ | CATGGC | | GCCATGT | | AAAGGGAC | | CCCGAAACGTTGCTACAATAAGGCCGTCTGAA | |
| ED15+_ | CCCAGC | | | | TGAAG | | AAGATGTGCCGCAACGCTCTGCCCCTTAAAGC | |
| G_6FE_ | AGCTT | | | | | | TTCTGCTTTAAGGGGCATCGTTATCGACgAGAA | |
| PB15 | | | | | | | AGGGACTGAAGCTGCTGGGGCCATGT | |
| pU6_A1AT_ | TAAAAA | 20969 | CTGCTGGG | 21779 | ATCGACgAG | 22589 | TAAAAACATGGCCCCAGCAGCTTGTTGTAGCT | 23399 |
| Nme2_ | CATGGC | | GCCATG | | AAAGGGAC | | CCCGAAACGTTGCTACAATAAGGCCGTCTGAA | |
| ED15+_ | CCCAGC | | | | TGAAG | | AAGATGTGCCGCAACGCTCTGCCCCTTAAAGC | |
| G_6FE_ | AGCTT | | | | | | TTCTGCTTTAAGGGGCATCGTTATCGACgAGAA | |
| PB14 | | | | | | | AGGGACTGAAGCTGCTGGGGCCATG | |
| pU6_A1AT_ | TAAAAA | 20970 | CTGCTGGG | 21780 | ATCGACgAG | 22590 | TAAAAACATGGCCCCAGCAGCTTGTTGTAGCT | 23400 |
| Nme2_ | CATGGC | | GCCAT | | AAAGGGAC | | CCCGAAACGTTGCTACAATAAGGCCGTCTGAA | |
| ED15+_ | CCCAGC | | | | TGAAG | | AAGATGTGCCGCAACGCTCTGCCCCTTAAAGC | |
| G_6FE_ | AGCTT | | | | | | TTCTGCTTTAAGGGGCATCGTTATCGACgAGAA | |
| PB13 | | | | | | | AGGGACTGAAGCTGCTGGGGCCAT | |
| pU6_A1AT_ | TAAAAA | 20971 | CTGCTGGG | 21781 | ATCGACgAG | 22591 | TAAAAACATGGCCCCAGCAGCTTGTTGTAGCT | 23401 |
| Nme2_ | CATGGC | | GCCA | | AAAGGGAC | | CCCGAAACGTTGCTACAATAAGGCCGTCTGAA | |
| ED15+_ | CCCAGC | | | | TGAAG | | AAGATGTGCCGCAACGCTCTGCCCCTTAAAGC | |
| G_6FE_ | AGCTT | | | | | | TTCTGCTTTAAGGGGCATCGTTATCGACgAGAA | |
| PB12 | | | | | | | AGGGACTGAAGCTGCTGGGGCCA | |
| pU6_A1AT_ | TAAAAA | 20972 | CTGCTGGG | 21782 | ATCGACgAG | 22592 | TAAAAACATGGCCCCAGCAGCTTGTTGTAGCT | 23402 |
| Nme2_ | CATGGC | | GCC | | AAAGGGAC | | CCCGAAACGTTGCTACAATAAGGCCGTCTGAA | |
| ED15+_ | CCCAGC | | | | TGAAG | | AAGATGTGCCGCAACGCTCTGCCCCTTAAAGC | |
| G_6FE_ | AGCTT | | | | | | TTCTGCTTTAAGGGGCATCGTTATCGACgAGAA | |
| PB11 | | | | | | | AGGGACTGAAGCTGCTGGGGCC | |
| pU6_A1AT_ | TAAAAA | 20973 | CTGCTGGG | 21783 | ATCGACgAG | 22593 | TAAAAACATGGCCCCAGCAGCTTGTTGTAGCT | 23403 |
| Nme2_ | CATGGC | | GC | | AAAGGGAC | | CCCGAAACGTTGCTACAATAAGGCCGTCTGAA | |
| ED15+_ | CCCAGC | | | | TGAAG | | AAGATGTGCCGCAACGCTCTGCCCCTTAAAGC | |
| G_6FE_ | AGCTT | | | | | | TTCTGCTTTAAGGGGCATCGTTATCGACgAGAA | |
| PB10 | | | | | | | AGGGACTGAAGCTGCTGGGGC | |
| pU6_A1AT_ | TAAAAA | 20974 | CTGCTGGG | | ATCGACgAG | 22594 | TAAAAACATGGCCCCAGCAGCTTGTTGTAGCT | 23404 |
| Nme2_ | CATGGC | | G | | AAAGGGAC | | CCCGAAACGTTGCTACAATAAGGCCGTCTGAA | |
| ED15+_ | CCCAGC | | | | TGAAG | | AAGATGTGCCGCAACGCTCTGCCCCTTAAAGC | |
| G_6FE_ | AGCTT | | | | | | TTCTGCTTTAAGGGGCATCGTTATCGACgAGAA | |
| PB9 | | | | | | | AGGGACTGAAGCTGCTGGGG | |
| pU6_A1AT_ | TAAAAA | 20975 | CTGCTGGG | | ATCGACgAG | 22595 | TAAAAACATGGCCCCAGCAGCTTGTTGTAGCT | 23405 |
| Nme2_ | CATGGC | | | | AAAGGGAC | | CCCGAAACGTTGCTACAATAAGGCCGTCTGAA | |
| ED15+_ | CCCAGC | | | | TGAAG | | AAGATGTGCCGCAACGCTCTGCCCCTTAAAGC | |
| G_6FE_ | AGCTT | | | | | | TTCTGCTTTAAGGGGCATCGTTATCGACgAGAA | |
| PB8 | | | | | | | AGGGACTGAAGCTGCTGGG | |
| pU6_A1AT_ | TAAAAA | 20976 | CTGCTGGG | 21786 | TCGACgAGA | 22596 | TAAAAACATGGCCCCAGCAGCTTGTTGTAGCT | 23406 |
| Nme2_ | CATGGC | | GCCATGTT | | AAGGGACT | | CCCGAAACGTTGCTACAATAAGGCCGTCTGAA | |
| ED15+_ | CCCAGC | | T | | GAAG | | AAGATGTGCCGCAACGCTCTGCCCCTTAAAGC | |
| G_5FE_ | AGCTT | | | | | | TTCTGCTTTAAGGGGCATCGTTTCGACgAGAAA | |
| PB17 | | | | | | | GGGACTGAAGCTGCTGGGGCCATGTTT | |
| pU6_A1AT_ | TAAAAA | 20977 | CTGCTGGG | 21787 | TCGACgAGA | 22597 | TAAAAACATGGCCCCAGCAGCTTGTTGTAGCT | 23407 |
| Nme2_ | CATGGC | | GCCATGTT | | AAGGGACT | | CCCGAAACGTTGCTACAATAAGGCCGTCTGAA | |
| ED15+_ | CCCAGC | | | | GAAG | | AAGATGTGCCGCAACGCTCTGCCCCTTAAAGC | |
| G_5FE_ | AGCTT | | | | | | TTCTGCTTTAAGGGGCATCGTTTCGACgAGAAA | |
| PB16 | | | | | | | GGGACTGAAGCTGCTGGGGCCATGTT | |
| pU6_A1AT_ | TAAAAA | 20978 | CTGCTGGG | 21788 | TCGACgAGA | 22598 | TAAAAACATGGCCCCAGCAGCTTGTTGTAGCT | 23408 |
| Nme2_ | CATGGC | | GCCATGT | | AAGGGACT | | CCCGAAACGTTGCTACAATAAGGCCGTCTGAA | |
| ED15+_ | CCCAGC | | | | GAAG | | AAGATGTGCCGCAACGCTCTGCCCCTTAAAGC | |
| G_5FE_ | AGCTT | | | | | | TTCTGCTTTAAGGGGCATCGTTTCGACgAGAAA | |
| PB15 | | | | | | | GGGACTGAAGCTGCTGGGGCCATGT | |
| pU6_A1AT_ | TAAAAA | 20979 | CTGCTGGG | 21789 | TCGACgAGA | 22599 | TAAAAACATGGCCCCAGCAGCTTGTTGTAGCT | 23409 |
| Nme2_ | CATGGC | | GCCATG | | AAGGGACT | | CCCGAAACGTTGCTACAATAAGGCCGTCTGAA | |
| ED15+_ | CCCAGC | | | | GAAG | | AAGATGTGCCGCAACGCTCTGCCCCTTAAAGC | |
| G_5FE_ | AGCTT | | | | | | TTCTGCTTTAAGGGGCATCGTTTCGACgAGAAA | |
| PB14 | | | | | | | GGGACTGAAGCTGCTGGGGCCATG | |
| pU6_A1AT_ | TAAAAA | 20980 | CTGCTGGG | 21790 | TCGACgAGA | 22600 | TAAAAACATGGCCCCAGCAGCTTGTTGTAGCT | 23410 |
| Nme2_ | CATGGC | | GCCAT | | AAGGGACT | | CCCGAAACGTTGCTACAATAAGGCCGTCTGAA | |
| ED15+_ | CCCAGC | | | | GAAG | | AAGATGTGCCGCAACGCTCTGCCCCTTAAAGC | |
| G_5FE_ | AGCTT | | | | | | TTCTGCTTTAAGGGGCATCGTTTCGACgAGAAA | |
| PB13 | | | | | | | GGGACTGAAGCTGCTGGGGCCAT | |
| pU6_A1AT_ | TAAAAA | 20981 | CTGCTGGG | 21791 | TCGACgAGA | 22601 | TAAAAACATGGCCCCAGCAGCTTGTTGTAGCT | 23411 |
| Nme2_ | CATGGC | | GCCA | | AAGGGACT | | CCCGAAACGTTGCTACAATAAGGCCGTCTGAA | |
| ED15+_ | CCCAGC | | | | GAAG | | AAGATGTGCCGCAACGCTCTGCCCCTTAAAGC | |
| G_5FE_ | AGCTT | | | | | | TTCTGCTTTAAGGGGCATCGTTTCGACgAGAAA | |
| PB12 | | | | | | | GGGACTGAAGCTGCTGGGGCCA | |
| pU6_A1AT_ | TAAAAA | 20982 | CTGCTGGG | 21792 | TCGACgAGA | 22602 | TAAAAACATGGCCCCAGCAGCTTGTTGTAGCT | 23412 |
| Nme2_ | CATGGC | | GCC | | AAGGGACT | | CCCGAAACGTTGCTACAATAAGGCCGTCTGAA | |
| ED15+_ | CCCAGC | | | | GAAG | | AAGATGTGCCGCAACGCTCTGCCCCTTAAAGC | |
| G_5FE_ | AGCTT | | | | | | TTCTGCTTTAAGGGGCATCGTTTCGACgAGAAA | |
| PB11 | | | | | | | GGGACTGAAGCTGCTGGGGCC | |
| pU6_A1AT_ | TAAAAA | 20983 | CTGCTGGG | 21793 | TCGACgAGA | 22603 | TAAAAACATGGCCCCAGCAGCTTGTTGTAGCT | 23413 |
| Nme2_ | CATGGC | | GC | | AAGGGACT | | CCCGAAACGTTGCTACAATAAGGCCGTCTGAA | |
| ED15+_ | CCCAGC | | | | GAAG | | AAGATGTGCCGCAACGCTCTGCCCCTTAAAGC | |
| G_5FE_ | AGCTT | | | | | | TTCTGCTTTAAGGGGCATCGTTTCGACgAGAAA | |
| PB10 | | | | | | | GGGACTGAAGCTGCTGGGGC | |
| pU6_A1AT_ | TAAAAA | 20984 | CTGCTGGG | | TCGACgAGA | 22604 | TAAAAACATGGCCCCAGCAGCTTGTTGTAGCT | 23414 |
| Nme2_ | CATGGC | | G | | AAGGGACT | | CCCGAAACGTTGCTACAATAAGGCCGTCTGAA | |
| ED15+_ | CCCAGC | | | | GAAG | | AAGATGTGCCGCAACGCTCTGCCCCTTAAAGC | |
| G_5FE_ | AGCTT | | | | | | TTCTGCTTTAAGGGGCATCGTTTCGACgAGAAA | |
| PB9 | | | | | | | GGGACTGAAGCTGCTGGGG | |
| pU6_A1AT_ | TAAAAA | 20985 | CTGCTGGG | | TCGACgAGA | | TAAAAACATGGCCCCAGCAGCTTGTTGTAGCT | 23415 |
| Nme2_ | CATGGC | | | | AAGGGACT | | CCCGAAACGTTGCTACAATAAGGCCGTCTGAA | |
| ED15+_ | CCCAGC | | | | GAAG | 22605 | AAGATGTGCCGCAACGCTCTGCCCCTTAAAGC | |
| G_5FE_ | AGCTT | | | | | | TTCTGCTTTAAGGGGCATCGTTTCGACgAGAAA | |
| PB8 | | | | | | | GGGACTGAAGCTGCTGGG | |
| pU6_A1AT_ | TAAAAA | 20986 | CTGCTGGG | 21796 | GACgAGAA | 22606 | TAAAAACATGGCCCCAGCAGCTTGTTGTAGCT | 23416 |
| Nme2_ | CATGGC | | GCCATGTT | | AGGGACTG | | CCCGAAACGTTGCTACAATAAGGCCGTCTGAA | |
| ED15+_ | CCCAGC | | T | | AAG | | AAGATGTGCCGCAACGCTCTGCCCCTTAAAGC | |
| G_3FE_ | AGCTT | | | | | | TTCTGCTTTAAGGGGCATCGTTGACgAGAAAG | |
| PB17 | | | | | | | GGACTGAAGCTGCTGGGGCCATGTTT | |
| pU6_A1AT_ | TAAAAA | 20987 | CTGCTGGG | 21797 | GACgAGAA | 22607 | TAAAAACATGGCCCCAGCAGCTTGTTGTAGCT | 23417 |
| Nme2_ | CATGGC | | GCCATGTT | | AGGGACTG | | CCCGAAACGTTGCTACAATAAGGCCGTCTGAA | |
| ED15+_ | CCCAGC | | | | AAG | | AAGATGTGCCGCAACGCTCTGCCCCTTAAAGC | |
| G_3FE_ | AGCTT | | | | | | TTCTGCTTTAAGGGGCATCGTTGACgAGAAAG | |
| PB16 | | | | | | | GGACTGAAGCTGCTGGGGCCATGTT | |
| pU6_A1AT_ | TAAAAA | 20988 | CTGCTGGG | 21798 | GACgAGAA | 22608 | TAAAAACATGGCCCCAGCAGCTTGTTGTAGCT | 23418 |
| Nme2_ | CATGGC | | GCCATGT | | AGGGACTG | | CCCGAAACGTTGCTACAATAAGGCCGTCTGAA | |
| ED15+_ | CCCAGC | | | | AAG | | AAGATGTGCCGCAACGCTCTGCCCCTTAAAGC | |
| G_3FE_ | AGCTT | | | | | | TTCTGCTTTAAGGGGCATCGTTGACgAGAAAG | |
| PB15 | | | | | | | GGACTGAAGCTGCTGGGGCCATGT | |
| pU6_A1AT_ | TAAAAA | 20989 | CTGCTGGG | 21799 | GACgAGAA | 22609 | TAAAAACATGGCCCCAGCAGCTTGTTGTAGCT | 23419 |
| Nme2_ | CATGGC | | GCCATG | | AGGGACTG | | CCCGAAACGTTGCTACAATAAGGCCGTCTGAA | |
| ED15+_ | CCCAGC | | | | AAG | | AAGATGTGCCGCAACGCTCTGCCCCTTAAAGC | |
| G_3FE_ | AGCTT | | | | | | TTCTGCTTTAAGGGGCATCGTTGACgAGAAAG | |
| PB14 | | | | | | | GGACTGAAGCTGCTGGGGCCATG | |
| pU6_A1AT_ | TAAAAA | 20990 | CTGCTGGG | 21800 | GACgAGAA | 22610 | TAAAAACATGGCCCCAGCAGCTTGTTGTAGCT | 23420 |
| Nme2_ | CATGGC | | GCCAT | | AGGGACTG | | CCCGAAACGTTGCTACAATAAGGCCGTCTGAA | |
| ED15+_ | CCCAGC | | | | AAG | | AAGATGTGCCGCAACGCTCTGCCCCTTAAAGC | |
| G_3FE_ | AGCTT | | | | | | TTCTGCTTTAAGGGGCATCGTTGACgAGAAAG | |
| PB13 | | | | | | | GGACTGAAGCTGCTGGGGCCAT | |
| pU6_A1AT_ | TAAAAA | 20991 | CTGCTGGG | 21801 | GACgAGAA | 22611 | TAAAAACATGGCCCCAGCAGCTTGTTGTAGCT | 23421 |
| Nme2_ | CATGGC | | GCCA | | AGGGACTG | | CCCGAAACGTTGCTACAATAAGGCCGTCTGAA | |
| ED15+_ | CCCAGC | | | | AAG | | AAGATGTGCCGCAACGCTCTGCCCCTTAAAGC | |
| G_3FE_ | AGCTT | | | | | | TTCTGCTTTAAGGGGCATCGTTGACgAGAAAG | |
| PB12 | | | | | | | GGACTGAAGCTGCTGGGGCCA | |
| pU6_A1AT_ | TAAAAA | 20992 | CTGCTGGG | 21802 | GACgAGAA | 22612 | TAAAAACATGGCCCCAGCAGCTTGTTGTAGCT | 23422 |
| Nme2_ | CATGGC | | | | AGGGACTG | | CCCGAAACGTTGCTACAATAAGGCCGTCTGAA | |
| ED15+_ | CCCAGC | | | | AAG | | AAGATGTGCCGCAACGCTCTGCCCCTTAAAGC | |
| G_3FE_ | AGCTT | | GCC | | | | TTCTGCTTTAAGGGGCATCGTTGACgAGAAAG | |
| PB11 | | | | | | | GGACTGAAGCTGCTGGGGCC | |
| pU6_A1AT_ | TAAAAA | 20993 | CTGCTGGG | 21803 | GACgAGAA | 22613 | TAAAAACATGGCCCCAGCAGCTTGTTGTAGCT | 23423 |
| Nme2_ | CATGGC | | GC | | AGGGACTG | | CCCGAAACGTTGCTACAATAAGGCCGTCTGAA | |
| ED15+_ | CCCAGC | | | | AAG | | AAGATGTGCCGCAACGCTCTGCCCCTTAAAGC | |
| G_3FE_ | AGCTT | | | | | | TTCTGCTTTAAGGGGCATCGTTGACgAGAAAG | |
| PB10 | | | | | | | GGACTGAAGCTGCTGGGGC | |
| pU6_A1AT_ | TAAAAA | 20994 | CTGCTGGG | | GACgAGAA | 22614 | TAAAAACATGGCCCCAGCAGCTTGTTGTAGCT | 23424 |
| Nme2_ | CATGGC | | G | | AGGGACTG | | CCCGAAACGTTGCTACAATAAGGCCGTCTGAA | |
| ED15+_ | CCCAGC | | | | AAG | | AAGATGTGCCGCAACGCTCTGCCCCTTAAAGC | |
| G_3FE_ | AGCTT | | | | | | TTCTGCTTTAAGGGGCATCGTTGACgAGAAAG | |
| PB9 | | | | | | | GGACTGAAGCTGCTGGGG | |
| pU6_A1AT_ | TAAAAA | 20995 | CTGCTGGG | | GACgAGAA | 22615 | TAAAAACATGGCCCCAGCAGCTTGTTGTAGCT | 23425 |
| Nme2_ | CATGGC | | | | AGGGACTG | | CCCGAAACGTTGCTACAATAAGGCCGTCTGAA | |
| ED15+_ | CCCAGC | | | | AAG | | AAGATGTGCCGCAACGCTCTGCCCCTTAAAGC | |
| G_3FE_ | AGCTT | | | | | | TTCTGCTTTAAGGGGCATCGTTGACgAGAAAG | |
| PB8 | | | | | | | GGACTGAAGCTGCTGGG | |
| pU6_A1AT_ | AGGCC | 20996 | AGCCTTAT | 21806 | ACATGGCCC | 22616 | AGGCCGTGCATAAGGCTGTGGTTTTAGAGCTA | 23426 |
| SpCas9- | GTGCAT | | GCACGGCC | | CAGCAGCTT | | GAAATAGCAAGTTAAAATAAGGCTAGTCCGTT | |
| NG_SpRY_ | AAGGCT | | T | | CAGTCCCTT | | ATCAACTTGAAAAAGTGGCACCGAGTCGGTGC | |
| ED15-_ | GTG | | | | TCTcGTCGA | | ACATGGCCCCAGCAGCTTCAGTCCCTTTCTcGT | |
| 30FE_PB17 | | | | | TGGTCAGCA | | CGATGGTCAGCACAGCCTTATGCACGGCCT | |
| | | | | | C | | | |
| pU6_A1AT_ | AGGCC | 20997 | AGCCTTAT | 21807 | ACATGGCCC | 22617 | AGGCCGTGCATAAGGCTGTGGTTTTAGAGCTA | 23427 |
| SpCas9- | GTGCAT | | GCACGGCC | | CAGCAGCTT | | GAAATAGCAAGTTAAAATAAGGCTAGTCCGTT | |
| NG_SpRY_ | AAGGCT | | | | CAGTCCCTT | | ATCAACTTGAAAAAGTGGCACCGAGTCGGTGC | |
| ED15-_ | GTG | | | | TCTcGTCGA | | ACATGGCCCCAGCAGCTTCAGTCCCTTTCTcGT | |
| 30FE_PB16 | | | | | TGGTCAGCA | | CGATGGTCAGCACAGCCTTATGCACGGCC | |
| | | | | | C | | | |
| pU6_A1AT_ | AGGCC | 20998 | AGCCTTAT | 21808 | ACATGGCCC | 22618 | AGGCCGTGCATAAGGCTGTGGTTTTAGAGCTA | 23428 |
| SpCas9- | GTGCAT | | GCACGGC | | CAGCAGCTT | | GAAATAGCAAGTTAAAATAAGGCTAGTCCGTT | |
| NG_SpRY_ | AAGGCT | | | | CAGTCCCTT | | ATCAACTTGAAAAAGTGGCACCGAGTCGGTGC | |
| ED15-_ | GTG | | | | TCTcGTCGA | | ACATGGCCCCAGCAGCTTCAGTCCCTTTCTcGT | |
| 30FE_PB15 | | | | | TGGTCAGCA | | CGATGGTCAGCACAGCCTTATGCACGGC | |
| | | | | | C | | | |
| pU6_A1AT_ | AGGCC | 20999 | AGCCTTAT | 21809 | ACATGGCCC | 22619 | AGGCCGTGCATAAGGCTGTGGTTTTAGAGCTA | 23429 |
| SpCas9- | GTGCAT | | GCACGG | | CAGCAGCTT | | GAAATAGCAAGTTAAAATAAGGCTAGTCCGTT | |
| NG_SpRY_ | AAGGCT | | | | CAGTCCCTT | | ATCAACTTGAAAAAGTGGCACCGAGTCGGTGC | |
| ED15-_ | GTG | | | | TCTcGTCGA | | ACATGGCCCCAGCAGCTTCAGTCCCTTTCTcGT | |
| 30FE_PB14 | | | | | TGGTCAGCA | | CGATGGTCAGCACAGCCTTATGCACGG | |
| | | | | | C | | | |
| pU6_A1AT_ | AGGCC | 21000 | AGCCTTAT | 21810 | ACATGGCCC | 22620 | AGGCCGTGCATAAGGCTGTGGTTTTAGAGCTA | 23430 |
| SpCas9- | GTGCAT | | GCACG | | CAGCAGCTT | | GAAATAGCAAGTTAAAATAAGGCTAGTCCGTT | |
| NG_SpRY_ | AAGGCT | | | | CAGTCCCTT | | ATCAACTTGAAAAAGTGGCACCGAGTCGGTGC | |
| ED15-_ | GTG | | | | TCTcGTCGA | | ACATGGCCCCAGCAGCTTCAGTCCCTTTCTcGT | |
| 30FE_PB13 | | | | | TGGTCAGCA | | CGATGGTCAGCACAGCCTTATGCACG | |
| | | | | | C | | | |
| pU6_A1AT_ | AGGCC | 21001 | AGCCTTAT | 21811 | ACATGGCCC | 22621 | AGGCCGTGCATAAGGCTGTGGTTTTAGAGCTA | 23431 |
| SpCas9- | GTGCAT | | GCAC | | CAGCAGCTT | | GAAATAGCAAGTTAAAATAAGGCTAGTCCGTT | |
| NG_SpRY_ | AAGGCT | | | | CAGTCCCTT | | ATCAACTTGAAAAAGTGGCACCGAGTCGGTGC | |
| ED15-_ | GTG | | | | TCTcGTCGA | | ACATGGCCCCAGCAGCTTCAGTCCCTTTCTCGT | |
| 30FE_PB12 | | | | | TGGTCAGCA | | CGATGGTCAGCACAGCCTTATGCAC | |
| | | | | | C | | | |
| pU6_A1AT_ | AGGCC | 21002 | AGCCTTAT | 21812 | ACATGGCCC | 22622 | AGGCCGTGCATAAGGCTGTGGTTTTAGAGCTA | 23432 |
| SpCas9- | GTGCAT | | GCA | | CAGCAGCTT | | GAAATAGCAAGTTAAAATAAGGCTAGTCCGTT | |
| NG_SpRY_ | AAGGCT | | | | CAGTCCCTT | | ATCAACTTGAAAAAGTGGCACCGAGTCGGTGC | |
| ED15-_ | GTG | | | | TCTcGTCGA | | ACATGGCCCCAGCAGCTTCAGTCCCTTTCTcGT | |
| 30FE_PB11 | | | | | TGGTCAGCA | | CGATGGTCAGCACAGCCTTATGCA | |
| | | | | | C | | | |
| pU6_A1AT_ | AGGCC | 21003 | AGCCTTAT | 21813 | ACATGGCCC | 22623 | AGGCCGTGCATAAGGCTGTGGTTTTAGAGCTA | 23433 |
| SpCas9- | GTGCAT | | GC | | CAGCAGCTT | | GAAATAGCAAGTTAAAATAAGGCTAGTCCGTT | |
| NG_SpRY_ | AAGGCT | | | | CAGTCCCTT | | ATCAACTTGAAAAAGTGGCACCGAGTCGGTGC | |
| ED15-_ | GTG | | | | TCTcGTCGA | | ACATGGCCCCAGCAGCTTCAGTCCCTTTCTcGT | |
| 30FE_PB10 | | | | | TGGTCAGCA | | CGATGGTCAGCACAGCCTTATGC | |
| | | | | | C | | | |
| pU6_A1AT_ | AGGCC | 21004 | AGCCTTAT | | ACATGGCCC | 22624 | AGGCCGTGCATAAGGCTGTGGTTTTAGAGCTA | 23434 |
| SpCas9- | GTGCAT | | G | | CAGCAGCTT | | GAAATAGCAAGTTAAAATAAGGCTAGTCCGTT | |
| NG_SpRY_ | AAGGCT | | | | CAGTCCCTT | | ATCAACTTGAAAAAGTGGCACCGAGTCGGTGC | |
| ED15-_ | GTG | | | | TCTcGTCGA | | ACATGGCCCCAGCAGCTTCAGTCCCTTTCTcGT | |
| 30FE_PB9 | | | | | TGGTCAGCA | | CGATGGTCAGCACAGCCTTATG | |
| | | | | | C | | | |
| pU6_A1AT_ | AGGCC | 21005 | AGCCTTAT | | ACATGGCCC | 22625 | AGGCCGTGCATAAGGCTGTGGTTTTAGAGCTA | 23435 |
| SpCas9- | GTGCAT | | | | CAGCAGCTT | | GAAATAGCAAGTTAAAATAAGGCTAGTCCGTT | |
| NG_SpRY_ | AAGGCT | | | | CAGTCCCTT | | ATCAACTTGAAAAAGTGGCACCGAGTCGGTGC | |
| ED15-_ | GTG | | | | TCTcGTCGA | | ACATGGCCCCAGCAGCTTCAGTCCCTTTCTcGT | |
| 30FE_PB8 | | | | | TGGTCAGCA | | CGATGGTCAGCACAGCCTTAT | |
| | | | | | C | | | |
| pU6_A1AT_ | AGGCC | 21006 | AGCCTTAT | 21816 | GCCCCAGCA | 22626 | AGGCCGTGCATAAGGCTGTGGTTTTAGAGCTA | 23436 |
| SpCas9- | GTGCAT | | GCACGGCC | | GCTTCAGTC | | GAAATAGCAAGTTAAAATAAGGCTAGTCCGTT | |
| NG_SpRY_ | AAGGCT | | T | | CCTTTCTcGT | | ATCAACTTGAAAAAGTGGCACCGAGTCGGTGC | |
| ED15-_ | GTG | | | | CGATGGTCA | | GCCCCAGCAGCTTCAGTCCCTTTCTcGTCGATG | |
| 25FE_PB17 | | | | | GCAC | | GTCAGCACAGCCTTATGCACGGCCT | |
| pU6_A1AT_ | AGGCC | 21007 | AGCCTTAT | 21817 | GCCCCAGCA | 22627 | AGGCCGTGCATAAGGCTGTGGTTTTAGAGCTA | 23437 |
| SpCas9- | GTGCAT | | GCACGGCC | | GCTTCAGTC | | GAAATAGCAAGTTAAAATAAGGCTAGTCCGTT | |
| NG_SpRY_ | AAGGCT | | | | CCTTTCTcGT | | ATCAACTTGAAAAAGTGGCACCGAGTCGGTGC | |
| ED15-_ | GTG | | | | CGATGGTCA | | GCCCCAGCAGCTTCAGTCCCTTTCTcGTCGATG | |
| 25FE_PB16 | | | | | GCAC | | GTCAGCACAGCCTTATGCACGGCC | |
| pU6_A1AT_ | AGGCC | 21008 | AGCCTTAT | 21818 | GCCCCAGCA | 22628 | AGGCCGTGCATAAGGCTGTGGTTTTAGAGCTA | 23438 |
| SpCas9- | GTGCAT | | GCACGGC | | GCTTCAGTC | | GAAATAGCAAGTTAAAATAAGGCTAGTCCGTT | |
| NG_SpRY_ | AAGGCT | | | | CCTTTCTCGT | | ATCAACTTGAAAAAGTGGCACCGAGTCGGTGC | |
| ED15-_ | GTG | | | | CGATGGTCA | | GCCCCAGCAGCTTCAGTCCCTTTCTcGTCGATG | |
| 25FE_PB15 | | | | | GCAC | | GTCAGCACAGCCTTATGCACGGC | |
| pU6_A1AT_ | AGGCC | 21009 | AGCCTTAT | 21819 | GCCCCAGCA | 22629 | AGGCCGTGCATAAGGCTGTGGTTTTAGAGCTA | 23439 |
| SpCas9- | GTGCAT | | GCACGG | | GCTTCAGTC | | GAAATAGCAAGTTAAAATAAGGCTAGTCCGTT | |
| NG_SpRY_ | AAGGCT | | | | CCTTTCTcGT | | ATCAACTTGAAAAAGTGGCACCGAGTCGGTGC | |
| ED15-_ | GTG | | | | CGATGGTCA | | GCCCCAGCAGCTTCAGTCCCTTTCTcGTCGATG | |
| 25FE_PB14 | | | | | GCAC | | GTCAGCACAGCCTTATGCACGG | |
| pU6_A1AT_ | AGGCC | 21010 | AGCCTTAT | 21820 | GCCCCAGCA | 22630 | AGGCCGTGCATAAGGCTGTGGTTTTAGAGCTA | 23440 |
| SpCas9- | GTGCAT | | GCACG | | GCTTCAGTC | | GAAATAGCAAGTTAAAATAAGGCTAGTCCGTT | |
| NG_SpRY_ | AAGGCT | | | | CCTTTCTcGT | | ATCAACTTGAAAAAGTGGCACCGAGTCGGTGC | |
| ED15-_ | GTG | | | | CGATGGTCA | | GCCCCAGCAGCTTCAGTCCCTTTCTcGTCGATG | |
| 25FE_PB13 | | | | | GCAC | | GTCAGCACAGCCTTATGCACG | |
| pU6_A1AT_ | AGGCC | 21011 | AGCCTTAT | 21821 | GCCCCAGCA | 22631 | AGGCCGTGCATAAGGCTGTGGTTTTAGAGCTA | 23441 |
| SpCas9- | GTGCAT | | GCAC | | GCTTCAGTC | | GAAATAGCAAGTTAAAATAAGGCTAGTCCGTT | |
| NG_SpRY_ | AAGGCT | | | | CCTTTCTCGT | | ATCAACTTGAAAAAGTGGCACCGAGTCGGTGC | |
| ED15-_ | GTG | | | | CGATGGTCA | | GCCCCAGCAGCTTCAGTCCCTTTCTcGTCGATG | |
| 25FE_PB12 | | | | | GCAC | | GTCAGCACAGCCTTATGCAC | |
| pU6_A1AT_ | AGGCC | 21012 | AGCCTTAT | 21822 | GCCCCAGCA | 22632 | AGGCCGTGCATAAGGCTGTGGTTTTAGAGCTA | 23442 |
| SpCas9- | GTGCAT | | GCA | | GCTTCAGTC | | GAAATAGCAAGTTAAAATAAGGCTAGTCCGTT | |
| NG_SpRY_ | AAGGCT | | | | CCTTTCTcGT | | ATCAACTTGAAAAAGTGGCACCGAGTCGGTGC | |
| ED15-_ | GTG | | | | CGATGGTCA | | GCCCCAGCAGCTTCAGTCCCTTTCTcGTCGATG | |
| 25FE_PB11 | | | | | GCAC | | GTCAGCACAGCCTTATGCA | |
| pU6_A1AT_ | AGGCC | 21013 | AGCCTTAT | 21823 | GCCCCAGCA | 22633 | AGGCCGTGCATAAGGCTGTGGTTTTAGAGCTA | 23443 |
| SpCas9- | GTGCAT | | GC | | GCTTCAGTC | | GAAATAGCAAGTTAAAATAAGGCTAGTCCGTT | |
| NG_SpRY_ | AAGGCT | | | | CCTTTCTcGT | | ATCAACTTGAAAAAGTGGCACCGAGTCGGTGC | |
| ED15-_ | GTG | | | | CGATGGTCA | | GCCCCAGCAGCTTCAGTCCCTTTCTcGTCGATG | |
| 25FE_PB10 | | | | | GCAC | | GTCAGCACAGCCTTATGC | |
| pU6_A1AT_ | AGGCC | 21014 | AGCCTTAT | | GCCCCAGCA | 22634 | AGGCCGTGCATAAGGCTGTGGTTTTAGAGCTA | 23444 |
| SpCas9- | GTGCAT | | G | | GCTTCAGTC | | GAAATAGCAAGTTAAAATAAGGCTAGTCCGTT | |
| NG_SpRY_ | AAGGCT | | | | CCTTTCTcGT | | ATCAACTTGAAAAAGTGGCACCGAGTCGGTGC | |
| ED15-_ | GTG | | | | CGATGGTCA | | GCCCCAGCAGCTTCAGTCCCTTTCTcGTCGATG | |
| 25FE_PB9 | | | | | GCAC | | GTCAGCACAGCCTTATG | |
| pU6_A1AT_ | AGGCC | 21015 | AGCCTTAT | | GCCCCAGCA | 22635 | AGGCCGTGCATAAGGCTGTGGTTTTAGAGCTA | 23445 |
| SpCas9- | GTGCAT | | | | GCTTCAGTC | | GAAATAGCAAGTTAAAATAAGGCTAGTCCGTT | |
| NG_SpRY_ | AAGGCT | | | | CCTTTCTcGT | | ATCAACTTGAAAAAGTGGCACCGAGTCGGTGC | |
| ED15-_ | GTG | | | | CGATGGTCA | | GCCCCAGCAGCTTCAGTCCCTTTCTcGTCGATG | |
| 25FE_PB8 | | | | | GCAC | | GTCAGCACAGCCTTAT | |
| pU6_A1AT_ | AGGCC | 21016 | AGCCTTAT | 21826 | AGCAGCTTC | 22636 | AGGCCGTGCATAAGGCTGTGGTTTTAGAGCTA | 23446 |
| SpCas9- | GTGCAT | | GCACGGCC | | AGTCCCTTT | | GAAATAGCAAGTTAAAATAAGGCTAGTCCGTT | |
| NG_SpRY_ | AAGGCT | | T | | CTCGTCGAT | | ATCAACTTGAAAAAGTGGCACCGAGTCGGTGC | |
| ED15-_ | GTG | | | | GGTCAGCAC | | AGCAGCTTCAGTCCCTTTCTcGTCGATGGTCAG | |
| 20FE_PB17 | | | | | | | CACAGCCTTATGCACGGCCT | |
| pU6_A1AT_ | AGGCC | 21017 | AGCCTTAT | 21827 | AGCAGCTTC | 22637 | AGGCCGTGCATAAGGCTGTGGTTTTAGAGCTA | 23447 |
| SpCas9- | GTGCAT | | GCACGGCC | | AGTCCCTTT | | GAAATAGCAAGTTAAAATAAGGCTAGTCCGTT | |
| NG_SpRY_ | AAGGCT | | | | CTcGTCGAT | | ATCAACTTGAAAAAGTGGCACCGAGTCGGTGC | |
| ED15-_ | GTG | | | | | | AGCAGCTTCAGTCCCTTTCTcGTCGATGGTCAG | |
| 20FE_PB16 | | | | | | | CACAGCCTTATGCACGGCC | |
| pU6_A1AT_ | AGGCC | 21018 | AGCCTTAT | 21828 | AGCAGCTTC | 22638 | AGGCCGTGCATAAGGCTGTGGTTTTAGAGCTA | 23448 |
| SpCas9- | GTGCAT | | GCACGGC | | AGTCCCTTT | | GAAATAGCAAGTTAAAATAAGGCTAGTCCGTT | |
| NG_SpRY_ | AAGGCT | | | | CTCGTCGAT | | ATCAACTTGAAAAAGTGGCACCGAGTCGGTGC | |
| ED15-_ | GTG | | | | GGTCAGCAC | | AGCAGCTTCAGTCCCTTTCTcGTCGATGGTCAG | |
| 20FE_PB15 | | | | | | | CACAGCCTTATGCACGGC | |
| pU6_A1AT_ | AGGCC | 21019 | AGCCTTAT | 21829 | AGCAGCTTC | 22639 | AGGCCGTGCATAAGGCTGTGGTTTTAGAGCTA | 23449 |
| SpCas9- | GTGCAT | | GCACGG | | AGTCCCTTT | | GAAATAGCAAGTTAAAATAAGGCTAGTCCGTT | |
| NG_SpRY_ | AAGGCT | | | | CTCGTCGAT | | ATCAACTTGAAAAAGTGGCACCGAGTCGGTGC | |
| ED15-_ | GTG | | | | GGTCAGCAC | | AGCAGCTTCAGTCCCTTTCTcGTCGATGGTCAG | |
| 20FE_PB14 | | | | | | | CACAGCCTTATGCACGG | |
| pU6_A1AT_ | AGGCC | 21020 | AGCCTTAT | 21830 | AGCAGCTTC | 22640 | AGGCCGTGCATAAGGCTGTGGTTTTAGAGCTA | 23450 |
| SpCas9- | GTGCAT | | GCACG | | AGTCCCTTT | | GAAATAGCAAGTTAAAATAAGGCTAGTCCGTT | |
| NG_SpRY_ | AAGGCT | | | | CTcGTCGAT | | ATCAACTTGAAAAAGTGGCACCGAGTCGGTGC | |
| ED15-_ | GTG | | | | GGTCAGCAC | | AGCAGCTTCAGTCCCTTTCTcGTCGATGGTCAG | |
| 20FE_PB13 | | | | | | | CACAGCCTTATGCACG | |
| pU6_A1AT_ | AGGCC | 21021 | AGCCTTAT | 21831 | AGCAGCTTC | 22641 | AGGCCGTGCATAAGGCTGTGGTTTTAGAGCTA | 23451 |
| SpCas9- | GTGCAT | | GCAC | | AGTCCCTTT | | GAAATAGCAAGTTAAAATAAGGCTAGTCCGTT | |
| NG_SpRY_ | | | | | | | ATCAACTTGAAAAAGTGGCACCGAGTCGGTGC | |
| ED15-_ | AAGGCT | | | | CTcGTCGAT | | AGCAGCTTCAGTCCCTTTCTcGTCGATGGTCAG | |
| 20FE_PB12 | GTG | | | | GGTCAGCAC | | CACAGCCTTATGCAC | |
| pU6_A1AT_ | AGGCC | 21022 | AGCCTTAT | 21832 | AGCAGCTTC | 22642 | AGGCCGTGCATAAGGCTGTGGTTTTAGAGCTA | 23452 |
| SpCas9- | GTGCAT | | GCA | | AGTCCCTTT | | GAAATAGCAAGTTAAAATAAGGCTAGTCCGTT | |
| NG_SpRY_ | AAGGCT | | | | CTcGTCGAT | | ATCAACTTGAAAAAGTGGCACCGAGTCGGTGC | |
| ED15-_ | GTG | | | | GGTCAGCAC | | AGCAGCTTCAGTCCCTTTCTcGTCGATGGTCAG | |
| 20FE_PB11 | | | | | | | CACAGCCTTATGCA | |
| pU6_A1AT_ | AGGCC | 21023 | AGCCTTAT | 21833 | AGCAGCTTC | 22643 | AGGCCGTGCATAAGGCTGTGGTTTTAGAGCTA | 23453 |
| SpCas9- | GTGCAT | | GC | | AGTCCCTTT | | GAAATAGCAAGTTAAAATAAGGCTAGTCCGTT | |
| NG_SpRY_ | AAGGCT | | | | CTCGTCGAT | | ATCAACTTGAAAAAGTGGCACCGAGTCGGTGC | |
| ED15-_ | GTG | | | | GGTCAGCAC | | AGCAGCTTCAGTCCCTTTCTcGTCGATGGTCAG | |
| 20FE_PB10 | | | | | | | CACAGCCTTATGC | |
| pU6_A1AT_ | AGGCC | 21024 | AGCCTTAT | | AGCAGCTTC | 22644 | AGGCCGTGCATAAGGCTGTGGTTTTAGAGCTA | 23454 |
| SpCas9- | GTGCAT | | G | | AGTCCCTTT | | GAAATAGCAAGTTAAAATAAGGCTAGTCCGTT | |
| NG_SpRY_ | AAGGCT | | | | CTCGTCGAT | | ATCAACTTGAAAAAGTGGCACCGAGTCGGTGC | |
| ED15-_ | GTG | | | | GGTCAGCAC | | AGCAGCTTCAGTCCCTTTCTcGTCGATGGTCAG | |
| 20FE_PB9 | | | | | | | CACAGCCTTATG | |
| pU6_A1AT_ | AGGCC | 21025 | AGCCTTAT | | AGCAGCTTC | 22645 | AGGCCGTGCATAAGGCTGTGGTTTTAGAGCTA | 23455 |
| SpCas9- | GTGCAT | | | | AGTCCCTTT | | GAAATAGCAAGTTAAAATAAGGCTAGTCCGTT | |
| NG_SpRY_ | AAGGCT | | | | CTcGTCGAT | | ATCAACTTGAAAAAGTGGCACCGAGTCGGTGC | |
| ED15-_ | GTG | | | | GGTCAGCAC | | AGCAGCTTCAGTCCCTTTCTcGTCGATGGTCAG | |
| 20FE_PB8 | | | | | | | CACAGCCTTAT | |
| pU6_A1AT_ | AGGCC | 21026 | AGCCTTAT | 21836 | TTCAGTCCC | 22646 | AGGCCGTGCATAAGGCTGTGGTTTTAGAGCTA | 23456 |
| SpCas9- | GTGCAT | | GCACGGCC | | TTTCTcGTC | | GAAATAGCAAGTTAAAATAAGGCTAGTCCGTT | |
| NG_SpRY_ | AAGGCT | | T | | GATGGTCA | | ATCAACTTGAAAAAGTGGCACCGAGTCGGTGC | |
| ED15-_ | GTG | | | | GCAC | | TTCAGTCCCTTTCTcGTCGATGGTCAGCACAGC | |
| 14FE_PB17 | | | | | | | CTTATGCACGGCCT | |
| pU6_A1AT_ | AGGCC | 21027 | AGCCTTAT | 21837 | TTCAGTCCC | 22647 | AGGCCGTGCATAAGGCTGTGGTTTTAGAGCTA | 23457 |
| SpCas9- | GTGCAT | | GCACGGCC | | TTTCTCGTC | | GAAATAGCAAGTTAAAATAAGGCTAGTCCGTT | |
| NG_SpRY_ | AAGGCT | | | | GATGGTCA | | ATCAACTTGAAAAAGTGGCACCGAGTCGGTGC | |
| ED15-_ | GTG | | | | GCAC | | TTCAGTCCCTTTCTcGTCGATGGTCAGCACAGC | |
| 14FE_PB16 | | | | | | | CTTATGCACGGCC | |
| pU6_A1AT_ | AGGCC | 21028 | AGCCTTAT | 21838 | TTCAGTCCC | 22648 | AGGCCGTGCATAAGGCTGTGGTTTTAGAGCTA | 23458 |
| SpCas9- | GTGCAT | | GCACGGC | | TTTCTcGTC | | GAAATAGCAAGTTAAAATAAGGCTAGTCCGTT | |
| NG_SpRY_ | AAGGCT | | | | GATGGTCA | | ATCAACTTGAAAAAGTGGCACCGAGTCGGTGC | |
| ED15-_ | GTG | | | | GCAC | | TTCAGTCCCTTTCTcGTCGATGGTCAGCACAGC | |
| 14FE_PB15 | | | | | | | CTTATGCACGGC | |
| pU6_A1AT_ | AGGCC | 21029 | AGCCTTAT | 21839 | TTCAGTCCC | 22649 | AGGCCGTGCATAAGGCTGTGGTTTTAGAGCTA | 23459 |
| SpCas9- | GTGCAT | | GCACGG | | TTTCTCGTC | | GAAATAGCAAGTTAAAATAAGGCTAGTCCGTT | |
| NG_SpRY_ | AAGGCT | | | | GATGGTCA | | ATCAACTTGAAAAAGTGGCACCGAGTCGGTGC | |
| ED15-_ | GTG | | | | GCAC | | TTCAGTCCCTTTCTcGTCGATGGTCAGCACAGC | |
| 14FE_PB14 | | | | | | | CTTATGCACGG | |
| pU6_A1AT_ | AGGCC | 21030 | AGCCTTAT | 21840 | TTCAGTCCC | 22650 | AGGCCGTGCATAAGGCTGTGGTTTTAGAGCTA | 23460 |
| SpCas9- | GTGCAT | | GCACG | | TTTCTcGTC | | GAAATAGCAAGTTAAAATAAGGCTAGTCCGTT | |
| NG_SpRY_ | AAGGCT | | | | GATGGTCA | | ATCAACTTGAAAAAGTGGCACCGAGTCGGTGC | |
| ED15-_ | GTG | | | | GCAC | | TTCAGTCCCTTTCTcGTCGATGGTCAGCACAGC | |
| 14FE_PB13 | | | | | | | CTTATGCACG | |
| pU6_A1AT_ | AGGCC | 21031 | AGCCTTAT | 21841 | TTCAGTCCC | 22651 | AGGCCGTGCATAAGGCTGTGGTTTTAGAGCTA | 23461 |
| SpCas9- | GTGCAT | | GCAC | | TTTCTcGTC | | GAAATAGCAAGTTAAAATAAGGCTAGTCCGTT | |
| NG_SpRY_ | AAGGCT | | | | GATGGTCA | | ATCAACTTGAAAAAGTGGCACCGAGTCGGTGC | |
| ED15-_ | GTG | | | | GCAC | | TTCAGTCCCTTTCTcGTCGATGGTCAGCACAGC | |
| 14FE_PB12 | | | | | | | CTTATGCAC | |
| pU6_A1AT_ | AGGCC | 21032 | AGCCTTAT | 21842 | TTCAGTCCC | 22652 | AGGCCGTGCATAAGGCTGTGGTTTTAGAGCTA | 23462 |
| SpCas9- | GTGCAT | | GCA | | TTTCTcGTC | | GAAATAGCAAGTTAAAATAAGGCTAGTCCGTT | |
| NG_SpRY_ | AAGGCT | | | | GATGGTCA | | ATCAACTTGAAAAAGTGGCACCGAGTCGGTGC | |
| ED15-_ | GTG | | | | GCAC | | TTCAGTCCCTTTCTcGTCGATGGTCAGCACAGC | |
| 14FE_PB11 | | | | | | | CTTATGCA | |
| pU6_A1AT_ | AGGCC | 21033 | AGCCTTAT | 21843 | TTCAGTCCC | 22653 | AGGCCGTGCATAAGGCTGTGGTTTTAGAGCTA | 23463 |
| SpCas9- | GTGCAT | | GC | | TTTCTcGTC | | GAAATAGCAAGTTAAAATAAGGCTAGTCCGTT | |
| NG_SpRY_ | AAGGCT | | | | GATGGTCA | | ATCAACTTGAAAAAGTGGCACCGAGTCGGTGC | |
| ED15-_ | GTG | | | | GCAC | | TTCAGTCCCTTTCTCGTCGATGGTCAGCACAGC | |
| 14FE_PB10 | | | | | | | CTTATGC | |
| pU6_A1AT_ | AGGCC | 21034 | AGCCTTAT | | TTCAGTCCC | 22654 | AGGCCGTGCATAAGGCTGTGGTTTTAGAGCTA | 23464 |
| SpCas9- | GTGCAT | | G | | TTTCTCGTC | | GAAATAGCAAGTTAAAATAAGGCTAGTCCGTT | |
| NG_SpRY_ | AAGGCT | | | | GATGGTCA | | ATCAACTTGAAAAAGTGGCACCGAGTCGGTGC | |
| ED15-_ | GTG | | | | GCAC | | TTCAGTCCCTTTCTCGTCGATGGTCAGCACAGC | |
| 14FE_PB9 | | | | | | | CTTATG | |
| pU6_A1AT_ | AGGCC | 21035 | AGCCTTAT | | TTCAGTCCC | 22655 | AGGCCGTGCATAAGGCTGTGGTTTTAGAGCTA | 23465 |
| SpCas9- | GTGCAT | | | | TTTCTCGTC | | GAAATAGCAAGTTAAAATAAGGCTAGTCCGTT | |
| NG_SpRY_ | AAGGCT | | | | GATGGTCA | | ATCAACTTGAAAAAGTGGCACCGAGTCGGTGC | |
| ED15-_ | GTG | | | | GCAC | | TTCAGTCCCTTTCTcGTCGATGGTCAGCACAGC | |
| 14FE_PB8 | | | | | | | CTTAT | |
| pU6_A1AT_ | AGGCC | 21036 | AGCCTTAT | 21846 | AGTCCCTTT | 22656 | AGGCCGTGCATAAGGCTGTGGTTTTAGAGCTA | 23466 |
| SpCas9- | GTGCAT | | GCACGGCC | | CTcGTCGAT | | GAAATAGCAAGTTAAAATAAGGCTAGTCCGTT | |
| NG_SpRY_ | AAGGCT | | T | | GGTCAGCAC | | ATCAACTTGAAAAAGTGGCACCGAGTCGGTGC | |
| ED15-_ | GTG | | | | | | AGTCCCTTTCTcGTCGATGGTCAGCACAGCCTT | |
| 11FE_PB17 | | | | | | | ATGCACGGCCT | |
| pU6_A1AT_ | AGGCC | 21037 | AGCCTTAT | 21847 | AGTCCCTTT | 22657 | AGGCCGTGCATAAGGCTGTGGTTTTAGAGCTA | 23467 |
| SpCas9- | GTGCAT | | GCACGGCC | | CTcGTCGAT | | GAAATAGCAAGTTAAAATAAGGCTAGTCCGTT | |
| NG_SpRY_ | AAGGCT | | | | GGTCAGCAC | | ATCAACTTGAAAAAGTGGCACCGAGTCGGTGC | |
| ED15-_ | GTG | | | | | | AGTCCCTTTCTcGTCGATGGTCAGCACAGCCTT | |
| 11FE_PB16 | | | | | | | ATGCACGGCC | |
| pU6_A1AT_ | AGGCC | 21038 | AGCCTTAT | 21848 | AGTCCCTTT | 22658 | AGGCCGTGCATAAGGCTGTGGTTTTAGAGCTA | 23468 |
| SpCas9- | GTGCAT | | GCACGGC | | CTcGTCGAT | | GAAATAGCAAGTTAAAATAAGGCTAGTCCGTT | |
| NG_SpRY_ | AAGGCT | | | | GGTCAGCAC | | ATCAACTTGAAAAAGTGGCACCGAGTCGGTGC | |
| ED15-_ | GTG | | | | | | AGTCCCTTTCTcGTCGATGGTCAGCACAGCCTT | |
| 11FE_PB15 | | | | | | | ATGCACGGC | |
| pU6_A1AT_ | AGGCC | 21039 | AGCCTTAT | 21849 | AGTCCCTTT | 22659 | AGGCCGTGCATAAGGCTGTGGTTTTAGAGCTA | 23469 |
| SpCas9- | GTGCAT | | GCACGG | | CTcGTCGAT | | GAAATAGCAAGTTAAAATAAGGCTAGTCCGTT | |
| NG_SpRY_ | AAGGCT | | | | GGTCAGCAC | | ATCAACTTGAAAAAGTGGCACCGAGTCGGTGC | |
| ED15-_ | GTG | | | | | | AGTCCCTTTCTcGTCGATGGTCAGCACAGCCTT | |
| 11FE_PB14 | | | | | | | ATGCACGG | |
| pU6_A1AT_ | AGGCC | 21040 | AGCCTTAT | 21850 | AGTCCCTTT | 22660 | AGGCCGTGCATAAGGCTGTGGTTTTAGAGCTA | 23470 |
| SpCas9- | GTGCAT | | GCACG | | CTcGTCGAT | | GAAATAGCAAGTTAAAATAAGGCTAGTCCGTT | |
| NG_SpRY_ | AAGGCT | | | | GGTCAGCAC | | ATCAACTTGAAAAAGTGGCACCGAGTCGGTGC | |
| ED15-_ | GTG | | | | | | AGTCCCTTTCTcGTCGATGGTCAGCACAGCCTT | |
| 11FE_PB13 | | | | | | | ATGCACG | |
| pU6_A1AT_ | AGGCC | 21041 | AGCCTTAT | 21851 | AGTCCCTTT | 22661 | AGGCCGTGCATAAGGCTGTGGTTTTAGAGCTA | 23471 |
| SpCas9- | GTGCAT | | GCAC | | CTcGTCGAT | | GAAATAGCAAGTTAAAATAAGGCTAGTCCGTT | |
| NG_SpRY_ | AAGGCT | | | | GGTCAGCAC | | ATCAACTTGAAAAAGTGGCACCGAGTCGGTGC | |
| ED15-_ | GTG | | | | | | AGTCCCTTTCTcGTCGATGGTCAGCACAGCCTT | |
| 11FE_PB12 | | | | | | | ATGCAC | |
| pU6_A1AT_ | AGGCC | 21042 | AGCCTTAT | 21852 | AGTCCCTTT | 22662 | AGGCCGTGCATAAGGCTGTGGTTTTAGAGCTA | 23472 |
| SpCas9- | GTGCAT | | GCA | | CTCGTCGAT | | GAAATAGCAAGTTAAAATAAGGCTAGTCCGTT | |
| NG_SpRY_ | AAGGCT | | | | GGTCAGCAC | | ATCAACTTGAAAAAGTGGCACCGAGTCGGTGC | |
| ED15-_ | GTG | | | | | | AGTCCCTTTCTcGTCGATGGTCAGCACAGCCTT | |
| 11FE_PB11 | | | | | | | ATGCA | |
| pU6_A1AT_ | AGGCC | 21043 | AGCCTTAT | 21853 | AGTCCCTTT | 22663 | AGGCCGTGCATAAGGCTGTGGTTTTAGAGCTA | 23473 |
| SpCas9- | GTGCAT | | GC | | CTCGTCGAT | | GAAATAGCAAGTTAAAATAAGGCTAGTCCGTT | |
| NG_SpRY_ | AAGGCT | | | | GGTCAGCAC | | ATCAACTTGAAAAAGTGGCACCGAGTCGGTGC | |
| ED15-_ | GTG | | | | | | AGTCCCTTTCTcGTCGATGGTCAGCACAGCCTT | |
| 11FE_PB10 | | | | | | | ATGC | |
| pU6_A1AT_ | AGGCC | 21044 | AGCCTTAT | | AGTCCCTTT | 22664 | AGGCCGTGCATAAGGCTGTGGTTTTAGAGCTA | 23474 |
| SpCas9- | GTGCAT | | G | | CTCGTCGAT | | GAAATAGCAAGTTAAAATAAGGCTAGTCCGTT | |
| NG_SpRY_ | AAGGCT | | | | GGTCAGCAC | | ATCAACTTGAAAAAGTGGCACCGAGTCGGTGC | |
| ED15-_ | GTG | | | | | | AGTCCCTTTCTcGTCGATGGTCAGCACAGCCTT | |
| 11FE_PB9 | | | | | | | ATG | |
| pU6_A1AT_ | AGGCC | 21045 | AGCCTTAT | | AGTCCCTTT | 22665 | AGGCCGTGCATAAGGCTGTGGTTTTAGAGCTA | 23475 |
| SpCas9- | GTGCAT | | | | CTcGTCGAT | | GAAATAGCAAGTTAAAATAAGGCTAGTCCGTT | |
| NG_SpRY_ | AAGGCT | | | | GGTCAGCAC | | ATCAACTTGAAAAAGTGGCACCGAGTCGGTGC | |
| ED15-_ | GTG | | | | | | AGTCCCTTTCTcGTCGATGGTCAGCACAGCCTT | |
| 11FE_PB8 | | | | | | | AT | |
| pU6_A1AT_ | AGGCC | 21046 | AGCCTTAT | 21856 | TCCCTTTCTc | 22666 | AGGCCGTGCATAAGGCTGTGGTTTTAGAGCTA | 23476 |
| SpCas9- | GTGCAT | | GCACGGCC | | GTCGATGGT | | GAAATAGCAAGTTAAAATAAGGCTAGTCCGTT | |
| NG_SpRY_ | AAGGCT | | T | | CAGCAC | | ATCAACTTGAAAAAGTGGCACCGAGTCGGTGC | |
| ED15-_ | GTG | | | | | | TCCCTTTCTcGTCGATGGTCAGCACAGCCTTAT | |
| 9FE_PB17 | | | | | | | GCACGGCCT | |
| pU6_A1AT_ | AGGCC | 21047 | AGCCTTAT | 21857 | TCCCTTTCTc | 22667 | AGGCCGTGCATAAGGCTGTGGTTTTAGAGCTA | 23477 |
| SpCas9- | GTGCAT | | GCACGGCC | | GTCGATGGT | | GAAATAGCAAGTTAAAATAAGGCTAGTCCGTT | |
| NG_SpRY_ | AAGGCT | | | | CAGCAC | | ATCAACTTGAAAAAGTGGCACCGAGTCGGTGC | |
| ED15-_ | GTG | | | | | | TCCCTTTCTcGTCGATGGTCAGCACAGCCTTAT | |
| 9FE_PB16 | | | | | | | GCACGGCC | |
| pU6_A1AT_ | AGGCC | 21048 | AGCCTTAT | 21858 | TCCCTTTCTc | 22668 | AGGCCGTGCATAAGGCTGTGGTTTTAGAGCTA | 23478 |
| SpCas9- | GTGCAT | | GCACGGC | | GTCGATGGT | | GAAATAGCAAGTTAAAATAAGGCTAGTCCGTT | |
| NG_SpRY_ | AAGGCT | | | | CAGCAC | | ATCAACTTGAAAAAGTGGCACCGAGTCGGTGC | |
| ED15-_ | GTG | | | | | | TCCCTTTCTcGTCGATGGTCAGCACAGCCTTAT | |
| 9FE_PB15 | | | | | | | GCACGGC | |
| pU6_A1AT_ | AGGCC | 21049 | AGCCTTAT | 21859 | TCCCTTTCTc | 22669 | AGGCCGTGCATAAGGCTGTGGTTTTAGAGCTA | 23479 |
| SpCas9- | GTGCAT | | GCACGG | | GTCGATGGT | | GAAATAGCAAGTTAAAATAAGGCTAGTCCGTT | |
| NG_SpRY_ | AAGGCT | | | | CAGCAC | | ATCAACTTGAAAAAGTGGCACCGAGTCGGTGC | |
| ED15-_ | GTG | | | | | | TCCCTTTCTcGTCGATGGTCAGCACAGCCTTAT | |
| 9FE_PB14 | | | | | | | GCACGG | |
| pU6_A1AT_ | AGGCC | 21050 | AGCCTTAT | 21860 | TCCCTTTCTc | 22670 | AGGCCGTGCATAAGGCTGTGGTTTTAGAGCTA | 23480 |
| SpCas9- | GTGCAT | | GCACG | | GTCGATGGT | | GAAATAGCAAGTTAAAATAAGGCTAGTCCGTT | |
| NG_SpRY_ | AAGGCT | | | | CAGCAC | | ATCAACTTGAAAAAGTGGCACCGAGTCGGTGC | |
| ED15-_ | GTG | | | | | | TCCCTTTCTcGTCGATGGTCAGCACAGCCTTAT | |
| 9FE_PB13 | | | | | | | GCACG | |
| pU6_A1AT_ | AGGCC | 21051 | AGCCTTAT | 21861 | TCCCTTTCTc | 22671 | AGGCCGTGCATAAGGCTGTGGTTTTAGAGCTA | 23481 |
| SpCas9- | GTGCAT | | GCAC | | GTCGATGGT | | GAAATAGCAAGTTAAAATAAGGCTAGTCCGTT | |
| NG_SpRY_ | AAGGCT | | | | CAGCAC | | ATCAACTTGAAAAAGTGGCACCGAGTCGGTGC | |
| ED15-_ | GTG | | | | | | TCCCTTTCTcGTCGATGGTCAGCACAGCCTTAT | |
| 9FE_PB12 | | | | | | | GCAC | |
| pU6_A1AT_ | AGGCC | 21052 | AGCCTTAT | 21862 | TCCCTTTCTC | 22672 | AGGCCGTGCATAAGGCTGTGGTTTTAGAGCTA | 23482 |
| SpCas9- | GTGCAT | | GCA | | GTCGATGGT | | GAAATAGCAAGTTAAAATAAGGCTAGTCCGTT | |
| NG_SpRY_ | AAGGCT | | | | CAGCAC | | ATCAACTTGAAAAAGTGGCACCGAGTCGGTGC | |
| ED15-_ | GTG | | | | | | TCCCTTTCTcGTCGATGGTCAGCACAGCCTTAT | |
| 9FE_PB11 | | | | | | | GCA | |
| pU6_A1AT_ | AGGCC | 21053 | AGCCTTAT | 21863 | TCCCTTTCTc | 22673 | AGGCCGTGCATAAGGCTGTGGTTTTAGAGCTA | 23483 |
| SpCas9- | GTGCAT | | GC | | GTCGATGGT | | GAAATAGCAAGTTAAAATAAGGCTAGTCCGTT | |
| NG_SpRY_ | AAGGCT | | | | CAGCAC | | ATCAACTTGAAAAAGTGGCACCGAGTCGGTGC | |
| ED15-_ | GTG | | | | | | TCCCTTTCTcGTCGATGGTCAGCACAGCCTTAT | |
| 9FE_PB10 | | | | | | | GC | |
| pU6_A1AT_ | AGGCC | 21054 | AGCCTTAT | | TCCCTTTCTc | 22674 | AGGCCGTGCATAAGGCTGTGGTTTTAGAGCTA | 23484 |
| SpCas9- | GTGCAT | | G | | GTCGATGGT | | GAAATAGCAAGTTAAAATAAGGCTAGTCCGTT | |
| NG_SpRY_ | AAGGCT | | | | CAGCAC | | ATCAACTTGAAAAAGTGGCACCGAGTCGGTGC | |
| ED15-_ | GTG | | | | | | TCCCTTTCTcGTCGATGGTCAGCACAGCCTTAT | |
| 9FE_PB9 | | | | | | | G | |
| pU6_A1AT_ | AGGCC | 21055 | AGCCTTAT | | TCCCTTTCTc | 22675 | AGGCCGTGCATAAGGCTGTGGTTTTAGAGCTA | 23485 |
| SpCas9- | GTGCAT | | | | GTCGATGGT | | GAAATAGCAAGTTAAAATAAGGCTAGTCCGTT | |
| NG_SpRY_ | AAGGCT | | | | CAGCAC | | ATCAACTTGAAAAAGTGGCACCGAGTCGGTGC | |
| ED15-_ | GTG | | | | | | TCCCTTTCTcGTCGATGGTCAGCACAGCCTTAT | |
| 9FE_PB8 | | | | | | | | |
| pU6_A1AT_ | AGGCC | 21056 | AGCCTTAT | 21866 | CCTTTCTcGT | 22676 | AGGCCGTGCATAAGGCTGTGGTTTTAGAGCTA | 23486 |
| SpCas9- | GTGCAT | | GCACGGCC | | CGATGGTCA | | GAAATAGCAAGTTAAAATAAGGCTAGTCCGTT | |
| NG_SpRY_ | AAGGCT | | T | | GCAC | | ATCAACTTGAAAAAGTGGCACCGAGTCGGTGC | |
| ED15-_ | GTG | | | | | | CCTTTCTcGTCGATGGTCAGCACAGCCTTATGC | |
| 7FE_PB17 | | | | | | | ACGGCCT | |
| pU6_A1AT_ | AGGCC | 21057 | AGCCTTAT | 21867 | CCTTTCTCGT | 22677 | AGGCCGTGCATAAGGCTGTGGTTTTAGAGCTA | 23487 |
| SpCas9- | GTGCAT | | GCACGGCC | | CGATGGTCA | | GAAATAGCAAGTTAAAATAAGGCTAGTCCGTT | |
| NG_SpRY_ | AAGGCT | | | | GCAC | | ATCAACTTGAAAAAGTGGCACCGAGTCGGTGC | |
| ED15-_ | GTG | | | | | | CCTTTCTcGTCGATGGTCAGCACAGCCTTATGC | |
| 7FE_PB16 | | | | | | | ACGGCC | |
| pU6_A1AT_ | AGGCC | 21058 | AGCCTTAT | 21868 | CCTTTCTcGT | 22678 | AGGCCGTGCATAAGGCTGTGGTTTTAGAGCTA | 23488 |
| SpCas9- | GTGCAT | | GCACGGC | | CGATGGTCA | | GAAATAGCAAGTTAAAATAAGGCTAGTCCGTT | |
| NG_SpRY_ | AAGGCT | | | | GCAC | | ATCAACTTGAAAAAGTGGCACCGAGTCGGTGC | |
| ED15-_ | GTG | | | | | | CCTTTCTcGTCGATGGTCAGCACAGCCTTATGC | |
| 7FE_PB15 | | | | | | | ACGGC | |
| pU6_A1AT_ | AGGCC | 21059 | AGCCTTAT | 21869 | CCTTTCTcGT | 22679 | AGGCCGTGCATAAGGCTGTGGTTTTAGAGCTA | 23489 |
| SpCas9- | GTGCAT | | GCACGG | | CGATGGTCA | | GAAATAGCAAGTTAAAATAAGGCTAGTCCGTT | |
| NG_SpRY_ | AAGGCT | | | | GCAC | | ATCAACTTGAAAAAGTGGCACCGAGTCGGTGC | |
| ED15-_ | GTG | | | | | | CCTTTCTcGTCGATGGTCAGCACAGCCTTATGC | |
| 7FE_PB14 | | | | | | | ACGG | |
| pU6_A1AT_ | AGGCC | 21060 | AGCCTTAT | 21870 | CCTTTCTcGT | 22680 | AGGCCGTGCATAAGGCTGTGGTTTTAGAGCTA | 23490 |
| SpCas9- | GTGCAT | | GCACG | | CGATGGTCA | | GAAATAGCAAGTTAAAATAAGGCTAGTCCGTT | |
| NG_SpRY_ | AAGGCT | | | | GCAC | | ATCAACTTGAAAAAGTGGCACCGAGTCGGTGC | |
| ED15-_ | GTG | | | | | | CCTTTCTcGTCGATGGTCAGCACAGCCTTATGC | |
| 7FE_PB13 | | | | | | | ACG | |
| pU6_A1AT_ | AGGCC | 21061 | AGCCTTAT | 21871 | CCTTTCTcGT | 22681 | AGGCCGTGCATAAGGCTGTGGTTTTAGAGCTA | 23491 |
| SpCas9- | GTGCAT | | GCAC | | CGATGGTCA | | GAAATAGCAAGTTAAAATAAGGCTAGTCCGTT | |
| NG_SpRY_ | AAGGCT | | | | GCAC | | ATCAACTTGAAAAAGTGGCACCGAGTCGGTGC | |
| ED15-_ | GTG | | | | | | CCTTTCTcGTCGATGGTCAGCACAGCCTTATGC | |
| 7FE_PB12 | | | | | | | AC | |
| pU6_A1AT_ | AGGCC | 21062 | AGCCTTAT | 21872 | CCTTTCTcGT | 22682 | AGGCCGTGCATAAGGCTGTGGTTTTAGAGCTA | 23492 |
| SpCas9- | GTGCAT | | GCA | | CGATGGTCA | | GAAATAGCAAGTTAAAATAAGGCTAGTCCGTT | |
| NG_SpRY_ | AAGGCT | | | | GCAC | | ATCAACTTGAAAAAGTGGCACCGAGTCGGTGC | |
| ED15-_ | GTG | | | | | | CCTTTCTcGTCGATGGTCAGCACAGCCTTATGC | |
| 7FE_PB11 | | | | | | | A | |
| pU6_A1AT_ | AGGCC | 21063 | AGCCTTAT | 21873 | CCTTTCTcGT | 22683 | AGGCCGTGCATAAGGCTGTGGTTTTAGAGCTA | 23493 |
| SpCas9- | GTGCAT | | GC | | CGATGGTCA | | GAAATAGCAAGTTAAAATAAGGCTAGTCCGTT | |
| NG_SpRY_ | AAGGCT | | | | GCAC | | ATCAACTTGAAAAAGTGGCACCGAGTCGGTGC | |
| ED15-_ | GTG | | | | | | CCTTTCTcGTCGATGGTCAGCACAGCCTTATGC | |
| 7FE_PB10 | | | | | | | | |
| pU6_A1AT_ | AGGCC | 21064 | AGCCTTAT | | CCTTTCTcGT | 22684 | AGGCCGTGCATAAGGCTGTGGTTTTAGAGCTA | 23494 |
| SpCas9- | GTGCAT | | G | | CGATGGTCA | | GAAATAGCAAGTTAAAATAAGGCTAGTCCGTT | |
| NG_SpRY_ | AAGGCT | | | | GCAC | | ATCAACTTGAAAAAGTGGCACCGAGTCGGTGC | |
| ED15-_ | GTG | | | | | | CCTTTCTcGTCGATGGTCAGCACAGCCTTATG | |
| 7FE_PB9 | | | | | | | | |
| pU6_A1AT_ | AGGCC | 21065 | AGCCTTAT | | CCTTTCTcGT | 22685 | AGGCCGTGCATAAGGCTGTGGTTTTAGAGCTA | 23495 |
| SpCas9- | GTGCAT | | | | CGATGGTCA | | GAAATAGCAAGTTAAAATAAGGCTAGTCCGTT | |
| NG_SpRY_ | AAGGCT | | | | GCAC | | ATCAACTTGAAAAAGTGGCACCGAGTCGGTGC | |
| ED15-_ | GTG | | | | | | CCTTTCTcGTCGATGGTCAGCACAGCCTTAT | |
| 7FE_PB8 | | | | | | | | |
| pU6_A1AT_ | AGGCC | 21066 | AGCCTTAT | 21876 | TTTCTCGTC | 22686 | AGGCCGTGCATAAGGCTGTGGTTTTAGAGCTA | 23496 |
| SpCas9- | GTGCAT | | GCACGGCC | | GATGGTCA | | GAAATAGCAAGTTAAAATAAGGCTAGTCCGTT | |
| NG_SpRY_ | AAGGCT | | T | | GCAC | | ATCAACTTGAAAAAGTGGCACCGAGTCGGTGC | |
| ED15-_ | GTG | | | | | | TTTCTcGTCGATGGTCAGCACAGCCTTATGCAC | |
| 5FE_PB17 | | | | | | | GGCCT | |
| pU6_A1AT_ | AGGCC | 21067 | AGCCTTAT | 21877 | TTTCTcGTC | 22687 | AGGCCGTGCATAAGGCTGTGGTTTTAGAGCTA | 23497 |
| SpCas9- | GTGCAT | | GCACGGCC | | GATGGTCA | | GAAATAGCAAGTTAAAATAAGGCTAGTCCGTT | |
| NG_SpRY_ | AAGGCT | | | | GCAC | | ATCAACTTGAAAAAGTGGCACCGAGTCGGTGC | |
| ED15-_ | GTG | | | | | | TTTCTCGTCGATGGTCAGCACAGCCTTATGCAC | |
| 5FE_PB16 | | | | | | | GGCC | |
| pU6_A1AT_ | AGGCC | 21068 | AGCCTTAT | 21878 | TTTCTcGTC | 22688 | AGGCCGTGCATAAGGCTGTGGTTTTAGAGCTA | 23498 |
| SpCas9- | GTGCAT | | GCACGGC | | GATGGTCA | | GAAATAGCAAGTTAAAATAAGGCTAGTCCGTT | |
| NG_SpRY_ | AAGGCT | | | | GCAC | | ATCAACTTGAAAAAGTGGCACCGAGTCGGTGC | |
| ED15-_ | GTG | | | | | | TTTCTcGTCGATGGTCAGCACAGCCTTATGCAC | |
| 5FE_PB15 | | | | | | | GGC | |
| pU6_A1AT_ | AGGCC | 21069 | AGCCTTAT | 21879 | TTTCTCGTC | 22689 | AGGCCGTGCATAAGGCTGTGGTTTTAGAGCTA | 23499 |
| SpCas9- | GTGCAT | | GCACGG | | GATGGTCA | | GAAATAGCAAGTTAAAATAAGGCTAGTCCGTT | |
| NG_SpRY_ | AAGGCT | | | | GCAC | | ATCAACTTGAAAAAGTGGCACCGAGTCGGTGC | |
| ED15-_ | GTG | | | | | | TTTCTcGTCGATGGTCAGCACAGCCTTATGCAC | |
| 5FE_PB14 | | | | | | | GG | |
| pU6_A1AT_ | AGGCC | 21070 | AGCCTTAT | 21880 | TTTCTCGTC | 22690 | AGGCCGTGCATAAGGCTGTGGTTTTAGAGCTA | 23500 |
| SpCas9- | GTGCAT | | GCACG | | GATGGTCA | | GAAATAGCAAGTTAAAATAAGGCTAGTCCGTT | |
| NG_SpRY_ | AAGGCT | | | | GCAC | | ATCAACTTGAAAAAGTGGCACCGAGTCGGTGC | |
| ED15-_ | GTG | | | | | | TTTCTCGTCGATGGTCAGCACAGCCTTATGCAC | |
| 5FE_PB13 | | | | | | | G | |
| pU6_A1AT_ | AGGCC | 21071 | AGCCTTAT | 21881 | TTTCTcGTC | 22691 | AGGCCGTGCATAAGGCTGTGGTTTTAGAGCTA | 23501 |
| SpCas9- | GTGCAT | | GCAC | | GATGGTCA | | GAAATAGCAAGTTAAAATAAGGCTAGTCCGTT | |
| NG_SpRY_ | AAGGCT | | | | GCAC | | ATCAACTTGAAAAAGTGGCACCGAGTCGGTGC | |
| ED15-_ | GTG | | | | | | TTTCTCGTCGATGGTCAGCACAGCCTTATGCAC | |
| 5FE_PB12 | | | | | | | | |
| pU6_A1AT_ | AGGCC | 21072 | AGCCTTAT | 21882 | TTTCTCGTC | 22692 | AGGCCGTGCATAAGGCTGTGGTTTTAGAGCTA | 23502 |
| SpCas9- | GTGCAT | | GCA | | GATGGTCA | | GAAATAGCAAGTTAAAATAAGGCTAGTCCGTT | |
| NG_SpRY_ | AAGGCT | | | | GCAC | | ATCAACTTGAAAAAGTGGCACCGAGTCGGTGC | |
| ED15-_ | GTG | | | | | | TTTCTCGTCGATGGTCAGCACAGCCTTATGCA | |
| 5FE_PB11 | | | | | | | | |
| pU6_A1AT_ | AGGCC | 21073 | AGCCTTAT | 21883 | TTTCTCGTC | 22693 | AGGCCGTGCATAAGGCTGTGGTTTTAGAGCTA | 23503 |
| SpCas9- | GTGCAT | | GC | | GATGGTCA | | GAAATAGCAAGTTAAAATAAGGCTAGTCCGTT | |
| NG_SpRY_ | AAGGCT | | | | GCAC | | ATCAACTTGAAAAAGTGGCACCGAGTCGGTGC | |
| ED15-_ | GTG | | | | | | TTTCTCGTCGATGGTCAGCACAGCCTTATGC | |
| 5FE_PB10 | | | | | | | | |
| pU6_A1AT_ | AGGCC | 21074 | AGCCTTAT | | TTTCTCGTC | 22694 | AGGCCGTGCATAAGGCTGTGGTTTTAGAGCTA | 23504 |
| SpCas9- | GTGCAT | | G | | GATGGTCA | | GAAATAGCAAGTTAAAATAAGGCTAGTCCGTT | |
| NG_SpRY_ | AAGGCT | | | | GCAC | | ATCAACTTGAAAAAGTGGCACCGAGTCGGTGC | |
| ED15-_ | GTG | | | | | | TTTCTcGTCGATGGTCAGCACAGCCTTATG | |
| 5FE_PB9 | | | | | | | | |
| pU6_A1AT_ | AGGCC | 21075 | AGCCTTAT | | TTTCTcGTC | 22695 | AGGCCGTGCATAAGGCTGTGGTTTTAGAGCTA | 23505 |
| SpCas9- | GTGCAT | | | | GATGGTCA | | GAAATAGCAAGTTAAAATAAGGCTAGTCCGTT | |
| NG_SpRY_ | AAGGCT | | | | GCAC | | ATCAACTTGAAAAAGTGGCACCGAGTCGGTGC | |
| ED15-_ | GTG | | | | | | TTTCTCGTCGATGGTCAGCACAGCCTTAT | |
| 5FE_PB8 | | | | | | | | |
| pU6_A1AT_ | AGGCC | 21076 | AGCCTTAT | 21886 | TCTcGTCGA | 22696 | AGGCCGTGCATAAGGCTGTGGTTTTAGAGCTA | 23506 |
| SpCas9- | GTGCAT | | GCACGGCC | | TGGTCAGCA | | GAAATAGCAAGTTAAAATAAGGCTAGTCCGTT | |
| NG_SpRY_ | AAGGCT | | T | | C | | ATCAACTTGAAAAAGTGGCACCGAGTCGGTGC | |
| ED15-_ | GTG | | | | | | TCTcGTCGATGGTCAGCACAGCCTTATGCACG | |
| 3FE_PB17 | | | | | | | GCCT | |
| pU6_A1AT_ | AGGCC | 21077 | AGCCTTAT | 21887 | TCTcGTCGA | 22697 | AGGCCGTGCATAAGGCTGTGGTTTTAGAGCTA | 23507 |
| SpCas9- | GTGCAT | | GCACGGCC | | TGGTCAGCA | | GAAATAGCAAGTTAAAATAAGGCTAGTCCGTT | |
| NG_SpRY_ | AAGGCT | | | | C | | ATCAACTTGAAAAAGTGGCACCGAGTCGGTGC | |
| ED15-_ | GTG | | | | | | TCTcGTCGATGGTCAGCACAGCCTTATGCACG | |
| 3FE_PB16 | | | | | | | GCC | |
| pU6_A1AT_ | AGGCC | 21078 | AGCCTTAT | 21888 | TCTcGTCGA | 22698 | AGGCCGTGCATAAGGCTGTGGTTTTAGAGCTA | 23508 |
| SpCas9- | GTGCAT | | GCACGGC | | TGGTCAGCA | | GAAATAGCAAGTTAAAATAAGGCTAGTCCGTT | |
| NG_SpRY_ | AAGGCT | | | | C | | ATCAACTTGAAAAAGTGGCACCGAGTCGGTGC | |
| ED15-_ | GTG | | | | | | TCTcGTCGATGGTCAGCACAGCCTTATGCACG | |
| 3FE_PB15 | | | | | | | GC | |
| pU6_A1AT_ | AGGCC | 21079 | AGCCTTAT | 21889 | TCTcGTCGA | 22699 | AGGCCGTGCATAAGGCTGTGGTTTTAGAGCTA | 23509 |
| SpCas9- | GTGCAT | | GCACGG | | TGGTCAGCA | | GAAATAGCAAGTTAAAATAAGGCTAGTCCGTT | |
| NG_SpRY_ | AAGGCT | | | | C | | ATCAACTTGAAAAAGTGGCACCGAGTCGGTGC | |
| ED15-_ | GTG | | | | | | TCTcGTCGATGGTCAGCACAGCCTTATGCACG | |
| 3FE_PB14 | | | | | | | G | |
| pU6_A1AT_ | AGGCC | 21080 | AGCCTTAT | 21890 | TCTcGTCGA | 22700 | AGGCCGTGCATAAGGCTGTGGTTTTAGAGCTA | 23510 |
| SpCas9- | GTGCAT | | GCACG | | TGGTCAGCA | | GAAATAGCAAGTTAAAATAAGGCTAGTCCGTT | |
| NG_SpRY_ | AAGGCT | | | | C | | ATCAACTTGAAAAAGTGGCACCGAGTCGGTGC | |
| ED15-_ | GTG | | | | | | TCTcGTCGATGGTCAGCACAGCCTTATGCACG | |
| 3FE_PB13 | | | | | | | | |
| pU6_A1AT_ | AGGCC | 21081 | AGCCTTAT | 21891 | TCTcGTCGA | 22701 | AGGCCGTGCATAAGGCTGTGGTTTTAGAGCTA | 23511 |
| SpCas9- | GTGCAT | | GCAC | | TGGTCAGCA | | GAAATAGCAAGTTAAAATAAGGCTAGTCCGTT | |
| NG_SpRY_ | AAGGCT | | | | C | | ATCAACTTGAAAAAGTGGCACCGAGTCGGTGC | |
| ED15-_ | GTG | | | | | | TCTcGTCGATGGTCAGCACAGCCTTATGCAC | |
| 3FE_PB12 | | | | | | | | |
| pU6_A1AT_ | AGGCC | 21082 | AGCCTTAT | 21892 | TCTcGTCGA | 22702 | AGGCCGTGCATAAGGCTGTGGTTTTAGAGCTA | 23512 |
| SpCas9- | GTGCAT | | GCA | | TGGTCAGCA | | GAAATAGCAAGTTAAAATAAGGCTAGTCCGTT | |
| NG_SpRY_ | AAGGCT | | | | C | | ATCAACTTGAAAAAGTGGCACCGAGTCGGTGC | |
| ED15-_ | GTG | | | | | | TCTcGTCGATGGTCAGCACAGCCTTATGCA | |
| 3FE_PB11 | | | | | | | | |
| pU6_A1AT_ | AGGCC | 21083 | AGCCTTAT | 21893 | TCTcGTCGA | 22703 | AGGCCGTGCATAAGGCTGTGGTTTTAGAGCTA | 23513 |
| SpCas9- | GTGCAT | | GC | | TGGTCAGCA | | GAAATAGCAAGTTAAAATAAGGCTAGTCCGTT | |
| NG_SpRY_ | AAGGCT | | | | C | | ATCAACTTGAAAAAGTGGCACCGAGTCGGTGC | |
| ED15-_ | GTG | | | | | | TCTcGTCGATGGTCAGCACAGCCTTATGC | |
| 3FE_PB10 | | | | | | | | |
| pU6_A1AT_ | AGGCC | 21084 | AGCCTTAT | | TCTcGTCGA | 22704 | AGGCCGTGCATAAGGCTGTGGTTTTAGAGCTA | 23514 |
| SpCas9- | GTGCAT | | G | | TGGTCAGCA | | GAAATAGCAAGTTAAAATAAGGCTAGTCCGTT | |
| NG_SpRY_ | AAGGCT | | | | C | | ATCAACTTGAAAAAGTGGCACCGAGTCGGTGC | |
| ED15-_ | GTG | | | | | | TCTcGTCGATGGTCAGCACAGCCTTATG | |
| 3FE_PB9 | | | | | | | | |
| pU6_A1AT_ | AGGCC | 21085 | AGCCTTAT | | TCTcGTCGA | 22705 | AGGCCGTGCATAAGGCTGTGGTTTTAGAGCTA | 23515 |
| SpCas9- | GTGCAT | | | | TGGTCAGCA | | GAAATAGCAAGTTAAAATAAGGCTAGTCCGTT | |
| NG_SpRY_ | AAGGCT | | | | C | | ATCAACTTGAAAAAGTGGCACCGAGTCGGTGC | |
| ED15-_ | GTG | | | | | | TCTcGTCGATGGTCAGCACAGCCTTAT | |
| 3FE_PB8 | | | | | | | | |
| pU6_A1AT_ | TCCAGG | 21086 | AGCCTTAT | 21896 | ACATGGCCC | 22706 | TCCAGGCCGTGCATAAGGCTGTGGTTGTAGCT | 23516 |
| Nme2_ | CCGTGC | | GCACGGCC | | CAGCAGCTT | | CCCGAAACGTTGCTACAATAAGGCCGTCTGAA | |
| ED1 | ATAAGG | | T | | CAGTCCCTT | | AAGATGTGCCGCAACGCTCTGCCCCTTAAAGC | |
| 5- | CTGTG | | | | TCTcGTCGA | | TTCTGCTTTAAGGGGCATCGTTACATGGCCCCA | |
| _G_30FE_ | | | | | TGGTCAGCA | | GCAGCTTCAGTCCCTTTCTcGTCGATGGTCAGC | |
| PB17 | | | | | C | | ACAGCCTTATGCACGGCCT | |
| pU6_A1AT_ | TCCAGG | 21087 | AGCCTTAT | 21897 | ACATGGCCC | 22707 | TCCAGGCCGTGCATAAGGCTGTGGTTGTAGCT | 23517 |
| Nme2_ | CCGTGC | | GCACGGCC | | CAGCAGCTT | | CCCGAAACGTTGCTACAATAAGGCCGTCTGAA | |
| ED1 | ATAAGG | | | | CAGTCCCTT | | AAGATGTGCCGCAACGCTCTGCCCCTTAAAGC | |
| 5- | CTGTG | | | | TCTcGTCGA | | TTCTGCTTTAAGGGGCATCGTTACATGGCCCCA | |
| _G_30FE_ | | | | | TGGTCAGCA | | GCAGCTTCAGTCCCTTTCTcGTCGATGGTCAGC | |
| PB16 | | | | | C | | ACAGCCTTATGCACGGCC | |
| pU6_A1AT_ | TCCAGG | 21088 | AGCCTTAT | 21898 | ACATGGCCC | 22708 | TCCAGGCCGTGCATAAGGCTGTGGTTGTAGCT | 23518 |
| Nme2_ | CCGTGC | | GCACGGC | | CAGCAGCTT | | CCCGAAACGTTGCTACAATAAGGCCGTCTGAA | |
| ED1 | ATAAGG | | | | CAGTCCCTT | | AAGATGTGCCGCAACGCTCTGCCCCTTAAAGC | |
| 5- | CTGTG | | | | TCTcGTCGA | | TTCTGCTTTAAGGGGCATCGTTACATGGCCCCA | |
| _G_30FE_ | | | | | TGGTCAGCA | | GCAGCTTCAGTCCCTTTCTcGTCGATGGTCAGC | |
| PB15 | | | | | C | | ACAGCCTTATGCACGGC | |
| pU6_A1AT_ | TCCAGG | 21089 | AGCCTTAT | 21899 | ACATGGCCC | 22709 | TCCAGGCCGTGCATAAGGCTGTGGTTGTAGCT | 23519 |
| Nme2_ | CCGTGC | | GCACGG | | CAGCAGCTT | | CCCGAAACGTTGCTACAATAAGGCCGTCTGAA | |
| ED1 | ATAAGG | | | | CAGTCCCTT | | AAGATGTGCCGCAACGCTCTGCCCCTTAAAGC | |
| 5- | CTGTG | | | | TCTcGTCGA | | TTCTGCTTTAAGGGGCATCGTTACATGGCCCCA | |
| _G_30FE_ | | | | | TGGTCAGCA | | GCAGCTTCAGTCCCTTTCTcGTCGATGGTCAGC | |
| PB14 | | | | | C | | ACAGCCTTATGCACGG | |
| pU6_A1AT_ | TCCAGG | 21090 | AGCCTTAT | 21900 | ACATGGCCC | 22710 | TCCAGGCCGTGCATAAGGCTGTGGTTGTAGCT | 23520 |
| Nme2_ | CCGTGC | | GCACG | | CAGCAGCTT | | CCCGAAACGTTGCTACAATAAGGCCGTCTGAA | |
| ED1 | ATAAGG | | | | CAGTCCCTT | | AAGATGTGCCGCAACGCTCTGCCCCTTAAAGC | |
| 5- | CTGTG | | | | TCTcGTCGA | | TTCTGCTTTAAGGGGCATCGTTACATGGCCCCA | |
| _G_30FE_ | | | | | TGGTCAGCA | | GCAGCTTCAGTCCCTTTCTcGTCGATGGTCAGC | |
| PB13 | | | | | C | | ACAGCCTTATGCACG | |
| pU6_A1AT_ | TCCAGG | 21091 | AGCCTTAT | 21901 | ACATGGCCC | 22711 | TCCAGGCCGTGCATAAGGCTGTGGTTGTAGCT | 23521 |
| Nme2_ | CCGTGC | | GCAC | | CAGCAGCTT | | CCCGAAACGTTGCTACAATAAGGCCGTCTGAA | |
| ED1 | ATAAGG | | | | CAGTCCCTT | | AAGATGTGCCGCAACGCTCTGCCCCTTAAAGC | |
| 5- | CTGTG | | | | TCTcGTCGA | | TTCTGCTTTAAGGGGCATCGTTACATGGCCCCA | |
| _G_30FE_ | | | | | TGGTCAGCA | | GCAGCTTCAGTCCCTTTCTcGTCGATGGTCAGC | |
| PB12 | | | | | C | | ACAGCCTTATGCAC | |
| pU6_A1AT_ | TCCAGG | 21092 | AGCCTTAT | 21902 | ACATGGCCC | 22712 | TCCAGGCCGTGCATAAGGCTGTGGTTGTAGCT | 23522 |
| Nme2_ | CCGTGC | | GCA | | CAGCAGCTT | | CCCGAAACGTTGCTACAATAAGGCCGTCTGAA | |
| ED1 | ATAAGG | | | | CAGTCCCTT | | AAGATGTGCCGCAACGCTCTGCCCCTTAAAGC | |
| 5- | CTGTG | | | | TCTcGTCGA | | TTCTGCTTTAAGGGGCATCGTTACATGGCCCCA | |
| _G_30FE_ | | | | | TGGTCAGCA | | GCAGCTTCAGTCCCTTTCTcGTCGATGGTCAGC | |
| PB11 | | | | | C | | ACAGCCTTATGCA | |
| pU6_A1 | TCCAGG | 21093 | AGCCTTAT | 21903 | ACATGGCCC | 22713 | TCCAGGCCGTGCATAAGGCTGTGGTTGTAGCT | 23523 |
| AT_Nm | CCGTGC | | GC | | CAGCAGCTT | | CCCGAAACGTTGCTACAATAAGGCCGTCTGAA | |
| e2_ED1 | ATAAGG | | | | CAGTCCCTT | | AAGATGTGCCGCAACGCTCTGCCCCTTAAAGC | |
| 5- | CTGTG | | | | TCTcGTCGA | | TTCTGCTTTAAGGGGCATCGTTACATGGCCCCA | |
| G_30F | | | | | TGGTCAGCA | | GCAGCTTCAGTCCCTTTCTcGTCGATGGTCAGC | |
| E_PB10 | | | | | C | | ACAGCCTTATGC | |
| pU6_A1AT_ | TCCAGG | 21094 | AGCCTTAT | | ACATGGCCC | 22714 | TCCAGGCCGTGCATAAGGCTGTGGTTGTAGCT | 23524 |
| Nme2_ | CCGTGC | | G | | CAGCAGCTT | | CCCGAAACGTTGCTACAATAAGGCCGTCTGAA | |
| ED1 | ATAAGG | | | | CAGTCCCTT | | AAGATGTGCCGCAACGCTCTGCCCCTTAAAGC | |
| 5- | CTGTG | | | | TCTcGTCGA | | TTCTGCTTTAAGGGGCATCGTTACATGGCCCCA | |
| _G_30FE_ | | | | | TGGTCAGCA | | GCAGCTTCAGTCCCTTTCTcGTCGATGGTCAGC | |
| PB9 | | | | | C | | ACAGCCTTATG | |
| pU6_A1AT_ | TCCAGG | 21095 | AGCCTTAT | | ACATGGCCC | 22715 | TCCAGGCCGTGCATAAGGCTGTGGTTGTAGCT | 23525 |
| Nme2_ | CCGTGC | | | | CAGCAGCTT | | CCCGAAACGTTGCTACAATAAGGCCGTCTGAA | |
| ED1 | ATAAGG | | | | CAGTCCCTT | | AAGATGTGCCGCAACGCTCTGCCCCTTAAAGC | |
| 5- | CTGTG | | | | TCTcGTCGA | | TTCTGCTTTAAGGGGCATCGTTACATGGCCCCA | |
| _G_30FE_ | | | | | TGGTCAGCA | | GCAGCTTCAGTCCCTTTCTcGTCGATGGTCAGC | |
| PB8 | | | | | C | | ACAGCCTTAT | |
| pU6_A1 | TCCAGG | 21096 | AGCCTTAT | 21906 | GCCCCAGCA | 22716 | TCCAGGCCGTGCATAAGGCTGTGGTTGTAGCT | 23526 |
| AT_Nme2_ | CCGTGC | | GCACGGCC | | GCTTCAGTC | | CCCGAAACGTTGCTACAATAAGGCCGTCTGAA | |
| ED1 | ATAAGG | | T | | CCTTTCTCGT | | AAGATGTGCCGCAACGCTCTGCCCCTTAAAGC | |
| 5- | CTGTG | | | | CGATGGTCA | | TTCTGCTTTAAGGGGCATCGTTGCCCCAGCAG | |
| _G_25FE_ | | | | | GCAC | | CTTCAGTCCCTTTCTcGTCGATGGTCAGCACAG | |
| PB17 | | | | | | | CCTTATGCACGGCCT | |
| pU6_A1AT_ | TCCAGG | 21097 | AGCCTTAT | 21907 | GCCCCAGCA | 22717 | TCCAGGCCGTGCATAAGGCTGTGGTTGTAGCT | 23527 |
| Nme2_ | CCGTGC | | GCACGGCC | | GCTTCAGTC | | CCCGAAACGTTGCTACAATAAGGCCGTCTGAA | |
| ED1 | ATAAGG | | | | CCTTTCTCGT | | AAGATGTGCCGCAACGCTCTGCCCCTTAAAGC | |
| 5- | CTGTG | | | | CGATGGTCA | | TTCTGCTTTAAGGGGCATCGTTGCCCCAGCAG | |
| _G_25FE_ | | | | | GCAC | | CTTCAGTCCCTTTCTcGTCGATGGTCAGCACAG | |
| PB16 | | | | | | | CCTTATGCACGGCC | |
| pU6_A1AT_ | TCCAGG | 21098 | AGCCTTAT | 21908 | GCCCCAGCA | 22718 | TCCAGGCCGTGCATAAGGCTGTGGTTGTAGCT | 23528 |
| Nme2_ | CCGTGC | | GCACGGC | | GCTTCAGTC | | CCCGAAACGTTGCTACAATAAGGCCGTCTGAA | |
| ED1 | ATAAGG | | | | CCTTTCTcGT | | AAGATGTGCCGCAACGCTCTGCCCCTTAAAGC | |
| 5- | CTGTG | | | | CGATGGTCA | | TTCTGCTTTAAGGGGCATCGTTGCCCCAGCAG | |
| _G_25FE_ | | | | | GCAC | | CTTCAGTCCCTTTCTcGTCGATGGTCAGCACAG | |
| PB15 | | | | | | | CCTTATGCACGGC | |
| pU6_A1AT_ | TCCAGG | 21099 | AGCCTTAT | 21909 | GCCCCAGCA | 22719 | TCCAGGCCGTGCATAAGGCTGTGGTTGTAGCT | 23529 |
| Nme2_ | CCGTGC | | GCACGG | | GCTTCAGTC | | CCCGAAACGTTGCTACAATAAGGCCGTCTGAA | |
| ED1 | ATAAGG | | | | CCTTTCTcGT | | AAGATGTGCCGCAACGCTCTGCCCCTTAAAGC | |
| 5- | CTGTG | | | | CGATGGTCA | | TTCTGCTTTAAGGGGCATCGTTGCCCCAGCAG | |
| _G_25FE_ | | | | | GCAC | | CTTCAGTCCCTTTCTcGTCGATGGTCAGCACAG | |
| PB14 | | | | | | | CCTTATGCACGG | |
| pU6_A1AT_ | TCCAGG | 21100 | AGCCTTAT | 21910 | GCCCCAGCA | 22720 | TCCAGGCCGTGCATAAGGCTGTGGTTGTAGCT | 23530 |
| Nme2_ | CCGTGC | | GCACG | | GCTTCAGTC | | CCCGAAACGTTGCTACAATAAGGCCGTCTGAA | |
| ED1 | ATAAGG | | | | CCTTTCTcGT | | AAGATGTGCCGCAACGCTCTGCCCCTTAAAGC | |
| 5- | CTGTG | | | | CGATGGTCA | | TTCTGCTTTAAGGGGCATCGTTGCCCCAGCAG | |
| _G_25FE_ | | | | | GCAC | | CTTCAGTCCCTTTCTcGTCGATGGTCAGCACAG | |
| PB13 | | | | | | | CCTTATGCACG | |
| pU6_A1AT_ | TCCAGG | 21101 | AGCCTTAT | 21911 | GCCCCAGCA | 22721 | TCCAGGCCGTGCATAAGGCTGTGGTTGTAGCT | 23531 |
| Nme2_ | CCGTGC | | GCAC | | GCTTCAGTC | | CCCGAAACGTTGCTACAATAAGGCCGTCTGAA | |
| ED1 | ATAAGG | | | | CCTTTCTcGT | | AAGATGTGCCGCAACGCTCTGCCCCTTAAAGC | |
| 5- | CTGTG | | | | CGATGGTCA | | TTCTGCTTTAAGGGGCATCGTTGCCCCAGCAG | |
| _G_25FE_ | | | | | GCAC | | CTTCAGTCCCTTTCTcGTCGATGGTCAGCACAG | |
| PB12 | | | | | | | CCTTATGCAC | |
| pU6_A1AT_ | TCCAGG | 21102 | AGCCTTAT | 21912 | GCCCCAGCA | 22722 | TCCAGGCCGTGCATAAGGCTGTGGTTGTAGCT | 23532 |
| Nme2_ | CCGTGC | | GCA | | GCTTCAGTC | | CCCGAAACGTTGCTACAATAAGGCCGTCTGAA | |
| ED1 | ATAAGG | | | | CCTTTCTcGT | | AAGATGTGCCGCAACGCTCTGCCCCTTAAAGC | |
| 5- | CTGTG | | | | CGATGGTCA | | TTCTGCTTTAAGGGGCATCGTTGCCCCAGCAG | |
| _G_25FE_ | | | | | GCAC | | CTTCAGTCCCTTTCTcGTCGATGGTCAGCACAG | |
| PB11 | | | | | | | CCTTATGCA | |
| pU6_A1AT_ | TCCAGG | 21103 | AGCCTTAT | 21913 | GCCCCAGCA | 22723 | TCCAGGCCGTGCATAAGGCTGTGGTTGTAGCT | 23533 |
| Nme2_ | CCGTGC | | GC | | GCTTCAGTC | | CCCGAAACGTTGCTACAATAAGGCCGTCTGAA | |
| ED1 | ATAAGG | | | | CCTTTCTcGT | | AAGATGTGCCGCAACGCTCTGCCCCTTAAAGC | |
| 5- | CTGTG | | | | CGATGGTCA | | TTCTGCTTTAAGGGGCATCGTTGCCCCAGCAG | |
| _G_25FE_ | | | | | GCAC | | CTTCAGTCCCTTTCTcGTCGATGGTCAGCACAG | |
| PB10 | | | | | | | CCTTATGC | |
| pU6_A1AT_ | TCCAGG | 21104 | AGCCTTAT | | GCCCCAGCA | 22724 | TCCAGGCCGTGCATAAGGCTGTGGTTGTAGCT | 23534 |
| Nme2_ | CCGTGC | | G | | GCTTCAGTC | | CCCGAAACGTTGCTACAATAAGGCCGTCTGAA | |
| ED1 | ATAAGG | | | | CCTTTCTCGT | | AAGATGTGCCGCAACGCTCTGCCCCTTAAAGC | |
| 5- | CTGTG | | | | CGATGGTCA | | TTCTGCTTTAAGGGGCATCGTTGCCCCAGCAG | |
| _G_25FE_ | | | | | GCAC | | CTTCAGTCCCTTTCTcGTCGATGGTCAGCACAG | |
| PB9 | | | | | | | CCTTATG | |
| pU6_A1AT_ | TCCAGG | 21105 | AGCCTTAT | | GCCCCAGCA | 22725 | TCCAGGCCGTGCATAAGGCTGTGGTTGTAGCT | 23535 |
| Nme2_ | CCGTGC | | | | GCTTCAGTC | | CCCGAAACGTTGCTACAATAAGGCCGTCTGAA | |
| ED1 | ATAAGG | | | | CCTTTCTcGT | | AAGATGTGCCGCAACGCTCTGCCCCTTAAAGC | |
| 5- | CTGTG | | | | CGATGGTCA | | TTCTGCTTTAAGGGGCATCGTTGCCCCAGCAG | |
| _G_25FE_ | | | | | GCAC | | CTTCAGTCCCTTTCTcGTCGATGGTCAGCACAG | |
| PB8 | | | | | | | CCTTAT | |
| pU6_A1AT_ | TCCAGG | 21106 | AGCCTTAT | 21916 | AGCAGCTTC | 22726 | TCCAGGCCGTGCATAAGGCTGTGGTTGTAGCT | 23536 |
| Nme2_ | CCGTGC | | GCACGGCC | | AGTCCCTTT | | CCCGAAACGTTGCTACAATAAGGCCGTCTGAA | |
| ED1 | ATAAGG | | T | | CTcGTCGAT | | AAGATGTGCCGCAACGCTCTGCCCCTTAAAGC | |
| 5- | CTGTG | | | | GGTCAGCAC | | TTCTGCTTTAAGGGGCATCGTTAGCAGCTTCAG | |
| _G_20FE_ | | | | | | | TCCCTTTCTcGTCGATGGTCAGCACAGCCTTAT | |
| PB17 | | | | | | | GCACGGCCT | |
| pU6_A1AT_ | TCCAGG | 21107 | AGCCTTAT | 21917 | AGCAGCTTC | 22727 | TCCAGGCCGTGCATAAGGCTGTGGTTGTAGCT | 23537 |
| Nme2_ | CCGTGC | | GCACGGCC | | AGTCCCTTT | | CCCGAAACGTTGCTACAATAAGGCCGTCTGAA | |
| ED1 | ATAAGG | | | | CTcGTCGAT | | AAGATGTGCCGCAACGCTCTGCCCCTTAAAGC | |
| 5- | CTGTG | | | | GGTCAGCAC | | TTCTGCTTTAAGGGGCATCGTTAGCAGCTTCAG | |
| _G_20FE_ | | | | | | | TCCCTTTCTcGTCGATGGTCAGCACAGCCTTAT | |
| PB16 | | | | | | | GCACGGCC | |
| pU6_A1AT_ | TCCAGG | 21108 | AGCCTTAT | 21918 | AGCAGCTTC | 22728 | TCCAGGCCGTGCATAAGGCTGTGGTTGTAGCT | 23538 |
| Nme2_ | CCGTGC | | GCACGGC | | AGTCCCTTT | | CCCGAAACGTTGCTACAATAAGGCCGTCTGAA | |
| ED1 | ATAAGG | | | | CTcGTCGAT | | AAGATGTGCCGCAACGCTCTGCCCCTTAAAGC | |
| 5- | CTGTG | | | | GGTCAGCAC | | TTCTGCTTTAAGGGGCATCGTTAGCAGCTTCAG | |
| _G_20FE_ | | | | | | | TCCCTTTCTcGTCGATGGTCAGCACAGCCTTAT | |
| PB15 | | | | | | | GCACGGC | |
| pU6_A1AT_ | TCCAGG | 21109 | AGCCTTAT | 21919 | AGCAGCTTC | 22729 | TCCAGGCCGTGCATAAGGCTGTGGTTGTAGCT | 23539 |
| Nme2_ | CCGTGC | | GCACGG | | AGTCCCTTT | | CCCGAAACGTTGCTACAATAAGGCCGTCTGAA | |
| ED1 | ATAAGG | | | | CTCGTCGAT | | AAGATGTGCCGCAACGCTCTGCCCCTTAAAGC | |
| 5- | CTGTG | | | | GGTCAGCAC | | TTCTGCTTTAAGGGGCATCGTTAGCAGCTTCAG | |
| _G_20FE_ | | | | | | | TCCCTTTCTcGTCGATGGTCAGCACAGCCTTAT | |
| PB14 | | | | | | | GCACGG | |
| pU6_A1AT_ | TCCAGG | 21110 | AGCCTTAT | 21920 | AGCAGCTTC | 22730 | TCCAGGCCGTGCATAAGGCTGTGGTTGTAGCT | 23540 |
| Nme2_ | CCGTGC | | GCACG | | AGTCCCTTT | | CCCGAAACGTTGCTACAATAAGGCCGTCTGAA | |
| ED1 | ATAAGG | | | | CTcGTCGAT | | AAGATGTGCCGCAACGCTCTGCCCCTTAAAGC | |
| 5- | CTGTG | | | | GGTCAGCAC | | TTCTGCTTTAAGGGGCATCGTTAGCAGCTTCAG | |
| _G_20FE_ | | | | | | | TCCCTTTCTcGTCGATGGTCAGCACAGCCTTAT | |
| PB13 | | | | | | | GCACG | |
| pU6_A1AT_ | TCCAGG | 21111 | AGCCTTAT | 21921 | AGCAGCTTC | 22731 | TCCAGGCCGTGCATAAGGCTGTGGTTGTAGCT | 23541 |
| Nme2_ | CCGTGC | | GCAC | | AGTCCCTTT | | CCCGAAACGTTGCTACAATAAGGCCGTCTGAA | |
| ED1 | ATAAGG | | | | CTcGTCGAT | | AAGATGTGCCGCAACGCTCTGCCCCTTAAAGC | |
| 5- | CTGTG | | | | GGTCAGCAC | | TTCTGCTTTAAGGGGCATCGTTAGCAGCTTCAG | |
| _G_20FE_ | | | | | | | TCCCTTTCTcGTCGATGGTCAGCACAGCCTTAT | |
| PB12 | | | | | | | GCAC | |
| pU6_A1AT_ | TCCAGG | 21112 | AGCCTTAT | 21922 | AGCAGCTTC | 22732 | TCCAGGCCGTGCATAAGGCTGTGGTTGTAGCT | 23542 |
| Nme2_ | CCGTGC | | GCA | | AGTCCCTTT | | CCCGAAACGTTGCTACAATAAGGCCGTCTGAA | |
| ED1 | ATAAGG | | | | CTCGTCGAT | | AAGATGTGCCGCAACGCTCTGCCCCTTAAAGC | |
| 5- | CTGTG | | | | GGTCAGCAC | | TTCTGCTTTAAGGGGCATCGTTAGCAGCTTCAG | |
| _G_20FE_ | | | | | | | TCCCTTTCTcGTCGATGGTCAGCACAGCCTTAT | |
| PB11 | | | | | | | GCA | |
| pU6_A1AT_ | TCCAGG | 21113 | AGCCTTAT | 21923 | AGCAGCTTC | 22733 | TCCAGGCCGTGCATAAGGCTGTGGTTGTAGCT | 23543 |
| Nme2_ | CCGTGC | | GC | | AGTCCCTTT | | CCCGAAACGTTGCTACAATAAGGCCGTCTGAA | |
| ED1 | ATAAGG | | | | CTcGTCGAT | | AAGATGTGCCGCAACGCTCTGCCCCTTAAAGC | |
| 5- | CTGTG | | | | GGTCAGCAC | | TTCTGCTTTAAGGGGCATCGTTAGCAGCTTCAG | |
| _G_20FE_ | | | | | | | TCCCTTTCTcGTCGATGGTCAGCACAGCCTTAT | |
| PB10 | | | | | | | GC | |
| pU6_A1AT_ | TCCAGG | 21114 | AGCCTTAT | | AGCAGCTTC | 22734 | TCCAGGCCGTGCATAAGGCTGTGGTTGTAGCT | 23544 |
| Nme2_ | CCGTGC | | G | | AGTCCCTTT | | CCCGAAACGTTGCTACAATAAGGCCGTCTGAA | |
| ED1 | ATAAGG | | | | CTcGTCGAT | | AAGATGTGCCGCAACGCTCTGCCCCTTAAAGC | |
| 5- | CTGTG | | | | GGTCAGCAC | | TTCTGCTTTAAGGGGCATCGTTAGCAGCTTCAG | |
| _G_20FE_ | | | | | | | TCCCTTTCTcGTCGATGGTCAGCACAGCCTTAT | |
| PB9 | | | | | | | G | |
| pU6_A1AT_ | TCCAGG | 21115 | AGCCTTAT | | AGCAGCTTC | 22735 | TCCAGGCCGTGCATAAGGCTGTGGTTGTAGCT | 23545 |
| Nme2_ | CCGTGC | | | | AGTCCCTTT | | CCCGAAACGTTGCTACAATAAGGCCGTCTGAA | |
| ED1 | ATAAGG | | | | CTCGTCGAT | | AAGATGTGCCGCAACGCTCTGCCCCTTAAAGC | |
| 5- | CTGTG | | | | GGTCAGCAC | | TTCTGCTTTAAGGGGCATCGTTAGCAGCTTCAG | |
| _G_20FE_ | | | | | | | TCCCTTTCTcGTCGATGGTCAGCACAGCCTTAT | |
| PB8 | | | | | | | | |
| pU6_A1AT_ | TCCAGG | 21116 | AGCCTTAT | 21926 | TTCAGTCCC | 22736 | TCCAGGCCGTGCATAAGGCTGTGGTTGTAGCT | 23546 |
| Nme2_ | CCGTGC | | GCACGGCC | | TTTCTCGTC | | CCCGAAACGTTGCTACAATAAGGCCGTCTGAA | |
| ED1 | ATAAGG | | T | | GATGGTCA | | AAGATGTGCCGCAACGCTCTGCCCCTTAAAGC | |
| 5- | CTGTG | | | | GCAC | | TTCTGCTTTAAGGGGCATCGTTTTCAGTCCCTT | |
| _G_14FE_ | | | | | | | TCTcGTCGATGGTCAGCACAGCCTTATGCACG | |
| PB17 | | | | | | | GCCT | |
| pU6_A1AT_ | TCCAGG | 21117 | AGCCTTAT | 21927 | TTCAGTCCC | 22737 | TCCAGGCCGTGCATAAGGCTGTGGTTGTAGCT | 23547 |
| Nme2_ | CCGTGC | | GCACGGCC | | TTTCTCGTC | | CCCGAAACGTTGCTACAATAAGGCCGTCTGAA | |
| ED1 | ATAAGG | | | | GATGGTCA | | AAGATGTGCCGCAACGCTCTGCCCCTTAAAGC | |
| 5- | CTGTG | | | | GCAC | | TTCTGCTTTAAGGGGCATCGTTTTCAGTCCCTT | |
| _G_14FE_ | | | | | | | TCTcGTCGATGGTCAGCACAGCCTTATGCACG | |
| PB16 | | | | | | | GCC | |
| pU6_A1AT_ | TCCAGG | 21118 | AGCCTTAT | 21928 | TTCAGTCCC | 22738 | TCCAGGCCGTGCATAAGGCTGTGGTTGTAGCT | 23548 |
| Nme2_ | CCGTGC | | GCACGGC | | TTTCTCGTC | | CCCGAAACGTTGCTACAATAAGGCCGTCTGAA | |
| ED1 | ATAAGG | | | | GATGGTCA | | AAGATGTGCCGCAACGCTCTGCCCCTTAAAGC | |
| 5- | CTGTG | | | | GCAC | | TTCTGCTTTAAGGGGCATCGTTTTCAGTCCCTT | |
| _G_14FE_ | | | | | | | TCTcGTCGATGGTCAGCACAGCCTTATGCACG | |
| PB15 | | | | | | | GC | |
| pU6_A1AT_ | TCCAGG | 21119 | AGCCTTAT | 21929 | TTCAGTCCC | 22739 | TCCAGGCCGTGCATAAGGCTGTGGTTGTAGCT | 23549 |
| Nme2_ | CCGTGC | | GCACGG | | TTTCTcGTC | | CCCGAAACGTTGCTACAATAAGGCCGTCTGAA | |
| ED1 | ATAAGG | | | | GATGGTCA | | AAGATGTGCCGCAACGCTCTGCCCCTTAAAGC | |
| 5- | CTGTG | | | | GCAC | | TTCTGCTTTAAGGGGCATCGTTTTCAGTCCCTT | |
| _G_14FE_ | | | | | | | TCTcGTCGATGGTCAGCACAGCCTTATGCACG | |
| PB14 | | | | | | | G | |
| pU6_A1AT_ | TCCAGG | 21120 | AGCCTTAT | 21930 | TTCAGTCCC | 22740 | TCCAGGCCGTGCATAAGGCTGTGGTTGTAGCT | 23550 |
| Nme2_ | CCGTGC | | GCACG | | TTTCTCGTC | | CCCGAAACGTTGCTACAATAAGGCCGTCTGAA | |
| ED1 | ATAAGG | | | | GATGGTCA | | AAGATGTGCCGCAACGCTCTGCCCCTTAAAGC | |
| 5- | CTGTG | | | | GCAC | | TTCTGCTTTAAGGGGCATCGTTTTCAGTCCCTT | |
| _G_14FE_ | | | | | | | TCTcGTCGATGGTCAGCACAGCCTTATGCACG | |
| PB13 | | | | | | | | |
| pU6_A1AT_ | TCCAGG | 21121 | AGCCTTAT | 21931 | TTCAGTCCC | 22741 | TCCAGGCCGTGCATAAGGCTGTGGTTGTAGCT | 23551 |
| Nme2_ | CCGTGC | | GCAC | | TTTCTCGTC | | CCCGAAACGTTGCTACAATAAGGCCGTCTGAA | |
| ED1 | ATAAGG | | | | GATGGTCA | | AAGATGTGCCGCAACGCTCTGCCCCTTAAAGC | |
| 5- | CTGTG | | | | GCAC | | TTCTGCTTTAAGGGGCATCGTTTTCAGTCCCTT | |
| _G_14FE_ | | | | | | | TCTcGTCGATGGTCAGCACAGCCTTATGCAC | |
| PB12 | | | | | | | | |
| pU6_A1AT_ | TCCAGG | 21122 | AGCCTTAT | 21932 | TTCAGTCCC | 22742 | TCCAGGCCGTGCATAAGGCTGTGGTTGTAGCT | 23552 |
| Nme2_ | CCGTGC | | GCA | | TTTCTCGTC | | CCCGAAACGTTGCTACAATAAGGCCGTCTGAA | |
| ED1 | ATAAGG | | | | GATGGTCA | | AAGATGTGCCGCAACGCTCTGCCCCTTAAAGC | |
| 5- | CTGTG | | | | GCAC | | TTCTGCTTTAAGGGGCATCGTTTTCAGTCCCTT | |
| _G_14FE_ | | | | | | | TCTcGTCGATGGTCAGCACAGCCTTATGCA | |
| PB11 | | | | | | | | |
| pU6_A1AT_ | TCCAGG | 21123 | AGCCTTAT | 21933 | TTCAGTCCC | 22743 | TCCAGGCCGTGCATAAGGCTGTGGTTGTAGCT | 23553 |
| Nme2_ | CCGTGC | | GC | | TTTCTCGTC | | CCCGAAACGTTGCTACAATAAGGCCGTCTGAA | |
| ED1 | ATAAGG | | | | GATGGTCA | | AAGATGTGCCGCAACGCTCTGCCCCTTAAAGC | |
| 5- | CTGTG | | | | GCAC | | TTCTGCTTTAAGGGGCATCGTTTTCAGTCCCTT | |
| _G_14FE_ | | | | | | | TCTcGTCGATGGTCAGCACAGCCTTATGC | |
| PB10 | | | | | | | | |
| pU6_A1AT_ | TCCAGG | 21124 | AGCCTTAT | | TTCAGTCCC | 22744 | TCCAGGCCGTGCATAAGGCTGTGGTTGTAGCT | 23554 |
| Nme2_ | CCGTGC | | G | | TTTCTCGTC | | CCCGAAACGTTGCTACAATAAGGCCGTCTGAA | |
| ED1 | ATAAGG | | | | GATGGTCA | | AAGATGTGCCGCAACGCTCTGCCCCTTAAAGC | |
| 5- | CTGTG | | | | GCAC | | TTCTGCTTTAAGGGGCATCGTTTTCAGTCCCTT | |
| _G_14FE_ | | | | | | | TCTcGTCGATGGTCAGCACAGCCTTATG | |
| PB9 | | | | | | | | |
| pU6_A1AT_ | TCCAGG | 21125 | AGCCTTAT | | TTCAGTCCC | 22745 | TCCAGGCCGTGCATAAGGCTGTGGTTGTAGCT | 23555 |
| Nme2_ | CCGTGC | | | | TTTCTcGTC | | CCCGAAACGTTGCTACAATAAGGCCGTCTGAA | |
| ED1 | ATAAGG | | | | GATGGTCA | | AAGATGTGCCGCAACGCTCTGCCCCTTAAAGC | |
| 5- | CTGTG | | | | GCAC | | TTCTGCTTTAAGGGGCATCGTTTTCAGTCCCTT | |
| _G_14FE_ | | | | | | | TCTcGTCGATGGTCAGCACAGCCTTAT | |
| PB8 | | | | | | | | |
| pU6_A1AT_ | TCCAGG | 21126 | AGCCTTAT | 21936 | AGTCCCTTT | 22746 | TCCAGGCCGTGCATAAGGCTGTGGTTGTAGCT | 23556 |
| Nme2_ | CCGTGC | | GCACGGCC | | CTCGTCGAT | | CCCGAAACGTTGCTACAATAAGGCCGTCTGAA | |
| ED1 | ATAAGG | | T | | GGTCAGCAC | | AAGATGTGCCGCAACGCTCTGCCCCTTAAAGC | |
| 5- | CTGTG | | | | | | TTCTGCTTTAAGGGGCATCGTTAGTCCCTTTCTc | |
| _G_11FE_ | | | | | | | GTCGATGGTCAGCACAGCCTTATGCACGGCCT | |
| PB17 | | | | | | | | |
| pU6_A1AT_ | TCCAGG | 21127 | AGCCTTAT | 21937 | AGTCCCTTT | 22747 | TCCAGGCCGTGCATAAGGCTGTGGTTGTAGCT | 23557 |
| Nme2_ | CCGTGC | | GCACGGCC | | CTcGTCGAT | | CCCGAAACGTTGCTACAATAAGGCCGTCTGAA | |
| ED1 | ATAAGG | | | | GGTCAGCAC | | AAGATGTGCCGCAACGCTCTGCCCCTTAAAGC | |
| 5- | CTGTG | | | | | | TTCTGCTTTAAGGGGCATCGTTAGTCCCTTTCTC | |
| _G_11FE_ | | | | | | | GTCGATGGTCAGCACAGCCTTATGCACGGCC | |
| PB16 | | | | | | | | |
| pU6_A1AT_ | TCCAGG | 21128 | AGCCTTAT | 21938 | AGTCCCTTT | 22748 | TCCAGGCCGTGCATAAGGCTGTGGTTGTAGCT | 23558 |
| Nme2_ | CCGTGC | | GCACGGC | | CTcGTCGAT | | CCCGAAACGTTGCTACAATAAGGCCGTCTGAA | |
| ED1 | ATAAGG | | | | GGTCAGCAC | | AAGATGTGCCGCAACGCTCTGCCCCTTAAAGC | |
| 5- | CTGTG | | | | | | TTCTGCTTTAAGGGGCATCGTTAGTCCCTTTCTC | |
| _G_11FE_ | | | | | | | GTCGATGGTCAGCACAGCCTTATGCACGGC | |
| PB15 | | | | | | | | |
| pU6_A1AT_ | TCCAGG | 21129 | AGCCTTAT | 21939 | AGTCCCTTT | 22749 | TCCAGGCCGTGCATAAGGCTGTGGTTGTAGCT | 23559 |
| Nme2_ | CCGTGC | | GCACGG | | CTcGTCGAT | | CCCGAAACGTTGCTACAATAAGGCCGTCTGAA | |
| ED1 | ATAAGG | | | | GGTCAGCAC | | AAGATGTGCCGCAACGCTCTGCCCCTTAAAGC | |
| 5- | CTGTG | | | | | | TTCTGCTTTAAGGGGCATCGTTAGTCCCTTTCTc | |
| _G_11FE_ | | | | | | | GTCGATGGTCAGCACAGCCTTATGCACGG | |
| PB14 | | | | | | | | |
| pU6_A1AT_ | TCCAGG | 21130 | AGCCTTAT | 21940 | AGTCCCTTT | 22750 | TCCAGGCCGTGCATAAGGCTGTGGTTGTAGCT | 23560 |
| Nme2_ | CCGTGC | | GCACG | | CTcGTCGAT | | CCCGAAACGTTGCTACAATAAGGCCGTCTGAA | |
| ED1 | ATAAGG | | | | GGTCAGCAC | | AAGATGTGCCGCAACGCTCTGCCCCTTAAAGC | |
| 5- | CTGTG | | | | | | TTCTGCTTTAAGGGGCATCGTTAGTCCCTTTCTc | |
| _G_11FE_ | | | | | | | GTCGATGGTCAGCACAGCCTTATGCACG | |
| PB13 | | | | | | | | |
| pU6_A1AT_ | TCCAGG | 21131 | AGCCTTAT | 21941 | AGTCCCTTT | 22751 | TCCAGGCCGTGCATAAGGCTGTGGTTGTAGCT | 23561 |
| Nme2_ | CCGTGC | | GCAC | | CTcGTCGAT | | CCCGAAACGTTGCTACAATAAGGCCGTCTGAA | |
| ED1 | ATAAGG | | | | GGTCAGCAC | | AAGATGTGCCGCAACGCTCTGCCCCTTAAAGC | |
| 5- | CTGTG | | | | | | TTCTGCTTTAAGGGGCATCGTTAGTCCCTTTCTc | |
| _G_11FE_ | | | | | | | GTCGATGGTCAGCACAGCCTTATGCAC | |
| PB12 | | | | | | | | |
| pU6_A1AT_ | TCCAGG | 21132 | AGCCTTAT | 21942 | AGTCCCTTT | 22752 | TCCAGGCCGTGCATAAGGCTGTGGTTGTAGCT | 23562 |
| Nme2_ | CCGTGC | | GCA | | CTcGTCGAT | | CCCGAAACGTTGCTACAATAAGGCCGTCTGAA | |
| ED1 | ATAAGG | | | | GGTCAGCAC | | AAGATGTGCCGCAACGCTCTGCCCCTTAAAGC | |
| 5- | CTGTG | | | | | | TTCTGCTTTAAGGGGCATCGTTAGTCCCTTTCTC | |
| _G_11FE_ | | | | | | | GTCGATGGTCAGCACAGCCTTATGCA | |
| PB11 | | | | | | | | |
| pU6_A1AT_ | TCCAGG | 21133 | AGCCTTAT | 21943 | AGTCCCTTT | 22753 | TCCAGGCCGTGCATAAGGCTGTGGTTGTAGCT | 23563 |
| Nme2_ | CCGTGC | | GC | | CTcGTCGAT | | CCCGAAACGTTGCTACAATAAGGCCGTCTGAA | |
| ED1 | ATAAGG | | | | GGTCAGCAC | | AAGATGTGCCGCAACGCTCTGCCCCTTAAAGC | |
| 5- | CTGTG | | | | | | TTCTGCTTTAAGGGGCATCGTTAGTCCCTTTCTC | |
| _G_11FE_ | | | | | | | GTCGATGGTCAGCACAGCCTTATGC | |
| PB10 | | | | | | | | |
| pU6_A1AT_ | TCCAGG | 21134 | AGCCTTAT | | AGTCCCTTT | 22754 | TCCAGGCCGTGCATAAGGCTGTGGTTGTAGCT | 23564 |
| Nme2_ | CCGTGC | | G | | CTcGTCGAT | | CCCGAAACGTTGCTACAATAAGGCCGTCTGAA | |
| ED1 | ATAAGG | | | | GGTCAGCAC | | AAGATGTGCCGCAACGCTCTGCCCCTTAAAGC | |
| 5- | CTGTG | | | | | | TTCTGCTTTAAGGGGCATCGTTAGTCCCTTTCTC | |
| _G_11FE_ | | | | | | | GTCGATGGTCAGCACAGCCTTATG | |
| PB9 | | | | | | | | |
| pU6_A1AT_ | TCCAGG | 21135 | AGCCTTAT | | AGTCCCTTT | 22755 | TCCAGGCCGTGCATAAGGCTGTGGTTGTAGCT | 23565 |
| Nme2_ | CCGTGC | | | | CTcGTCGAT | | CCCGAAACGTTGCTACAATAAGGCCGTCTGAA | |
| ED1 | ATAAGG | | | | GGTCAGCAC | | AAGATGTGCCGCAACGCTCTGCCCCTTAAAGC | |
| 5- | CTGTG | | | | | | TTCTGCTTTAAGGGGCATCGTTAGTCCCTTTCTc | |
| _G_11FE_ | | | | | | | GTCGATGGTCAGCACAGCCTTAT | |
| PB8 | | | | | | | | |
| pU6_A1AT_ | TCCAGG | 21136 | AGCCTTAT | 21946 | TCCCTTTCTc | 22756 | TCCAGGCCGTGCATAAGGCTGTGGTTGTAGCT | 23566 |
| Nme2_ | CCGTGC | | GCACGGCC | | GTCGATGGT | | CCCGAAACGTTGCTACAATAAGGCCGTCTGAA | |
| ED1 | ATAAGG | | T | | CAGCAC | | AAGATGTGCCGCAACGCTCTGCCCCTTAAAGC | |
| 5- | CTGTG | | | | | | TTCTGCTTTAAGGGGCATCGTTTCCCTTTCTcGT | |
| _G_9FE_ | | | | | | | CGATGGTCAGCACAGCCTTATGCACGGCCT | |
| PB17 | | | | | | | | |
| pU6_A1AT_ | TCCAGG | 21137 | AGCCTTAT | 21947 | TCCCTTTCTc | 22757 | TCCAGGCCGTGCATAAGGCTGTGGTTGTAGCT | 23567 |
| Nme2_ | CCGTGC | | GCACGGCC | | GTCGATGGT | | CCCGAAACGTTGCTACAATAAGGCCGTCTGAA | |
| ED1 | ATAAGG | | | | CAGCAC | | AAGATGTGCCGCAACGCTCTGCCCCTTAAAGC | |
| 5- | CTGTG | | | | | | TTCTGCTTTAAGGGGCATCGTTTCCCTTTCTcGT | |
| _G_9FE_ | | | | | | | CGATGGTCAGCACAGCCTTATGCACGGCC | |
| PB16 | | | | | | | | |
| pU6_A1AT_ | TCCAGG | 21138 | AGCCTTAT | 21948 | TCCCTTTCTc | 22758 | TCCAGGCCGTGCATAAGGCTGTGGTTGTAGCT | 23568 |
| Nme2_ | CCGTGC | | GCACGGC | | GTCGATGGT | | CCCGAAACGTTGCTACAATAAGGCCGTCTGAA | |
| ED1 | ATAAGG | | | | CAGCAC | | AAGATGTGCCGCAACGCTCTGCCCCTTAAAGC | |
| 5- | CTGTG | | | | | | TTCTGCTTTAAGGGGCATCGTTTCCCTTTCTcGT | |
| _G_9FE_ | | | | | | | CGATGGTCAGCACAGCCTTATGCACGGC | |
| PB15 | | | | | | | | |
| pU6_A1AT_ | TCCAGG | 21139 | AGCCTTAT | 21949 | TCCCTTTCTc | 22759 | TCCAGGCCGTGCATAAGGCTGTGGTTGTAGCT | 23569 |
| Nme2_ | CCGTGC | | GCACGG | | GTCGATGGT | | CCCGAAACGTTGCTACAATAAGGCCGTCTGAA | |
| ED1 | ATAAGG | | | | CAGCAC | | AAGATGTGCCGCAACGCTCTGCCCCTTAAAGC | |
| 5- | CTGTG | | | | | | TTCTGCTTTAAGGGGCATCGTTTCCCTTTCTcGT | |
| _G_9FE_ | | | | | | | CGATGGTCAGCACAGCCTTATGCACGG | |
| PB14 | | | | | | | | |
| pU6_A1AT_ | TCCAGG | 21140 | AGCCTTAT | 21950 | TCCCTTTCTc | 22760 | TCCAGGCCGTGCATAAGGCTGTGGTTGTAGCT | 23570 |
| Nme2_ | CCGTGC | | GCACG | | GTCGATGGT | | CCCGAAACGTTGCTACAATAAGGCCGTCTGAA | |
| ED1 | ATAAGG | | | | CAGCAC | | AAGATGTGCCGCAACGCTCTGCCCCTTAAAGC | |
| 5- | CTGTG | | | | | | TTCTGCTTTAAGGGGCATCGTTTCCCTTTCTcGT | |
| _G_9FE_ | | | | | | | CGATGGTCAGCACAGCCTTATGCACG | |
| PB13 | | | | | | | | |
| pU6_A1AT_ | TCCAGG | 21141 | AGCCTTAT | 21951 | TCCCTTTCTc | 22761 | TCCAGGCCGTGCATAAGGCTGTGGTTGTAGCT | 23571 |
| Nme2_ | CCGTGC | | GCAC | | GTCGATGGT | | CCCGAAACGTTGCTACAATAAGGCCGTCTGAA | |
| ED1 | ATAAGG | | | | CAGCAC | | AAGATGTGCCGCAACGCTCTGCCCCTTAAAGC | |
| 5- | CTGTG | | | | | | TTCTGCTTTAAGGGGCATCGTTTCCCTTTCTcGT | |
| _G_9FE_ | | | | | | | CGATGGTCAGCACAGCCTTATGCAC | |
| PB12 | | | | | | | | |
| pU6_A1AT_ | TCCAGG | 21142 | AGCCTTAT | 21952 | TCCCTTTCTc | 22762 | TCCAGGCCGTGCATAAGGCTGTGGTTGTAGCT | 23572 |
| Nme2_ | CCGTGC | | GCA | | GTCGATGGT | | CCCGAAACGTTGCTACAATAAGGCCGTCTGAA | |
| ED1 | ATAAGG | | | | CAGCAC | | AAGATGTGCCGCAACGCTCTGCCCCTTAAAGC | |
| 5- | CTGTG | | | | | | TTCTGCTTTAAGGGGCATCGTTTCCCTTTCTcGT | |
| _G_9FE_ | | | | | | | CGATGGTCAGCACAGCCTTATGCA | |
| PB11 | | | | | | | | |
| pU6_A1AT_ | TCCAGG | 21143 | AGCCTTAT | 21953 | TCCCTTTCTc | 22763 | TCCAGGCCGTGCATAAGGCTGTGGTTGTAGCT | 23573 |
| Nme2_ | CCGTGC | | GC | | GTCGATGGT | | CCCGAAACGTTGCTACAATAAGGCCGTCTGAA | |
| ED1 | ATAAGG | | | | CAGCAC | | AAGATGTGCCGCAACGCTCTGCCCCTTAAAGC | |
| 5- | CTGTG | | | | | | TTCTGCTTTAAGGGGCATCGTTTCCCTTTCTcGT | |
| _G_9FE_ | | | | | | | CGATGGTCAGCACAGCCTTATGC | |
| PB10 | | | | | | | | |
| pU6_A1AT_ | TCCAGG | 21144 | AGCCTTAT | | TCCCTTTCTc | 22764 | TCCAGGCCGTGCATAAGGCTGTGGTTGTAGCT | 23574 |
| Nme2_ | CCGTGC | | G | | GTCGATGGT | | CCCGAAACGTTGCTACAATAAGGCCGTCTGAA | |
| ED1 | ATAAGG | | | | CAGCAC | | AAGATGTGCCGCAACGCTCTGCCCCTTAAAGC | |
| 5- | CTGTG | | | | | | TTCTGCTTTAAGGGGCATCGTTTCCCTTTCTcGT | |
| _G_9FE_ | | | | | | | CGATGGTCAGCACAGCCTTATG | |
| PB9 | | | | | | | | |
| pU6_A1AT_ | TCCAGG | 21145 | AGCCTTAT | | TCCCTTTCTc | 22765 | TCCAGGCCGTGCATAAGGCTGTGGTTGTAGCT | 23575 |
| Nme2_ | CCGTGC | | | | GTCGATGGT | | CCCGAAACGTTGCTACAATAAGGCCGTCTGAA | |
| ED1 | ATAAGG | | | | CAGCAC | | AAGATGTGCCGCAACGCTCTGCCCCTTAAAGC | |
| 5- | CTGTG | | | | | | TTCTGCTTTAAGGGGCATCGTTTCCCTTTCTcGT | |
| _G_9FE_ | | | | | | | CGATGGTCAGCACAGCCTTAT | |
| PB8 | | | | | | | | |
| pU6_A1AT_ | TCCAGG | 21146 | AGCCTTAT | 21956 | CCTTTCTcGT | 22766 | TCCAGGCCGTGCATAAGGCTGTGGTTGTAGCT | 23576 |
| Nme2_ | CCGTGC | | GCACGGCC | | CGATGGTCA | | CCCGAAACGTTGCTACAATAAGGCCGTCTGAA | |
| ED1 | ATAAGG | | T | | GCAC | | AAGATGTGCCGCAACGCTCTGCCCCTTAAAGC | |
| 5- | CTGTG | | | | | | TTCTGCTTTAAGGGGCATCGTTCCTTTCTcGTC | |
| _G_7FE_ | | | | | | | GATGGTCAGCACAGCCTTATGCACGGCCT | |
| PB17 | | | | | | | | |
| pU6_A1AT_ | TCCAGG | 21147 | AGCCTTAT | 21957 | CCTTTCTcGT | 22767 | TCCAGGCCGTGCATAAGGCTGTGGTTGTAGCT | 23577 |
| Nme2_ | CCGTGC | | GCACGGCC | | CGATGGTCA | | CCCGAAACGTTGCTACAATAAGGCCGTCTGAA | |
| ED1 | ATAAGG | | | | GCAC | | AAGATGTGCCGCAACGCTCTGCCCCTTAAAGC | |
| 5- | CTGTG | | | | | | TTCTGCTTTAAGGGGCATCGTTCCTTTCTcGTC | |
| _G_7FE_ | | | | | | | GATGGTCAGCACAGCCTTATGCACGGCC | |
| PB16 | | | | | | | | |
| pU6_A1AT_ | TCCAGG | 21148 | AGCCTTAT | 21958 | CCTTTCTcGT | 22768 | TCCAGGCCGTGCATAAGGCTGTGGTTGTAGCT | 23578 |
| Nme2_ | CCGTGC | | GCACGGC | | CGATGGTCA | | CCCGAAACGTTGCTACAATAAGGCCGTCTGAA | |
| ED1 | ATAAGG | | | | GCAC | | AAGATGTGCCGCAACGCTCTGCCCCTTAAAGC | |
| 5- | CTGTG | | | | | | TTCTGCTTTAAGGGGCATCGTTCCTTTCTcGTC | |
| _G_7FE_ | | | | | | | GATGGTCAGCACAGCCTTATGCACGGC | |
| PB15 | | | | | | | | |
| pU6_A1AT_ | TCCAGG | 21149 | AGCCTTAT | 21959 | CCTTTCTcGT | 22769 | TCCAGGCCGTGCATAAGGCTGTGGTTGTAGCT | 23579 |
| Nme2_ | CCGTGC | | GCACGG | | CGATGGTCA | | CCCGAAACGTTGCTACAATAAGGCCGTCTGAA | |
| ED1 | ATAAGG | | | | GCAC | | AAGATGTGCCGCAACGCTCTGCCCCTTAAAGC | |
| 5- | CTGTG | | | | | | TTCTGCTTTAAGGGGCATCGTTCCTTTCTcGTC | |
| _G_7FE_ | | | | | | | GATGGTCAGCACAGCCTTATGCACGG | |
| PB14 | | | | | | | | |
| pU6_A1AT_ | TCCAGG | 21150 | AGCCTTAT | 21960 | CCTTTCTcGT | 22770 | TCCAGGCCGTGCATAAGGCTGTGGTTGTAGCT | 23580 |
| Nme2_ | CCGTGC | | GCACG | | CGATGGTCA | | CCCGAAACGTTGCTACAATAAGGCCGTCTGAA | |
| ED1 | ATAAGG | | | | GCAC | | AAGATGTGCCGCAACGCTCTGCCCCTTAAAGC | |
| 5- | CTGTG | | | | | | TTCTGCTTTAAGGGGCATCGTTCCTTTCTcGTC | |
| _G_7FE_ | | | | | | | GATGGTCAGCACAGCCTTATGCACG | |
| PB13 | | | | | | | | |
| pU6_A1AT_ | TCCAGG | 21151 | AGCCTTAT | 21961 | CCTTTCTcGT | 22771 | TCCAGGCCGTGCATAAGGCTGTGGTTGTAGCT | 23581 |
| Nme2_ | CCGTGC | | GCAC | | CGATGGTCA | | CCCGAAACGTTGCTACAATAAGGCCGTCTGAA | |
| ED1 | ATAAGG | | | | GCAC | | AAGATGTGCCGCAACGCTCTGCCCCTTAAAGC | |
| 5- | CTGTG | | | | | | TTCTGCTTTAAGGGGCATCGTTCCTTTCTcGTC | |
| _G_7FE_ | | | | | | | GATGGTCAGCACAGCCTTATGCAC | |
| PB12 | | | | | | | | |
| pU6_A1AT_ | TCCAGG | 21152 | AGCCTTAT | 21962 | CCTTTCTcGT | 22772 | TCCAGGCCGTGCATAAGGCTGTGGTTGTAGCT | 23582 |
| Nme2_ | CCGTGC | | GCA | | CGATGGTCA | | CCCGAAACGTTGCTACAATAAGGCCGTCTGAA | |
| ED1 | ATAAGG | | | | GCAC | | AAGATGTGCCGCAACGCTCTGCCCCTTAAAGC | |
| 5- | CTGTG | | | | | | TTCTGCTTTAAGGGGCATCGTTCCTTTCTcGTC | |
| _G_7FE_ | | | | | | | GATGGTCAGCACAGCCTTATGCA | |
| PB11 | | | | | | | | |
| pU6_A1AT_ | TCCAGG | 21153 | AGCCTTAT | 21963 | CCTTTCTCGT | 22773 | TCCAGGCCGTGCATAAGGCTGTGGTTGTAGCT | 23583 |
| Nme2_ | CCGTGC | | GC | | CGATGGTCA | | CCCGAAACGTTGCTACAATAAGGCCGTCTGAA | |
| ED1 | ATAAGG | | | | GCAC | | AAGATGTGCCGCAACGCTCTGCCCCTTAAAGC | |
| 5- | CTGTG | | | | | | TTCTGCTTTAAGGGGCATCGTTCCTTTCTcGTC | |
| _G_7FE_ | | | | | | | GATGGTCAGCACAGCCTTATGC | |
| PB10 | | | | | | | | |
| pU6_A1AT_ | TCCAGG | 21154 | AGCCTTAT | | CCTTTCTcGT | 22774 | TCCAGGCCGTGCATAAGGCTGTGGTTGTAGCT | 23584 |
| Nme2_ | CCGTGC | | G | | CGATGGTCA | | CCCGAAACGTTGCTACAATAAGGCCGTCTGAA | |
| ED1 | ATAAGG | | | | GCAC | | AAGATGTGCCGCAACGCTCTGCCCCTTAAAGC | |
| 5- | CTGTG | | | | | | TTCTGCTTTAAGGGGCATCGTTCCTTTCTcGTC | |
| _G_7FE_ | | | | | | | GATGGTCAGCACAGCCTTATG | |
| PB9 | | | | | | | | |
| pU6_A1AT_ | TCCAGG | 21155 | AGCCTTAT | | CCTTTCTCGT | 22775 | TCCAGGCCGTGCATAAGGCTGTGGTTGTAGCT | 23585 |
| Nme2_ | CCGTGC | | | | CGATGGTCA | | CCCGAAACGTTGCTACAATAAGGCCGTCTGAA | |
| ED1 | ATAAGG | | | | GCAC | | AAGATGTGCCGCAACGCTCTGCCCCTTAAAGC | |
| 5- | CTGTG | | | | | | TTCTGCTTTAAGGGGCATCGTTCCTTTCTcGTC | |
| _G_7FE_ | | | | | | | GATGGTCAGCACAGCCTTAT | |
| PB8 | | | | | | | | |
| pU6_A1AT_ | TCCAGG | 21156 | AGCCTTAT | 21966 | TTTCTCGTC | 22776 | TCCAGGCCGTGCATAAGGCTGTGGTTGTAGCT | 23586 |
| Nme2_ | CCGTGC | | GCACGGCC | | GATGGTCA | | CCCGAAACGTTGCTACAATAAGGCCGTCTGAA | |
| ED1 | ATAAGG | | T | | GCAC | | AAGATGTGCCGCAACGCTCTGCCCCTTAAAGC | |
| 5- | CTGTG | | | | | | TTCTGCTTTAAGGGGCATCGTTTTTCTcGTCGA | |
| _G_5FE_ | | | | | | | TGGTCAGCACAGCCTTATGCACGGCCT | |
| PB17 | | | | | | | | |
| pU6_A1AT_ | TCCAGG | 21157 | AGCCTTAT | 21967 | TTTCTCGTC | 22777 | TCCAGGCCGTGCATAAGGCTGTGGTTGTAGCT | 23587 |
| Nme2_ | CCGTGC | | GCACGGCC | | GATGGTCA | | CCCGAAACGTTGCTACAATAAGGCCGTCTGAA | |
| ED1 | ATAAGG | | | | GCAC | | AAGATGTGCCGCAACGCTCTGCCCCTTAAAGC | |
| 5- | CTGTG | | | | | | TTCTGCTTTAAGGGGCATCGTTTTTCTcGTCGA | |
| _G_5FE_ | | | | | | | TGGTCAGCACAGCCTTATGCACGGCC | |
| PB16 | | | | | | | | |
| pU6_A1AT_ | TCCAGG | 21158 | AGCCTTAT | 21968 | TTTCTcGTC | 22778 | TCCAGGCCGTGCATAAGGCTGTGGTTGTAGCT | 23588 |
| Nme2_ | CCGTGC | | GCACGGC | | GATGGTCA | | CCCGAAACGTTGCTACAATAAGGCCGTCTGAA | |
| ED1 | ATAAGG | | | | GCAC | | AAGATGTGCCGCAACGCTCTGCCCCTTAAAGC | |
| 5- | CTGTG | | | | | | TTCTGCTTTAAGGGGCATCGTTTTTCTcGTCGA | |
| _G_5FE_ | | | | | | | TGGTCAGCACAGCCTTATGCACGGC | |
| PB15 | | | | | | | | |
| pU6_A1AT_ | TCCAGG | 21159 | AGCCTTAT | 21969 | TTTCTcGTC | 22779 | TCCAGGCCGTGCATAAGGCTGTGGTTGTAGCT | 23589 |
| Nme2_ | CCGTGC | | GCACGG | | GATGGTCA | | CCCGAAACGTTGCTACAATAAGGCCGTCTGAA | |
| ED1 | ATAAGG | | | | GCAC | | AAGATGTGCCGCAACGCTCTGCCCCTTAAAGC | |
| 5- | CTGTG | | | | | | TTCTGCTTTAAGGGGCATCGTTTTTCTcGTCGA | |
| _G_5FE_ | | | | | | | TGGTCAGCACAGCCTTATGCACGG | |
| PB14 | | | | | | | | |
| pU6_A1AT_ | TCCAGG | 21160 | AGCCTTAT | 21970 | TTTCTCGTC | 22780 | TCCAGGCCGTGCATAAGGCTGTGGTTGTAGCT | 23590 |
| Nme2_ | CCGTGC | | GCACG | | GATGGTCA | | CCCGAAACGTTGCTACAATAAGGCCGTCTGAA | |
| ED1 | ATAAGG | | | | GCAC | | AAGATGTGCCGCAACGCTCTGCCCCTTAAAGC | |
| 5- | CTGTG | | | | | | TTCTGCTTTAAGGGGCATCGTTTTTCTCGTCGA | |
| _G_5FE_ | | | | | | | TGGTCAGCACAGCCTTATGCACG | |
| PB13 | | | | | | | | |
| pU6_A1AT_ | TCCAGG | 21161 | AGCCTTAT | 21971 | TTTCTCGTC | 22781 | TCCAGGCCGTGCATAAGGCTGTGGTTGTAGCT | 23591 |
| Nme2_ | CCGTGC | | GCAC | | GATGGTCA | | CCCGAAACGTTGCTACAATAAGGCCGTCTGAA | |
| ED1 | ATAAGG | | | | GCAC | | AAGATGTGCCGCAACGCTCTGCCCCTTAAAGC | |
| 5- | CTGTG | | | | | | TTCTGCTTTAAGGGGCATCGTTTTTCTcGTCGA | |
| _G_5FE_ | | | | | | | TGGTCAGCACAGCCTTATGCAC | |
| PB12 | | | | | | | | |
| pU6_A1AT_ | TCCAGG | 21162 | AGCCTTAT | 21972 | TTTCTCGTC | 22782 | TCCAGGCCGTGCATAAGGCTGTGGTTGTAGCT | 23592 |
| Nme2_ | CCGTGC | | GCA | | GATGGTCA | | CCCGAAACGTTGCTACAATAAGGCCGTCTGAA | |
| ED1 | ATAAGG | | | | GCAC | | AAGATGTGCCGCAACGCTCTGCCCCTTAAAGC | |
| 5- | CTGTG | | | | | | TTCTGCTTTAAGGGGCATCGTTTTTCTcGTCGA | |
| _G_5FE_ | | | | | | | TGGTCAGCACAGCCTTATGCA | |
| PB11 | | | | | | | | |
| pU6_A1AT_ | TCCAGG | 21163 | AGCCTTAT | 21973 | TTTCTCGTC | 22783 | TCCAGGCCGTGCATAAGGCTGTGGTTGTAGCT | 23593 |
| Nme2_ | CCGTGC | | GC | | GATGGTCA | | CCCGAAACGTTGCTACAATAAGGCCGTCTGAA | |
| ED1 | ATAAGG | | | | GCAC | | AAGATGTGCCGCAACGCTCTGCCCCTTAAAGC | |
| 5- | CTGTG | | | | | | TTCTGCTTTAAGGGGCATCGTTTTTCTcGTCGA | |
| _G_5FE_ | | | | | | | TGGTCAGCACAGCCTTATGC | |
| PB10 | | | | | | | | |
| pU6_A1AT_ | TCCAGG | 21164 | AGCCTTAT | | TTTCTcGTC | 22784 | TCCAGGCCGTGCATAAGGCTGTGGTTGTAGCT | 23594 |
| Nme2_ | CCGTGC | | G | | GATGGTCA | | CCCGAAACGTTGCTACAATAAGGCCGTCTGAA | |
| ED1 | ATAAGG | | | | GCAC | | AAGATGTGCCGCAACGCTCTGCCCCTTAAAGC | |
| 5- | CTGTG | | | | | | TTCTGCTTTAAGGGGCATCGTTTTTCTCGTCGA | |
| _G_5FE_ | | | | | | | TGGTCAGCACAGCCTTATG | |
| PB9 | | | | | | | | |
| pU6_A1AT_ | TCCAGG | 21165 | AGCCTTAT | | TTTCTCGTC | 22785 | TCCAGGCCGTGCATAAGGCTGTGGTTGTAGCT | 23595 |
| Nme2_ | CCGTGC | | | | GATGGTCA | | CCCGAAACGTTGCTACAATAAGGCCGTCTGAA | |
| ED1 | ATAAGG | | | | GCAC | | AAGATGTGCCGCAACGCTCTGCCCCTTAAAGC | |
| 5- | CTGTG | | | | | | TTCTGCTTTAAGGGGCATCGTTTTTCTcGTCGA | |
| _G_5FE_ | | | | | | | TGGTCAGCACAGCCTTAT | |
| PB8 | | | | | | | | |
| pU6_A1AT_ | TCCAGG | 21166 | AGCCTTAT | 21976 | TCTcGTCGA | 22786 | TCCAGGCCGTGCATAAGGCTGTGGTTGTAGCT | 23596 |
| Nme2_ | CCGTGC | | GCACGGCC | | TGGTCAGCA | | CCCGAAACGTTGCTACAATAAGGCCGTCTGAA | |
| ED1 | ATAAGG | | T | | C | | AAGATGTGCCGCAACGCTCTGCCCCTTAAAGC | |
| 5- | CTGTG | | | | | | TTCTGCTTTAAGGGGCATCGTTTCTcGTCGATG | |
| _G_3FE_ | | | | | | | GTCAGCACAGCCTTATGCACGGCCT | |
| PB17 | | | | | | | | |
| pU6_A1AT_ | TCCAGG | 21167 | AGCCTTAT | 21977 | TCTcGTCGA | 22787 | TCCAGGCCGTGCATAAGGCTGTGGTTGTAGCT | 23597 |
| Nme2_ | CCGTGC | | GCACGGCC | | TGGTCAGCA | | CCCGAAACGTTGCTACAATAAGGCCGTCTGAA | |
| ED1 | ATAAGG | | | | C | | AAGATGTGCCGCAACGCTCTGCCCCTTAAAGC | |
| 5- | CTGTG | | | | | | TTCTGCTTTAAGGGGCATCGTTTCTcGTCGATG | |
| _G_3FE_ | | | | | | | GTCAGCACAGCCTTATGCACGGCC | |
| PB16 | | | | | | | | |
| pU6_A1AT_ | TCCAGG | 21168 | AGCCTTAT | 21978 | TCTcGTCGA | 22788 | TCCAGGCCGTGCATAAGGCTGTGGTTGTAGCT | 23598 |
| Nme2_ | CCGTGC | | GCACGGC | | TGGTCAGCA | | CCCGAAACGTTGCTACAATAAGGCCGTCTGAA | |
| ED1 | ATAAGG | | | | C | | AAGATGTGCCGCAACGCTCTGCCCCTTAAAGC | |
| 5- | CTGTG | | | | | | TTCTGCTTTAAGGGGCATCGTTTCTcGTCGATG | |
| _G_3FE_ | | | | | | | GTCAGCACAGCCTTATGCACGGC | |
| PB15 | | | | | | | | |
| pU6_A1AT_ | TCCAGG | 21169 | AGCCTTAT | 21979 | TCTcGTCGA | 22789 | TCCAGGCCGTGCATAAGGCTGTGGTTGTAGCT | 23599 |
| Nme2_ | CCGTGC | | GCACGG | | TGGTCAGCA | | CCCGAAACGTTGCTACAATAAGGCCGTCTGAA | |
| ED1 | ATAAGG | | | | C | | AAGATGTGCCGCAACGCTCTGCCCCTTAAAGC | |
| 5- | CTGTG | | | | | | TTCTGCTTTAAGGGGCATCGTTTCTcGTCGATG | |
| _G_3FE_ | | | | | | | GTCAGCACAGCCTTATGCACGG | |
| PB14 | | | | | | | | |
| pU6_A1AT_ | TCCAGG | 21170 | AGCCTTAT | 21980 | TCTcGTCGA | 22790 | TCCAGGCCGTGCATAAGGCTGTGGTTGTAGCT | 23600 |
| Nme2_ | CCGTGC | | GCACG | | TGGTCAGCA | | CCCGAAACGTTGCTACAATAAGGCCGTCTGAA | |
| ED1 | ATAAGG | | | | C | | AAGATGTGCCGCAACGCTCTGCCCCTTAAAGC | |
| 5- | CTGTG | | | | | | TTCTGCTTTAAGGGGCATCGTTTCTcGTCGATG | |
| _G_3FE_ | | | | | | | GTCAGCACAGCCTTATGCACG | |
| PB13 | | | | | | | | |
| pU6_A1AT_ | TCCAGG | 21171 | AGCCTTAT | 21981 | TCTcGTCGA | 22791 | TCCAGGCCGTGCATAAGGCTGTGGTTGTAGCT | 23601 |
| Nme2_ | CCGTGC | | GCAC | | TGGTCAGCA | | CCCGAAACGTTGCTACAATAAGGCCGTCTGAA | |
| ED1 | ATAAGG | | | | C | | AAGATGTGCCGCAACGCTCTGCCCCTTAAAGC | |
| 5- | CTGTG | | | | | | TTCTGCTTTAAGGGGCATCGTTTCTcGTCGATG | |
| _G_3FE_ | | | | | | | GTCAGCACAGCCTTATGCAC | |
| PB12 | | | | | | | | |
| pU6_A1AT_ | TCCAGG | 21172 | AGCCTTAT | 21982 | TCTcGTCGA | 22792 | TCCAGGCCGTGCATAAGGCTGTGGTTGTAGCT | 23602 |
| Nme2_ | CCGTGC | | GCA | | TGGTCAGCA | | CCCGAAACGTTGCTACAATAAGGCCGTCTGAA | |
| ED1 | ATAAGG | | | | C | | AAGATGTGCCGCAACGCTCTGCCCCTTAAAGC | |
| 5- | CTGTG | | | | | | TTCTGCTTTAAGGGGCATCGTTTCTcGTCGATG | |
| _G_3FE_ | | | | | | | GTCAGCACAGCCTTATGCA | |
| PB11 | | | | | | | | |
| pU6_A1AT_ | TCCAGG | 21173 | AGCCTTAT | 21983 | TCTcGTCGA | 22793 | TCCAGGCCGTGCATAAGGCTGTGGTTGTAGCT | 23603 |
| Nme2_ | CCGTGC | | GC | | TGGTCAGCA | | CCCGAAACGTTGCTACAATAAGGCCGTCTGAA | |
| ED1 | ATAAGG | | | | C | | AAGATGTGCCGCAACGCTCTGCCCCTTAAAGC | |
| 5- | CTGTG | | | | | | TTCTGCTTTAAGGGGCATCGTTTCTcGTCGATG | |
| _G_3FE_ | | | | | | | GTCAGCACAGCCTTATGC | |
| PB10 | | | | | | | | |
| pU6_A1AT_ | TCCAGG | 21174 | AGCCTTAT | | TCTcGTCGA | 22794 | TCCAGGCCGTGCATAAGGCTGTGGTTGTAGCT | 23604 |
| Nme2_ | CCGTGC | | G | | TGGTCAGCA | | CCCGAAACGTTGCTACAATAAGGCCGTCTGAA | |
| ED1 | ATAAGG | | | | C | | AAGATGTGCCGCAACGCTCTGCCCCTTAAAGC | |
| 5- | CTGTG | | | | | | TTCTGCTTTAAGGGGCATCGTTTCTcGTCGATG | |
| _G_3FE_ | | | | | | | GTCAGCACAGCCTTATG | |
| PB9 | | | | | | | | |
| pU6_A1AT_ | TCCAGG | 21175 | AGCCTTAT | | TCTcGTCGA | 22795 | TCCAGGCCGTGCATAAGGCTGTGGTTGTAGCT | 23605 |
| Nme2_ | CCGTGC | | | | TGGTCAGCA | | CCCGAAACGTTGCTACAATAAGGCCGTCTGAA | |
| ED1 | ATAAGG | | | | C | | AAGATGTGCCGCAACGCTCTGCCCCTTAAAGC | |
| 5- | CTGTG | | | | | | TTCTGCTTTAAGGGGCATCGTTTCTcGTCGATG | |
| _G_3FE_ | | | | | | | GTCAGCACAGCCTTAT | |
| PB8 | | | | | | | | |
| pU6_A1AT_ | CCAGGC | 21176 | CCTTATGC | 21986 | ACATGGCCC | 22796 | CCAGGCCGTGCATAAGGCTGGTTTTAGAGCTA | 23606 |
| SpCas9- | CGTGCA | | ACGGCCTG | | CAGCAGCTT | | GAAATAGCAAGTTAAAATAAGGCTAGTCCGTT | |
| NG_ED1 | TAAGGC | | G | | CAGTCCCTT | | ATCAACTTGAAAAAGTGGCACCGAGTCGGTGC | |
| 7- | TG | | | | TCTcGTCGA | | ACATGGCCCCAGCAGCTTCAGTCCCTTTCTcGT | |
| _30FE_ | | | | | TGGTCAGCA | | CGATGGTCAGCACAGCCTTATGCACGGCCTGG | |
| PB17 | | | | | CAG | | | |
| pU6_A1AT_ | CCAGGC | 21177 | CCTTATGC | 21987 | ACATGGCCC | 22797 | CCAGGCCGTGCATAAGGCTGGTTTTAGAGCTA | 23607 |
| SpCas9- | CGTGCA | | ACGGCCTG | | CAGCAGCTT | | GAAATAGCAAGTTAAAATAAGGCTAGTCCGTT | |
| NG_ED1 | TAAGGC | | | | CAGTCCCTT | | ATCAACTTGAAAAAGTGGCACCGAGTCGGTGC | |
| 7- | TG | | | | TCTcGTCGA | | ACATGGCCCCAGCAGCTTCAGTCCCTTTCTcGT | |
| _30FE_ | | | | | TGGTCAGCA | | CGATGGTCAGCACAGCCTTATGCACGGCCTG | |
| PB16 | | | | | CAG | | | |
| pU6_A1AT_ | CCAGGC | 21178 | CCTTATGC | 21988 | ACATGGCCC | 22798 | CCAGGCCGTGCATAAGGCTGGTTTTAGAGCTA | 23608 |
| SpCas9- | CGTGCA | | ACGGCCT | | CAGCAGCTT | | GAAATAGCAAGTTAAAATAAGGCTAGTCCGTT | |
| NG_ED1 | TAAGGC | | | | CAGTCCCTT | | ATCAACTTGAAAAAGTGGCACCGAGTCGGTGC | |
| 7- | TG | | | | TCTcGTCGA | | ACATGGCCCCAGCAGCTTCAGTCCCTTTCTcGT | |
| _30FE_ | | | | | TGGTCAGCA | | CGATGGTCAGCACAGCCTTATGCACGGCCT | |
| PB15 | | | | | CAG | | | |
| pU6_A1AT_ | CCAGGC | 21179 | CCTTATGC | 21989 | ACATGGCCC | 22799 | CCAGGCCGTGCATAAGGCTGGTTTTAGAGCTA | 23609 |
| SpCas9- | CGTGCA | | ACGGCC | | CAGCAGCTT | | GAAATAGCAAGTTAAAATAAGGCTAGTCCGTT | |
| NG_ED1 | TAAGGC | | | | CAGTCCCTT | | ATCAACTTGAAAAAGTGGCACCGAGTCGGTGC | |
| 7- | TG | | | | TCTcGTCGA | | ACATGGCCCCAGCAGCTTCAGTCCCTTTCTcGT | |
| _30FE_ | | | | | TGGTCAGCA | | CGATGGTCAGCACAGCCTTATGCACGGCC | |
| PB14 | | | | | CAG | | | |
| pU6_A1AT_ | CCAGGC | 21180 | CCTTATGC | 21990 | ACATGGCCC | 22800 | CCAGGCCGTGCATAAGGCTGGTTTTAGAGCTA | 23610 |
| SpCas9- | CGTGCA | | ACGGC | | CAGCAGCTT | | GAAATAGCAAGTTAAAATAAGGCTAGTCCGTT | |
| | TAAGGC | | | | CAGTCCCTT | | ATCAACTTGAAAAAGTGGCACCGAGTCGGTGC | |
| NG_ED1 | TG | | | | TCTcGTCGA | | ACATGGCCCCAGCAGCTTCAGTCCCTTTCTCGT | |
| 7- | | | | | TGGTCAGCA | | CGATGGTCAGCACAGCCTTATGCACGGC | |
| _30FE_ | | | | | CAG | | | |
| PB13 | | | | | | | | |
| pU6_A1AT_ | CCAGGC | 21181 | CCTTATGC | 21991 | ACATGGCCC | 22801 | CCAGGCCGTGCATAAGGCTGGTTTTAGAGCTA | 23611 |
| SpCas9- | CGTGCA | | ACGG | | CAGCAGCTT | | GAAATAGCAAGTTAAAATAAGGCTAGTCCGTT | |
| | TAAGGC | | | | CAGTCCCTT | | ATCAACTTGAAAAAGTGGCACCGAGTCGGTGC | |
| NG_ED1 | TG | | | | TCTcGTCGA | | ACATGGCCCCAGCAGCTTCAGTCCCTTTCTcGT | |
| 7- | | | | | TGGTCAGCA | | CGATGGTCAGCACAGCCTTATGCACGG | |
| _30FE_ | | | | | CAG | | | |
| PB12 | | | | | | | | |
| pU6_A1AT_ | CCAGGC | 21182 | CCTTATGC | 21992 | ACATGGCCC | 22802 | CCAGGCCGTGCATAAGGCTGGTTTTAGAGCTA | 23612 |
| SpCas9- | CGTGCA | | ACG | | CAGCAGCTT | | GAAATAGCAAGTTAAAATAAGGCTAGTCCGTT | |
| NG_ED1 | TAAGGC | | | | CAGTCCCTT | | ATCAACTTGAAAAAGTGGCACCGAGTCGGTGC | |
| 7- | TG | | | | TCTcGTCGA | | ACATGGCCCCAGCAGCTTCAGTCCCTTTCTcGT | |
| _30FE_ | | | | | TGGTCAGCA | | CGATGGTCAGCACAGCCTTATGCACG | |
| PB11 | | | | | CAG | | | |
| pU6_A1AT_ | CCAGGC | 21183 | CCTTATGC | 21993 | ACATGGCCC | 22803 | CCAGGCCGTGCATAAGGCTGGTTTTAGAGCTA | 23613 |
| SpCas9- | CGTGCA | | AC | | CAGCAGCTT | | GAAATAGCAAGTTAAAATAAGGCTAGTCCGTT | |
| NG_ED1 | TAAGGC | | | | CAGTCCCTT | | ATCAACTTGAAAAAGTGGCACCGAGTCGGTGC | |
| 7- | TG | | | | TCTcGTCGA | | ACATGGCCCCAGCAGCTTCAGTCCCTTTCTcGT | |
| _30FE_ | | | | | TGGTCAGCA | | CGATGGTCAGCACAGCCTTATGCAC | |
| PB10 | | | | | CAG | | | |
| pU6_A1AT_ | CCAGGC | 21184 | CCTTATGC | | ACATGGCCC | 22804 | CCAGGCCGTGCATAAGGCTGGTTTTAGAGCTA | 23614 |
| SpCas9- | CGTGCA | | A | | CAGCAGCTT | | GAAATAGCAAGTTAAAATAAGGCTAGTCCGTT | |
| NG_ED1 | TAAGGC | | | | CAGTCCCTT | | ATCAACTTGAAAAAGTGGCACCGAGTCGGTGC | |
| 7- | TG | | | | TCTcGTCGA | | ACATGGCCCCAGCAGCTTCAGTCCCTTTCTcGT | |
| _30FE_ | | | | | TGGTCAGCA | | CGATGGTCAGCACAGCCTTATGCA | |
| PB9 | | | | | CAG | | | |
| pU6_A1AT_ | CCAGGC | 21185 | CCTTATGC | | ACATGGCCC | 22805 | CCAGGCCGTGCATAAGGCTGGTTTTAGAGCTA | 23615 |
| SpCas9- | CGTGCA | | | | CAGCAGCTT | | GAAATAGCAAGTTAAAATAAGGCTAGTCCGTT | |
| NG_ED1 | TAAGGC | | | | CAGTCCCTT | | ATCAACTTGAAAAAGTGGCACCGAGTCGGTGC | |
| 7- | TG | | | | TCTcGTCGA | | ACATGGCCCCAGCAGCTTCAGTCCCTTTCTcGT | |
| _30FE_ | | | | | TGGTCAGCA | | CGATGGTCAGCACAGCCTTATGC | |
| PB8 | | | | | CAG | | | |
| pU6_A1AT_ | CCAGGC | 21186 | CCTTATGC | 21996 | GCCCCAGCA | 22806 | CCAGGCCGTGCATAAGGCTGGTTTTAGAGCTA | 23616 |
| SpCas9- | CGTGCA | | ACGGCCTG | | GCTTCAGTC | | GAAATAGCAAGTTAAAATAAGGCTAGTCCGTT | |
| NG_ED1 | TAAGGC | | G | | CCTTTCTcGT | | ATCAACTTGAAAAAGTGGCACCGAGTCGGTGC | |
| 7- | TG | | | | CGATGGTCA | | GCCCCAGCAGCTTCAGTCCCTTTCTcGTCGATG | |
| _25FE_ | | | | | GCACAG | | GTCAGCACAGCCTTATGCACGGCCTGG | |
| PB17 | | | | | | | | |
| pU6_A1AT_ | CCAGGC | 21187 | CCTTATGC | 21997 | GCCCCAGCA | 22807 | CCAGGCCGTGCATAAGGCTGGTTTTAGAGCTA | 23617 |
| SpCas9- | CGTGCA | | ACGGCCTG | | GCTTCAGTC | | GAAATAGCAAGTTAAAATAAGGCTAGTCCGTT | |
| NG_ED1 | TAAGGC | | | | CCTTTCTcGT | | ATCAACTTGAAAAAGTGGCACCGAGTCGGTGC | |
| 7- | TG | | | | CGATGGTCA | | GCCCCAGCAGCTTCAGTCCCTTTCTcGTCGATG | |
| _25FE_ | | | | | GCACAG | | GTCAGCACAGCCTTATGCACGGCCTG | |
| PB16 | | | | | | | | |
| pU6_A1AT_ | CCAGGC | 21188 | CCTTATGC | 21998 | GCCCCAGCA | 22808 | CCAGGCCGTGCATAAGGCTGGTTTTAGAGCTA | 23618 |
| SpCas9- | CGTGCA | | ACGGCCT | | GCTTCAGTC | | GAAATAGCAAGTTAAAATAAGGCTAGTCCGTT | |
| NG_ED1 | TAAGGC | | | | CCTTTCTcGT | | ATCAACTTGAAAAAGTGGCACCGAGTCGGTGC | |
| 7- | TG | | | | CGATGGTCA | | GCCCCAGCAGCTTCAGTCCCTTTCTcGTCGATG | |
| _25FE_ | | | | | GCACAG | | GTCAGCACAGCCTTATGCACGGCCT | |
| PB15 | | | | | | | | |
| pU6_A1AT_ | CCAGGC | 21189 | CCTTATGC | 21999 | GCCCCAGCA | 22809 | CCAGGCCGTGCATAAGGCTGGTTTTAGAGCTA | 23619 |
| SpCas9- | CGTGCA | | ACGGCC | | GCTTCAGTC | | GAAATAGCAAGTTAAAATAAGGCTAGTCCGTT | |
| NG_ED1 | TAAGGC | | | | CCTTTCTcGT | | ATCAACTTGAAAAAGTGGCACCGAGTCGGTGC | |
| 7- | TG | | | | CGATGGTCA | | GCCCCAGCAGCTTCAGTCCCTTTCTcGTCGATG | |
| _25FE_ | | | | | GCACAG | | GTCAGCACAGCCTTATGCACGGCC | |
| PB14 | | | | | | | | |
| pU6_A1AT_ | CCAGGC | 21190 | CCTTATGC | 22000 | GCCCCAGCA | 22810 | CCAGGCCGTGCATAAGGCTGGTTTTAGAGCTA | 23620 |
| SpCas9- | CGTGCA | | ACGGC | | GCTTCAGTC | | GAAATAGCAAGTTAAAATAAGGCTAGTCCGTT | |
| NG_ED1 | TAAGGC | | | | CCTTTCTCGT | | ATCAACTTGAAAAAGTGGCACCGAGTCGGTGC | |
| 7- | TG | | | | CGATGGTCA | | GCCCCAGCAGCTTCAGTCCCTTTCTcGTCGATG | |
| _25FE_ | | | | | GCACAG | | GTCAGCACAGCCTTATGCACGGC | |
| PB13 | | | | | | | | |
| pU6_A1AT_ | CCAGGC | 21191 | CCTTATGC | 22001 | GCCCCAGCA | 22811 | CCAGGCCGTGCATAAGGCTGGTTTTAGAGCTA | 23621 |
| SpCas9- | CGTGCA | | ACGG | | GCTTCAGTC | | GAAATAGCAAGTTAAAATAAGGCTAGTCCGTT | |
| NG_ED1 | TAAGGC | | | | CCTTTCTcGT | | ATCAACTTGAAAAAGTGGCACCGAGTCGGTGC | |
| 7- | TG | | | | CGATGGTCA | | GCCCCAGCAGCTTCAGTCCCTTTCTcGTCGATG | |
| _25FE_ | | | | | GCACAG | | GTCAGCACAGCCTTATGCACGG | |
| PB12 | | | | | | | | |
| pU6_A1AT_ | CCAGGC | 21192 | CCTTATGC | 22002 | GCCCCAGCA | 22812 | CCAGGCCGTGCATAAGGCTGGTTTTAGAGCTA | 23622 |
| SpCas9- | CGTGCA | | ACG | | GCTTCAGTC | | GAAATAGCAAGTTAAAATAAGGCTAGTCCGTT | |
| NG_ED1 | TAAGGC | | | | CCTTTCTcGT | | ATCAACTTGAAAAAGTGGCACCGAGTCGGTGC | |
| 7- | TG | | | | CGATGGTCA | | GCCCCAGCAGCTTCAGTCCCTTTCTcGTCGATG | |
| _25FE_ | | | | | GCACAG | | GTCAGCACAGCCTTATGCACG | |
| PB11 | | | | | | | | |
| pU6_A1AT_ | CCAGGC | 21193 | CCTTATGC | 22003 | GCCCCAGCA | 22813 | CCAGGCCGTGCATAAGGCTGGTTTTAGAGCTA | 23623 |
| SpCas9- | CGTGCA | | AC | | GCTTCAGTC | | GAAATAGCAAGTTAAAATAAGGCTAGTCCGTT | |
| NG_ED1 | TAAGGC | | | | CCTTTCTcGT | | ATCAACTTGAAAAAGTGGCACCGAGTCGGTGC | |
| 7- | TG | | | | CGATGGTCA | | GCCCCAGCAGCTTCAGTCCCTTTCTcGTCGATG | |
| _25FE_ | | | | | GCACAG | | GTCAGCACAGCCTTATGCAC | |
| PB10 | | | | | | | | |
| pU6_A1AT_ | CCAGGC | 21194 | CCTTATGC | | GCCCCAGCA | 22814 | CCAGGCCGTGCATAAGGCTGGTTTTAGAGCTA | 23624 |
| SpCas9- | CGTGCA | | A | | GCTTCAGTC | | GAAATAGCAAGTTAAAATAAGGCTAGTCCGTT | |
| NG_ED1 | TAAGGC | | | | CCTTTCTCGT | | ATCAACTTGAAAAAGTGGCACCGAGTCGGTGC | |
| 7- | TG | | | | CGATGGTCA | | GCCCCAGCAGCTTCAGTCCCTTTCTcGTCGATG | |
| _25FE_ | | | | | GCACAG | | GTCAGCACAGCCTTATGCA | |
| PB9 | | | | | | | | |
| pU6_A1AT_ | CCAGGC | 21195 | CCTTATGC | | GCCCCAGCA | 22815 | CCAGGCCGTGCATAAGGCTGGTTTTAGAGCTA | 23625 |
| SpCas9- | CGTGCA | | | | GCTTCAGTC | | GAAATAGCAAGTTAAAATAAGGCTAGTCCGTT | |
| NG_ED1 | TAAGGC | | | | CCTTTCTcGT | | ATCAACTTGAAAAAGTGGCACCGAGTCGGTGC | |
| 7- | TG | | | | CGATGGTCA | | GCCCCAGCAGCTTCAGTCCCTTTCTcGTCGATG | |
| _25FE_ | | | | | GCACAG | | GTCAGCACAGCCTTATGC | |
| PB8 | | | | | | | | |
| pU6_A1AT_ | CCAGGC | 21196 | CCTTATGC | 22006 | AGCAGCTTC | 22816 | CCAGGCCGTGCATAAGGCTGGTTTTAGAGCTA | 23626 |
| SpCas9- | CGTGCA | | ACGGCCTG | | AGTCCCTTT | | GAAATAGCAAGTTAAAATAAGGCTAGTCCGTT | |
| NG_ED1 | TAAGGC | | G | | CTCGTCGAT | | ATCAACTTGAAAAAGTGGCACCGAGTCGGTGC | |
| 7- | TG | | | | GGTCAGCAC | | AGCAGCTTCAGTCCCTTTCTcGTCGATGGTCAG | |
| _20FE_ | | | | | AG | | CACAGCCTTATGCACGGCCTGG | |
| PB17 | | | | | | | | |
| pU6_A1AT_ | CCAGGC | 21197 | CCTTATGC | 22007 | AGCAGCTTC | 22817 | CCAGGCCGTGCATAAGGCTGGTTTTAGAGCTA | 23627 |
| SpCas9- | CGTGCA | | ACGGCCTG | | AGTCCCTTT | | GAAATAGCAAGTTAAAATAAGGCTAGTCCGTT | |
| NG_ED1 | TAAGGC | | | | CTCGTCGAT | | ATCAACTTGAAAAAGTGGCACCGAGTCGGTGC | |
| 7- | TG | | | | GGTCAGCAC | | AGCAGCTTCAGTCCCTTTCTcGTCGATGGTCAG | |
| _20FE_ | | | | | AG | | CACAGCCTTATGCACGGCCTG | |
| PB16 | | | | | | | | |
| pU6_A1AT_ | CCAGGC | 21198 | CCTTATGC | 22008 | AGCAGCTTC | 22818 | CCAGGCCGTGCATAAGGCTGGTTTTAGAGCTA | 23628 |
| SpCas9- | CGTGCA | | ACGGCCT | | AGTCCCTTT | | GAAATAGCAAGTTAAAATAAGGCTAGTCCGTT | |
| NG_ED1 | TAAGGC | | | | CTCGTCGAT | | ATCAACTTGAAAAAGTGGCACCGAGTCGGTGC | |
| 7- | TG | | | | GGTCAGCAC | | AGCAGCTTCAGTCCCTTTCTcGTCGATGGTCAG | |
| _20FE_ | | | | | AG | | CACAGCCTTATGCACGGCCT | |
| PB15 | | | | | | | | |
| pU6_A1AT_ | CCAGGC | 21199 | CCTTATGC | 22009 | AGCAGCTTC | 22819 | CCAGGCCGTGCATAAGGCTGGTTTTAGAGCTA | 23629 |
| SpCas9- | CGTGCA | | ACGGCC | | AGTCCCTTT | | GAAATAGCAAGTTAAAATAAGGCTAGTCCGTT | |
| NG_ED1 | TAAGGC | | | | CTcGTCGAT | | ATCAACTTGAAAAAGTGGCACCGAGTCGGTGC | |
| 7- | TG | | | | GGTCAGCAC | | AGCAGCTTCAGTCCCTTTCTcGTCGATGGTCAG | |
| _20FE_ | | | | | AG | | CACAGCCTTATGCACGGCC | |
| PB14 | | | | | | | | |
| pU6_A1AT_ | CCAGGC | 21200 | CCTTATGC | 22010 | AGCAGCTTC | 22820 | CCAGGCCGTGCATAAGGCTGGTTTTAGAGCTA | 23630 |
| SpCas9- | CGTGCA | | ACGGC | | AGTCCCTTT | | GAAATAGCAAGTTAAAATAAGGCTAGTCCGTT | |
| NG_ED1 | TAAGGC | | | | CTCGTCGAT | | ATCAACTTGAAAAAGTGGCACCGAGTCGGTGC | |
| 7- | TG | | | | GGTCAGCAC | | AGCAGCTTCAGTCCCTTTCTcGTCGATGGTCAG | |
| _20FE_ | | | | | AG | | CACAGCCTTATGCACGGC | |
| PB13 | | | | | | | | |
| pU6_A1AT_ | CCAGGC | 21201 | CCTTATGC | 22011 | AGCAGCTTC | 22821 | CCAGGCCGTGCATAAGGCTGGTTTTAGAGCTA | 23631 |
| SpCas9- | CGTGCA | | ACGG | | AGTCCCTTT | | GAAATAGCAAGTTAAAATAAGGCTAGTCCGTT | |
| NG_ED1 | TAAGGC | | | | CTCGTCGAT | | ATCAACTTGAAAAAGTGGCACCGAGTCGGTGC | |
| 7- | TG | | | | GGTCAGCAC | | AGCAGCTTCAGTCCCTTTCTcGTCGATGGTCAG | |
| _20FE_ | | | | | AG | | CACAGCCTTATGCACGG | |
| PB12 | | | | | | | | |
| pU6_A1AT_ | CCAGGC | 21202 | CCTTATGC | 22012 | AGCAGCTTC | 22822 | CCAGGCCGTGCATAAGGCTGGTTTTAGAGCTA | 23632 |
| SpCas9- | CGTGCA | | ACG | | AGTCCCTTT | | GAAATAGCAAGTTAAAATAAGGCTAGTCCGTT | |
| NG_ED1 | TAAGGC | | | | CTcGTCGAT | | ATCAACTTGAAAAAGTGGCACCGAGTCGGTGC | |
| 7- | TG | | | | GGTCAGCAC | | AGCAGCTTCAGTCCCTTTCTcGTCGATGGTCAG | |
| _20FE_ | | | | | AG | | CACAGCCTTATGCACG | |
| PB11 | | | | | | | | |
| pU6_A1AT_ | CCAGGC | 21203 | CCTTATGC | 22013 | AGCAGCTTC | 22823 | CCAGGCCGTGCATAAGGCTGGTTTTAGAGCTA | 23633 |
| SpCas9- | CGTGCA | | AC | | AGTCCCTTT | | GAAATAGCAAGTTAAAATAAGGCTAGTCCGTT | |
| NG_ED1 | TAAGGC | | | | CTcGTCGAT | | ATCAACTTGAAAAAGTGGCACCGAGTCGGTGC | |
| 7- | TG | | | | GGTCAGCAC | | AGCAGCTTCAGTCCCTTTCTcGTCGATGGTCAG | |
| _20FE_ | | | | | AG | | CACAGCCTTATGCAC | |
| PB10 | | | | | | | | |
| pU6_A1AT_ | CCAGGC | 21204 | CCTTATGC | | AGCAGCTTC | 22824 | CCAGGCCGTGCATAAGGCTGGTTTTAGAGCTA | 23634 |
| SpCas9- | CGTGCA | | A | | AGTCCCTTT | | GAAATAGCAAGTTAAAATAAGGCTAGTCCGTT | |
| NG_ED1 | TAAGGC | | | | CTcGTCGAT | | ATCAACTTGAAAAAGTGGCACCGAGTCGGTGC | |
| 7- | TG | | | | GGTCAGCAC | | AGCAGCTTCAGTCCCTTTCTcGTCGATGGTCAG | |
| _20FE_ | | | | | AG | | CACAGCCTTATGCA | |
| PB9 | | | | | | | | |
| pU6_A1AT_ | CCAGGC | 21205 | CCTTATGC | | AGCAGCTTC | 22825 | CCAGGCCGTGCATAAGGCTGGTTTTAGAGCTA | 23635 |
| SpCas9- | CGTGCA | | | | AGTCCCTTT | | GAAATAGCAAGTTAAAATAAGGCTAGTCCGTT | |
| NG_ED1 | TAAGGC | | | | CTcGTCGAT | | ATCAACTTGAAAAAGTGGCACCGAGTCGGTGC | |
| 7- | TG | | | | GGTCAGCAC | | AGCAGCTTCAGTCCCTTTCTcGTCGATGGTCAG | |
| _20FE_ | | | | | AG | | CACAGCCTTATGC | |
| PB8 | | | | | | | | |
| pU6_A1AT_ | CCAGGC | 21206 | CCTTATGC | 22016 | TTCAGTCCC | 22826 | CCAGGCCGTGCATAAGGCTGGTTTTAGAGCTA | 23636 |
| SpCas9- | CGTGCA | | ACGGCCTG | | TTTCTcGTC | | GAAATAGCAAGTTAAAATAAGGCTAGTCCGTT | |
| NG_ED1 | TAAGGC | | G | | GATGGTCA | | ATCAACTTGAAAAAGTGGCACCGAGTCGGTGC | |
| 7- | TG | | | | GCACAG | | TTCAGTCCCTTTCTcGTCGATGGTCAGCACAGC | |
| _14FE_ | | | | | | | CTTATGCACGGCCTGG | |
| PB17 | | | | | | | | |
| pU6_A1AT_ | CCAGGC | 21207 | CCTTATGC | 22017 | TTCAGTCCC | 22827 | CCAGGCCGTGCATAAGGCTGGTTTTAGAGCTA | 23637 |
| SpCas9- | CGTGCA | | ACGGCCTG | | TTTCTcGTC | | GAAATAGCAAGTTAAAATAAGGCTAGTCCGTT | |
| NG_ED1 | TAAGGC | | | | GATGGTCA | | ATCAACTTGAAAAAGTGGCACCGAGTCGGTGC | |
| 7- | TG | | | | GCACAG | | TTCAGTCCCTTTCTcGTCGATGGTCAGCACAGC | |
| _14FE_ | | | | | | | CTTATGCACGGCCTG | |
| PB16 | | | | | | | | |
| pU6_A1AT_ | CCAGGC | 21208 | CCTTATGC | 22018 | TTCAGTCCC | 22828 | CCAGGCCGTGCATAAGGCTGGTTTTAGAGCTA | 23638 |
| SpCas9- | CGTGCA | | ACGGCCT | | TTTCTCGTC | | GAAATAGCAAGTTAAAATAAGGCTAGTCCGTT | |
| NG_ED1 | TAAGGC | | | | GATGGTCA | | ATCAACTTGAAAAAGTGGCACCGAGTCGGTGC | |
| 7- | TG | | | | GCACAG | | TTCAGTCCCTTTCTcGTCGATGGTCAGCACAGC | |
| _14FE_ | | | | | | | CTTATGCACGGCCT | |
| PB15 | | | | | | | | |
| pU6_A1AT_ | CCAGGC | 21209 | CCTTATGC | 22019 | TTCAGTCCC | 22829 | CCAGGCCGTGCATAAGGCTGGTTTTAGAGCTA | 23639 |
| SpCas9- | CGTGCA | | ACGGCC | | TTTCTCGTC | | GAAATAGCAAGTTAAAATAAGGCTAGTCCGTT | |
| NG_ED1 | TAAGGC | | | | GATGGTCA | | ATCAACTTGAAAAAGTGGCACCGAGTCGGTGC | |
| 7- | TG | | | | GCACAG | | TTCAGTCCCTTTCTcGTCGATGGTCAGCACAGC | |
| _14FE_ | | | | | | | CTTATGCACGGCC | |
| PB14 | | | | | | | | |
| pU6_A1AT_ | CCAGGC | 21210 | CCTTATGC | 22020 | TTCAGTCCC | 22830 | CCAGGCCGTGCATAAGGCTGGTTTTAGAGCTA | 23640 |
| SpCas9- | CGTGCA | | ACGGC | | TTTCTcGTC | | GAAATAGCAAGTTAAAATAAGGCTAGTCCGTT | |
| NG_ED1 | TAAGGC | | | | GATGGTCA | | ATCAACTTGAAAAAGTGGCACCGAGTCGGTGC | |
| 7- | TG | | | | GCACAG | | TTCAGTCCCTTTCTcGTCGATGGTCAGCACAGC | |
| _14FE_ | | | | | | | CTTATGCACGGC | |
| PB13 | | | | | | | | |
| pU6_A1AT_ | CCAGGC | 21211 | CCTTATGC | 22021 | TTCAGTCCC | 22831 | CCAGGCCGTGCATAAGGCTGGTTTTAGAGCTA | 23641 |
| SpCas9- | CGTGCA | | ACGG | | TTTCTCGTC | | GAAATAGCAAGTTAAAATAAGGCTAGTCCGTT | |
| NG_ED1 | TAAGGC | | | | GATGGTCA | | ATCAACTTGAAAAAGTGGCACCGAGTCGGTGC | |
| 7- | TG | | | | GCACAG | | TTCAGTCCCTTTCTcGTCGATGGTCAGCACAGC | |
| _14FE_ | | | | | | | CTTATGCACGG | |
| PB12 | | | | | | | | |
| pU6_A1AT_ | CCAGGC | 21212 | CCTTATGC | 22022 | TTCAGTCCC | 22832 | CCAGGCCGTGCATAAGGCTGGTTTTAGAGCTA | 23642 |
| SpCas9- | CGTGCA | | ACG | | TTTCTCGTC | | GAAATAGCAAGTTAAAATAAGGCTAGTCCGTT | |
| NG_ED1 | TAAGGC | | | | GATGGTCA | | ATCAACTTGAAAAAGTGGCACCGAGTCGGTGC | |
| 7- | TG | | | | GCACAG | | TTCAGTCCCTTTCTcGTCGATGGTCAGCACAGC | |
| _14FE_ | | | | | | | CTTATGCACG | |
| PB11 | | | | | | | | |
| pU6_A1AT_ | CCAGGC | 21213 | CCTTATGC | 22023 | TTCAGTCCC | 22833 | CCAGGCCGTGCATAAGGCTGGTTTTAGAGCTA | 23643 |
| SpCas9- | CGTGCA | | AC | | TTTCTcGTC | | GAAATAGCAAGTTAAAATAAGGCTAGTCCGTT | |
| NG_ED1 | TAAGGC | | | | GATGGTCA | | ATCAACTTGAAAAAGTGGCACCGAGTCGGTGC | |
| 7- | TG | | | | GCACAG | | TTCAGTCCCTTTCTcGTCGATGGTCAGCACAGC | |
| _14FE_ | | | | | | | CTTATGCAC | |
| PB10 | | | | | | | | |
| pU6_A1AT_ | CCAGGC | 21214 | CCTTATGC | | TTCAGTCCC | 22834 | CCAGGCCGTGCATAAGGCTGGTTTTAGAGCTA | 23644 |
| SpCas9- | CGTGCA | | A | | TTTCTcGTC | | GAAATAGCAAGTTAAAATAAGGCTAGTCCGTT | |
| NG_ED1 | TAAGGC | | | | GATGGTCA | | ATCAACTTGAAAAAGTGGCACCGAGTCGGTGC | |
| 7- | TG | | | | GCACAG | | TTCAGTCCCTTTCTcGTCGATGGTCAGCACAGC | |
| _14FE_ | | | | | | | CTTATGCA | |
| PB9 | | | | | | | | |
| pU6_A1AT_ | CCAGGC | 21215 | CCTTATGC | | TTCAGTCCC | 22835 | CCAGGCCGTGCATAAGGCTGGTTTTAGAGCTA | 23645 |
| SpCas9- | CGTGCA | | | | TTTCTcGTC | | GAAATAGCAAGTTAAAATAAGGCTAGTCCGTT | |
| NG_ED1 | TAAGGC | | | | GATGGTCA | | ATCAACTTGAAAAAGTGGCACCGAGTCGGTGC | |
| 7- | TG | | | | GCACAG | | TTCAGTCCCTTTCTcGTCGATGGTCAGCACAGC | |
| _14FE_ | | | | | | | CTTATGC | |
| PB8 | | | | | | | | |
| pU6_A1AT_ | CCAGGC | 21216 | CCTTATGC | 22026 | AGTCCCTTT | 22836 | CCAGGCCGTGCATAAGGCTGGTTTTAGAGCTA | 23646 |
| SpCas9- | CGTGCA | | ACGGCCTG | | CTcGTCGAT | | GAAATAGCAAGTTAAAATAAGGCTAGTCCGTT | |
| NG_ED1 | TAAGGC | | G | | GGTCAGCAC | | ATCAACTTGAAAAAGTGGCACCGAGTCGGTGC | |
| 7- | TG | | | | AG | | AGTCCCTTTCTcGTCGATGGTCAGCACAGCCTT | |
| _11FE_ | | | | | | | ATGCACGGCCTGG | |
| PB17 | | | | | | | | |
| pU6_A1AT_ | CCAGGC | 21217 | CCTTATGC | 22027 | AGTCCCTTT | 22837 | CCAGGCCGTGCATAAGGCTGGTTTTAGAGCTA | 23647 |
| SpCas9- | CGTGCA | | ACGGCCTG | | CTcGTCGAT | | GAAATAGCAAGTTAAAATAAGGCTAGTCCGTT | |
| NG_ED1 | TAAGGC | | | | GGTCAGCAC | | ATCAACTTGAAAAAGTGGCACCGAGTCGGTGC | |
| 7- | TG | | | | AG | | AGTCCCTTTCTcGTCGATGGTCAGCACAGCCTT | |
| _11FE_ | | | | | | | ATGCACGGCCTG | |
| PB16 | | | | | | | | |
| pU6_A1AT_ | CCAGGC | 21218 | CCTTATGC | 22028 | AGTCCCTTT | 22838 | CCAGGCCGTGCATAAGGCTGGTTTTAGAGCTA | 23648 |
| SpCas9- | CGTGCA | | ACGGCCT | | CTCGTCGAT | | GAAATAGCAAGTTAAAATAAGGCTAGTCCGTT | |
| NG_ED1 | TAAGGC | | | | GGTCAGCAC | | ATCAACTTGAAAAAGTGGCACCGAGTCGGTGC | |
| 7- | TG | | | | AG | | AGTCCCTTTCTcGTCGATGGTCAGCACAGCCTT | |
| _11FE_ | | | | | | | ATGCACGGCCT | |
| PB15 | | | | | | | | |
| pU6_A1AT_ | CCAGGC | 21219 | CCTTATGC | 22029 | AGTCCCTTT | 22839 | CCAGGCCGTGCATAAGGCTGGTTTTAGAGCTA | 23649 |
| SpCas9- | CGTGCA | | ACGGCC | | CTCGTCGAT | | GAAATAGCAAGTTAAAATAAGGCTAGTCCGTT | |
| NG_ED1 | TAAGGC | | | | GGTCAGCAC | | ATCAACTTGAAAAAGTGGCACCGAGTCGGTGC | |
| 7- | TG | | | | AG | | AGTCCCTTTCTcGTCGATGGTCAGCACAGCCTT | |
| _11FE_ | | | | | | | ATGCACGGCC | |
| PB14 | | | | | | | | |
| pU6_A1AT_ | CCAGGC | 21220 | CCTTATGC | 22030 | AGTCCCTTT | 22840 | CCAGGCCGTGCATAAGGCTGGTTTTAGAGCTA | 23650 |
| SpCas9- | CGTGCA | | ACGGC | | CTCGTCGAT | | GAAATAGCAAGTTAAAATAAGGCTAGTCCGTT | |
| NG_ED1 | TAAGGC | | | | GGTCAGCAC | | ATCAACTTGAAAAAGTGGCACCGAGTCGGTGC | |
| 7- | TG | | | | AG | | AGTCCCTTTCTcGTCGATGGTCAGCACAGCCTT | |
| _11FE_ | | | | | | | ATGCACGGC | |
| PB13 | | | | | | | | |
| pU6_A1AT_ | CCAGGC | 21221 | CCTTATGC | 22031 | AGTCCCTTT | 22841 | CCAGGCCGTGCATAAGGCTGGTTTTAGAGCTA | 23651 |
| SpCas9- | CGTGCA | | ACGG | | CTCGTCGAT | | GAAATAGCAAGTTAAAATAAGGCTAGTCCGTT | |
| NG_ED1 | TAAGGC | | | | GGTCAGCAC | | ATCAACTTGAAAAAGTGGCACCGAGTCGGTGC | |
| 7- | TG | | | | AG | | AGTCCCTTTCTcGTCGATGGTCAGCACAGCCTT | |
| _11FE_ | | | | | | | ATGCACGG | |
| PB12 | | | | | | | | |
| pU6_A1AT_ | CCAGGC | 21222 | CCTTATGC | 22032 | AGTCCCTTT | 22842 | CCAGGCCGTGCATAAGGCTGGTTTTAGAGCTA | 23652 |
| SpCas9- | CGTGCA | | ACG | | CTCGTCGAT | | GAAATAGCAAGTTAAAATAAGGCTAGTCCGTT | |
| NG_ED1 | TAAGGC | | | | GGTCAGCAC | | ATCAACTTGAAAAAGTGGCACCGAGTCGGTGC | |
| 7- | TG | | | | AG | | AGTCCCTTTCTcGTCGATGGTCAGCACAGCCTT | |
| _11FE_ | | | | | | | ATGCACG | |
| PB11 | | | | | | | | |
| pU6_A1AT_ | CCAGGC | 21223 | CCTTATGC | 22033 | AGTCCCTTT | 22843 | CCAGGCCGTGCATAAGGCTGGTTTTAGAGCTA | 23653 |
| SpCas9- | CGTGCA | | AC | | CTcGTCGAT | | GAAATAGCAAGTTAAAATAAGGCTAGTCCGTT | |
| NG_ED1 | TAAGGC | | | | GGTCAGCAC | | ATCAACTTGAAAAAGTGGCACCGAGTCGGTGC | |
| 7- | TG | | | | AG | | AGTCCCTTTCTcGTCGATGGTCAGCACAGCCTT | |
| _11FE_ | | | | | | | ATGCAC | |
| PB10 | | | | | | | | |
| pU6_A1AT_ | CCAGGC | 21224 | CCTTATGC | | AGTCCCTTT | 22844 | CCAGGCCGTGCATAAGGCTGGTTTTAGAGCTA | 23654 |
| SpCas9- | CGTGCA | | A | | CTCGTCGAT | | GAAATAGCAAGTTAAAATAAGGCTAGTCCGTT | |
| NG_ED1 | TAAGGC | | | | GGTCAGCAC | | ATCAACTTGAAAAAGTGGCACCGAGTCGGTGC | |
| 7- | TG | | | | AG | | AGTCCCTTTCTcGTCGATGGTCAGCACAGCCTT | |
| _11FE_ | | | | | | | ATGCA | |
| PB9 | | | | | | | | |
| pU6_A1AT_ | CCAGGC | 21225 | CCTTATGC | | AGTCCCTTT | 22845 | CCAGGCCGTGCATAAGGCTGGTTTTAGAGCTA | 23655 |
| SpCas9- | CGTGCA | | | | CTcGTCGAT | | GAAATAGCAAGTTAAAATAAGGCTAGTCCGTT | |
| NG_ED1 | TAAGGC | | | | GGTCAGCAC | | ATCAACTTGAAAAAGTGGCACCGAGTCGGTGC | |
| 7- | TG | | | | AG | | AGTCCCTTTCTcGTCGATGGTCAGCACAGCCTT | |
| _11FE_ | | | | | | | ATGC | |
| PB8 | | | | | | | | |
| pU6_A1AT_ | CCAGGC | 21226 | CCTTATGC | 22036 | TCCCTTTCTc | 22846 | CCAGGCCGTGCATAAGGCTGGTTTTAGAGCTA | 23656 |
| SpCas9- | CGTGCA | | ACGGCCTG | | GTCGATGGT | | GAAATAGCAAGTTAAAATAAGGCTAGTCCGTT | |
| NG_ED1 | TAAGGC | | G | | CAGCACAG | | ATCAACTTGAAAAAGTGGCACCGAGTCGGTGC | |
| 7- | TG | | | | | | TCCCTTTCTcGTCGATGGTCAGCACAGCCTTAT | |
| _9FE_ | | | | | | | GCACGGCCTGG | |
| PB17 | | | | | | | | |
| pU6_A1AT_ | CCAGGC | 21227 | CCTTATGC | 22037 | TCCCTTTCTc | 22847 | CCAGGCCGTGCATAAGGCTGGTTTTAGAGCTA | 23657 |
| SpCas9- | CGTGCA | | ACGGCCTG | | GTCGATGGT | | GAAATAGCAAGTTAAAATAAGGCTAGTCCGTT | |
| NG_ED1 | TAAGGC | | | | CAGCACAG | | ATCAACTTGAAAAAGTGGCACCGAGTCGGTGC | |
| 7- | TG | | | | | | TCCCTTTCTcGTCGATGGTCAGCACAGCCTTAT | |
| _9FE_ | | | | | | | GCACGGCCTG | |
| PB16 | | | | | | | | |
| pU6_A1AT_ | CCAGGC | 21228 | CCTTATGC | 22038 | TCCCTTTCTc | 22848 | CCAGGCCGTGCATAAGGCTGGTTTTAGAGCTA | 23658 |
| SpCas9- | CGTGCA | | ACGGCCT | | GTCGATGGT | | GAAATAGCAAGTTAAAATAAGGCTAGTCCGTT | |
| NG_ED1 | TAAGGC | | | | CAGCACAG | | ATCAACTTGAAAAAGTGGCACCGAGTCGGTGC | |
| 7- | TG | | | | | | TCCCTTTCTcGTCGATGGTCAGCACAGCCTTAT | |
| _9FE_ | | | | | | | GCACGGCCT | |
| PB15 | | | | | | | | |
| pU6_A1AT_ | CCAGGC | 21229 | CCTTATGC | 22039 | TCCCTTTCTc | 22849 | CCAGGCCGTGCATAAGGCTGGTTTTAGAGCTA | 23659 |
| SpCas9- | CGTGCA | | ACGGCC | | GTCGATGGT | | GAAATAGCAAGTTAAAATAAGGCTAGTCCGTT | |
| NG_ED1 | TAAGGC | | | | CAGCACAG | | ATCAACTTGAAAAAGTGGCACCGAGTCGGTGC | |
| 7- | TG | | | | | | TCCCTTTCTcGTCGATGGTCAGCACAGCCTTAT | |
| _9FE_ | | | | | | | GCACGGCC | |
| PB14 | | | | | | | | |
| pU6_A1AT_ | CCAGGC | 21230 | CCTTATGC | 22040 | TCCCTTTCTc | 22850 | CCAGGCCGTGCATAAGGCTGGTTTTAGAGCTA | 23660 |
| SpCas9- | CGTGCA | | ACGGC | | GTCGATGGT | | GAAATAGCAAGTTAAAATAAGGCTAGTCCGTT | |
| NG_ED1 | TAAGGC | | | | CAGCACAG | | ATCAACTTGAAAAAGTGGCACCGAGTCGGTGC | |
| 7- | TG | | | | | | TCCCTTTCTcGTCGATGGTCAGCACAGCCTTAT | |
| _9FE_ | | | | | | | GCACGGC | |
| PB13 | | | | | | | | |
| pU6_A1AT_ | CCAGGC | 21231 | CCTTATGC | 22041 | TCCCTTTCTc | 22851 | CCAGGCCGTGCATAAGGCTGGTTTTAGAGCTA | 23661 |
| SpCas9- | CGTGCA | | ACGG | | GTCGATGGT | | GAAATAGCAAGTTAAAATAAGGCTAGTCCGTT | |
| NG_ED1 | TAAGGC | | | | CAGCACAG | | ATCAACTTGAAAAAGTGGCACCGAGTCGGTGC | |
| 7- | TG | | | | | | TCCCTTTCTcGTCGATGGTCAGCACAGCCTTAT | |
| _9FE_ | | | | | | | GCACGG | |
| PB12 | | | | | | | | |
| pU6_A1AT_ | CCAGGC | 21232 | CCTTATGC | 22042 | TCCCTTTCTc | 22852 | CCAGGCCGTGCATAAGGCTGGTTTTAGAGCTA | 23662 |
| SpCas9- | CGTGCA | | ACG | | GTCGATGGT | | GAAATAGCAAGTTAAAATAAGGCTAGTCCGTT | |
| NG_ED1 | TAAGGC | | | | CAGCACAG | | ATCAACTTGAAAAAGTGGCACCGAGTCGGTGC | |
| 7- | TG | | | | | | TCCCTTTCTcGTCGATGGTCAGCACAGCCTTAT | |
| _9FE_ | | | | | | | GCACG | |
| PB11 | | | | | | | | |
| pU6_A1AT_ | CCAGGC | 21233 | CCTTATGC | 22043 | TCCCTTTCTc | 22853 | CCAGGCCGTGCATAAGGCTGGTTTTAGAGCTA | 23663 |
| SpCas9- | CGTGCA | | AC | | GTCGATGGT | | GAAATAGCAAGTTAAAATAAGGCTAGTCCGTT | |
| NG_ED1 | TAAGGC | | | | CAGCACAG | | ATCAACTTGAAAAAGTGGCACCGAGTCGGTGC | |
| 7- | TG | | | | | | TCCCTTTCTcGTCGATGGTCAGCACAGCCTTAT | |
| _9FE_ | | | | | | | GCAC | |
| PB10 | | | | | | | | |
| pU6_A1AT_ | CCAGGC | 21234 | CCTTATGC | | TCCCTTTCTc | 22854 | CCAGGCCGTGCATAAGGCTGGTTTTAGAGCTA | 23664 |
| SpCas9- | CGTGCA | | A | | GTCGATGGT | | GAAATAGCAAGTTAAAATAAGGCTAGTCCGTT | |
| NG_ED1 | TAAGGC | | | | CAGCACAG | | ATCAACTTGAAAAAGTGGCACCGAGTCGGTGC | |
| 7- | TG | | | | | | TCCCTTTCTcGTCGATGGTCAGCACAGCCTTAT | |
| _9FE_ | | | | | | | GCA | |
| PB9 | | | | | | | | |
| pU6_A1AT_ | CCAGGC | 21235 | CCTTATGC | | TCCCTTTCTc | 22855 | CCAGGCCGTGCATAAGGCTGGTTTTAGAGCTA | 23665 |
| SpCas9- | CGTGCA | | | | GTCGATGGT | | GAAATAGCAAGTTAAAATAAGGCTAGTCCGTT | |
| NG_ED1 | TAAGGC | | | | CAGCACAG | | ATCAACTTGAAAAAGTGGCACCGAGTCGGTGC | |
| 7- | TG | | | | | | TCCCTTTCTcGTCGATGGTCAGCACAGCCTTAT | |
| _9FE_ | | | | | | | GC | |
| PB8 | | | | | | | | |
| pU6_A1AT_ | CCAGGC | 21236 | CCTTATGC | 22046 | CCTTTCTcGT | 22856 | CCAGGCCGTGCATAAGGCTGGTTTTAGAGCTA | 23666 |
| SpCas9- | CGTGCA | | ACGGCCTG | | CGATGGTCA | | GAAATAGCAAGTTAAAATAAGGCTAGTCCGTT | |
| NG_ED1 | TAAGGC | | G | | GCACAG | | ATCAACTTGAAAAAGTGGCACCGAGTCGGTGC | |
| 7- | TG | | | | | | CCTTTCTcGTCGATGGTCAGCACAGCCTTATGC | |
| _7FE_ | | | | | | | ACGGCCTGG | |
| PB17 | | | | | | | | |
| pU6_A1AT_ | CCAGGC | 21237 | CCTTATGC | 22047 | CCTTTCTcGT | 22857 | CCAGGCCGTGCATAAGGCTGGTTTTAGAGCTA | 23667 |
| SpCas9- | CGTGCA | | ACGGCCTG | | CGATGGTCA | | GAAATAGCAAGTTAAAATAAGGCTAGTCCGTT | |
| NG_ED1 | TAAGGC | | | | GCACAG | | ATCAACTTGAAAAAGTGGCACCGAGTCGGTGC | |
| 7- | TG | | | | | | CCTTTCTcGTCGATGGTCAGCACAGCCTTATGC | |
| _7FE_ | | | | | | | ACGGCCTG | |
| PB16 | | | | | | | | |
| pU6_A1AT_ | CCAGGC | 21238 | CCTTATGC | 22048 | CCTTTCTcGT | 22858 | CCAGGCCGTGCATAAGGCTGGTTTTAGAGCTA | 23668 |
| SpCas9- | CGTGCA | | ACGGCCT | | CGATGGTCA | | GAAATAGCAAGTTAAAATAAGGCTAGTCCGTT | |
| NG_ED1 | TAAGGC | | | | GCACAG | | ATCAACTTGAAAAAGTGGCACCGAGTCGGTGC | |
| 7- | TG | | | | | | CCTTTCTcGTCGATGGTCAGCACAGCCTTATGC | |
| _7FE_ | | | | | | | ACGGCCT | |
| PB15 | | | | | | | | |
| pU6_A1AT_ | CCAGGC | 21239 | CCTTATGC | 22049 | CCTTTCTcGT | 22859 | CCAGGCCGTGCATAAGGCTGGTTTTAGAGCTA | 23669 |
| SpCas9- | CGTGCA | | ACGGCC | | CGATGGTCA | | GAAATAGCAAGTTAAAATAAGGCTAGTCCGTT | |
| NG_ED1 | TAAGGC | | | | GCACAG | | ATCAACTTGAAAAAGTGGCACCGAGTCGGTGC | |
| 7- | TG | | | | | | CCTTTCTcGTCGATGGTCAGCACAGCCTTATGC | |
| _7FE_ | | | | | | | ACGGCC | |
| PB14 | | | | | | | | |
| pU6_A1AT_ | CCAGGC | 21240 | CCTTATGC | 22050 | CCTTTCTcGT | 22860 | CCAGGCCGTGCATAAGGCTGGTTTTAGAGCTA | 23670 |
| SpCas9- | CGTGCA | | ACGGC | | CGATGGTCA | | GAAATAGCAAGTTAAAATAAGGCTAGTCCGTT | |
| NG_ED1 | TAAGGC | | | | GCACAG | | ATCAACTTGAAAAAGTGGCACCGAGTCGGTGC | |
| 7- | TG | | | | | | CCTTTCTcGTCGATGGTCAGCACAGCCTTATGC | |
| _7FE_ | | | | | | | ACGGC | |
| PB13 | | | | | | | | |
| pU6_A1AT_ | CCAGGC | 21241 | CCTTATGC | 22051 | CCTTTCTcGT | 22861 | CCAGGCCGTGCATAAGGCTGGTTTTAGAGCTA | 23671 |
| SpCas9- | CGTGCA | | ACGG | | CGATGGTCA | | GAAATAGCAAGTTAAAATAAGGCTAGTCCGTT | |
| NG_ED1 | TAAGGC | | | | GCACAG | | ATCAACTTGAAAAAGTGGCACCGAGTCGGTGC | |
| 7- | TG | | | | | | CCTTTCTcGTCGATGGTCAGCACAGCCTTATGC | |
| _7FE_ | | | | | | | ACGG | |
| PB12 | | | | | | | | |
| pU6_A1AT_ | CCAGGC | 21242 | CCTTATGC | 22052 | CCTTTCTCGT | 22862 | CCAGGCCGTGCATAAGGCTGGTTTTAGAGCTA | 23672 |
| SpCas9- | CGTGCA | | ACG | | CGATGGTCA | | GAAATAGCAAGTTAAAATAAGGCTAGTCCGTT | |
| NG_ED1 | TAAGGC | | | | GCACAG | | ATCAACTTGAAAAAGTGGCACCGAGTCGGTGC | |
| 7- | TG | | | | | | CCTTTCTcGTCGATGGTCAGCACAGCCTTATGC | |
| _7FE_ | | | | | | | ACG | |
| PB11 | | | | | | | | |
| pU6_A1AT_ | CCAGGC | 21243 | CCTTATGC | 22053 | CCTTTCTcGT | 22863 | CCAGGCCGTGCATAAGGCTGGTTTTAGAGCTA | 23673 |
| SpCas9- | CGTGCA | | AC | | CGATGGTCA | | GAAATAGCAAGTTAAAATAAGGCTAGTCCGTT | |
| NG_ED1 | TAAGGC | | | | GCACAG | | ATCAACTTGAAAAAGTGGCACCGAGTCGGTGC | |
| 7- | TG | | | | | | CCTTTCTcGTCGATGGTCAGCACAGCCTTATGC | |
| _7FE_ | | | | | | | AC | |
| PB10 | | | | | | | | |
| pU6_A1AT_ | CCAGGC | 21244 | CCTTATGC | | CCTTTCTcGT | 22864 | CCAGGCCGTGCATAAGGCTGGTTTTAGAGCTA | 23674 |
| SpCas9- | CGTGCA | | A | | CGATGGTCA | | GAAATAGCAAGTTAAAATAAGGCTAGTCCGTT | |
| NG_ED1 | TAAGGC | | | | GCACAG | | ATCAACTTGAAAAAGTGGCACCGAGTCGGTGC | |
| 7- | TG | | | | | | CCTTTCTcGTCGATGGTCAGCACAGCCTTATGC | |
| _7FE_ | | | | | | | A | |
| PB9 | | | | | | | | |
| pU6_A1AT_ | CCAGGC | 21245 | CCTTATGC | | CCTTTCTCGT | 22865 | CCAGGCCGTGCATAAGGCTGGTTTTAGAGCTA | 23675 |
| SpCas9- | CGTGCA | | | | CGATGGTCA | | GAAATAGCAAGTTAAAATAAGGCTAGTCCGTT | |
| NG_ED1 | TAAGGC | | | | GCACAG | | ATCAACTTGAAAAAGTGGCACCGAGTCGGTGC | |
| 7- | TG | | | | | | CCTTTCTcGTCGATGGTCAGCACAGCCTTATGC | |
| _7FE_ | | | | | | | | |
| PB8 | | | | | | | | |
| pU6_A1AT_ | CCAGGC | 21246 | CCTTATGC | 22056 | TTTCTCGTC | 22866 | CCAGGCCGTGCATAAGGCTGGTTTTAGAGCTA | 23676 |
| SpCas9- | CGTGCA | | ACGGCCTG | | GATGGTCA | | GAAATAGCAAGTTAAAATAAGGCTAGTCCGTT | |
| NG_ED1 | TAAGGC | | G | | GCACAG | | ATCAACTTGAAAAAGTGGCACCGAGTCGGTGC | |
| 7- | TG | | | | | | TTTCTCGTCGATGGTCAGCACAGCCTTATGCAC | |
| _5FE_ | | | | | | | GGCCTGG | |
| PB17 | | | | | | | | |
| pU6_A1AT_ | CCAGGC | 21247 | CCTTATGC | 22057 | TTTCTcGTC | 22867 | CCAGGCCGTGCATAAGGCTGGTTTTAGAGCTA | 23677 |
| SpCas9- | CGTGCA | | ACGGCCTG | | GATGGTCA | | GAAATAGCAAGTTAAAATAAGGCTAGTCCGTT | |
| NG_ED1 | TAAGGC | | | | GCACAG | | ATCAACTTGAAAAAGTGGCACCGAGTCGGTGC | |
| 7- | TG | | | | | | TTTCTcGTCGATGGTCAGCACAGCCTTATGCAC | |
| _5FE_ | | | | | | | GGCCTG | |
| PB16 | | | | | | | | |
| pU6_A1AT_ | CCAGGC | 21248 | CCTTATGC | 22058 | TTTCTCGTC | 22868 | CCAGGCCGTGCATAAGGCTGGTTTTAGAGCTA | 23678 |
| SpCas9- | CGTGCA | | ACGGCCT | | GATGGTCA | | GAAATAGCAAGTTAAAATAAGGCTAGTCCGTT | |
| NG_ED1 | TAAGGC | | | | GCACAG | | ATCAACTTGAAAAAGTGGCACCGAGTCGGTGC | |
| 7- | TG | | | | | | TTTCTcGTCGATGGTCAGCACAGCCTTATGCAC | |
| _5FE_ | | | | | | | GGCCT | |
| PB15 | | | | | | | | |
| pU6_A1AT_ | CCAGGC | 21249 | CCTTATGC | 22059 | TTTCTCGTC | 22869 | CCAGGCCGTGCATAAGGCTGGTTTTAGAGCTA | 23679 |
| SpCas9- | CGTGCA | | ACGGCC | | GATGGTCA | | GAAATAGCAAGTTAAAATAAGGCTAGTCCGTT | |
| NG_ED1 | TAAGGC | | | | GCACAG | | ATCAACTTGAAAAAGTGGCACCGAGTCGGTGC | |
| 7- | TG | | | | | | TTTCTcGTCGATGGTCAGCACAGCCTTATGCAC | |
| _5FE_ | | | | | | | GGCC | |
| PB14 | | | | | | | | |
| pU6_A1AT_ | CCAGGC | 21250 | CCTTATGC | 22060 | TTTCTCGTC | 22870 | CCAGGCCGTGCATAAGGCTGGTTTTAGAGCTA | 23680 |
| SpCas9- | CGTGCA | | ACGGC | | GATGGTCA | | GAAATAGCAAGTTAAAATAAGGCTAGTCCGTT | |
| NG_ED1 | TAAGGC | | | | GCACAG | | ATCAACTTGAAAAAGTGGCACCGAGTCGGTGC | |
| 7- | TG | | | | | | TTTCTcGTCGATGGTCAGCACAGCCTTATGCAC | |
| _5FE_ | | | | | | | GGC | |
| PB13 | | | | | | | | |
| pU6_A1AT_ | CCAGGC | 21251 | CCTTATGC | 22061 | TTTCTCGTC | 22871 | CCAGGCCGTGCATAAGGCTGGTTTTAGAGCTA | 23681 |
| SpCas9- | CGTGCA | | ACGG | | GATGGTCA | | GAAATAGCAAGTTAAAATAAGGCTAGTCCGTT | |
| NG_ED1 | TAAGGC | | | | GCACAG | | ATCAACTTGAAAAAGTGGCACCGAGTCGGTGC | |
| 7- | TG | | | | | | TTTCTcGTCGATGGTCAGCACAGCCTTATGCAC | |
| _5FE_ | | | | | | | GG | |
| PB12 | | | | | | | | |
| pU6_A1AT_ | CCAGGC | 21252 | CCTTATGC | 22062 | TTTCTcGTC | 22872 | CCAGGCCGTGCATAAGGCTGGTTTTAGAGCTA | 23682 |
| SpCas9- | CGTGCA | | ACG | | GATGGTCA | | GAAATAGCAAGTTAAAATAAGGCTAGTCCGTT | |
| NG_ED1 | TAAGGC | | | | GCACAG | | ATCAACTTGAAAAAGTGGCACCGAGTCGGTGC | |
| 7- | TG | | | | | | TTTCTCGTCGATGGTCAGCACAGCCTTATGCAC | |
| _5FE_ | | | | | | | G | |
| PB11 | | | | | | | | |
| pU6_A1AT_ | CCAGGC | 21253 | CCTTATGC | 22063 | TTTCTcGTC | 22873 | CCAGGCCGTGCATAAGGCTGGTTTTAGAGCTA | 23683 |
| SpCas9- | CGTGCA | | AC | | GATGGTCA | | GAAATAGCAAGTTAAAATAAGGCTAGTCCGTT | |
| NG_ED1 | TAAGGC | | | | GCACAG | | ATCAACTTGAAAAAGTGGCACCGAGTCGGTGC | |
| 7- | TG | | | | | | TTTCTCGTCGATGGTCAGCACAGCCTTATGCAC | |
| _5FE_ | | | | | | | | |
| PB10 | | | | | | | | |
| pU6_A1AT_ | CCAGGC | 21254 | CCTTATGC | | TTTCTCGTC | 22874 | CCAGGCCGTGCATAAGGCTGGTTTTAGAGCTA | 23684 |
| SpCas9- | CGTGCA | | A | | GATGGTCA | | GAAATAGCAAGTTAAAATAAGGCTAGTCCGTT | |
| NG_ED1 | TAAGGC | | | | GCACAG | | ATCAACTTGAAAAAGTGGCACCGAGTCGGTGC | |
| 7- | TG | | | | | | TTTCTCGTCGATGGTCAGCACAGCCTTATGCA | |
| _5FE_ | | | | | | | | |
| PB9 | | | | | | | | |
| pU6_A1AT_ | CCAGGC | 21255 | CCTTATGC | | TTTCTCGTC | 22875 | CCAGGCCGTGCATAAGGCTGGTTTTAGAGCTA | 23685 |
| SpCas9- | CGTGCA | | | | GATGGTCA | | GAAATAGCAAGTTAAAATAAGGCTAGTCCGTT | |
| NG_ED1 | TAAGGC | | | | GCACAG | | ATCAACTTGAAAAAGTGGCACCGAGTCGGTGC | |
| 7- | TG | | | | | | TTTCTCGTCGATGGTCAGCACAGCCTTATGC | |
| _5FE_ | | | | | | | | |
| PB8 | | | | | | | | |
| pU6_A1AT_ | CCAGGC | 21256 | CCTTATGC | 22066 | TCTcGTCGA | 22876 | CCAGGCCGTGCATAAGGCTGGTTTTAGAGCTA | 23686 |
| SpCas9- | CGTGCA | | ACGGCCTG | | TGGTCAGCA | | GAAATAGCAAGTTAAAATAAGGCTAGTCCGTT | |
| NG_ED1 | TAAGGC | | G | | CAG | | ATCAACTTGAAAAAGTGGCACCGAGTCGGTGC | |
| 7- | TG | | | | | | TCTcGTCGATGGTCAGCACAGCCTTATGCACG | |
| _3FE_ | | | | | | | GCCTGG | |
| PB17 | | | | | | | | |
| pU6_A1AT_ | CCAGGC | 21257 | CCTTATGC | 22067 | TCTcGTCGA | 22877 | CCAGGCCGTGCATAAGGCTGGTTTTAGAGCTA | 23687 |
| SpCas9- | CGTGCA | | ACGGCCTG | | TGGTCAGCA | | GAAATAGCAAGTTAAAATAAGGCTAGTCCGTT | |
| NG_ED1 | TAAGGC | | | | CAG | | ATCAACTTGAAAAAGTGGCACCGAGTCGGTGC | |
| 7- | TG | | | | | | TCTcGTCGATGGTCAGCACAGCCTTATGCACG | |
| _3FE_ | | | | | | | GCCTG | |
| PB16 | | | | | | | | |
| pU6_A1AT_ | CCAGGC | 21258 | CCTTATGC | 22068 | TCTcGTCGA | 22878 | CCAGGCCGTGCATAAGGCTGGTTTTAGAGCTA | 23688 |
| SpCas9- | CGTGCA | | ACGGCCT | | TGGTCAGCA | | GAAATAGCAAGTTAAAATAAGGCTAGTCCGTT | |
| NG_ED1 | TAAGGC | | | | CAG | | ATCAACTTGAAAAAGTGGCACCGAGTCGGTGC | |
| 7- | TG | | | | | | TCTcGTCGATGGTCAGCACAGCCTTATGCACG | |
| _3FE_ | | | | | | | GCCT | |
| PB15 | | | | | | | | |
| pU6_A1AT_ | CCAGGC | 21259 | CCTTATGC | 22069 | TCTcGTCGA | 22879 | CCAGGCCGTGCATAAGGCTGGTTTTAGAGCTA | 23689 |
| SpCas9- | CGTGCA | | ACGGCC | | TGGTCAGCA | | GAAATAGCAAGTTAAAATAAGGCTAGTCCGTT | |
| NG_ED1 | TAAGGC | | | | CAG | | ATCAACTTGAAAAAGTGGCACCGAGTCGGTGC | |
| 7- | TG | | | | | | TCTcGTCGATGGTCAGCACAGCCTTATGCACG | |
| _3FE_ | | | | | | | GCC | |
| PB14 | | | | | | | | |
| pU6_A1AT_ | CCAGGC | 21260 | CCTTATGC | 22070 | TCTcGTCGA | 22880 | CCAGGCCGTGCATAAGGCTGGTTTTAGAGCTA | 23690 |
| SpCas9- | CGTGCA | | ACGGC | | TGGTCAGCA | | GAAATAGCAAGTTAAAATAAGGCTAGTCCGTT | |
| NG_ED1 | TAAGGC | | | | CAG | | ATCAACTTGAAAAAGTGGCACCGAGTCGGTGC | |
| 7- | TG | | | | | | TCTcGTCGATGGTCAGCACAGCCTTATGCACG | |
| _3FE_ | | | | | | | GC | |
| PB13 | | | | | | | | |
| pU6_A1AT_ | CCAGGC | 21261 | CCTTATGC | 22071 | TCTcGTCGA | 22881 | CCAGGCCGTGCATAAGGCTGGTTTTAGAGCTA | 23691 |
| SpCas9- | CGTGCA | | ACGG | | TGGTCAGCA | | GAAATAGCAAGTTAAAATAAGGCTAGTCCGTT | |
| NG_ED1 | TAAGGC | | | | CAG | | ATCAACTTGAAAAAGTGGCACCGAGTCGGTGC | |
| 7- | TG | | | | | | TCTcGTCGATGGTCAGCACAGCCTTATGCACG | |
| _3FE_ | | | | | | | G | |
| PB12 | | | | | | | | |
| pU6_A1AT_ | CCAGGC | 21262 | CCTTATGC | 22072 | TCTcGTCGA | 22882 | CCAGGCCGTGCATAAGGCTGGTTTTAGAGCTA | 23692 |
| SpCas9- | CGTGCA | | ACG | | TGGTCAGCA | | GAAATAGCAAGTTAAAATAAGGCTAGTCCGTT | |
| NG_ED1 | TAAGGC | | | | CAG | | ATCAACTTGAAAAAGTGGCACCGAGTCGGTGC | |
| 7- | TG | | | | | | TCTcGTCGATGGTCAGCACAGCCTTATGCACG | |
| _3FE_ | | | | | | | | |
| PB11 | | | | | | | | |
| pU6_A1AT_ | CCAGGC | 21263 | CCTTATGC | 22073 | TCTcGTCGA | 22883 | CCAGGCCGTGCATAAGGCTGGTTTTAGAGCTA | 23693 |
| SpCas9- | CGTGCA | | AC | | TGGTCAGCA | | GAAATAGCAAGTTAAAATAAGGCTAGTCCGTT | |
| NG_ED1 | TAAGGC | | | | CAG | | ATCAACTTGAAAAAGTGGCACCGAGTCGGTGC | |
| 7- | TG | | | | | | TCTcGTCGATGGTCAGCACAGCCTTATGCAC | |
| _3FE_ | | | | | | | | |
| PB10 | | | | | | | | |
| pU6_A1AT_ | CCAGGC | 21264 | CCTTATGC | | TCTcGTCGA | 22884 | CCAGGCCGTGCATAAGGCTGGTTTTAGAGCTA | 23694 |
| SpCas9- | CGTGCA | | A | | TGGTCAGCA | | GAAATAGCAAGTTAAAATAAGGCTAGTCCGTT | |
| NG_ED1 | TAAGGC | | | | CAG | | ATCAACTTGAAAAAGTGGCACCGAGTCGGTGC | |
| 7- | TG | | | | | | TCTcGTCGATGGTCAGCACAGCCTTATGCA | |
| _3FE_ | | | | | | | | |
| PB9 | | | | | | | | |
| pU6_A1AT_ | CCAGGC | 21265 | CCTTATGC | | TCTcGTCGA | 22885 | CCAGGCCGTGCATAAGGCTGGTTTTAGAGCTA | 23695 |
| SpCas9- | CGTGCA | | | | TGGTCAGCA | | GAAATAGCAAGTTAAAATAAGGCTAGTCCGTT | |
| NG_ED1 | TAAGGC | | | | CAG | | ATCAACTTGAAAAAGTGGCACCGAGTCGGTGC | |
| 7- | TG | | | | | | TCTcGTCGATGGTCAGCACAGCCTTATGC | |
| _3FE_ | | | | | | | | |
| PB8 | | | | | | | | |
| pU6_A1AT_ | TCCAGG | 21266 | CTTATGCA | 22076 | ACATGGCCC | 22886 | TCCAGGCCGTGCATAAGGCTGTTTTAGAGCTA | 23696 |
| SpRY_ | CCGTGC | | CGGCCTGG | | CAGCAGCTT | | GAAATAGCAAGTTAAAATAAGGCTAGTCCGTT | |
| ED18- | ATAAGG | | A | | CAGTCCCTT | | ATCAACTTGAAAAAGTGGCACCGAGTCGGTGC | |
| _G_30FE_ | CT | | | | TCTcGTCGA | | ACATGGCCCCAGCAGCTTCAGTCCCTTTCTcGT | |
| PB17 | | | | | TGGTCAGCA | | CGATGGTCAGCACAGCCTTATGCACGGCCTGG | |
| | | | | | CAGC | | A | |
| pU6_A1AT_ | TCCAGG | 21267 | CTTATGCA | 22077 | ACATGGCCC | 22887 | TCCAGGCCGTGCATAAGGCTGTTTTAGAGCTA | 23697 |
| SpRY_ | CCGTGC | | CGGCCTGG | | CAGCAGCTT | | GAAATAGCAAGTTAAAATAAGGCTAGTCCGTT | |
| ED18- | ATAAGG | | | | CAGTCCCTT | | ATCAACTTGAAAAAGTGGCACCGAGTCGGTGC | |
| _G_30FE_ | CT | | | | TCTcGTCGA | | ACATGGCCCCAGCAGCTTCAGTCCCTTTCTcGT | |
| PB16 | | | | | TGGTCAGCA | | CGATGGTCAGCACAGCCTTATGCACGGCCTGG | |
| | | | | | CAGC | | | |
| pU6_A1 | TCCAGG | 21268 | CTTATGCA | 22078 | ACATGGCCC | 22888 | TCCAGGCCGTGCATAAGGCTGTTTTAGAGCTA | 23698 |
| AT_SpR | CCGTGC | | CGGCCTG | | CAGCAGCTT | | GAAATAGCAAGTTAAAATAAGGCTAGTCCGTT | |
| Y_ED18- | ATAAGG | | | | CAGTCCCTT | | ATCAACTTGAAAAAGTGGCACCGAGTCGGTGC | |
| G_30F | CT | | | | TCTcGTCGA | | ACATGGCCCCAGCAGCTTCAGTCCCTTTCTcGT | |
| E_PB15 | | | | | TGGTCAGCA | | CGATGGTCAGCACAGCCTTATGCACGGCCTG | |
| | | | | | CAGC | | | |
| pU6_A1AT_ | TCCAGG | 21269 | CTTATGCA | 22079 | ACATGGCCC | 22889 | TCCAGGCCGTGCATAAGGCTGTTTTAGAGCTA | 23699 |
| SpRY_ | CCGTGC | | CGGCCT | | CAGCAGCTT | | GAAATAGCAAGTTAAAATAAGGCTAGTCCGTT | |
| ED18- | ATAAGG | | | | CAGTCCCTT | | ATCAACTTGAAAAAGTGGCACCGAGTCGGTGC | |
| _G_30FE_ | CT | | | | TCTcGTCGA | | ACATGGCCCCAGCAGCTTCAGTCCCTTTCTcGT | |
| PB14 | | | | | TGGTCAGCA | | CGATGGTCAGCACAGCCTTATGCACGGCCT | |
| | | | | | CAGC | | | |
| pU6_A1AT_ | TCCAGG | 21270 | CTTATGCA | 22080 | ACATGGCCC | 22890 | TCCAGGCCGTGCATAAGGCTGTTTTAGAGCTA | 23700 |
| SpRY_ | CCGTGC | | CGGCC | | CAGCAGCTT | | GAAATAGCAAGTTAAAATAAGGCTAGTCCGTT | |
| ED18- | ATAAGG | | | | CAGTCCCTT | | ATCAACTTGAAAAAGTGGCACCGAGTCGGTGC | |
| _G_30FE_ | CT | | | | TCTcGTCGA | | ACATGGCCCCAGCAGCTTCAGTCCCTTTCTcGT | |
| PB13 | | | | | TGGTCAGCA | | CGATGGTCAGCACAGCCTTATGCACGGCC | |
| | | | | | CAGC | | | |
| pU6_A1AT_ | TCCAGG | 21271 | CTTATGCA | 22081 | ACATGGCCC | 22891 | TCCAGGCCGTGCATAAGGCTGTTTTAGAGCTA | 23701 |
| SpRY_ | CCGTGC | | CGGC | | CAGCAGCTT | | GAAATAGCAAGTTAAAATAAGGCTAGTCCGTT | |
| ED18- | ATAAGG | | | | CAGTCCCTT | | ATCAACTTGAAAAAGTGGCACCGAGTCGGTGC | |
| _G_30FE_ | CT | | | | TCTcGTCGA | | ACATGGCCCCAGCAGCTTCAGTCCCTTTCTcGT | |
| PB12 | | | | | TGGTCAGCA | | CGATGGTCAGCACAGCCTTATGCACGGC | |
| | | | | | CAGC | | | |
| pU6_A1AT_ | TCCAGG | 21272 | CTTATGCA | 22082 | ACATGGCCC | 22892 | TCCAGGCCGTGCATAAGGCTGTTTTAGAGCTA | 23702 |
| SpRY_ | CCGTGC | | CGG | | CAGCAGCTT | | GAAATAGCAAGTTAAAATAAGGCTAGTCCGTT | |
| ED18- | ATAAGG | | | | CAGTCCCTT | | ATCAACTTGAAAAAGTGGCACCGAGTCGGTGC | |
| _G_30FE_ | CT | | | | TCTcGTCGA | | ACATGGCCCCAGCAGCTTCAGTCCCTTTCTcGT | |
| PB11 | | | | | TGGTCAGCA | | CGATGGTCAGCACAGCCTTATGCACGG | |
| | | | | | CAGC | | | |
| pU6_A1AT_ | TCCAGG | 21273 | CTTATGCA | 22083 | ACATGGCCC | 22893 | TCCAGGCCGTGCATAAGGCTGTTTTAGAGCTA | 23703 |
| SpRY_ | CCGTGC | | CG | | CAGCAGCTT | | GAAATAGCAAGTTAAAATAAGGCTAGTCCGTT | |
| ED18- | ATAAGG | | | | CAGTCCCTT | | ATCAACTTGAAAAAGTGGCACCGAGTCGGTGC | |
| _G_30FE_ | CT | | | | TCTcGTCGA | | ACATGGCCCCAGCAGCTTCAGTCCCTTTCTcGT | |
| PB10 | | | | | TGGTCAGCA | | CGATGGTCAGCACAGCCTTATGCACG | |
| | | | | | CAGC | | | |
| pU6_A1AT_ | TCCAGG | 21274 | CTTATGCA | | ACATGGCCC | 22894 | TCCAGGCCGTGCATAAGGCTGTTTTAGAGCTA | 23704 |
| SpRY_ | CCGTGC | | C | | CAGCAGCTT | | GAAATAGCAAGTTAAAATAAGGCTAGTCCGTT | |
| ED18- | ATAAGG | | | | CAGTCCCTT | | ATCAACTTGAAAAAGTGGCACCGAGTCGGTGC | |
| _G_30FE_ | CT | | | | TCTcGTCGA | | ACATGGCCCCAGCAGCTTCAGTCCCTTTCTcGT | |
| PB9 | | | | | TGGTCAGCA | | CGATGGTCAGCACAGCCTTATGCAC | |
| | | | | | CAGC | | | |
| pU6_A1AT_ | TCCAGG | 21275 | CTTATGCA | | ACATGGCCC | 22895 | TCCAGGCCGTGCATAAGGCTGTTTTAGAGCTA | 23705 |
| SpRY_ | CCGTGC | | | | CAGCAGCTT | | GAAATAGCAAGTTAAAATAAGGCTAGTCCGTT | |
| ED18- | ATAAGG | | | | CAGTCCCTT | | ATCAACTTGAAAAAGTGGCACCGAGTCGGTGC | |
| _G_30FE_ | CT | | | | TCTcGTCGA | | ACATGGCCCCAGCAGCTTCAGTCCCTTTCTcGT | |
| PB8 | | | | | TGGTCAGCA | | CGATGGTCAGCACAGCCTTATGCA | |
| | | | | | CAGC | | | |
| pU6_A1AT_ | TCCAGG | 21276 | CTTATGCA | 22086 | GCCCCAGCA | 22896 | TCCAGGCCGTGCATAAGGCTGTTTTAGAGCTA | 23706 |
| SpRY_ | CCGTGC | | CGGCCTGG | | GCTTCAGTC | | GAAATAGCAAGTTAAAATAAGGCTAGTCCGTT | |
| ED18- | ATAAGG | | A | | CCTTTCTcGT | | ATCAACTTGAAAAAGTGGCACCGAGTCGGTGC | |
| _G_25FE_ | CT | | | | CGATGGTCA | | GCCCCAGCAGCTTCAGTCCCTTTCTcGTCGATG | |
| PB17 | | | | | GCACAGC | | GTCAGCACAGCCTTATGCACGGCCTGGA | |
| pU6_A1AT_ | TCCAGG | 21277 | CTTATGCA | 22087 | GCCCCAGCA | 22897 | TCCAGGCCGTGCATAAGGCTGTTTTAGAGCTA | 23707 |
| SpRY_ | CCGTGC | | CGGCCTGG | | GCTTCAGTC | | GAAATAGCAAGTTAAAATAAGGCTAGTCCGTT | |
| ED18- | ATAAGG | | | | CCTTTCTCGT | | ATCAACTTGAAAAAGTGGCACCGAGTCGGTGC | |
| _G_25FE_ | CT | | | | CGATGGTCA | | GCCCCAGCAGCTTCAGTCCCTTTCTcGTCGATG | |
| PB16 | | | | | GCACAGC | | GTCAGCACAGCCTTATGCACGGCCTGG | |
| pU6_A1AT_ | TCCAGG | 21278 | CTTATGCA | 22088 | GCCCCAGCA | 22898 | TCCAGGCCGTGCATAAGGCTGTTTTAGAGCTA | 23708 |
| SpRY_ | CCGTGC | | CGGCCTG | | GCTTCAGTC | | GAAATAGCAAGTTAAAATAAGGCTAGTCCGTT | |
| ED18- | ATAAGG | | | | CCTTTCTCGT | | ATCAACTTGAAAAAGTGGCACCGAGTCGGTGC | |
| _G_25FE_ | CT | | | | CGATGGTCA | | GCCCCAGCAGCTTCAGTCCCTTTCTcGTCGATG | |
| PB15 | | | | | GCACAGC | | GTCAGCACAGCCTTATGCACGGCCTG | |
| pU6_A1AT_ | TCCAGG | 21279 | CTTATGCA | 22089 | GCCCCAGCA | 22899 | TCCAGGCCGTGCATAAGGCTGTTTTAGAGCTA | 23709 |
| SpRY_ | CCGTGC | | CGGCCT | | GCTTCAGTC | | GAAATAGCAAGTTAAAATAAGGCTAGTCCGTT | |
| ED18- | ATAAGG | | | | CCTTTCTcGT | | ATCAACTTGAAAAAGTGGCACCGAGTCGGTGC | |
| _G_25FE_ | CT | | | | CGATGGTCA | | GCCCCAGCAGCTTCAGTCCCTTTCTcGTCGATG | |
| PB14 | | | | | GCACAGC | | GTCAGCACAGCCTTATGCACGGCCT | |
| pU6_A1AT_ | TCCAGG | 21280 | CTTATGCA | 22090 | GCCCCAGCA | 22900 | TCCAGGCCGTGCATAAGGCTGTTTTAGAGCTA | 23710 |
| SpRY_ | CCGTGC | | CGGCC | | GCTTCAGTC | | GAAATAGCAAGTTAAAATAAGGCTAGTCCGTT | |
| ED18- | ATAAGG | | | | CCTTTCTcGT | | ATCAACTTGAAAAAGTGGCACCGAGTCGGTGC | |
| _G_25FE_ | CT | | | | CGATGGTCA | | GCCCCAGCAGCTTCAGTCCCTTTCTcGTCGATG | |
| PB13 | | | | | GCACAGC | | GTCAGCACAGCCTTATGCACGGCC | |
| pU6_A1AT_ | TCCAGG | 21281 | CTTATGCA | 22091 | GCCCCAGCA | 22901 | TCCAGGCCGTGCATAAGGCTGTTTTAGAGCTA | 23711 |
| SpRY_ | CCGTGC | | CGGC | | GCTTCAGTC | | GAAATAGCAAGTTAAAATAAGGCTAGTCCGTT | |
| ED18- | ATAAGG | | | | CCTTTCTcGT | | ATCAACTTGAAAAAGTGGCACCGAGTCGGTGC | |
| _G_25FE_ | CT | | | | CGATGGTCA | | GCCCCAGCAGCTTCAGTCCCTTTCTcGTCGATG | |
| PB12 | | | | | GCACAGC | | GTCAGCACAGCCTTATGCACGGC | |
| pU6_A1AT_ | TCCAGG | 21282 | CTTATGCA | 22092 | GCCCCAGCA | 22902 | TCCAGGCCGTGCATAAGGCTGTTTTAGAGCTA | 23712 |
| SpRY_ | CCGTGC | | CGG | | GCTTCAGTC | | GAAATAGCAAGTTAAAATAAGGCTAGTCCGTT | |
| ED18- | ATAAGG | | | | CCTTTCTCGT | | ATCAACTTGAAAAAGTGGCACCGAGTCGGTGC | |
| _G_25FE_ | CT | | | | CGATGGTCA | | GCCCCAGCAGCTTCAGTCCCTTTCTcGTCGATG | |
| PB11 | | | | | GCACAGC | | GTCAGCACAGCCTTATGCACGG | |
| pU6_A1AT_ | TCCAGG | 21283 | CTTATGCA | 22093 | GCCCCAGCA | 22903 | TCCAGGCCGTGCATAAGGCTGTTTTAGAGCTA | 23713 |
| SpRY_ | CCGTGC | | CG | | GCTTCAGTC | | GAAATAGCAAGTTAAAATAAGGCTAGTCCGTT | |
| ED18- | ATAAGG | | | | CCTTTCTcGT | | ATCAACTTGAAAAAGTGGCACCGAGTCGGTGC | |
| _G_25FE_ | CT | | | | CGATGGTCA | | GCCCCAGCAGCTTCAGTCCCTTTCTcGTCGATG | |
| PB10 | | | | | GCACAGC | | GTCAGCACAGCCTTATGCACG | |
| pU6_A1AT_ | TCCAGG | 21284 | CTTATGCA | | GCCCCAGCA | 22904 | TCCAGGCCGTGCATAAGGCTGTTTTAGAGCTA | 23714 |
| SpRY_ | CCGTGC | | C | | GCTTCAGTC | | GAAATAGCAAGTTAAAATAAGGCTAGTCCGTT | |
| ED18- | ATAAGG | | | | CCTTTCTcGT | | ATCAACTTGAAAAAGTGGCACCGAGTCGGTGC | |
| _G_25FE_ | CT | | | | CGATGGTCA | | GCCCCAGCAGCTTCAGTCCCTTTCTcGTCGATG | |
| PB9 | | | | | GCACAGC | | GTCAGCACAGCCTTATGCAC | |
| pU6_A1AT_ | TCCAGG | 21285 | CTTATGCA | | GCCCCAGCA | 22905 | TCCAGGCCGTGCATAAGGCTGTTTTAGAGCTA | 23715 |
| SpRY_ | CCGTGC | | | | GCTTCAGTC | | GAAATAGCAAGTTAAAATAAGGCTAGTCCGTT | |
| ED18- | ATAAGG | | | | CCTTTCTcGT | | ATCAACTTGAAAAAGTGGCACCGAGTCGGTGC | |
| _G_25FE_ | CT | | | | CGATGGTCA | | GCCCCAGCAGCTTCAGTCCCTTTCTcGTCGATG | |
| PB8 | | | | | GCACAGC | | GTCAGCACAGCCTTATGCA | |
| pU6_A1AT_ | TCCAGG | 21286 | CTTATGCA | 22096 | AGCAGCTTC | 22906 | TCCAGGCCGTGCATAAGGCTGTTTTAGAGCTA | 23716 |
| SpRY_ | CCGTGC | | CGGCCTGG | | AGTCCCTTT | | GAAATAGCAAGTTAAAATAAGGCTAGTCCGTT | |
| ED18- | ATAAGG | | A | | CTcGTCGAT | | ATCAACTTGAAAAAGTGGCACCGAGTCGGTGC | |
| _G_20FE_ | CT | | | | GGTCAGCAC | | AGCAGCTTCAGTCCCTTTCTcGTCGATGGTCAG | |
| PB17 | | | | | AGC | | CACAGCCTTATGCACGGCCTGGA | |
| pU6_A1AT_ | TCCAGG | 21287 | CTTATGCA | 22097 | AGCAGCTTC | 22907 | TCCAGGCCGTGCATAAGGCTGTTTTAGAGCTA | 23717 |
| SpRY_ | CCGTGC | | CGGCCTGG | | AGTCCCTTT | | GAAATAGCAAGTTAAAATAAGGCTAGTCCGTT | |
| ED18- | ATAAGG | | | | CTcGTCGAT | | ATCAACTTGAAAAAGTGGCACCGAGTCGGTGC | |
| _G_20FE_ | CT | | | | GGTCAGCAC | | AGCAGCTTCAGTCCCTTTCTcGTCGATGGTCAG | |
| PB16 | | | | | AGC | | CACAGCCTTATGCACGGCCTGG | |
| pU6_A1AT_ | TCCAGG | 21288 | CTTATGCA | 22098 | AGCAGCTTC | 22908 | TCCAGGCCGTGCATAAGGCTGTTTTAGAGCTA | 23718 |
| SpRY_ | CCGTGC | | CGGCCTG | | AGTCCCTTT | | GAAATAGCAAGTTAAAATAAGGCTAGTCCGTT | |
| ED18- | ATAAGG | | | | CTCGTCGAT | | ATCAACTTGAAAAAGTGGCACCGAGTCGGTGC | |
| _G_20FE_ | CT | | | | GGTCAGCAC | | AGCAGCTTCAGTCCCTTTCTcGTCGATGGTCAG | |
| PB15 | | | | | AGC | | CACAGCCTTATGCACGGCCTG | |
| pU6_A1AT_ | TCCAGG | 21289 | CTTATGCA | 22099 | AGCAGCTTC | 22909 | TCCAGGCCGTGCATAAGGCTGTTTTAGAGCTA | 23719 |
| SpRY_ | CCGTGC | | CGGCCT | | AGTCCCTTT | | GAAATAGCAAGTTAAAATAAGGCTAGTCCGTT | |
| ED18- | ATAAGG | | | | CTCGTCGAT | | ATCAACTTGAAAAAGTGGCACCGAGTCGGTGC | |
| _G_20FE_ | CT | | | | GGTCAGCAC | | AGCAGCTTCAGTCCCTTTCTcGTCGATGGTCAG | |
| PB14 | | | | | AGC | | CACAGCCTTATGCACGGCCT | |
| pU6_A1AT_ | TCCAGG | 21290 | CTTATGCA | 22100 | AGCAGCTTC | 22910 | TCCAGGCCGTGCATAAGGCTGTTTTAGAGCTA | 23720 |
| SpRY_ | CCGTGC | | CGGCC | | AGTCCCTTT | | GAAATAGCAAGTTAAAATAAGGCTAGTCCGTT | |
| ED18- | ATAAGG | | | | CTcGTCGAT | | ATCAACTTGAAAAAGTGGCACCGAGTCGGTGC | |
| _G_20FE_ | CT | | | | GGTCAGCAC | | AGCAGCTTCAGTCCCTTTCTcGTCGATGGTCAG | |
| PB13 | | | | | AGC | | CACAGCCTTATGCACGGCC | |
| pU6_A1AT_ | TCCAGG | 21291 | CTTATGCA | 22101 | AGCAGCTTC | 22911 | TCCAGGCCGTGCATAAGGCTGTTTTAGAGCTA | 23721 |
| SpRY_ | CCGTGC | | CGGC | | AGTCCCTTT | | GAAATAGCAAGTTAAAATAAGGCTAGTCCGTT | |
| ED18- | ATAAGG | | | | CTcGTCGAT | | ATCAACTTGAAAAAGTGGCACCGAGTCGGTGC | |
| _G_20FE_ | CT | | | | GGTCAGCAC | | AGCAGCTTCAGTCCCTTTCTcGTCGATGGTCAG | |
| PB12 | | | | | AGC | | CACAGCCTTATGCACGGC | |
| pU6_A1AT_ | TCCAGG | 21292 | CTTATGCA | 22102 | AGCAGCTTC | 22912 | TCCAGGCCGTGCATAAGGCTGTTTTAGAGCTA | 23722 |
| SpRY_ | CCGTGC | | CGG | | AGTCCCTTT | | GAAATAGCAAGTTAAAATAAGGCTAGTCCGTT | |
| ED18- | ATAAGG | | | | CTcGTCGAT | | ATCAACTTGAAAAAGTGGCACCGAGTCGGTGC | |
| _G_20FE_ | CT | | | | GGTCAGCAC | | AGCAGCTTCAGTCCCTTTCTcGTCGATGGTCAG | |
| PB11 | | | | | AGC | | CACAGCCTTATGCACGG | |
| pU6_A1AT_ | TCCAGG | 21293 | CTTATGCA | 22103 | AGCAGCTTC | 22913 | TCCAGGCCGTGCATAAGGCTGTTTTAGAGCTA | 23723 |
| SpRY_ | CCGTGC | | CG | | AGTCCCTTT | | GAAATAGCAAGTTAAAATAAGGCTAGTCCGTT | |
| ED18- | ATAAGG | | | | CTcGTCGAT | | ATCAACTTGAAAAAGTGGCACCGAGTCGGTGC | |
| _G_20FE_ | CT | | | | GGTCAGCAC | | AGCAGCTTCAGTCCCTTTCTcGTCGATGGTCAG | |
| PB10 | | | | | AGC | | CACAGCCTTATGCACG | |
| pU6_A1AT_ | TCCAGG | 21294 | CTTATGCA | | AGCAGCTTC | 22914 | TCCAGGCCGTGCATAAGGCTGTTTTAGAGCTA | 23724 |
| SpRY_ | CCGTGC | | C | | AGTCCCTTT | | GAAATAGCAAGTTAAAATAAGGCTAGTCCGTT | |
| ED18- | ATAAGG | | | | CTcGTCGAT | | ATCAACTTGAAAAAGTGGCACCGAGTCGGTGC | |
| _G_20FE_ | CT | | | | GGTCAGCAC | | AGCAGCTTCAGTCCCTTTCTcGTCGATGGTCAG | |
| PB9 | | | | | AGC | | CACAGCCTTATGCAC | |
| pU6_A1AT_ | TCCAGG | 21295 | CTTATGCA | | AGCAGCTTC | 22915 | TCCAGGCCGTGCATAAGGCTGTTTTAGAGCTA | 23725 |
| SpRY_ | CCGTGC | | | | AGTCCCTTT | | GAAATAGCAAGTTAAAATAAGGCTAGTCCGTT | |
| ED18- | ATAAGG | | | | CTcGTCGAT | | ATCAACTTGAAAAAGTGGCACCGAGTCGGTGC | |
| _G_20FE_ | CT | | | | GGTCAGCAC | | AGCAGCTTCAGTCCCTTTCTcGTCGATGGTCAG | |
| PB8 | | | | | AGC | | CACAGCCTTATGCA | |
| pU6_A1AT_ | TCCAGG | 21296 | CTTATGCA | 22106 | TTCAGTCCC | 22916 | TCCAGGCCGTGCATAAGGCTGTTTTAGAGCTA | 23726 |
| SpRY_ | CCGTGC | | CGGCCTGG | | TTTCTCGTC | | GAAATAGCAAGTTAAAATAAGGCTAGTCCGTT | |
| ED18- | ATAAGG | | A | | GATGGTCA | | ATCAACTTGAAAAAGTGGCACCGAGTCGGTGC | |
| _G_14FE_ | CT | | | | GCACAGC | | TTCAGTCCCTTTCTcGTCGATGGTCAGCACAGC | |
| PB17 | | | | | | | CTTATGCACGGCCTGGA | |
| pU6_A1AT_ | TCCAGG | 21297 | CTTATGCA | 22107 | TTCAGTCCC | 22917 | TCCAGGCCGTGCATAAGGCTGTTTTAGAGCTA | 23727 |
| SpRY_ | CCGTGC | | CGGCCTGG | | TTTCTcGTC | | GAAATAGCAAGTTAAAATAAGGCTAGTCCGTT | |
| ED18- | ATAAGG | | | | GATGGTCA | | ATCAACTTGAAAAAGTGGCACCGAGTCGGTGC | |
| _G_14FE_ | CT | | | | GCACAGC | | TTCAGTCCCTTTCTcGTCGATGGTCAGCACAGC | |
| PB16 | | | | | | | CTTATGCACGGCCTGG | |
| pU6_A1AT_ | TCCAGG | 21298 | CTTATGCA | 22108 | TTCAGTCCC | 22918 | TCCAGGCCGTGCATAAGGCTGTTTTAGAGCTA | 23728 |
| SpRY_ | CCGTGC | | CGGCCTG | | TTTCTcGTC | | GAAATAGCAAGTTAAAATAAGGCTAGTCCGTT | |
| ED18- | ATAAGG | | | | GATGGTCA | | ATCAACTTGAAAAAGTGGCACCGAGTCGGTGC | |
| _G_14FE_ | CT | | | | GCACAGC | | TTCAGTCCCTTTCTcGTCGATGGTCAGCACAGC | |
| PB15 | | | | | | | CTTATGCACGGCCTG | |
| pU6_A1AT_ | TCCAGG | 21299 | CTTATGCA | 22109 | TTCAGTCCC | 22919 | TCCAGGCCGTGCATAAGGCTGTTTTAGAGCTA | 23729 |
| SpRY_ | CCGTGC | | CGGCCT | | TTTCTcGTC | | GAAATAGCAAGTTAAAATAAGGCTAGTCCGTT | |
| ED18- | ATAAGG | | | | GATGGTCA | | ATCAACTTGAAAAAGTGGCACCGAGTCGGTGC | |
| _G_14FE_ | CT | | | | GCACAGC | | TTCAGTCCCTTTCTCGTCGATGGTCAGCACAGC | |
| PB14 | | | | | | | CTTATGCACGGCCT | |
| pU6_A1AT_ | TCCAGG | 21300 | CTTATGCA | 22110 | TTCAGTCCC | 22920 | TCCAGGCCGTGCATAAGGCTGTTTTAGAGCTA | 23730 |
| SpRY_ | CCGTGC | | CGGCC | | TTTCTcGTC | | GAAATAGCAAGTTAAAATAAGGCTAGTCCGTT | |
| ED18- | ATAAGG | | | | GATGGTCA | | ATCAACTTGAAAAAGTGGCACCGAGTCGGTGC | |
| _G_14FE_ | CT | | | | GCACAGC | | TTCAGTCCCTTTCTcGTCGATGGTCAGCACAGC | |
| PB13 | | | | | | | CTTATGCACGGCC | |
| pU6_A1AT_ | TCCAGG | 21301 | CTTATGCA | 22111 | TTCAGTCCC | 22921 | TCCAGGCCGTGCATAAGGCTGTTTTAGAGCTA | 23731 |
| SpRY_ | CCGTGC | | CGGC | | TTTCTcGTC | | GAAATAGCAAGTTAAAATAAGGCTAGTCCGTT | |
| ED18- | ATAAGG | | | | GATGGTCA | | ATCAACTTGAAAAAGTGGCACCGAGTCGGTGC | |
| _G_14FE_ | CT | | | | GCACAGC | | TTCAGTCCCTTTCTCGTCGATGGTCAGCACAGC | |
| PB12 | | | | | | | CTTATGCACGGC | |
| pU6_A1AT_ | TCCAGG | 21302 | CTTATGCA | 22112 | TTCAGTCCC | 22922 | TCCAGGCCGTGCATAAGGCTGTTTTAGAGCTA | 23732 |
| SpRY_ | CCGTGC | | CGG | | TTTCTCGTC | | GAAATAGCAAGTTAAAATAAGGCTAGTCCGTT | |
| ED18- | ATAAGG | | | | GATGGTCA | | ATCAACTTGAAAAAGTGGCACCGAGTCGGTGC | |
| _G_14FE_ | CT | | | | GCACAGC | | TTCAGTCCCTTTCTcGTCGATGGTCAGCACAGC | |
| PB11 | | | | | | | CTTATGCACGG | |
| pU6_A1AT_ | TCCAGG | 21303 | CTTATGCA | 22113 | TTCAGTCCC | 22923 | TCCAGGCCGTGCATAAGGCTGTTTTAGAGCTA | 23733 |
| SpRY_ | CCGTGC | | CG | | TTTCTCGTC | | GAAATAGCAAGTTAAAATAAGGCTAGTCCGTT | |
| ED18- | ATAAGG | | | | GATGGTCA | | ATCAACTTGAAAAAGTGGCACCGAGTCGGTGC | |
| _G_14FE_ | CT | | | | GCACAGC | | TTCAGTCCCTTTCTcGTCGATGGTCAGCACAGC | |
| PB10 | | | | | | | CTTATGCACG | |
| pU6_A1AT_ | TCCAGG | 21304 | CTTATGCA | | TTCAGTCCC | 22924 | TCCAGGCCGTGCATAAGGCTGTTTTAGAGCTA | 23734 |
| SpRY_ | CCGTGC | | C | | TTTCTCGTC | | GAAATAGCAAGTTAAAATAAGGCTAGTCCGTT | |
| ED18- | ATAAGG | | | | GATGGTCA | | ATCAACTTGAAAAAGTGGCACCGAGTCGGTGC | |
| _G_14FE_ | CT | | | | GCACAGC | | TTCAGTCCCTTTCTcGTCGATGGTCAGCACAGC | |
| PB9 | | | | | | | CTTATGCAC | |
| pU6_A1AT_ | TCCAGG | 21305 | CTTATGCA | | TTCAGTCCC | 22925 | TCCAGGCCGTGCATAAGGCTGTTTTAGAGCTA | 23735 |
| SpRY_ | CCGTGC | | | | TTTCTCGTC | | GAAATAGCAAGTTAAAATAAGGCTAGTCCGTT | |
| ED18- | ATAAGG | | | | GATGGTCA | | ATCAACTTGAAAAAGTGGCACCGAGTCGGTGC | |
| _G_14FE_ | CT | | | | GCACAGC | | TTCAGTCCCTTTCTcGTCGATGGTCAGCACAGC | |
| PB8 | | | | | | | CTTATGCA | |
| pU6_A1AT_ | TCCAGG | 21306 | CTTATGCA | 22116 | AGTCCCTTT | 22926 | TCCAGGCCGTGCATAAGGCTGTTTTAGAGCTA | 23736 |
| SpRY_ | CCGTGC | | CGGCCTGG | | CTcGTCGAT | | GAAATAGCAAGTTAAAATAAGGCTAGTCCGTT | |
| ED18- | ATAAGG | | A | | GGTCAGCAC | | ATCAACTTGAAAAAGTGGCACCGAGTCGGTGC | |
| _G_11FE_ | CT | | | | AGC | | AGTCCCTTTCTcGTCGATGGTCAGCACAGCCTT | |
| PB17 | | | | | | | ATGCACGGCCTGGA | |
| pU6_A1AT_ | TCCAGG | 21307 | CTTATGCA | 22117 | AGTCCCTTT | 22927 | TCCAGGCCGTGCATAAGGCTGTTTTAGAGCTA | 23737 |
| SpRY_ | CCGTGC | | CGGCCTGG | | CTcGTCGAT | | GAAATAGCAAGTTAAAATAAGGCTAGTCCGTT | |
| ED18- | ATAAGG | | | | GGTCAGCAC | | ATCAACTTGAAAAAGTGGCACCGAGTCGGTGC | |
| _G_11FE_ | CT | | | | AGC | | AGTCCCTTTCTcGTCGATGGTCAGCACAGCCTT | |
| PB16 | | | | | | | ATGCACGGCCTGG | |
| pU6_A1AT_ | TCCAGG | 21308 | CTTATGCA | 22118 | AGTCCCTTT | 22928 | TCCAGGCCGTGCATAAGGCTGTTTTAGAGCTA | 23738 |
| SpRY_ | CCGTGC | | CGGCCTG | | CTcGTCGAT | | GAAATAGCAAGTTAAAATAAGGCTAGTCCGTT | |
| ED18- | ATAAGG | | | | GGTCAGCAC | | ATCAACTTGAAAAAGTGGCACCGAGTCGGTGC | |
| _G_11FE_ | CT | | | | AGC | | AGTCCCTTTCTcGTCGATGGTCAGCACAGCCTT | |
| PB15 | | | | | | | ATGCACGGCCTG | |
| pU6_A1AT_ | TCCAGG | 21309 | CTTATGCA | 22119 | AGTCCCTTT | 22929 | TCCAGGCCGTGCATAAGGCTGTTTTAGAGCTA | 23739 |
| SpRY_ | CCGTGC | | CGGCCT | | CTcGTCGAT | | GAAATAGCAAGTTAAAATAAGGCTAGTCCGTT | |
| ED18- | ATAAGG | | | | GGTCAGCAC | | ATCAACTTGAAAAAGTGGCACCGAGTCGGTGC | |
| _G_11FE_ | CT | | | | AGC | | AGTCCCTTTCTcGTCGATGGTCAGCACAGCCTT | |
| PB14 | | | | | | | ATGCACGGCCT | |
| pU6_A1AT_ | TCCAGG | 21310 | CTTATGCA | 22120 | AGTCCCTTT | 22930 | TCCAGGCCGTGCATAAGGCTGTTTTAGAGCTA | 23740 |
| SpRY_ | CCGTGC | | CGGCC | | CTcGTCGAT | | GAAATAGCAAGTTAAAATAAGGCTAGTCCGTT | |
| ED18- | ATAAGG | | | | GGTCAGCAC | | ATCAACTTGAAAAAGTGGCACCGAGTCGGTGC | |
| _G_11FE_ | CT | | | | AGC | | AGTCCCTTTCTcGTCGATGGTCAGCACAGCCTT | |
| PB13 | | | | | | | ATGCACGGCC | |
| pU6_A1AT_ | TCCAGG | 21311 | CTTATGCA | 22121 | AGTCCCTTT | 22931 | TCCAGGCCGTGCATAAGGCTGTTTTAGAGCTA | 23741 |
| SpRY_ | CCGTGC | | CGGC | | CTCGTCGAT | | GAAATAGCAAGTTAAAATAAGGCTAGTCCGTT | |
| ED18- | ATAAGG | | | | GGTCAGCAC | | ATCAACTTGAAAAAGTGGCACCGAGTCGGTGC | |
| _G_11FE_ | CT | | | | AGC | | AGTCCCTTTCTcGTCGATGGTCAGCACAGCCTT | |
| PB12 | | | | | | | ATGCACGGC | |
| pU6_A1AT_ | TCCAGG | 21312 | CTTATGCA | 22122 | AGTCCCTTT | 22932 | TCCAGGCCGTGCATAAGGCTGTTTTAGAGCTA | 23742 |
| SpRY_ | CCGTGC | | CGG | | CTCGTCGAT | | GAAATAGCAAGTTAAAATAAGGCTAGTCCGTT | |
| ED18- | ATAAGG | | | | GGTCAGCAC | | ATCAACTTGAAAAAGTGGCACCGAGTCGGTGC | |
| _G_11FE_ | CT | | | | AGC | | AGTCCCTTTCTcGTCGATGGTCAGCACAGCCTT | |
| PB11 | | | | | | | ATGCACGG | |
| pU6_A1AT_ | TCCAGG | 21313 | CTTATGCA | 22123 | AGTCCCTTT | 22933 | TCCAGGCCGTGCATAAGGCTGTTTTAGAGCTA | 23743 |
| SpRY_ | CCGTGC | | CG | | CTcGTCGAT | | GAAATAGCAAGTTAAAATAAGGCTAGTCCGTT | |
| ED18- | ATAAGG | | | | GGTCAGCAC | | ATCAACTTGAAAAAGTGGCACCGAGTCGGTGC | |
| _G_11FE_ | CT | | | | AGC | | AGTCCCTTTCTcGTCGATGGTCAGCACAGCCTT | |
| PB10 | | | | | | | ATGCACG | |
| pU6_A1AT_ | TCCAGG | 21314 | CTTATGCA | | AGTCCCTTT | 22934 | TCCAGGCCGTGCATAAGGCTGTTTTAGAGCTA | 23744 |
| SpRY_ | CCGTGC | | C | | CTcGTCGAT | | GAAATAGCAAGTTAAAATAAGGCTAGTCCGTT | |
| ED18- | ATAAGG | | | | GGTCAGCAC | | ATCAACTTGAAAAAGTGGCACCGAGTCGGTGC | |
| _G_11FE_ | CT | | | | AGC | | AGTCCCTTTCTcGTCGATGGTCAGCACAGCCTT | |
| PB9 | | | | | | | ATGCAC | |
| pU6_A1AT_ | TCCAGG | 21315 | CTTATGCA | | AGTCCCTTT | 22935 | TCCAGGCCGTGCATAAGGCTGTTTTAGAGCTA | 23745 |
| SpRY_ | CCGTGC | | | | CTcGTCGAT | | GAAATAGCAAGTTAAAATAAGGCTAGTCCGTT | |
| ED18- | ATAAGG | | | | GGTCAGCAC | | ATCAACTTGAAAAAGTGGCACCGAGTCGGTGC | |
| _G_11FE_ | CT | | | | AGC | | AGTCCCTTTCTcGTCGATGGTCAGCACAGCCTT | |
| PB8 | | | | | | | ATGCA | |
| pU6_A1AT_ | TCCAGG | 21316 | CTTATGCA | 22126 | TCCCTTTCTc | 22936 | TCCAGGCCGTGCATAAGGCTGTTTTAGAGCTA | 23746 |
| SpRY_ | CCGTGC | | CGGCCTGG | | GTCGATGGT | | GAAATAGCAAGTTAAAATAAGGCTAGTCCGTT | |
| ED18- | ATAAGG | | A | | CAGCACAGC | | ATCAACTTGAAAAAGTGGCACCGAGTCGGTGC | |
| _G_9FE_ | CT | | | | | | TCCCTTTCTcGTCGATGGTCAGCACAGCCTTAT | |
| PB17 | | | | | | | GCACGGCCTGGA | |
| pU6_A1AT_ | TCCAGG | 21317 | CTTATGCA | 22127 | TCCCTTTCTc | 22937 | TCCAGGCCGTGCATAAGGCTGTTTTAGAGCTA | 23747 |
| SpRY_ | CCGTGC | | CGGCCTGG | | GTCGATGGT | | GAAATAGCAAGTTAAAATAAGGCTAGTCCGTT | |
| ED18- | ATAAGG | | | | CAGCACAGC | | ATCAACTTGAAAAAGTGGCACCGAGTCGGTGC | |
| _G_9FE_ | CT | | | | | | TCCCTTTCTcGTCGATGGTCAGCACAGCCTTAT | |
| PB16 | | | | | | | GCACGGCCTGG | |
| pU6_A1AT_ | TCCAGG | 21318 | CTTATGCA | 22128 | TCCCTTTCTc | 22938 | TCCAGGCCGTGCATAAGGCTGTTTTAGAGCTA | 23748 |
| SpRY_ | CCGTGC | | CGGCCTG | | GTCGATGGT | | GAAATAGCAAGTTAAAATAAGGCTAGTCCGTT | |
| ED18- | ATAAGG | | | | CAGCACAGC | | ATCAACTTGAAAAAGTGGCACCGAGTCGGTGC | |
| _G_9FE_ | CT | | | | | | TCCCTTTCTcGTCGATGGTCAGCACAGCCTTAT | |
| PB15 | | | | | | | GCACGGCCTG | |
| pU6_A1AT_ | TCCAGG | 21319 | CTTATGCA | 22129 | TCCCTTTCTc | 22939 | TCCAGGCCGTGCATAAGGCTGTTTTAGAGCTA | 23749 |
| SpRY_ | CCGTGC | | CGGCCT | | GTCGATGGT | | GAAATAGCAAGTTAAAATAAGGCTAGTCCGTT | |
| ED18- | ATAAGG | | | | CAGCACAGC | | ATCAACTTGAAAAAGTGGCACCGAGTCGGTGC | |
| _G_9FE_ | CT | | | | | | TCCCTTTCTcGTCGATGGTCAGCACAGCCTTAT | |
| PB14 | | | | | | | GCACGGCCT | |
| pU6_A1AT_ | TCCAGG | 21320 | CTTATGCA | 22130 | TCCCTTTCTc | 22940 | TCCAGGCCGTGCATAAGGCTGTTTTAGAGCTA | 23750 |
| SpRY_ | CCGTGC | | CGGCC | | GTCGATGGT | | GAAATAGCAAGTTAAAATAAGGCTAGTCCGTT | |
| ED18- | ATAAGG | | | | CAGCACAGC | | ATCAACTTGAAAAAGTGGCACCGAGTCGGTGC | |
| _G_9FE_ | CT | | | | | | TCCCTTTCTcGTCGATGGTCAGCACAGCCTTAT | |
| PB13 | | | | | | | GCACGGCC | |
| pU6_A1AT_ | TCCAGG | 21321 | CTTATGCA | 22131 | TCCCTTTCTc | 22941 | TCCAGGCCGTGCATAAGGCTGTTTTAGAGCTA | 23751 |
| SpRY_ | CCGTGC | | CGGC | | GTCGATGGT | | GAAATAGCAAGTTAAAATAAGGCTAGTCCGTT | |
| ED18- | ATAAGG | | | | CAGCACAGC | | ATCAACTTGAAAAAGTGGCACCGAGTCGGTGC | |
| _G_9FE_ | CT | | | | | | TCCCTTTCTcGTCGATGGTCAGCACAGCCTTAT | |
| PB12 | | | | | | | GCACGGC | |
| pU6_A1AT_ | TCCAGG | 21322 | CTTATGCA | 22132 | TCCCTTTCTc | 22942 | TCCAGGCCGTGCATAAGGCTGTTTTAGAGCTA | 23752 |
| SpRY_ | CCGTGC | | CGG | | GTCGATGGT | | GAAATAGCAAGTTAAAATAAGGCTAGTCCGTT | |
| ED18- | ATAAGG | | | | CAGCACAGC | | ATCAACTTGAAAAAGTGGCACCGAGTCGGTGC | |
| _G_9FE_ | CT | | | | | | TCCCTTTCTcGTCGATGGTCAGCACAGCCTTAT | |
| PB11 | | | | | | | GCACGG | |
| pU6_A1AT_ | TCCAGG | 21323 | CTTATGCA | 22133 | TCCCTTTCTc | 22943 | TCCAGGCCGTGCATAAGGCTGTTTTAGAGCTA | 23753 |
| SpRY_ | CCGTGC | | CG | | GTCGATGGT | | GAAATAGCAAGTTAAAATAAGGCTAGTCCGTT | |
| ED18- | ATAAGG | | | | CAGCACAGC | | ATCAACTTGAAAAAGTGGCACCGAGTCGGTGC | |
| _G_9FE_ | CT | | | | | | TCCCTTTCTcGTCGATGGTCAGCACAGCCTTAT | |
| PB10 | | | | | | | GCACG | |
| pU6_A1AT_ | TCCAGG | 21324 | CTTATGCA | | TCCCTTTCTc | 22944 | TCCAGGCCGTGCATAAGGCTGTTTTAGAGCTA | 23754 |
| SpRY_ | CCGTGC | | C | | GTCGATGGT | | GAAATAGCAAGTTAAAATAAGGCTAGTCCGTT | |
| ED18- | ATAAGG | | | | CAGCACAGC | | ATCAACTTGAAAAAGTGGCACCGAGTCGGTGC | |
| _G_9FE_ | CT | | | | | | TCCCTTTCTcGTCGATGGTCAGCACAGCCTTAT | |
| PB9 | | | | | | | GCAC | |
| pU6_A1AT_ | TCCAGG | 21325 | CTTATGCA | | TCCCTTTCTc | 22945 | TCCAGGCCGTGCATAAGGCTGTTTTAGAGCTA | 23755 |
| SpRY_ | CCGTGC | | | | GTCGATGGT | | GAAATAGCAAGTTAAAATAAGGCTAGTCCGTT | |
| ED18- | ATAAGG | | | | CAGCACAGC | | ATCAACTTGAAAAAGTGGCACCGAGTCGGTGC | |
| _G_9FE_ | CT | | | | | | TCCCTTTCTcGTCGATGGTCAGCACAGCCTTAT | |
| PB8 | | | | | | | GCA | |
| pU6_A1AT_ | TCCAGG | 21326 | CTTATGCA | 22136 | CCTTTCTCGT | 22946 | TCCAGGCCGTGCATAAGGCTGTTTTAGAGCTA | 23756 |
| SpRY_ | CCGTGC | | CGGCCTGG | | CGATGGTCA | | GAAATAGCAAGTTAAAATAAGGCTAGTCCGTT | |
| ED18- | ATAAGG | | A | | GCACAGC | | ATCAACTTGAAAAAGTGGCACCGAGTCGGTGC | |
| _G_7FE_ | CT | | | | | | CCTTTCTcGTCGATGGTCAGCACAGCCTTATGC | |
| PB17 | | | | | | | ACGGCCTGGA | |
| pU6_A1AT_ | TCCAGG | 21327 | CTTATGCA | 22137 | CCTTTCTcGT | 22947 | TCCAGGCCGTGCATAAGGCTGTTTTAGAGCTA | 23757 |
| SpRY_ | CCGTGC | | CGGCCTGG | | CGATGGTCA | | GAAATAGCAAGTTAAAATAAGGCTAGTCCGTT | |
| ED18- | ATAAGG | | | | GCACAGC | | ATCAACTTGAAAAAGTGGCACCGAGTCGGTGC | |
| _G_7FE_ | CT | | | | | | CCTTTCTcGTCGATGGTCAGCACAGCCTTATGC | |
| PB16 | | | | | | | ACGGCCTGG | |
| pU6_A1AT_ | TCCAGG | 21328 | CTTATGCA | 22138 | CCTTTCTcGT | 22948 | TCCAGGCCGTGCATAAGGCTGTTTTAGAGCTA | 23758 |
| SpRY_ | CCGTGC | | CGGCCTG | | CGATGGTCA | | GAAATAGCAAGTTAAAATAAGGCTAGTCCGTT | |
| ED18- | ATAAGG | | | | GCACAGC | | ATCAACTTGAAAAAGTGGCACCGAGTCGGTGC | |
| _G_7FE_ | CT | | | | | | CCTTTCTcGTCGATGGTCAGCACAGCCTTATGC | |
| PB15 | | | | | | | ACGGCCTG | |
| pU6_A1AT_ | TCCAGG | 21329 | CTTATGCA | 22139 | CCTTTCTCGT | 22949 | TCCAGGCCGTGCATAAGGCTGTTTTAGAGCTA | 23759 |
| SpRY_ | CCGTGC | | CGGCCT | | CGATGGTCA | | GAAATAGCAAGTTAAAATAAGGCTAGTCCGTT | |
| ED18- | ATAAGG | | | | GCACAGC | | ATCAACTTGAAAAAGTGGCACCGAGTCGGTGC | |
| _G_7FE_ | CT | | | | | | CCTTTCTcGTCGATGGTCAGCACAGCCTTATGC | |
| PB14 | | | | | | | ACGGCCT | |
| pU6_A1AT_ | TCCAGG | 21330 | CTTATGCA | 22140 | CCTTTCTcGT | 22950 | TCCAGGCCGTGCATAAGGCTGTTTTAGAGCTA | 23760 |
| SpRY_ | CCGTGC | | CGGCC | | CGATGGTCA | | GAAATAGCAAGTTAAAATAAGGCTAGTCCGTT | |
| ED18- | ATAAGG | | | | GCACAGC | | ATCAACTTGAAAAAGTGGCACCGAGTCGGTGC | |
| _G_7FE_ | CT | | | | | | CCTTTCTcGTCGATGGTCAGCACAGCCTTATGC | |
| PB13 | | | | | | | ACGGCC | |
| pU6_A1AT_ | TCCAGG | 21331 | CTTATGCA | 22141 | CCTTTCTcGT | 22951 | TCCAGGCCGTGCATAAGGCTGTTTTAGAGCTA | 23761 |
| SpRY_ | CCGTGC | | CGGC | | CGATGGTCA | | GAAATAGCAAGTTAAAATAAGGCTAGTCCGTT | |
| ED18- | ATAAGG | | | | GCACAGC | | ATCAACTTGAAAAAGTGGCACCGAGTCGGTGC | |
| _G_7FE_ | CT | | | | | | CCTTTCTcGTCGATGGTCAGCACAGCCTTATGC | |
| PB12 | | | | | | | ACGGC | |
| pU6_A1AT_ | TCCAGG | 21332 | CTTATGCA | 22142 | CCTTTCTcGT | 22952 | TCCAGGCCGTGCATAAGGCTGTTTTAGAGCTA | 23762 |
| SpRY_ | CCGTGC | | CGG | | CGATGGTCA | | GAAATAGCAAGTTAAAATAAGGCTAGTCCGTT | |
| ED18- | ATAAGG | | | | GCACAGC | | ATCAACTTGAAAAAGTGGCACCGAGTCGGTGC | |
| _G_7FE_ | CT | | | | | | CCTTTCTcGTCGATGGTCAGCACAGCCTTATGC | |
| PB11 | | | | | | | ACGG | |
| pU6_A1AT_ | TCCAGG | 21333 | CTTATGCA | 22143 | CCTTTCTcGT | 22953 | TCCAGGCCGTGCATAAGGCTGTTTTAGAGCTA | 23763 |
| SpRY_ | CCGTGC | | CG | | CGATGGTCA | | GAAATAGCAAGTTAAAATAAGGCTAGTCCGTT | |
| ED18- | ATAAGG | | | | GCACAGC | | ATCAACTTGAAAAAGTGGCACCGAGTCGGTGC | |
| _G_7FE_ | CT | | | | | | CCTTTCTcGTCGATGGTCAGCACAGCCTTATGC | |
| PB10 | | | | | | | ACG | |
| pU6_A1AT_ | TCCAGG | 21334 | CTTATGCA | | CCTTTCTcGT | 22954 | TCCAGGCCGTGCATAAGGCTGTTTTAGAGCTA | 23764 |
| SpRY_ | CCGTGC | | C | | CGATGGTCA | | GAAATAGCAAGTTAAAATAAGGCTAGTCCGTT | |
| ED18- | ATAAGG | | | | GCACAGC | | ATCAACTTGAAAAAGTGGCACCGAGTCGGTGC | |
| _G_7FE_ | CT | | | | | | CCTTTCTcGTCGATGGTCAGCACAGCCTTATGC | |
| PB9 | | | | | | | AC | |
| pU6_A1AT_ | TCCAGG | 21335 | CTTATGCA | | CCTTTCTcGT | 22955 | TCCAGGCCGTGCATAAGGCTGTTTTAGAGCTA | 23765 |
| SpRY_ | CCGTGC | | | | CGATGGTCA | | GAAATAGCAAGTTAAAATAAGGCTAGTCCGTT | |
| ED18- | ATAAGG | | | | GCACAGC | | ATCAACTTGAAAAAGTGGCACCGAGTCGGTGC | |
| _G_7FE_ | CT | | | | | | CCTTTCTcGTCGATGGTCAGCACAGCCTTATGC | |
| PB8 | | | | | | | A | |
| pU6_A1AT_ | TCCAGG | 21336 | CTTATGCA | 22146 | TTTCTCGTC | 22956 | TCCAGGCCGTGCATAAGGCTGTTTTAGAGCTA | 23766 |
| SpRY_ | CCGTGC | | CGGCCTGG | | GATGGTCA | | GAAATAGCAAGTTAAAATAAGGCTAGTCCGTT | |
| ED18- | ATAAGG | | A | | GCACAGC | | ATCAACTTGAAAAAGTGGCACCGAGTCGGTGC | |
| _G_5FE_ | CT | | | | | | TTTCTCGTCGATGGTCAGCACAGCCTTATGCAC | |
| PB17 | | | | | | | GGCCTGGA | |
| pU6_A1AT_ | TCCAGG | 21337 | CTTATGCA | 22147 | TTTCTCGTC | 22957 | TCCAGGCCGTGCATAAGGCTGTTTTAGAGCTA | 23767 |
| SpRY_ | CCGTGC | | CGGCCTGG | | GATGGTCA | | GAAATAGCAAGTTAAAATAAGGCTAGTCCGTT | |
| ED18- | ATAAGG | | | | GCACAGC | | ATCAACTTGAAAAAGTGGCACCGAGTCGGTGC | |
| _G_5FE_ | CT | | | | | | TTTCTcGTCGATGGTCAGCACAGCCTTATGCAC | |
| PB16 | | | | | | | GGCCTGG | |
| pU6_A1AT_ | TCCAGG | 21338 | CTTATGCA | 22148 | TTTCTCGTC | 22958 | TCCAGGCCGTGCATAAGGCTGTTTTAGAGCTA | 23768 |
| SpRY_ | CCGTGC | | CGGCCTG | | GATGGTCA | | GAAATAGCAAGTTAAAATAAGGCTAGTCCGTT | |
| ED18- | ATAAGG | | | | GCACAGC | | ATCAACTTGAAAAAGTGGCACCGAGTCGGTGC | |
| _G_5FE_ | CT | | | | | | TTTCTcGTCGATGGTCAGCACAGCCTTATGCAC | |
| PB15 | | | | | | | GGCCTG | |
| pU6_A1AT_ | TCCAGG | 21339 | CTTATGCA | 22149 | TTTCTcGTC | 22959 | TCCAGGCCGTGCATAAGGCTGTTTTAGAGCTA | 23769 |
| SpRY_ | CCGTGC | | CGGCCT | | GATGGTCA | | GAAATAGCAAGTTAAAATAAGGCTAGTCCGTT | |
| ED18- | ATAAGG | | | | GCACAGC | | ATCAACTTGAAAAAGTGGCACCGAGTCGGTGC | |
| _G_5FE_ | CT | | | | | | TTTCTCGTCGATGGTCAGCACAGCCTTATGCAC | |
| PB14 | | | | | | | GGCCT | |
| pU6_A1AT_ | TCCAGG | 21340 | CTTATGCA | 22150 | TTTCTcGTC | 22960 | TCCAGGCCGTGCATAAGGCTGTTTTAGAGCTA | 23770 |
| SpRY_ | CCGTGC | | CGGCC | | GATGGTCA | | GAAATAGCAAGTTAAAATAAGGCTAGTCCGTT | |
| ED18- | ATAAGG | | | | GCACAGC | | ATCAACTTGAAAAAGTGGCACCGAGTCGGTGC | |
| _G_5FE_ | CT | | | | | | TTTCTCGTCGATGGTCAGCACAGCCTTATGCAC | |
| PB13 | | | | | | | GGCC | |
| pU6_A1AT_ | TCCAGG | 21341 | CTTATGCA | 22151 | TTTCTCGTC | 22961 | TCCAGGCCGTGCATAAGGCTGTTTTAGAGCTA | 23771 |
| SpRY_ | CCGTGC | | CGGC | | GATGGTCA | | GAAATAGCAAGTTAAAATAAGGCTAGTCCGTT | |
| ED18- | ATAAGG | | | | GCACAGC | | ATCAACTTGAAAAAGTGGCACCGAGTCGGTGC | |
| _G_5FE_ | CT | | | | | | TTTCTcGTCGATGGTCAGCACAGCCTTATGCAC | |
| PB12 | | | | | | | GGC | |
| pU6_A1AT_ | TCCAGG | 21342 | CTTATGCA | 22152 | TTTCTcGTC | 22962 | TCCAGGCCGTGCATAAGGCTGTTTTAGAGCTA | 23772 |
| SpRY_ | CCGTGC | | CGG | | GATGGTCA | | GAAATAGCAAGTTAAAATAAGGCTAGTCCGTT | |
| ED18- | ATAAGG | | | | GCACAGC | | ATCAACTTGAAAAAGTGGCACCGAGTCGGTGC | |
| _G_5FE_ | CT | | | | | | TTTCTCGTCGATGGTCAGCACAGCCTTATGCAC | |
| PB11 | | | | | | | GG | |
| pU6_A1AT_ | TCCAGG | 21343 | CTTATGCA | 22153 | TTTCTCGTC | 22963 | TCCAGGCCGTGCATAAGGCTGTTTTAGAGCTA | 23773 |
| SpRY_ | CCGTGC | | CG | | GATGGTCA | | GAAATAGCAAGTTAAAATAAGGCTAGTCCGTT | |
| ED18- | ATAAGG | | | | GCACAGC | | ATCAACTTGAAAAAGTGGCACCGAGTCGGTGC | |
| _G_5FE_ | CT | | | | | | TTTCTcGTCGATGGTCAGCACAGCCTTATGCAC | |
| PB10 | | | | | | | G | |
| pU6_A1AT_ | TCCAGG | 21344 | CTTATGCA | | TTTCTcGTC | 22964 | TCCAGGCCGTGCATAAGGCTGTTTTAGAGCTA | 23774 |
| SpRY_ | CCGTGC | | C | | GATGGTCA | | GAAATAGCAAGTTAAAATAAGGCTAGTCCGTT | |
| ED18- | ATAAGG | | | | GCACAGC | | ATCAACTTGAAAAAGTGGCACCGAGTCGGTGC | |
| _G_5FE_ | CT | | | | | | TTTCTCGTCGATGGTCAGCACAGCCTTATGCAC | |
| PB9 | | | | | | | | |
| pU6_A1AT_ | TCCAGG | 21345 | CTTATGCA | | TTTCTcGTC | 22965 | TCCAGGCCGTGCATAAGGCTGTTTTAGAGCTA | 23775 |
| SpRY_ | CCGTGC | | | | GATGGTCA | | GAAATAGCAAGTTAAAATAAGGCTAGTCCGTT | |
| ED18- | ATAAGG | | | | GCACAGC | | ATCAACTTGAAAAAGTGGCACCGAGTCGGTGC | |
| _G_5FE_ | CT | | | | | | TTTCTCGTCGATGGTCAGCACAGCCTTATGCA | |
| PB8 | | | | | | | | |
| pU6_A1AT_ | TCCAGG | 21346 | CTTATGCA | 22156 | TCTcGTCGA | 22966 | TCCAGGCCGTGCATAAGGCTGTTTTAGAGCTA | 23776 |
| SpRY_ | CCGTGC | | CGGCCTGG | | TGGTCAGCA | | GAAATAGCAAGTTAAAATAAGGCTAGTCCGTT | |
| ED18- | ATAAGG | | A | | CAGC | | ATCAACTTGAAAAAGTGGCACCGAGTCGGTGC | |
| _G_3FE_ | CT | | | | | | TCTcGTCGATGGTCAGCACAGCCTTATGCACG | |
| PB17 | | | | | | | GCCTGGA | |
| pU6_A1AT_ | TCCAGG | 21347 | CTTATGCA | 22157 | TCTcGTCGA | 22967 | TCCAGGCCGTGCATAAGGCTGTTTTAGAGCTA | 23777 |
| SpRY_ | CCGTGC | | CGGCCTGG | | TGGTCAGCA | | GAAATAGCAAGTTAAAATAAGGCTAGTCCGTT | |
| ED18- | ATAAGG | | | | CAGC | | ATCAACTTGAAAAAGTGGCACCGAGTCGGTGC | |
| _G_3FE_ | CT | | | | | | TCTcGTCGATGGTCAGCACAGCCTTATGCACG | |
| PB16 | | | | | | | GCCTGG | |
| pU6_A1AT_ | TCCAGG | 21348 | CTTATGCA | 22158 | TCTcGTCGA | 22968 | TCCAGGCCGTGCATAAGGCTGTTTTAGAGCTA | 23778 |
| SpRY_ | CCGTGC | | CGGCCTG | | TGGTCAGCA | | GAAATAGCAAGTTAAAATAAGGCTAGTCCGTT | |
| ED18- | ATAAGG | | | | CAGC | | ATCAACTTGAAAAAGTGGCACCGAGTCGGTGC | |
| _G_3FE_ | CT | | | | | | TCTcGTCGATGGTCAGCACAGCCTTATGCACG | |
| PB15 | | | | | | | GCCTG | |
| pU6_A1AT_ | TCCAGG | 21349 | CTTATGCA | 22159 | TCTcGTCGA | 22969 | TCCAGGCCGTGCATAAGGCTGTTTTAGAGCTA | 23779 |
| SpRY_ | CCGTGC | | CGGCCT | | TGGTCAGCA | | GAAATAGCAAGTTAAAATAAGGCTAGTCCGTT | |
| ED18- | ATAAGG | | | | CAGC | | ATCAACTTGAAAAAGTGGCACCGAGTCGGTGC | |
| _G_3FE_ | CT | | | | | | TCTcGTCGATGGTCAGCACAGCCTTATGCACG | |
| PB14 | | | | | | | GCCT | |
| pU6_A1AT_ | TCCAGG | 21350 | CTTATGCA | 22160 | TCTcGTCGA | 22970 | TCCAGGCCGTGCATAAGGCTGTTTTAGAGCTA | 23780 |
| SpRY_ | CCGTGC | | CGGCC | | TGGTCAGCA | | GAAATAGCAAGTTAAAATAAGGCTAGTCCGTT | |
| ED18- | ATAAGG | | | | CAGC | | ATCAACTTGAAAAAGTGGCACCGAGTCGGTGC | |
| _G_3FE_ | CT | | | | | | TCTcGTCGATGGTCAGCACAGCCTTATGCACG | |
| PB13 | | | | | | | GCC | |
| pU6_A1AT_ | TCCAGG | 21351 | CTTATGCA | 22161 | TCTcGTCGA | 22971 | TCCAGGCCGTGCATAAGGCTGTTTTAGAGCTA | 23781 |
| SpRY_ | CCGTGC | | CGGC | | TGGTCAGCA | | GAAATAGCAAGTTAAAATAAGGCTAGTCCGTT | |
| ED18- | ATAAGG | | | | CAGC | | ATCAACTTGAAAAAGTGGCACCGAGTCGGTGC | |
| _G_3FE_ | CT | | | | | | TCTcGTCGATGGTCAGCACAGCCTTATGCACG | |
| PB12 | | | | | | | GC | |
| pU6_A1AT_ | TCCAGG | 21352 | CTTATGCA | 22162 | TCTcGTCGA | 22972 | TCCAGGCCGTGCATAAGGCTGTTTTAGAGCTA | 23782 |
| SpRY_ | CCGTGC | | CGG | | TGGTCAGCA | | GAAATAGCAAGTTAAAATAAGGCTAGTCCGTT | |
| ED18- | ATAAGG | | | | CAGC | | ATCAACTTGAAAAAGTGGCACCGAGTCGGTGC | |
| _G_3FE_ | CT | | | | | | TCTcGTCGATGGTCAGCACAGCCTTATGCACG | |
| PB11 | | | | | | | G | |
| pU6_A1AT_ | TCCAGG | 21353 | CTTATGCA | 22163 | TCTcGTCGA | 22973 | TCCAGGCCGTGCATAAGGCTGTTTTAGAGCTA | 23783 |
| SpRY_ | CCGTGC | | CG | | TGGTCAGCA | | GAAATAGCAAGTTAAAATAAGGCTAGTCCGTT | |
| ED18- | ATAAGG | | | | CAGC | | ATCAACTTGAAAAAGTGGCACCGAGTCGGTGC | |
| _G_3FE_ | CT | | | | | | TCTcGTCGATGGTCAGCACAGCCTTATGCACG | |
| PB10 | | | | | | | | |
| pU6_A1AT_ | TCCAGG | 21354 | CTTATGCA | | TCTcGTCGA | 22974 | TCCAGGCCGTGCATAAGGCTGTTTTAGAGCTA | 23784 |
| SpRY_ | CCGTGC | | C | | TGGTCAGCA | | GAAATAGCAAGTTAAAATAAGGCTAGTCCGTT | |
| ED18- | ATAAGG | | | | CAGC | | ATCAACTTGAAAAAGTGGCACCGAGTCGGTGC | |
| _G_3FE_ | CT | | | | | | TCTcGTCGATGGTCAGCACAGCCTTATGCAC | |
| PB9 | | | | | | | | |
| pU6_A1AT_ | TCCAGG | 21355 | CTTATGCA | | TCTcGTCGA | 22975 | TCCAGGCCGTGCATAAGGCTGTTTTAGAGCTA | 23785 |
| SpRY_ | CCGTGC | | | | TGGTCAGCA | | GAAATAGCAAGTTAAAATAAGGCTAGTCCGTT | |
| ED18- | ATAAGG | | | | CAGC | | ATCAACTTGAAAAAGTGGCACCGAGTCGGTGC | |
| _G_3FE_ | CT | | | | | | TCTcGTCGATGGTCAGCACAGCCTTATGCA | |
| PB8 | | | | | | | | |

[0533] The template RNA sequences shown in Tables 1-4, 5, 6A, and 6B may be customized depending on the cell being targeted. For example, in some embodiments it is desired to inactivate a PAM sequence upon editing (e.g., using a “PAM-kill” modification) to decrease the potential for further gene editing (e.g., by Cas retargeting) following the initial edit. Consequently, certain template RNAs described herein are designed to write a mutation (e.g., a substitution) into the PAM of the target site, such that upon editing, the PAM site will be mutated to a sequence no longer recognized by the gene modifying polypeptide. Thus, a mutation region within the heterologous object sequence of the template RNA may comprise a PAM-kill sequence. Without wishing to be bound by theory, in some embodiments, a PAM-kill sequence prevents re-engagement of the gene modifying polypeptide upon completion of a gene modification, or decreases re-engagement relative to a template RNA lacking a PAM-kill sequence. In some embodiments, a PAM-kill sequence does not alter the amino acid sequence encoded by a gene, e.g., the PAM-kill sequence results in a silent mutation. In other embodiments, it is desired to leave the PAM sequence intact (no PAM-kill).

[0534] Similarly, in some embodiments, to decrease the potential for further gene editing (e.g., by Cas retargeting) following the initial edit, it may be desirable to alter the first three nucleotides of the RT template sequence via a “seed-kill” motif. Consequently, certain template RNAs described herein are designed to write a mutation (e.g., a substitution) into the portion of the target site corresponding to the first three nucleotides of the RT template sequence, such that upon editing, the target site will be mutated to a sequence with lower homology to the RT template sequence. Thus, a mutation region within the heterologous object sequence of the template RNA may comprise a seed-kill sequence. Without wishing to be bound by theory, in some embodiments, a seed-kill sequence prevents re-engagement of the gene modifying polypeptide upon completion of genetic modification, or decreases re-engagement relative to an otherwise similar template RNA lacking a seed-kill sequence. In some embodiments, a seed-kill sequence does not alter the amino acid sequence encoded by a gene, e.g., the seed-kill sequence results in a silent mutation. In other embodiments, it is desired to leave the seed region intact, and a seed-kill sequence is not used.

[0535] In further embodiments, to optimize or improve gene editing efficiency, it may be desirable to evade the target cell's mismatch repair or nucleotide repair pathways or to bias the target cell's repair pathways toward preservation of the edited strand. In some embodiments, multiple silent mutations (for example, silent substitutions) may be introduced within the RT template sequence to evade the target cell's mismatch repair or nucleotide repair pathways or to bias the target cell's repair pathways toward preservation of the edited strand.

[0536] Table 7B provides exemplary silent mutations for various positions within the SERPINA1 gene.

TABLE 7B
Exemplary Silent Mutation Codons for the SERPINA1 Gene

| Amino Acid | | | | | | | | |
|---|---|---|---|---|---|---|---|---|
| Position | WT | | | | | | | |
| (counting | Amino | WT | | | | | | |
| initial Met) | Acid | Codon | ALL_CODONS | | | | | |
| 356 | A | GCC | GCT | GCC | GCA | GCG | | |
| 357 | V | GTG | GTT | GTC | GTA | GTG | | |
| 358 | H | CAT | CAT | CAC | | | | |
| 359 | K | AAG | AAA | AAG | | | | |
| 360 | A | GCT | GCT | GCC | GCA | GCG | | |
| 361 | V | GTG | GTT | GTC | GTA | GTG | | |
| 362 | L | CTG | TTA | TTG | CTT | CTC | CTA | CTG |
| 363 | T | ACC | ACT | ACC | ACA | ACG | | |
| 364 | I | ATC | ATA | ATT | ATC | | | |
| 365 | D | GAC | GAT | GAC | | | | |
| 367 | K | AAA | AAA | AAG | | | | |
| 368 | G | GGG | GGT | GGC | GGA | GGG | | |
| 369 | T | ACT | ACT | ACC | ACA | ACG | | |
| 370 | E | GAA | GAA | GAG | | | | |
| 371 | A | GCT | GCT | GCC | GCA | GCG | | |
| 372 | A | GCT | GCT | GCC | GCA | GCG | | |
| 373 | G | GGG | GGT | GGC | GGA | GGG | | |
| 374 | A | GCC | GCT | GCC | GCA | GCG | | |
| 375 | M | ATG | ATG | | | | | |
| 376 | F | TTT | TTT | TTC | | | | |
| 377 | L | TTA | TTA | TTG | CTT | CTC | CTA | CTG |
| 378 | E | GAG | GAA | GAG | | | | |
| 379 | A | GCC | GCT | GCC | GCA | GCG | | |
| 380 | I | ATA | ATA | ATT | ATC | | | |
| 381 | P | CCC | CCT | CCC | CCA | CCG | | |
| 382 | M | ATG | ATG | | | | | |
| 383 | S | TCT | TCT | TCC | TCA | TCG | AGT | AGC |
| 384 | I | ATC | ATA | ATT | ATC | | | |
| 385 | P | CCC | CCT | CCC | CCA | CCG | | |
| 386 | P | CCC | CCT | CCC | CCA | CCG | | |
| 387 | E | GAG | GAA | GAG | | | | |
| 388 | V | GTC | GTT | GTC | GTA | GTG | | |
| 389 | K | AAG | AAA | AAG | | | | |
| 390 | F | TTC | TTT | TTC | | | | |
| 391 | N | AAC | AAT | AAC | | | | |
| 392 | K | AAA | AAA | AAG | | | | |
| 393 | P | CCC | CCT | CCC | CCA | CCG | | |
| 394 | F | TTT | TTT | TTC | | | | |
| 395 | V | GTC | GTT | GTC | GTA | GTG | | |
| 396 | F | TTC | TTT | TTC | | | | |
| 397 | L | TTA | TTA | TTG | CTT | CTC | CTA | CTG |
| 398 | M | ATG | ATG | | | | | |
| 399 | I | ATT | ATA | ATT | ATC | | | |
| 400 | E | GAA | GAA | GAG | | | | |
| 401 | Q | CAA | CAA | CAG | | | | |
| 402 | N | AAT | AAT | AAC | | | | |
| 403 | T | ACC | ACT | ACC | ACA | ACG | | |
| 404 | K | AAG | AAA | AAG | | | | |
| 405 | S | TCT | TCT | TCC | TCA | TCG | AGT | AGC |
| 406 | P | CCC | CCT | CCC | CCA | CCG | | |
| 407 | L | CTC | TTA | TTG | CTT | CTC | CTA | CTG |
| 408 | F | TTC | TTT | TTC | | | | |
| 409 | M | ATG | ATG | | | | | |
| 410 | G | GGA | GGT | GGC | GGA | GGG | | |
| 411 | K | AAA | AAA | AAG | | | | |
| 412 | V | GTG | GTT | GTC | GTA | GTG | | |
| 413 | V | GTG | GTT | GTC | GTA | GTG | | |
| 414 | N | AAT | AAT | AAC | | | | |
| 415 | P | CCC | CCT | CCC | CCA | CCG | | |
| 416 | T | ACC | ACT | ACC | ACA | ACG | | |
| 417 | Q | CAA | CAA | CAG | | | | |
| 418 | K | AAA | AAA | AAG | | | | |
| 419 | * | TAA | TAA | TAG | TGA | | | |

[0537] In some embodiments, the template RNA comprises one or more silent mutations.

[0538] It should be understood that the silent mutations illustrated in Table 7B may be used individually or combined in any manner in a template RNA sequence described herein.

gRNAs with Inducible Activity

[0539] In some embodiments, a gRNA described herein (e.g., a gRNA that is part of a template RNA or a gRNA used for second strand nicking) has inducible activity. Inducible activity may be achieved by the template nucleic acid, e.g., template RNA, further comprising (in addition to the gRNA) a blocking domain, wherein the sequence of a portion of or all of the blocking domain is at least partially complementary to a portion or all of the gRNA. The blocking domain is thus capable of hybridizing or substantially hybridizing to a portion of or all of the gRNA. In some embodiments, the blocking domain and inducibly active gRNA are disposed on the template nucleic acid, e.g., template RNA, such that the gRNA can adopt a first conformation where the blocking domain is hybridized or substantially hybridized to the gRNA, and a second conformation where the blocking domain is not hybridized or not substantially hybridized to the gRNA. In some embodiments, in the first conformation the gRNA is unable to bind to the gene modifying polypeptide (e.g., the template nucleic acid binding domain, DNA binding domain, or endonuclease domain (e.g., a CRISPR/Cas protein)) or binds with substantially decreased affinity compared to an otherwise similar template RNA lacking the blocking domain. In some embodiments, in the second conformation the gRNA is able to bind to the gene modifying polypeptide (e.g., the template nucleic acid binding domain, DNA binding domain, or endonuclease domain (e.g., a CRISPR/Cas protein)). In some embodiments, whether the gRNA is in the first or second conformation can influence whether the DNA binding or endonuclease activities of the gene modifying polypeptide (e.g., of the CRISPR/Cas protein the gene modifying polypeptide comprises) are active.

[0540] In some embodiments, the gRNA that coordinates the second nick has inducible activity. In some embodiments, the gRNA that coordinates the second nick is induced after the template is reverse transcribed. In some embodiments, hybridization of the gRNA to the blocking domain can be disrupted using an opener molecule. In some embodiments, an opener molecule comprises an agent that binds to a portion or all of the gRNA or blocking domain and inhibits hybridization of the gRNA to the blocking domain. In some embodiments, the opener molecule comprises a nucleic acid, e.g., comprising a sequence that is partially or wholly complementary to the gRNA, blocking domain, or both. By choosing or designing an appropriate opener molecule, providing the opener molecule can promote a change in the conformation of the gRNA such that it can associate with a CRISPR/Cas protein and provide the associated functions of the CRISPR/Cas protein (e.g., DNA binding and/or endonuclease activity). Without wishing to be bound by theory, providing the opener molecule at a selected time and/or location may allow for spatial and temporal control of the activity of the gRNA, CRISPR/Cas protein, or gene modifying system comprising the same. In some embodiments, the opener molecule is exogenous to the cell comprising the gene modifying polypeptide and or template nucleic acid. In some embodiments, the opener molecule comprises an endogenous agent (e.g., endogenous to the cell comprising the gene modifying polypeptide and or template nucleic acid comprising the gRNA and blocking domain). For example, an inducible gRNA, blocking domain, and opener molecule may be chosen such that the opener molecule is an endogenous agent expressed in a target cell or tissue, e.g., thereby ensuring activity of a gene modifying system in the target cell or tissue. As a further example, an inducible gRNA, blocking domain, and opener molecule may be chosen such that the opener molecule is absent or not substantially expressed in one or more non-target cells or tissues, e.g., thereby ensuring that activity of a gene modifying system does not occur or substantially occur in the one or more non-target cells or tissues, or occurs at a reduced level compared to a target cell or tissue. Exemplary blocking domains, opener molecules, and uses thereof are described in PCT App. Publication WO2020044039A1, which is incorporated herein by reference in its entirety. In some embodiments, the template nucleic acid, e.g., template RNA, may comprise one or more sequences or structures for binding by one or more components of a gene modifying polypeptide, e.g., by a reverse transcriptase or RNA binding domain, and a gRNA. In some embodiments, the gRNA facilitates interaction with the template nucleic acid binding domain (e.g., RNA binding domain) of the gene modifying polypeptide. In some embodiments, the gRNA directs the gene modifying polypeptide to the matching target sequence, e.g., in a target cell genome.

### Circular RNAs and Ribozymes in Gene Modifying Systems

[0541] It is contemplated that it may be useful to employ circular and/or linear RNA states during the formulation, delivery, or gene modifying reaction within the target cell. Thus, in some embodiments of any of the aspects described herein, a gene modifying system comprises one or more circular RNAs (circRNAs). In some embodiments of any of the aspects described herein, a gene modifying system comprises one or more linear RNAs. In some embodiments, a nucleic acid as described herein (e.g., a template nucleic acid, a nucleic acid molecule encoding a gene modifying polypeptide, or both) is a circRNA. In some embodiments, a circular RNA molecule encodes the gene modifying polypeptide. In some embodiments, the circRNA molecule encoding the gene modifying polypeptide is delivered to a host cell. In some embodiments, a circular RNA molecule encodes a recombinase, e.g., as described herein. In some embodiments, the circRNA molecule encoding the recombinase is delivered to a host cell. In some embodiments, the circRNA molecule encoding the gene modifying polypeptide is linearized (e.g., in the host cell, e.g., in the nucleus of the host cell) prior to translation.

[0542] Circular RNAs (circRNAs) have been found to occur naturally in cells and have been found to have diverse functions, including both non-coding and protein coding roles in human cells. It has been shown that a circRNA can be engineered by incorporating a self-splicing intron into an RNA molecule (or DNA encoding the RNA molecule) that results in circularization of the RNA, and that an engineered circRNA can have enhanced protein production and stability (Wesselhoeft et al. Nature Communications 2018). In some embodiments, the gene modifying polypeptide is encoded as circRNA. In certain embodiments, the template nucleic acid is a DNA, such as a dsDNA or ssDNA. In certain embodiments, the circDNA comprises a template RNA.

[0543] In some embodiments, the circRNA comprises one or more ribozyme sequences. In some embodiments, the ribozyme sequence is activated for autocleavage, e.g., in a host cell, e.g., thereby resulting in linearization of the circRNA. In some embodiments, the ribozyme is activated when the concentration of magnesium reaches a sufficient level for cleavage, e.g., in a host cell. In some embodiments the circRNA is maintained in a low magnesium environment prior to delivery to the host cell. In some embodiments, the ribozyme is a protein-responsive ribozyme. In some embodiments, the ribozyme is a nucleic acid-responsive ribozyme. In some embodiments, the circRNA comprises a cleavage site. In some embodiments, the circRNA comprises a second cleavage site.

[0544] In some embodiments, the circRNA is linearized in the nucleus of a target cell. In some embodiments, linearization of a circRNA in the nucleus of a cell involves components present in the nucleus of the cell, e.g., to activate a cleavage event. In some embodiments, a ribozyme, e.g., a ribozyme from a B2 or ALU element, that is responsive to a nuclear element, e.g., a nuclear protein, e.g., a genome-interacting protein, e.g., an epigenetic modifier, e.g., EZH2, is incorporated into a circRNA, e.g., of a gene modifying system. In some embodiments, nuclear localization of the circRNA results in an increase in autocatalytic activity of the ribozyme and linearization of the circRNA.

[0545] In some embodiments, the ribozyme is heterologous to one or more of the other components of the gene modifying system. In some embodiments, an inducible ribozyme (e.g., in a circRNA as described herein) is created synthetically, for example, by utilizing a protein ligand-responsive aptamer design. A system for utilizing the satellite RNA of tobacco ringspot virus hammerhead ribozyme with an MS2 coat protein aptamer has been described (Kennedy et al. Nucleic Acids Res 42(19):12306-12321 (2014), incorporated herein by reference in its entirety) that results in activation of the ribozyme activity in the presence of the MS2 coat protein. In embodiments, such a system responds to protein ligand localized to the cytoplasm or the nucleus. In some embodiments the protein ligand is not MS2. Methods for generating RNA aptamers to target ligands have been described, for example, based on the systematic evolution of ligands by exponential enrichment (SELEX) (Tuerk and Gold, Science 249(4968):505-510 (1990); Ellington and Szostak, Nature 346(6287):818-822 (1990); the methods of each of which are incorporated herein by reference) and have, in some instances, been aided by in silico design (Bell et al. PNAS 117(15):8486-8493, the methods of which are incorporated herein by reference). Thus, in some embodiments, an aptamer for a target ligand is generated and incorporated into a synthetic ribozyme system, e.g., to trigger ribozyme-mediated cleavage and circRNA linearization, e.g., in the presence of the protein ligand. In some embodiments, circRNA linearization is triggered in the cytoplasm, e.g., using an aptamer that associates with a ligand in the cytoplasm. In some embodiments, circRNA linearization is triggered in the nucleus, e.g., using an aptamer that associates with a ligand in the nucleus. In embodiments, the ligand in the nucleus comprises an epigenetic modifier or a transcription factor. In some embodiments the ligand that triggers linearization is present at higher levels in on-target cells than off-target cells.

[0546] It is further contemplated that a nucleic acid-responsive ribozyme system can be employed for circRNA linearization. For example, biosensors that sense defined target nucleic acid molecules to trigger ribozyme activation are described, e.g., in Penchovsky (Biotechnology Advances 32(5):1015-1027 (2014), incorporated herein by reference). By these methods, a ribozyme naturally folds into an inactive state and is only activated in the presence of a defined target nucleic acid molecule (e.g., an RNA molecule). In some embodiments, a circRNA of a gene modifying system comprises a nucleic acid-responsive ribozyme that is activated in the presence of a defined target nucleic acid, e.g., an RNA, e.g., an mRNA, miRNA, guide RNA, gRNA, sgRNA, ncRNA, lncRNA, tRNA, snRNA, or mtRNA. In some embodiments the nucleic acid that triggers linearization is present at higher levels in on-target cells than off-target cells.

[0547] In some embodiments of any of the aspects herein, a gene modifying system incorporates one or more ribozymes with inducible specificity to a target tissue or target cell of interest, e.g., a ribozyme that is activated by a ligand or nucleic acid present at higher levels in a target tissue or target cell of interest. In some embodiments, the gene modifying system incorporates a ribozyme with inducible specificity to a subcellular compartment, e.g., the nucleus, nucleolus, cytoplasm, or mitochondria. In some embodiments, the ribozyme that is activated by a ligand or nucleic acid present at higher levels in the target subcellular compartment. In some embodiments, an RNA component of a gene modifying system is provided as circRNA, e.g., that is activated by linearization. In some embodiments, linearization of a circRNA encoding a gene modifying polypeptide activates the molecule for translation. In some embodiments, a signal that activates a circRNA component of a gene modifying system is present at higher levels in on-target cells or tissues, e.g., such that the system is specifically activated in these cells.

[0548] In some embodiments, an RNA component of a gene modifying system is provided as a circRNA that is inactivated by linearization. In some embodiments, a circRNA encoding the gene modifying polypeptide is inactivated by cleavage and degradation. In some embodiments, a circRNA encoding the gene modifying polypeptide is inactivated by cleavage that separates a translation signal from the coding sequence of the polypeptide. In some embodiments, a signal that inactivates a circRNA component of a gene modifying system is present at higher levels in off-target cells or tissues, such that the system is specifically inactivated in these cells.

### Target Nucleic Acid Site

[0549] In some embodiments, after gene modification, the target site surrounding the edited sequence contains a limited number of insertions or deletions, for example, in less than about 50% or 10% of editing events, e.g., as determined by long-read amplicon sequencing of the target site, e.g., as described in Karst et al. (2020) bioRxiv doi.org/10.1101/645903 (incorporated by reference herein in its entirety). In some embodiments, the target site does not show multiple consecutive editing events, e.g., head-to-tail or head-to-head duplications, e.g., as determined by long-read amplicon sequencing of the target site, e.g., as described in Karst et al. bioRxiv doi.org/10.1101/645903 (2020) (incorporated herein by reference in its entirety). In some embodiments, the target site contains an integrated sequence corresponding to the template RNA. In some embodiments, the target site does not contain insertions resulting from endogenous RNA in more than about 1% or 10% of events, e.g., as determined by long-read amplicon sequencing of the target site, e.g., as described in Karst et al. bioRxiv doi.org/10.1101/645903 (2020) (incorporated herein by reference in its entirety). In some embodiments, the target site contains the integrated sequence corresponding to the template RNA.

[0550] In certain aspects of the present invention, the host DNA-binding site integrated into by the gene modifying system can be in a gene, in an intron, in an exon, an ORF, outside of a coding region of any gene, in a regulatory region of a gene, or outside of a regulatory region of a gene. In other aspects, the polypeptide may bind to one or more than one host DNA sequence.

[0551] In some embodiments, a gene modifying system is used to edit a target locus in multiple alleles. In some embodiments, a gene modifying system is designed to edit a specific allele. For example, a gene modifying polypeptide may be directed to a specific sequence that is only present on one allele, e.g., comprises a template RNA with homology to a target allele, e.g., a gRNA or annealing domain, but not to a second cognate allele. In some embodiments, a gene modifying system can alter a haplotype-specific allele. In some embodiments, a gene modifying system that targets a specific allele preferentially targets that allele, e.g., has at least a 2, 4, 6, 8, or 10-fold preference for a target allele.

### Second Strand Nicking

[0552] In some embodiments, a gene modifying system described herein comprises a nickase activity (e.g., in the gene modifying polypeptide) that nicks the first strand, and a nickase activity (e.g., in a polypeptide separate from the gene modifying polypeptide) that nicks the second strand of target DNA. As discussed herein, without wishing to be bound by theory, nicking of the first strand of the target site DNA is thought to provide a 3′ OH that can be used by an RT domain to reverse transcribe a sequence of a template RNA, e.g., a heterologous object sequence. Without wishing to be bound by theory, it is thought that introducing an additional nick to the second strand may bias the cellular DNA repair machinery to adopt the heterologous object sequence-based sequence more frequently than the original genomic sequence. In some embodiments, the additional nick to the second strand is made by the same endonuclease domain (e.g., nickase domain) as the nick to the first strand. In some embodiments, the same gene modifying polypeptide performs both the nick to the first strand and the nick to the second strand. In some embodiments, the gene modifying polypeptide comprises a CRISPR/Cas domain and the additional nick to the second strand is directed by an additional nucleic acid, e.g., comprising a second gRNA directing the CRISPR/Cas domain to nick the second strand. In other embodiments, the additional second strand nick is made by a different endonuclease domain (e.g., nickase domain) than the nick to the first strand. In some embodiments, that different endonuclease domain is situated in an additional polypeptide (e.g., a system of the invention further comprises the additional polypeptide), separate from the gene modifying polypeptide. In some embodiments, the additional polypeptide comprises an endonuclease domain (e.g., nickase domain) described herein. In some embodiments, the additional polypeptide comprises a DNA binding domain, e.g., described herein.

[0553] It is contemplated herein that the position at which the second strand nick occurs relative to the first strand nick may influence the extent to which one or more of: desired gene modifying DNA modifications are obtained, undesired double-strand breaks (DSBs) occur, undesired insertions occur, or undesired deletions occur. Without wishing to be bound by theory, second strand nicking may occur in two general orientations: inward nicks and outward nicks.

[0554] In some embodiments, in the inward nick orientation, the RT domain polymerizes (e.g., using the template RNA (e.g., the heterologous object sequence)) away from the second strand nick. In some embodiments, in the inward nick orientation, the location of the nick to the first strand and the location of the nick to the second strand are positioned between the first PAM site and second PAM site (e.g., in a scenario wherein both nicks are made by a polypeptide (e.g., a gene modifying polypeptide) comprising a CRISPR/Cas domain). When there are two PAMs on the outside and two nicks on the inside, this inward nick orientation can also be referred to as “PAM-out”. In some embodiments, in the inward nick orientation, the location of the nick to the first strand and the location of the nick to the second strand are between the sites where the polypeptide and the additional polypeptide bind to the target DNA. In some embodiments, in the inward nick orientation, the location of the nick to the second strand is positioned between the binding sites of the polypeptide and additional polypeptide, and the nick to the first strand is also located between the binding sites of the polypeptide and additional polypeptide. In some embodiments, in the inward nick orientation, the location of the nick to the first strand and the location of the nick to the second strand are positioned between the PAM site and the binding site of the second polypeptide which is at a distance from the target site. An example of a gene modifying system that provides an inward nick orientation comprises a gene modifying polypeptide comprising a CRISPR/Cas domain, a template RNA comprising a gRNA that directs nicking of the target site DNA on the first strand, and an additional nucleic acid comprising an additional gRNA that directs nicking at a site a distance from the location of the first nick, wherein the location of the first nick and the location of the second nick are between the PAM sites of the sites to which the two gRNAs direct the gene modifying polypeptide. As a further example, another gene modifying system that provides an inward nick orientation comprises a gene modifying polypeptide comprising a zinc finger molecule and a first nickase domain wherein the zinc finger molecule binds to the target DNA in a manner that directs the first nickase domain to nick the first strand of the target site; an additional polypeptide comprising a CRISPR/Cas domain, and an additional nucleic acid comprising a gRNA that directs the additional polypeptide to nick a site a distance from the target site DNA on the second strand, wherein the location of the first nick and the location of the second nick are between the PAM site and the site to which the zinc finger molecule binds. As a further example, another gene modifying system that provides an inward nick orientation comprises a gene modifying polypeptide comprising a zinc finger molecule and a first nickase domain wherein the zinc finger molecule binds to the target DNA in a manner that directs the first nickase domain to nick the first strand of the target site; an additional polypeptide comprising a TAL effector molecule and a second nickase domain wherein the TAL effector molecule binds to a site a distance from the target site in a manner that directs the additional polypeptide to nick the second strand, wherein the location of the first nick and the location of the second nick are between the site to which the TAL effector molecule binds and the site to which the zinc finger molecule binds.

[0555] In some embodiments, in the outward nick orientation, the RT domain polymerizes (e.g., using the template RNA (e.g., the heterologous object sequence)) toward the second strand nick. In some embodiments, in the outward nick orientation when both the first and second nicks are made by a polypeptide comprising a CRISPR/Cas domain (e.g., a gene modifying polypeptide), the first PAM site and second PAM site are positioned between the location of the nick to the first strand and the location of the nick to the second strand. When there are two PAMs on the inside and two nicks on the outside, this outward nick orientation also can be referred to as “PAM-in”. In some embodiments, in the outward nick orientation, the polypeptide (e.g., the gene modifying polypeptide) and the additional polypeptide bind to sites on the target DNA between the location of the nick to the first strand and the location of the nick to the second. In some embodiments, in the outward nick orientation, the location of the nick to the second strand is positioned on the opposite side of the binding sites of the polypeptide and additional polypeptide relative to the location of the nick to the first strand. In some embodiments, in the outward orientation, the PAM site and the binding site of the second polypeptide which is at a distance from the target site are positioned between the location of the nick to the first strand and the location of the nick to the second strand.

[0556] An example of a gene modifying system that provides an outward nick orientation comprises a gene modifying polypeptide comprising a CRISPR/Cas domain, a template RNA comprising a gRNA that directs nicking of the target site DNA on the first strand, and an additional nucleic acid comprising an additional gRNA that directs nicking at a site a distance from the location of the first nick, wherein the location of the first nick and the location of the second nick are outside of the PAM sites of the sites to which the two gRNAs direct the gene modifying polypeptide (i.e., the PAM sites are between the location of the first nick and the location of the second nick). As a further example, another gene modifying system that provides an outward nick orientation comprises a gene modifying polypeptide comprising a zinc finger molecule and a first nickase domain wherein the zinc finger molecule binds to the target DNA in a manner that directs the first nickase domain to nick the first strand of the target site; an additional polypeptide comprising a CRISPR/Cas domain, and an additional nucleic acid comprising a gRNA that directs the additional polypeptide to nick a site a distance from the target site DNA on the second strand, wherein the location of the first nick and the location of the second nick are outside the PAM site and the site to which the zinc finger molecule binds (i.e., the PAM site and the site to which the zinc finger molecule binds are between the location of the first nick and the location of the second nick). As a further example, another gene modifying system that provides an outward nick orientation comprises a gene modifying polypeptide comprising a zinc finger molecule and a first nickase domain wherein the zinc finger molecule binds to the target DNA in a manner that directs the first nickase domain to nick the first strand of the target site; an additional polypeptide comprising a TAL effector molecule and a second nickase domain wherein the TAL effector molecule binds to a site a distance from the target site in a manner that directs the additional polypeptide to nick the second strand, wherein the location of the first nick and the location of the second nick are outside the site to which the TAL effector molecule binds and the site to which the zinc finger molecule binds (i.e., the site to which the TAL effector molecule binds and the site to which the zinc finger molecule binds are between the location of the first nick and the location of the second nick).

[0557] Without wishing to be bound by theory, it is thought that, for gene modifying systems where a second strand nick is provided, an outward nick orientation is preferred in some embodiments. As is described herein, an inward nick may produce a higher number of double-strand breaks (DSBs) than an outward nick orientation. DSBs may be recognized by the DSB repair pathways in the nucleus of a cell, which can result in undesired insertions and deletions. An outward nick orientation may provide a decreased risk of DSB formation, and a corresponding lower amount of undesired insertions and deletions. In some embodiments, undesired insertions and deletions are insertions and deletions not encoded by the heterologous object sequence, e.g., an insertion or deletion produced by the double-strand break repair pathway unrelated to the modification encoded by the heterologous object sequence. In some embodiments, a desired gene modification comprises a change to the target DNA (e.g., a substitution, insertion, or deletion) encoded by the heterologous object sequence (e.g., and achieved by the gene modifying writing the heterologous object sequence into the target site). In some embodiments, the first strand nick and the second strand nick are in an outward orientation.

[0558] In addition, the distance between the first strand nick and second strand nick may influence the extent to which one or more of: desired gene modifying system DNA modifications are obtained, undesired double-strand breaks (DSBs) occur, undesired insertions occur, or undesired deletions occur. Without wishing to be bound by theory, it is thought the second strand nick benefit, the biasing of DNA repair toward incorporation of the heterologous object sequence into the target DNA, increases as the distance between the first strand nick and second strand nick decreases. However, it is thought that the risk of DSB formation also increases as the distance between the first strand nick and second strand nick decreases. Correspondingly, it is thought that the number of undesired insertions and/or deletions may increase as the distance between the first strand nick and second strand nick decreases. In some embodiments, the distance between the first strand nick and second strand nick is chosen to balance the benefit of biasing DNA repair toward incorporation of the heterologous object sequence into the target DNA and the risk of DSB formation and of undesired deletions and/or insertions. In some embodiments, a system where the first strand nick and the second strand nick are at least a threshold distance apart has an increased level of desired gene modifying system modification outcomes, a decreased level of undesired deletions, and/or a decreased level of undesired insertions relative to an otherwise similar inward nick orientation system where the first nick and the second nick are less than the a threshold distance apart. In some embodiments the threshold distance(s) is given below.

[0559] In some embodiments, the first nick and the second nick are at least 20, 25, 30, 35, 40, 45, 50, 55, 60, 65, 70, 75, 80, 85, 90, 95, 100, 110, 120, 130, 140, 150, 160, 170, 180, 190, or 200 nucleotides apart. In some embodiments, the first nick and the second nick are no more than 25, 30, 35, 40, 45, 50, 55, 60, 65, 70, 75, 80, 85, 90, 95, 100, 110, 120, 130, 140, 150, 160, 170, 180, 190, 200, or 250 nucleotides apart. In some embodiments, the first nick and the second nick are 20-200, 30-200, 40-200, 50-200, 60-200, 70-200, 80-200, 90-200, 100-200, 110-200, 120-200, 130-200, 140-200, 150-200, 160-200, 170-200, 180-200, 190-200, 20-190, 30-190, 40-190, 50-190, 60-190, 70-190, 80-190, 90-190, 100-190, 110-190, 120-190, 130-190, 140-190, 150-190, 160-190, 170-190, 180-190, 20-180, 30-180, 40-180, 50-180, 60-180, 70-180, 80-180, 90-180, 100-180, 110-180, 120-180, 130-180, 140-180, 150-180, 160-180, 170-180, 20-170, 30-170, 40-170, 50-170, 60-170, 70-170, 80-170, 90-170, 100-170, 110-170, 120-170, 130-170, 140-170, 150-170, 160-170, 20-160, 30-160, 40-160, 50-160, 60-160, 70-160, 80-160, 90-160, 100-160, 110-160, 120-160, 130-160, 140-160, 150-160, 20-150, 30-150, 40-150, 50-150, 60-150, 70-150, 80-150, 90-150, 100-150, 110-150, 120-150, 130-150, 140-150, 20-140, 30-140, 40-140, 50-140, 60-140, 70-140, 80-140, 90-140, 100-140, 110-140, 120-140, 130-140, 20-130, 30-130, 40-130, 50-130, 60-130, 70-130, 80-130, 90-130, 100-130, 110-130, 120-130, 20-120, 30-120, 40-120, 50-120, 60-120, 70-120, 80-120, 90-120, 100-120, 110-120, 20-110, 30-110, 40-110, 50-110, 60-110, 70-110, 80-110, 90-110, 100-110, 20-100, 30-100, 40-100, 50-100, 60-100, 70-100, 80-100, 90-100, 20-90, 30-90, 40-90, 50-90, 60-90, 70-90, 80-90, 20-80, 30-80, 40-80, 50-80, 60-80, 70-80, 20-70, 30-70, 40-70, 50-70, 60-70, 20-60, 30-60, 40-60, 50-60, 20-50, 30-50, 40-50, 20-40, 30-40, or 20-30 nucleotides apart. In some embodiments, the first nick and the second nick are 40-100 nucleotides apart.

[0560] Without wishing to be bound by theory, it is thought that, for gene modifying systems where a second strand nick is provided and an inward nick orientation is selected, increasing the distance between the first strand nick and second strand nick may be preferred. As is described herein, an inward nick orientation may produce a higher number of DSBs than an outward nick orientation, and may result in a higher amount of undesired insertions and deletions than an outward nick orientation, but increasing the distance between the nicks may mitigate that increase in DSBs, undesired deletions, and/or undesired insertions. In some embodiments, an inward nick orientation wherein the first nick and the second nick are at least a threshold distance apart has an increased level of desired gene modifying system modification outcomes, a decreased level of undesired deletions, and/or a decreased level of undesired insertions relative to an otherwise similar inward nick orientation system where the first nick and the second nick are less than the a threshold distance apart. In some embodiments the threshold distance is given below.

[0561] In some embodiments, the first strand nick and the second strand nick are in an inward orientation. In some embodiments, the first strand nick and the second strand nick are in an inward orientation and the first strand nick and second strand nick are at least 100, 110, 120, 130, 140, 150, 160, 170, 180, 190, 200, 220, 240, 260, 280, 300, 350, 400, 450, or 500 nucleotides apart, e.g., at least 100 nucleotides apart, (and optionally no more than 500, 400, 300, 200, 190, 180, 170, 160, 150, 140, 130, or 120 nucleotides apart). In some embodiments, the first strand nick and the second strand nick are in an inward orientation and the first strand nick and second strand nick are 100-200, 110-200, 120-200, 130-200, 140-200, 150-200, 160-200, 170-200, 180-200, 190-200, 100-190, 110-190, 120-190, 130-190, 140-190, 150-190, 160-190, 170-190, 180-190, 100-180, 110-180, 120-180, 130-180, 140-180, 150-180, 160-180, 170-180, 100-170, 110-170, 120-170, 130-170, 140-170, 150-170, 160-170, 100-160, 110-160, 120-160, 130-160, 140-160, 150-160, 100-150, 110-150, 120-150, 130-150, 140-150, 100-140, 110-140, 120-140, 130-140, 100-130, 110-130, 120-130, 100-120, 110-120, or 100-110 nucleotides apart.

### Chemically Modified Nucleic Acids and Nucleic Acid End Features

[0562] A nucleic acid described herein (e.g., a template nucleic acid, e.g., a template RNA; or a nucleic acid (e.g., mRNA) encoding a gene modifying polypeptide; or a gRNA) can comprise unmodified or modified nucleobases. Naturally occurring RNAs are synthesized from four basic ribonucleotides: ATP, CTP, UTP and GTP, but may contain post-transcriptionally modified nucleotides. Further, approximately one hundred different nucleoside modifications have been identified in RNA (Rozenski, J, Crain, P, and McCloskey, J. (1999). The RNA Modification Database: 1999 update. Nucl Acids Res 27: 196-197). An RNA can also comprise wholly synthetic nucleotides that do not occur in nature.

[0563] In some embodiments, the chemical modification is one provided in WO/2016/183482, US Pat. Pub. No. 20090286852, of International Application No. WO/2012/019168, WO/2012/045075, WO/2012/135805, WO/2012/158736, WO/2013/039857, WO/2013/039861, WO/2013/052523, WO/2013/090648, WO/2013/096709, WO/2013/101690, WO/2013/106496, WO/2013/130161, WO/2013/151669, WO/2013/151736, WO/2013/151672, WO/2013/151664, WO/2013/151665, WO/2013/151668, WO/2013/151671, WO/2013/151667, WO/2013/151670, WO/2013/151666, WO/2013/151663, WO/2014/028429, WO/2014/081507, WO/2014/093924, WO/2014/093574, WO/2014/113089, WO/2014/144711, WO/2014/144767, WO/2014/144039, WO/2014/152540, WO/2014/152030, WO/2014/152031, WO/2014/152027, WO/2014/152211, WO/2014/158795, WO/2014/159813, WO/2014/164253, WO/2015/006747, WO/2015/034928, WO/2015/034925, WO/2015/038892, WO/2015/048744, WO/2015/051214, WO/2015/051173, WO/2015/051169, WO/2015/058069, WO/2015/085318, WO/2015/089511, WO/2015/105926, WO/2015/164674, WO/2015/196130, WO/2015/196128, WO/2015/196118, WO/2016/011226, WO/2016/011222, WO/2016/011306, WO/2016/014846, WO/2016/022914, WO/2016/036902, WO/2016/077125, or WO/2016/077123, each of which is herein incorporated by reference in its entirety. It is understood that incorporation of a chemically modified nucleotide into a polynucleotide can result in the modification being incorporated into a nucleobase, the backbone, or both, depending on the location of the modification in the nucleotide. In some embodiments, the backbone modification is one provided in EP 2813570, which is herein incorporated by reference in its entirety. In some embodiments, the modified cap is one provided in US Pat. Pub. No. 20050287539, which is herein incorporated by reference in its entirety.

[0564] In some embodiments, the chemically modified nucleic acid (e.g., RNA, e.g., mRNA) comprises one or more of ARCA: anti-reverse cap analog (m27.3′-OGP3G), GP3G (Unmethylated Cap Analog), m7GP3G (Monomethylated Cap Analog), m32.2.7GP3G (Trimethylated Cap Analog), m5CTP (5′-methyl-cytidine triphosphate), m6ATP (N6-methyl-adenosine-5″-triphosphate), s2UTP (2-thio-uridine triphosphate), and Ψ (pseudouridine triphosphate).

[0565] In some embodiments, the chemically modified nucleic acid comprises a 5′ cap, e.g.: a 7-methylguanosine cap (e.g., a O-Me-m7G cap); a hypermethylated cap analog; an NAD+-derived cap analog (e.g., as described in Kiledjian, Trends in Cell Biology 28, 454-464 (2018)); or a modified, e.g., biotinylated, cap analog (e.g., as described in Bednarek et al., Phil Trans R Soc B 373, 20180167 (2018)).

[0566] In some embodiments, the chemically modified nucleic acid comprises a 3′ feature selected from one or more of: a polyA tail; a 16-nucleotide long stem-loop structure flanked by unpaired 5 nucleotides (e.g., as described by Mannironi et al., Nucleic Acid Research 17, 9113-9126 (1989)); a triple-helical structure (e.g., as described by Brown et al., PNAS 109, 19202-19207 (2012)); a tRNA, Y RNA, or vault RNA structure (e.g., as described by Labno et al., Biochemica et Biophysica Acta 1863, 3125-3147 (2016)); incorporation of one or more deoxyribonucleotide triphosphates (dNTPs), 2′O-Methylated NTPs, or phosphorothioate-NTPs; a single nucleotide chemical modification (e.g., oxidation of the 3′ terminal ribose to a reactive aldehyde followed by conjugation of the aldehyde-reactive modified nucleotide); or chemical ligation to another nucleic acid molecule.

[0567] In some embodiments, the nucleic acid (e.g., template nucleic acid) comprises one or more modified nucleotides, e.g., selected from dihydrouridine, inosine, 7-methylguanosine, 5-methylcytidine (5mC), 5′ Phosphate ribothymidine, 2′-O-methyl ribothymidine, 2′-O-ethyl ribothymidine, 2′-fluoro ribothymidine, C-5 propynyl-deoxycytidine (pdC), C-5 propynyl-deoxyuridine (pdU), C-5 propynyl-cytidine (pC), C-5 propynyl-uridine (pU), 5-methyl cytidine, 5-methyl uridine, 5-methyl deoxycytidine, 5-methyl deoxyuridine methoxy, 2,6-diaminopurine, 5′-Dimethoxytrityl-N4-ethyl-2′-deoxycytidine, C-5 propynyl-f-cytidine (pfC), C-5 propynyl-f-uridine (pfU), 5-methyl f-cytidine, 5-methyl f-uridine, C-5 propynyl-m-cytidine (pmC), C-5 propynyl-f-uridine (pmU), 5-methyl m-cytidine, 5-methyl m-uridine, LNA (locked nucleic acid), MGB (minor groove binder) pseudouridine (T), 1-N-methylpseudouridine (1-Me-′P), or 5-methoxyuridine (S-MO-U).

[0568] In some embodiments, the nucleic acid comprises a backbone modification, e.g., a modification to a sugar or phosphate group in the backbone. In some embodiments, the nucleic acid comprises a nucleobase modification.

[0569] In some embodiments, the nucleic acid comprises one or more chemically modified nucleotides of Table 13, one or more chemical backbone modifications of Table 14, one or more chemically modified caps of Table 15. For instance, in some embodiments, the nucleic acid comprises two or more (e.g., 3, 4, 5, 6, 7, 8, 9, or 10 or more) different types of chemical modifications. As an example, the nucleic acid may comprise two or more (e.g., 3, 4, 5, 6, 7, 8, 9, or 10 or more) different types of modified nucleobases, e.g., as described herein, e.g., in Table 13. Alternatively or in combination, the nucleic acid may comprise two or more (e.g., 3, 4, 5, 6, 7, 8, 9, or 10 or more) different types of backbone modifications, e.g., as described herein, e.g., in Table 14. Alternatively or in combination, the nucleic acid may comprise one or more modified cap, e.g., as described herein, e.g., in Table 15. For instance, in some embodiments, the nucleic acid comprises one or more type of modified nucleobase and one or more type of backbone modification; one or more type of modified nucleobase and one or more modified cap; one or more type of modified cap and one or more type of backbone modification; or one or more type of modified nucleobase, one or more type of backbone modification, and one or more type of modified cap.

[0570] In some embodiments, the nucleic acid comprises one or more (e.g., 2, 3, 4, 5, 6, 7, 8, 9, 10, 20, 30, 40, 50, 60, 70, 80, 90, 100, 150, 200, 250, 300, 350, 400, 450, 500, 600, 700, 800, 900, 1000, or more) modified nucleobases. In some embodiments, all nucleobases of the nucleic acid are modified. In some embodiments, the nucleic acid is modified at one or more (e.g., 2, 3, 4, 5, 6, 7, 8, 9, 10, 20, 30, 40, 50, 60, 70, 80, 90, 100, 150, 200, 250, 300, 350, 400, 450, 500, 600, 700, 800, 900, 1000, or more) positions in the backbone. In some embodiments, all backbone positions of the nucleic acid are modified.

TABLE 13
Modified nucleotides

| | |
|---|---|
| 5-aza-uridine | N2-methyl-6-thio-guanosine |
| 2-thio-5-aza-midine | N2,N2-dimethyl-6-thio-guanosine |
| 2-thiouridine | pyridin-4-one ribonucleoside |
| 4-thio-pseudouridine | 2-thio-5-aza-uridine |
| 2-thio-pseudouridine | 2-thiomidine |
| 5-hydroxyuridine | 4-thio-pseudomidine |
| 3-methyluridine | 2-thio-pseudowidine |
| 5-carboxymethyl-uridine | 3-methylmidine |
| 1-carboxymethyl-pseudouridine | 1-propynyl-pseudomidine |
| 5-propynyl-uridine | 1-methyl-1-deaza-pseudomidine |
| 1-propynyl-pseudouridine | 2-thio-1-methyl-1-deaza-pseudouridine |
| 5-taurinomethyluridine | 4-methoxy-pseudomidine |
| 1-taurinomethyl-pseudouridine | 5′-O-(1-Thiophosphate)-Adenosine |
| 5-taurinomethyl-2-thio-uridine | 5′-O-(1-Thiophosphate)-Cytidine |
| 1-taurinomethyl-4-thio-uridine | 5′-O-(1-thiophosphate)-Guanosine |
| 5-methyl-uridine | 5′-O-(1-Thiophophate)-Uridine |
| 1-methyl-pseudouridine | 5′-O-(1-Thiophosphate)-Pseudouridine |
| 4-thio-1-methyl-pseudouridine | 2′-O-methyl-Adenosine |
| 2-thio-1-methyl-pseudouridine | 2′-O-methyl-Cytidine |
| 1-methyl-1-deaza-pseudouridine | 2′-O-methyl-Guanosine |
| 2-thio-1-methyl-1-deaza-pseudomidine | 2′-O-methyl-Uridine |
| dihydrouridine | 2′-O-methyl-Pseudouridine |
| dihydropseudouridine | 2′-O-methyl-Inosine |
| 2-thio-dihydromidine | 2-methyladenosine |
| 2-thio-dihydropseudouridine | 2-methylthio-N6-methyladenosine |
| 2-methoxyuridine | 2-methylthio-N6 isopentenyladenosine |
| 2-methoxy-4-thio-uridine | 2-methylthio-N6-(cis- |
| 4-methoxy-pseudouridine | hydroxyisopentenyl)adenosine |
| 4-methoxy-2-thio-pseudouridine | N6-methyl-N6-threonylcarbamoyladenosine |
| 5-aza-cytidine | N6-hydroxynorvalylcarbamoyladenosine |
| pseudoisocytidine | 2-methylthio-N6-hydroxynorvalyl |
| 3-methyl-cytidine | carbamoyladenosine |
| N4-acetylcytidine | 2′-O-ribosyladenosine (phosphate) |
| 5-formylcytidine | 1,2′-O-dimethylinosine |
| N4-methylcytidine | 5,2′-O-dimethylcytidine |
| 5-hydroxymethylcytidine | N4-acetyl-2′-O-methylcytidine |
| 1-methyl-pseudoisocytidine | Lysidine |
| pyrrolo-cytidine | 7-methylguanosine |
| pyrrolo-pseudoisocytidine | N2,2′-O-dimethylguanosine |
| 2-thio-cytidine | N2,N2,2′-O-trimethylguanosine |
| 2-thio-5-methyl-cytidine | 2′-O-ribosylguanosine (phosphate) |
| 4-thio-pseudoisocytidine | Wybutosine |
| 4-thio-1-methyl-pseudoisocytidine | Peroxywybutosine |
| 4-thio-1-methyl-1-deaza-pseudoisocytidine | Hydroxywybutosine |
| 1-methyl-1-deaza-pseudoisocytidine | undermodified hydroxywybutosine |
| zebularine | methylwyosine |
| 5-aza-zebularine | queuosine |
| 5-methyl-zebularine | epoxyqueuosine |
| 5-aza-2-thio-zebularine | galactosyl-queuosine |
| 2-thio-zebularine | mannosyl-queuosine |
| 2-methoxy-cytidine | 7-cyano-7-deazaguanosine |
| 2-methoxy-5-methyl-cytidine | 7-aminomethyl-7-deazaguanosine |
| 4-methoxy-pseudoisocytidine | archaeosine |
| 4-methoxy-1-methyl-pseudoisocytidine | 5,2′-O-dimethyluridine |
| 2-aminopurine | 4-thiouridine |
| 2,6-diaminopurine | 5-methyl-2-thiouridine |
| 7-deaza-adenine | 2-thio-2′-O-methyluridine |
| 7-deaza-8-aza-adenine | 3-(3-amino-3-carboxypropyl)uridine |
| 7-deaza-2-aminopurine | 5-methoxyuridine |
| 7-deaza-8-aza-2-aminopurine | uridine 5-oxyacetic acid |
| 7-deaza-2,6-diaminopurine | uridine 5-oxyacetic acid methyl ester |
| 7-deaza-8-aza-2,6-diarninopurine | 5-(carboxyhydroxymethyl)uridine) |
| 1-methyladenosine | 5-(carboxyhydroxymethyl)uridine methyl ester |
| N6-isopentenyladenosine | 5-methoxycarbonylmethyluridine |
| N6-(cis-hydroxyisopentenyl)adenosine | 5-methoxycarbonylmethyl-2′-O-methyluridine |
| 2-methylthio-N6-(cis-hydroxyisopentenyl) | 5-methoxycarbonylmethyl-2-thiouridine |
| adenosine | 5-aminomethyl-2-thiouridine |
| N6-glycinylcarbamoyladenosine | 5-methylaminomethyluridine |
| N6-threonylcarbamoyladenosine | 5-methylaminomethyl-2-thiouridine |
| 2-methylthio-N6-threonyl | 5-methylaminomethyl-2-selenouridine |
| carbamoyladenosine | 5-carbamoylmethyluridine |
| N6,N6-dimethyladenosine | 5-carbamoylmethyl-2′-O-methyluridine |
| 7-methyladenine | 5-carboxymethylaminomethyluridine |
| 2-methylthio-adenine | 5-carboxymethylaminomethyl-2′-O- |
| 2-methoxy-adenine | methyluridine |
| inosine | 5-carboxymethylaminomethyl-2-thiouridine |
| 1-methyl-inosine | N4,2′-O-dimethylcytidine |
| wyosine | 5-carboxymethyluridine |
| wybutosine | N6,2′-O-dimethyladenosine |
| 7-deaza-guanosine | N,N6,O-2′-trimethyladenosine |
| 7-deaza-8-aza-guanosine | N2,7-dimethylguanosine |
| 6-thio-guanosine | N2,N2,7-trimethylguanosine |
| 6-thio-7-deaza-guanosine | 3,2′-O-dimethyluridine |
| 6-thio-7-deaza-8-aza-guanosine | 5-methyldihydrouridine |
| 7-methyl-guanosine | 5-formy1-2′-O-methylcytidine |
| 6-thio-7-methyl-guanosine | 1,2′-O-dimethylguanosine |
| 7-methylinosine | 4-demethylwyosine |
| 6-methoxy-guanosine | Isowyosine |
| 1-methylguanosine | N6-acetyladenosine |
| N2-methylguanosine | |
| N2,N2-dimethylguanosine | |
| 8-oxo-guanosine | |
| 7-methyl-8-oxo-guanosine | |
| 1-methyl-6-thio-guanosine | |

TABLE 14
Backbone modifications
2′-O-Methyl backbone
Peptide Nucleic Acid (PNA) backbone
phosphorothioate backbone
morpholino backbone
carbamate backbone
siloxane backbone
sulfide backbone
sulfoxide backbone
sulfone backbone
formacetyl backbone
thioformacetyl backbone
methyleneformacetyl backbone
riboacetyl backbone
alkene containing backbone
sulfamate backbone
sulfonate backbone
sulfonamide backbone
methyleneimino backbone
methylenehydrazino backbone
amide backbone

TABLE 15
Modified caps
m7GpppA
m7GpppC
m2,7GpppG
m2,2,7GpppG
m7Gpppm7G
m7,2′OmeGpppG
m72′dGpppG
m7,3′OmeGpppG
m7,3′dGpppG
GppppG
m7GppppG
m7GppppA
m7GppppC
m2,7GppppG
m2,2,7GppppG
m7Gppppm7G
m7,2′OmeGppppG
m72′dGppppG
m7,3′OmeGppppG
m7,3′dGppppG

[0571] The nucleotides comprising the template of the gene modifying system can be natural or modified bases, or a combination thereof. For example, the template may contain pseudouridine, dihydrouridine, inosine, 7-methylguanosine, or other modified bases. In some embodiments, the template may contain locked nucleic acid nucleotides. In some embodiments, the modified bases used in the template do not inhibit the reverse transcription of the template. In some embodiments, the modified bases used in the template may improve reverse transcription, e.g., specificity or fidelity.

[0572] In some embodiments, an RNA component of the system (e.g., a template RNA or a gRNA) comprises one or more nucleotide modifications. In some embodiments, the modification pattern of a gRNA can significantly affect in vivo activity compared to unmodified or end-modified guides (e.g., as shown in FIG. 1D from Finn et al. Cell Rep 22(9):2227-2235 (2018); incorporated herein by reference in its entirety). Without wishing to be bound by theory, this process may be due, at least in part, to a stabilization of the RNA conferred by the modifications. Non-limiting examples of such modifications may include 2′-O-methyl (2′-O-Me), 2′-O-(2-methoxyethyl) (2′-O-M0E), 2′-fluoro (2′-F), phosphorothioate (PS) bond between nucleotides, G-C substitutions, and inverted abasic linkages between nucleotides and equivalents thereof.

[0573] In some embodiments, the template RNA (e.g., at the portion thereof that binds a target site) or the guide RNA comprises a 5′ terminus region. In some embodiments, the template RNA or the guide RNA does not comprise a 5′ terminus region. In some embodiments, the 5′ terminus region comprises a gRNA spacer region, e.g., as described with respect to sgRNA in Briner AE et al, Molecular Cell 56: 333-339 (2014) (incorporated herein by reference in its entirety; applicable herein, e.g., to all guide RNAs). In some embodiments, the 5′ terminus region comprises a 5′ end modification. In some embodiments, a 5′ terminus region with or without a spacer region may be associated with a crRNA, trRNA, sgRNA and/or dgRNA. The gRNA spacer region can, in some instances, comprise a guide region, guide domain, or targeting domain.

[0574] In some embodiments, the template RNAs (e.g., at the portion thereof that binds a target site) or guide RNAs described herein comprises any of the sequences shown in Table 4 of WO2018107028A1, incorporated herein by reference in its entirety. In some embodiments, where a sequence shows a guide and/or spacer region, the composition may comprise this region or not. In some embodiments, a guide RNA comprises one or more of the modifications of any of the sequences shown in Table 4 of WO2018107028A1, e.g., as identified therein by a SEQ ID NO. In embodiments, the nucleotides may be the same or different, and/or the modification pattern shown may be the same or similar to a modification pattern of a guide sequence as shown in Table 4 of WO2018107028A1. In some embodiments, a modification pattern includes the relative position and identity of modifications of the gRNA or a region of the gRNA (e.g. 5′ terminus region, lower stem region, bulge region, upper stem region, nexus region, hairpin 1 region, hairpin 2 region, 3′ terminus region). In some embodiments, the modification pattern contains at least 50%, 55%, 60%, 70%, 75%, 80%, 85%, 90%, 95%, 96%, 97%, 98%, 99%, or 100% of the modifications of any one of the sequences shown in the sequence column of Table 4 of WO2018107028A1, and/or over one or more regions of the sequence. In some embodiments, the modification pattern is at least 50%, 55%, 60%, 70%, 75%, 80%, 85%, 90%, 95%, 96%, 97%, 98%, 99%, or 100% identical to the modification pattern of any one of the sequences shown in the sequence column of Table 4 of WO2018107028A1. In some embodiments, the modification pattern is at least 50%, 55%, 60%, 70%, 75%, 80%, 85%, 90%, 95%, 96%, 97%, 98%, 99%, or 100% identical over one or more regions of the sequence shown in Table 4 of WO2018107028A1, e.g., in a 5′ terminus region, lower stem region, bulge region, upper stem region, nexus region, hairpin 1 region, hairpin 2 region, and/or 3′ terminus region. In some embodiments, the modification pattern is least 50%, 55%, 60%, 70%, 75%, 80%, 85%, 90%, 95%, 96%, 97%, 98%, 99%, or 100% identical to the modification pattern of a sequence over the 5′ terminus region. In some embodiments, the modification pattern is least 50%, 55%, 60%, 70%, 75%, 80%, 85%, 90%, 95%, 96%, 97%, 98%, 99%, or 100% identical over the lower stem. In some embodiments, the modification pattern is least 50%, 55%, 60%, 70%, 75%, 80%, 85%, 90%, 95%, 96%, 97%, 98%, 99%, or 100% identical over the bulge. In some embodiments, the modification pattern is least 50%, 55%, 60%, 70%, 75%, 80%, 85%, 90%, 95%, 96%, 97%, 98%, 99%, or 100% identical over the upper stem. In some embodiments, the modification pattern is least 50%, 55%, 60%, 70%, 75%, 80%, 85%, 90%, 95%, 96%, 97%, 98%, 99%, or 100% identical over the nexus. In some embodiments, the modification pattern is least 50%, 55%, 60%, 70%, 75%, 80%, 85%, 90%, 95%, 96%, 97%, 98%, 99%, or 100% identical over the hairpin 1. In some embodiments, the modification pattern is least 50%, 55%, 60%, 70%, 75%, 80%, 85%, 90%, 95%, 96%, 97%, 98%, 99%, or 100% identical over the hairpin 2. In some embodiments, the modification pattern is least 50%, 55%, 60%, 70%, 75%, 80%, 85%, 90%, 95%, 96%, 97%, 98%, 99%, or 100% identical over the 3′ terminus. In some embodiments, the modification pattern differs from the modification pattern of a sequence of Table 4 of WO2018107028A1, or a region (e.g. 5′ terminus, lower stem, bulge, upper stem, nexus, hairpin 1, hairpin 2, 3′ terminus) of such a sequence, e.g., at 0, 1, 2, 3, 4, 5, 6, or more nucleotides. In some embodiments, the gRNA comprises modifications that differ from the modifications of a sequence of Table 4 of WO2018107028A1, e.g., at 0, 1, 2, 3, 4, 5, 6, or more nucleotides. In some embodiments, the gRNA comprises modifications that differ from modifications of a region (e.g. 5′ terminus, lower stem, bulge, upper stem, nexus, hairpin 1, hairpin 2, 3′ terminus) of a sequence of Table 4 of WO2018107028A1, e.g., at 0, 1, 2, 3, 4, 5, 6, or more nucleotides.

[0575] In some embodiments, the template RNAs (e.g., at the portion thereof that binds a target site) or the gRNA comprises a 2′-O-methyl (2′-O-Me) modified nucleotide. In some embodiments, the gRNA comprises a 2′-O-(2-methoxy ethyl) (2′-O-moe) modified nucleotide. In some embodiments, the gRNA comprises a 2′-fluoro (2′-F) modified nucleotide. In some embodiments, the gRNA comprises a phosphorothioate (PS) bond between nucleotides. In some embodiments, the gRNA comprises a 5′ end modification, a 3′ end modification, or 5′ and 3′ end modifications. In some embodiments, the 5′ end modification comprises a phosphorothioate (PS) bond between nucleotides. In some embodiments, the 5′ end modification comprises a 2′-O-methyl (2′-O-Me), 2′-O-(2-methoxy ethyl) (2′-O-M0E), and/or 2′-fluoro (2′-F) modified nucleotide. In some embodiments, the 5′ end modification comprises at least one phosphorothioate (PS) bond and one or more of a 2′-O-methyl (2′-O-Me), 2′-O-(2-methoxyethyl) (2′-O-M0E), and/or 2′-fluoro (2′-F) modified nucleotide. The end modification may comprise a phosphorothioate (PS), 2′-O-methyl (2′-O-Me), 2′-O-(2-methoxyethyl) (2′-O-MOE), and/or 2′-fluoro (2′-F) modification. Equivalent end modifications are also encompassed by embodiments described herein. In some embodiments, the template RNA or gRNA comprises an end modification in combination with a modification of one or more regions of the template RNA or gRNA. Additional exemplary modifications and methods for protecting RNA, e.g., gRNA, and formulae thereof, are described in WO2018126176A1, which is incorporated herein by reference in its entirety.

[0576] In some embodiments, a template RNA described herein comprises three phosphorothioate linkages at the 5′ end and three phosphorothioate linkages at the 3′ end. In some embodiments, a template RNA described herein comprises three 2′-O-methyl ribonucleotides at the 5′ end and three 2′-O-methyl ribonucleotides at the 3′ end. In some embodiments, the 5′ most three nucleotides of the template RNA are 2′-O-methyl ribonucleotides, the 5′ most three internucleotide linkages of the template RNA are phosphorothioate linkages, the 3′ most three nucleotides of the template RNA are 2′-O-methyl ribonucleotides, and the 3′ most three internucleotide linkages of the template RNA are phosphorothioate linkages. In some embodiments, the template RNA comprises alternating blocks of ribonucleotides and 2′-O-methyl ribonucleotides, for instance, blocks of between 12 and 28 nucleotides in length. In some embodiments, the central portion of the template RNA comprises the alternating blocks and the 5′ and 3′ ends each comprise three 2′-O-methyl ribonucleotides and three phosphorothioate linkages.

[0577] In some embodiments, structure-guided and systematic approaches are used to introduce modifications (e.g., 2′-OMe-RNA, 2′-F-RNA, and PS modifications) to a template RNA or guide RNA, for example, as described in Mir et al. Nat Commun 9:2641 (2018) (incorporated by reference herein in its entirety). In some embodiments, the incorporation of 2′-F-RNAs increases thermal and nuclease stability of RNA:RNA or RNA:DNA duplexes, e.g., while minimally interfering with C3′-endo sugar puckering. In some embodiments, 2′-F may be better tolerated than 2′-OMe at positions where the 2′-OH is important for RNA:DNA duplex stability. In some embodiments, a crRNA comprises one or more modifications that do not reduce Cas9 activity, e.g., C10, C20, or C21 (fully modified), e.g., as described in Supplementary Table 1 of Mir et al. Nat Commun 9:2641 (2018), incorporated herein by reference in its entirety. In some embodiments, a tracrRNA comprises one or more modifications that do not reduce Cas9 activity, e.g., T2, T6, T7, or T8 (fully modified) of Supplementary Table 1 of Mir et al. Nat Commun 9:2641 (2018). In some embodiments, a crRNA comprises one or more modifications (e.g., as described herein) may be paired with a tracrRNA comprising one or more modifications, e.g., C20 and T2. In some embodiments, a gRNA comprises a chimera, e.g., of a crRNA and a tracrRNA (e.g., Jinek et al. Science 337(6096):816-821 (2012)). In embodiments, modifications from the crRNA and tracrRNA are mapped onto the single-guide chimera, e.g., to produce a modified gRNA with enhanced stability.

[0578] In some embodiments, gRNA molecules may be modified by the addition or subtraction of the naturally occurring structural components, e.g., hairpins. In some embodiments, a gRNA may comprise a gRNA with one or more 3′ hairpin elements deleted, e.g., as described in WO2018106727, incorporated herein by reference in its entirety. In some embodiments, a gRNA may contain an added hairpin structure, e.g., an added hairpin structure in the spacer region, which was shown to increase specificity of a CRISPR-Cas system in the teachings of Kocak et al. Nat Biotechnol 37(6):657-666 (2019). Additional modifications, including examples of shortened gRNA and specific modifications improving in vivo activity, can be found in US20190316121, incorporated herein by reference in its entirety.

[0579] In some embodiments, structure-guided and systematic approaches (e.g., as described in Mir et al. Nat Commun 9:2641 (2018); incorporated herein by reference in its entirety) are employed to find modifications for the template RNA. In embodiments, the modifications are identified with the inclusion or exclusion of a guide region of the template RNA. In some embodiments, a structure of polypeptide bound to template RNA is used to determine non-protein-contacted nucleotides of the RNA that may then be selected for modifications, e.g., with lower risk of disrupting the association of the RNA with the polypeptide. Secondary structures in a template RNA can also be predicted in silico by software tools, e.g., the RNAstructure tool available at rna.urmc.rochester.edu/RNAstructureWeb (Bellaousov et al. Nucleic Acids Res 41:W471-W474 (2013); incorporated by reference herein in its entirety), e.g., to determine secondary structures for selecting modifications, e.g., hairpins, stems, and/or bulges.

### Production of Compositions and Systems

[0580] As will be appreciated by one of skill, methods of designing and constructing nucleic acid constructs and proteins or polypeptides (such as the systems, constructs and polypeptides described herein) are routine in the art. Generally, recombinant methods may be used. See, in general, Smales & James (Eds.), Therapeutic Proteins: Methods and Protocols (Methods in Molecular Biology), Humana Press (2005); and Crommelin, Sindelar & Meibohm (Eds.), Pharmaceutical Biotechnology: Fundamentals and Applications, Springer (2013). Methods of designing, preparing, evaluating, purifying and manipulating nucleic acid compositions are described in Green and Sambrook (Eds.), Molecular Cloning: A Laboratory Manual (Fourth Edition), Cold Spring Harbor Laboratory Press (2012).

[0581] The disclosure provides, in part, a nucleic acid, e.g., vector, encoding a gene modifying polypeptide described herein, a template nucleic acid described herein, or both. In some embodiments, a vector comprises a selective marker, e.g., an antibiotic resistance marker. In some embodiments, the antibiotic resistance marker is a kanamycin resistance marker. In some embodiments, the antibiotic resistance marker does not confer resistance to beta-lactam antibiotics. In some embodiments, the vector does not comprise an ampicillin resistance marker. In some embodiments, the vector comprises a kanamycin resistance marker and does not comprise an ampicillin resistance marker. In some embodiments, a vector encoding a gene modifying polypeptide is integrated into a target cell genome (e.g., upon administration to a target cell, tissue, organ, or subject). In some embodiments, a vector encoding a gene modifying polypeptide is not integrated into a target cell genome (e.g., upon administration to a target cell, tissue, organ, or subject). In some embodiments, a vector encoding a template nucleic acid (e.g., template RNA) is not integrated into a target cell genome (e.g., upon administration to a target cell, tissue, organ, or subject). In some embodiments, if a vector is integrated into a target site in a target cell genome, the selective marker is not integrated into the genome. In some embodiments, if a vector is integrated into a target site in a target cell genome, genes or sequences involved in vector maintenance (e.g., plasmid maintenance genes) are not integrated into the genome. In some embodiments, if a vector is integrated into a target site in a target cell genome, transfer regulating sequences (e.g., inverted terminal repeats, e.g., from an AAV) are not integrated into the genome. In some embodiments, administration of a vector (e.g., encoding a gene modifying polypeptide described herein, a template nucleic acid described herein, or both) to a target cell, tissue, organ, or subject results in integration of a portion of the vector into one or more target sites in the genome(s) of said target cell, tissue, organ, or subject. In some embodiments, less than 99, 95, 90, 80, 70, 60, 50, 40, 30, 20, 10, 5, 4, 3, 2, or 1% of target sites (e.g., no target sites) comprising integrated material comprise a selective marker (e.g., an antibiotic resistance gene), a transfer regulating sequence (e.g., an inverted terminal repeat, e.g., from an AAV), or both from the vector.

[0582] Exemplary methods for producing a therapeutic pharmaceutical protein or polypeptide described herein involve expression in mammalian cells, although recombinant proteins can also be produced using insect cells, yeast, bacteria, or other cells under control of appropriate promoters. Mammalian expression vectors may comprise non-transcribed elements such as an origin of replication, a suitable promoter, and other 5′ or 3′ flanking non-transcribed sequences, and 5′ or 3′ non-translated sequences such as necessary ribosome binding sites, a polyadenylation site, splice donor and acceptor sites, and termination sequences. DNA sequences derived from the SV40 viral genome, for example, SV40 origin, early promoter, splice, and polyadenylation sites may be used to provide other genetic elements required for expression of a heterologous DNA sequence. Appropriate cloning and expression vectors for use with bacterial, fungal, yeast, and mammalian cellular hosts are described in Green & Sambrook, Molecular Cloning: A Laboratory Manual (Fourth Edition), Cold Spring Harbor Laboratory Press (2012).

[0583] Various mammalian cell culture systems can be employed to express and manufacture recombinant protein. Examples of mammalian expression systems include CHO, COS, HEK293, HeLA, and BHK cell lines. Processes of host cell culture for production of protein therapeutics are described in Zhou and Kantardjieff (Eds.), Mammalian Cell Cultures for Biologics Manufacturing (Advances in Biochemical Engineering/Biotechnology), Springer (2014). Compositions described herein may include a vector, such as a viral vector, e.g., a lentiviral vector, encoding a recombinant protein. In some embodiments, a vector, e.g., a viral vector, may comprise a nucleic acid encoding a recombinant protein.

[0584] Purification of protein therapeutics is described in Franks, Protein Biotechnology: Isolation, Characterization, and Stabilization, Humana Press (2013); and in Cutler, Protein Purification Protocols (Methods in Molecular Biology), Humana Press (2010).

[0585] The disclosure also provides compositions and methods for the production of template nucleic acid molecules (e.g., template RNAs) with specificity for a gene modifying polypeptide and/or a genomic target site. In an aspect, the method comprises production of RNA segments including an upstream homology segment, a heterologous object sequence segment, a gene modifying polypeptide binding motif, and a gRNA segment.

### Therapeutic Applications

[0586] In some embodiments, a gene modifying system as described herein can be used to modify a cell (e.g., an animal cell, plant cell, or fungal cell). In some embodiments, a gene modifying system as described herein can be used to modify a mammalian cell (e.g., a human cell). In some embodiments, a gene modifying system as described herein can be used to modify a cell from a livestock animal (e.g., a cow, horse, sheep, goat, pig, llama, alpaca, camel, yak, chicken, duck, goose, or ostrich). In some embodiments, a gene modifying system as described herein can be used as a laboratory tool or a research tool, or used in a laboratory method or research method, e.g., to modify an animal cell, e.g., a mammalian cell (e.g., a human cell), a plant cell, or a fungal cell.

[0587] By integrating coding genes into a RNA sequence template, the gene modifying system can address therapeutic needs, for example, by providing expression of a therapeutic transgene in individuals with loss-of-function mutations, by replacing gain-of-function mutations with normal transgenes, by providing regulatory sequences to eliminate gain-of-function mutation expression, and/or by controlling the expression of operably linked genes, transgenes and systems thereof. In certain embodiments, the RNA sequence template encodes a promotor region specific to the therapeutic needs of the host cell, for example a tissue specific promotor or enhancer. In still other embodiments, a promotor can be operably linked to a coding sequence.

[0588] Accordingly, provided herein are methods for treating alpha-1 antitrypsin deficiency (AATD) in a subject in need thereof. In some embodiments, treatment results in amelioration of one or more symptoms associated with AATD.

[0589] In some embodiments, a system herein is used to treat a subject having a mutation in E342 (e.g., E342K).

[0590] In some embodiments, treatment with a system disclosed herein results in correction of the E342K mutation in between about 30-100% (e.g., about 30-40%, 40-50%, 50-60%, 60-70%, 70-80%, 80-90%, 90-100%, or about 50%) of cells. In some embodiments, treatment with a system disclosed herein results in correction of the E342K mutation in between about 30-60% (e.g., about 30-40%, 40-50%, 50-60%, or about 50%) of DNA isolated from the treated cells.

[0591] In some embodiments, treatment with a gene modifying system described herein results in one or more of:
[0592] (a) an increase in alpha-1 antitrypsin (AAT) activity and/or function;
[0593] (b) an increase in levels of circulating AAT;
[0594] (c) a reduction in protease-induced lung damage and/or inflammation (e.g., a reduction in protease digestion of connective tissue in the lower airway, e.g., alveoli linings));
[0595] (d) a reduction in accumulated, polymerized Z-AAT protein within hepatocytes;
[0596] (e) a reduction in AAT-induced hepatocyte toxicity;
[0597] (f) a reduction of cellular stress, inflammation, fibrosis, cirrhosis, hepatocellular carcinoma (HCC), and/or neonatal liver disease;
[0598] (g) an increase in pulmonary function (e.g., an increase in lung elasticity); and/or
[0599] (h) a reduction of symptoms associated with emphysema, as compared to a subject having AATD that has not been treated with a gene modifying system described herein.

### Administration and Delivery

[0600] The compositions and systems described herein may be used in vitro or in vivo. In some embodiments the system or components of the system are delivered to cells (e.g., mammalian cells, e.g., human cells), e.g., in vitro or in vivo. In some embodiments, the cells are eukaryotic cells, e.g., cells of a multicellular organism, e.g., an animal, e.g., a mammal (e.g., human, swine, bovine), a bird (e.g., poultry, such as chicken, turkey, or duck), or a fish. In some embodiments, the cells are non-human animal cells (e.g., a laboratory animal, a livestock animal, or a companion animal). In some embodiments, the cell is a stem cell (e.g., a hematopoietic stem cell), a fibroblast, or a T cell. In some embodiments, the cell is an immune cell, e.g., a T cell (e.g., a Treg, CD4, CD8, γδ, or memory T cell), B cell (e.g., memory B cell or plasma cell), or NK cell. In some embodiments, the cell is a non-dividing cell, e.g., a non-dividing fibroblast or non-dividing T cell. In some embodiments, the cell is an HSC and p53 is not upregulated or is upregulated by less than 10%, 5%, 2%, or 1%, e.g., as determined according to the method described in Example 30 of PCT/US2019/048607. The skilled artisan will understand that the components of the gene modifying system may be delivered in the form of polypeptide, nucleic acid (e.g., DNA, RNA), and combinations thereof.

[0601] In one embodiment the system and/or components of the system are delivered as nucleic acid. For example, the gene modifying polypeptide may be delivered in the form of a DNA or RNA encoding the polypeptide, and the template RNA may be delivered in the form of RNA or its complementary DNA to be transcribed into RNA. In some embodiments the system or components of the system are delivered on 1, 2, 3, 4, or more distinct nucleic acid molecules. In some embodiments the system or components of the system are delivered as a combination of DNA and RNA. In some embodiments the system or components of the system are delivered as a combination of DNA and protein. In some embodiments the system or components of the system are delivered as a combination of RNA and protein. In some embodiments the gene modifying polypeptide is delivered as a protein.

[0602] In some embodiments the system or components of the system are delivered to cells, e.g. mammalian cells or human cells, using a vector. The vector may be, e.g., a plasmid or a virus. In some embodiments, delivery is in vivo, in vitro, ex vivo, or in situ. In some embodiments the virus is an adeno associated virus (AAV), a lentivirus, or an adenovirus. In some embodiments the system or components of the system are delivered to cells with a viral-like particle or a virosome. In some embodiments the delivery uses more than one virus, viral-like particle or virosome.

[0603] In one embodiment, the compositions and systems described herein can be formulated in liposomes or other similar vesicles. Liposomes are spherical vesicle structures composed of a uni- or multilamellar lipid bilayer surrounding internal aqueous compartments and a relatively impermeable outer lipophilic phospholipid bilayer. Liposomes may be anionic, neutral or cationic. Liposomes are biocompatible, nontoxic, can deliver both hydrophilic and lipophilic drug molecules, protect their cargo from degradation by plasma enzymes, and transport their load across biological membranes and the blood brain barrier (BBB) (see, e.g., Spuch and Navarro, Journal of Drug Delivery, vol. 2011, Article ID 469679, 12 pages, 2011. doi:10.1155/2011/469679 for review).

[0604] Vesicles can be made from several different types of lipids; however, phospholipids are most commonly used to generate liposomes as drug carriers. Methods for preparation of multilamellar vesicle lipids are known in the art (see for example U.S. Pat. No. 6,693,086, the teachings of which relating to multilamellar vesicle lipid preparation are incorporated herein by reference). Although vesicle formation can be spontaneous when a lipid film is mixed with an aqueous solution, it can also be expedited by applying force in the form of shaking by using a homogenizer, sonicator, or an extrusion apparatus (see, e.g., Spuch and Navarro, Journal of Drug Delivery, vol. 2011, Article ID 469679, 12 pages, 2011. doi:10.1155/2011/469679 for review). Extruded lipids can be prepared by extruding through filters of decreasing size, as described in Templeton et al., Nature Biotech, 15:647-652, 1997, the teachings of which relating to extruded lipid preparation are incorporated herein by reference.

[0605] A variety of nanoparticles can be used for delivery, such as a liposome, a lipid nanoparticle, a cationic lipid nanoparticle, an ionizable lipid nanoparticle, a polymeric nanoparticle, a gold nanoparticle, a dendrimer, a cyclodextrin nanoparticle, a micelle, or a combination of the foregoing.

[0606] Lipid nanoparticles are an example of a carrier that provides a biocompatible and biodegradable delivery system for the pharmaceutical compositions described herein. Nanostructured lipid carriers (NLCs) are modified solid lipid nanoparticles (SLNs) that retain the characteristics of the SLN, improve drug stability and loading capacity, and prevent drug leakage. Polymer nanoparticles (PNPs) are an important component of drug delivery. These nanoparticles can effectively direct drug delivery to specific targets and improve drug stability and controlled drug release. Lipid—polymer nanoparticles (PLNs), a type of carrier that combines liposomes and polymers, may also be employed. These nanoparticles possess the complementary advantages of PNPs and liposomes. A PLN is composed of a core—shell structure; the polymer core provides a stable structure, and the phospholipid shell offers good biocompatibility. As such, the two components increase the drug encapsulation efficiency rate, facilitate surface modification, and prevent leakage of water-soluble drugs. For a review, see, e.g., Li et al. 2017, Nanomaterials 7, 122; doi:10.3390/nano7060122.

[0607] Exosomes can also be used as drug delivery vehicles for the compositions and systems described herein. For a review, see Ha et al. July 2016. Acta Pharmaceutica Sinica B. Volume 6, Issue 4, Pages 287-296; doi.org/10.1016/j.apsb.2016.02.001.

[0608] Fusosomes interact and fuse with target cells, and thus can be used as delivery vehicles for a variety of molecules. They generally consist of a bilayer of amphipathic lipids enclosing a lumen or cavity and a fusogen that interacts with the amphipathic lipid bilayer. The fusogen component has been shown to be engineerable in order to confer target cell specificity for the fusion and payload delivery, allowing the creation of delivery vehicles with programmable cell specificity (see for example Patent Application WO2020014209, the teachings of which relating to fusosome design, preparation, and usage are incorporated herein by reference).

[0609] In some embodiments, the protein component(s) of the gene modifying system may be pre-associated with the template nucleic acid (e.g., template RNA). For example, in some embodiments, the gene modifying polypeptide may be first combined with the template nucleic acid (e.g., template RNA) to form a ribonucleoprotein (RNP) complex. In some embodiments, the RNP may be delivered to cells via, e.g., transfection, nucleofection, virus, vesicle, LNP, exosome, fusosome.

[0610] A gene modifying system can be introduced into cells, tissues and multicellular organisms. In some embodiments the system or components of the system are delivered to the cells via mechanical means or physical means.

[0611] Formulation of protein therapeutics is described in Meyer (Ed.), Therapeutic Protein Drug Products: Practical Approaches to formulation in the Laboratory, Manufacturing, and the Clinic, Woodhead Publishing Series (2012).

### Tissue Specific Activity/Administration

[0612] In some embodiments, a system described herein can make use of one or more feature (e.g., a promoter or microRNA binding site) to limit activity in off-target cells or tissues.

[0613] In some embodiments, a nucleic acid described herein (e.g., a template RNA or a DNA encoding a template RNA) comprises a promoter sequence, e.g., a tissue specific promoter sequence. In some embodiments, the tissue-specific promoter is used to increase the target-cell specificity of a gene modifying system. For instance, the promoter can be chosen on the basis that it is active in a target cell type but not active in (or active at a lower level in) a non-target cell type. Thus, even if the promoter integrated into the genome of a non-target cell, it would not drive expression (or only drive low level expression) of an integrated gene. A system having a tissue-specific promoter sequence in the template RNA may also be used in combination with a microRNA binding site, e.g., in the template RNA or a nucleic acid encoding a gene modifying protein, e.g., as described herein. A system having a tissue-specific promoter sequence in the template RNA may also be used in combination with a DNA encoding a gene modifying polypeptide, driven by a tissue-specific promoter, e.g., to achieve higher levels of gene modifying protein in target cells than in non-target cells. In some embodiments, e.g., for liver indications, a tissue-specific promoter is selected from Table 3 of WO2020014209, incorporated herein by reference.

[0614] In some embodiments, a nucleic acid described herein (e.g., a template RNA or a DNA encoding a template RNA) comprises a microRNA binding site. In some embodiments, the microRNA binding site is used to increase the target-cell specificity of a gene modifying system. For instance, the microRNA binding site can be chosen on the basis that is recognized by a miRNA that is present in a non-target cell type, but that is not present (or is present at a reduced level relative to the non-target cell) in a target cell type. Thus, when the template RNA is present in a non-target cell, it would be bound by the miRNA, and when the template RNA is present in a target cell, it would not be bound by the miRNA (or bound but at reduced levels relative to the non-target cell). While not wishing to be bound by theory, binding of the miRNA to the template RNA may interfere with its activity, e.g., may interfere with insertion of the heterologous object sequence into the genome. Accordingly, the system would edit the genome of target cells more efficiently than it edits the genome of non-target cells, e.g., the heterologous object sequence would be inserted into the genome of target cells more efficiently than into the genome of non-target cells, or an insertion or deletion is produced more efficiently in target cells than in non-target cells. A system having a microRNA binding site in the template RNA (or DNA encoding it) may also be used in combination with a nucleic acid encoding a gene modifying polypeptide, wherein expression of the gene modifying polypeptide is regulated by a second microRNA binding site, e.g., as described herein. In some embodiments, e.g., for liver indications, a miRNA is selected from Table 4 of WO2020014209, incorporated herein by reference.

[0615] In some embodiments, the template RNA comprises a microRNA sequence, an siRNA sequence, a guide RNA sequence, or a piwi RNA sequence.

[0616] Promoters

[0617] In some embodiments, one or more promoter or enhancer elements are operably linked to a nucleic acid encoding a gene modifying protein or a template nucleic acid, e.g., that controls expression of the heterologous object sequence. In certain embodiments, the one or more promoter or enhancer elements comprise cell-type or tissue specific elements. In some embodiments, the promoter or enhancer is the same or derived from the promoter or enhancer that naturally controls expression of the heterologous object sequence. For example, the ornithine transcarbomylase promoter and enhancer may be used to control expression of the ornithine transcarbomylase gene in a system or method provided by the invention for correcting ornithine transcarbomylase deficiencies. In some embodiments, the promoter is a promoter of Table 16 or 17 or a functional fragment or variant thereof.

[0618] Exemplary tissue specific promoters that are commercially available can be found, for example, at a uniform resource locator (e.g., invivogen.com/tissue-specific-promoters). In some embodiments, a promoter is a native promoter or a minimal promoter, e.g., which consists of a single fragment from the 5′ region of a given gene. In some embodiments, a native promoter comprises a core promoter and its natural 5′ UTR., in some embodiments, the 5′ UTR comprises an intron. in other embodiments, these include composite promoters, which combine promoter elements of different origins or were generated by assembling a distal enhancer with a minimal promoter of the same origin.

[0619] Exemplary cell or tissue specific promoters are provided in the tAles, below, and exemplary nucleic acid sequences encoding them are known in the art and can be readily accessed using a variety of resources, such as the INCM database, including RefSeq, as well as the Eukaryotic Promoter Database (//epd.epfl.ch//index.php).

TABLE 16
Exemplary cell or tissue-specific promoters

| Promoter | Target cells |
|---|---|
| B29 Promoter | B cells |
| CD14 Promoter | Monocytic Cells |
| CD43 Promoter | Leukocytes and platelets |
| CD45 Promoter | Hematopoeitic cells |
| CD68 promoter | macrophages |
| Desmin promoter | muscle cells |
| Elastase-1 | pancreatic acinar cells |
| promoter | |
| Endoglin promoter | endothelial cells |
| fibronectin | differentiating cells, healing |
| promoter | tissue |
| Flt-1 promoter | endothelial cells |
| GFAP promoter | Astrocytes |
| GPIIB promoter | megakaryocytes |
| ICAM-2 Promoter | Endothelial cells |
| INF-Beta promoter | Hematopoeitic cells |
| Mb promoter | muscle cells |
| Nphs1 promoter | podocytes |
| OG-2 promoter | Osteoblasts, Odonblasts |
| SP-B promoter | Lung |
| Syn1 promoter | Neurons |
| WASP promoter | Hematopoeitic cells |
| SV40/bAlb | Liver |
| promoter | |
| SV40/bAlb | Liver |
| promoter | |
| SV40/Cd3 | Leukocytes and platelets |
| promoter | |
| SV40/CD45 | hematopoeitic cells |
| promoter | |
| NSE/RU5′ | Mature Neurons |
| promoter | |

TABLE 17
Additional exemplary cell or tissue-specific promoters

| Promoter | Gene Description | Gene Specificity |
|---|---|---|
| APOA2 | Apolipoprotein A-II | Hepatocytes (from hepatocyte |
| | | progenitors) |
| SERPINA1 | Serpin peptidase inhibitor, clade A | Hepatocytes |
| (hAAT) | (alpha-1 antiproteinase, | (from definitive endoderm stage) |
| | antitrypsin), member 1 | |
| | (also named alpha 1 anti-tryps in) | |
| CYP3A | Cytochrome P450, family 3, | Mature Hepatocytes |
| | subfamily A, polypeptide | |
| MIR122 | MicroRNA 122 | Hepatocytes |
| | | (from early stage embryonic |
| | | liver cells) and endoderm |

Pancreatic specific promoters

| | | |
|---|---|---|
| INS | Insulin | Pancreatic beta cells |
| | | (from definitive endoderm stage) |
| IRS2 | Insulin receptor substrate 2 | Pancreatic beta cells |
| Pdx1 | Pancreatic and duodenal | Pancreas |
| | homeobox 1 | (from definitive endoderm stage) |
| Alx3 | Aristaless-like homeobox 3 | Pancreatic beta cells |
| | | (from definitive endoderm stage) |
| Ppy | Pancreatic polypeptide | PP pancreatic cells |
| | | (gamma cells) |

Cardiac specific promoters

| | | |
|---|---|---|
| Myh6 | Myosin, heavy chain 6, cardiac | Late differentiation marker of cardiac |
| (aMHC) | muscle, alpha | muscle cells (atrial specificity) |
| MYL2 | Myosin, light chain 2, regulatory, | Late differentiation marker of cardiac |
| (MLC-2v) | cardiac, slow | muscle cells (ventricular specificity) |
| ITNN13 | Troponin I type 3 (cardiac) | Cardiomyocytes |
| (cTn1) | | (from immature state) |
| ITNN13 | Troponin I type 3 (cardiac) | Cardiomyocytes |
| (cTn1) | | (from immature state) |
| NPPA | Natriuretic peptide precursor A (also | Atrial specificity in adult cells |
| (ANF) | named Atrial Natriuretic Factor) | |
| Slc8a1 | Solute carrier family 8 | Cardiomyocytes from early |
| (Ncx1) | (sodium/calcium exchanger), | developmental stages |
| | member 1 | |

CNS specific promoters

| | | |
|---|---|---|
| SYN1 | Synapsin I | Neurons |
| (hSyn) | | |
| GFAP | Glial fibrillary acidic protein | Astrocytes |
| INA | Internexin neuronal intermediate | Neuroprogenitors |
| | filament protein, alpha (a-internexin) | |
| NES | Nestin | Neuroprogenitors and ectoderm |
| MOBP | Myelin-associated oligodendrocyte | Oligodendrocytes |
| | basic protein | |
| MBP | Myelin basic protein | Oligodendrocytes |
| TH | Tyrosine hydroxylase | Dopaminergic neurons |
| FOXA2 | Forkhead box A2 | Dopaminergic neurons (also used as a |
| (HNF3 | | marker of endoderm) |
| beta) | | |

Skin specific promoters

| | | |
|---|---|---|
| FLG | Filaggrin | Keratinocytes from granular layer |
| K14 | Keratin 14 | Keratinocytes from granular |
| | | and basal layers |
| TGM3 | Transglutaminase 3 | Keratinocytes from granular layer |

Immune cell specific promoters

| | | |
|---|---|---|
| ITGAM | Integrin, alpha M (complement | Monocytes, macrophages, granulocytes, |
| (CD11B) | component 3 receptor 3 subunit) | natural killer cells |

Urogential cell specific promoters

| | | |
|---|---|---|
| Pbsn | Probasin | Prostatic epithelium |
| Upk2 | Uroplakin 2 | Bladder |
| Sbp | Spermine binding protein | Prostate |
| Fer114 | Fer-1-like 4 | Bladder |

Endothelial cell specific promoters

| | | |
|---|---|---|
| ENG | Endoglin | Endothelial cells |

Pluripotent and embryonic cell specific promoters

| | | |
|---|---|---|
| Oct4 | POU class 5 homeobox 1 | Pluripotent cells |
| (POU5F1) | | (germ cells, ES cells, iPS cells) |
| NANOG | Nanog homeobox | Pluripotent cells |
| | | (ES cells, iPS cells) |
| Synthetic | Synthetic promoter based on a Oct-4 | Pluripotent cells (ES cells, iPS cells) |
| Oct4 | core enhancer element | |
| T | Brachyury | Mesoderm |
| brachyury | | |
| NES | Nestin | Neuroprogenitors and Ectoderm |
| SOX17 | SRY (sex determining region Y)-box 17 | Endoderm |
| FOXA2 | Forkhead box A2 | Endoderm (also used as a marker of |
| (HNFJ | | dopaminergic neurons) |
| beta) | | |
| MIR122 | MicroRNA 122 | Endoderm and hepatocytes |
| | | (from early stage embryonic liver cells~ |

[0620] Depending on the host/vector system utilized, any of a number of suitable transcription and translation control elements, including constitutive and inducible promoters, transcription enhancer elements, transcription terminators, etc. may be used in the expression vector (see e.g., Bitter et al. (1987) Methods in Eta-yinology, 153:516-544; incorporated herein by reference in its entirety).

[0621] In some embodiments, a nucleic acid encoding a gene modifying protein or template nucleic acid is operably linked to a control element, e.g., a transcriptional control element, such as a promoter. The transcriptional control element may, in some embodiment, be functional in either a eukaryotic cell, e.g., a mammalian cell; or a prokaryotic cell (e.g., bacterial or archaeal cell). In some embodiments, a nucleotide sequence encoding a polypeptide is operably linked to multiple control elements, e.g., that allow expression of the nucleotide sequence encoding the polypeptide in both prokaryotic and eukaryotic cells.

[0622] For illustration purposes, examples of spatially restricted promoters include, but are not limited to, neuron-specific promoters, adipocyte-specific promoters, cardiomyocyte-specific promoters, smooth muscle-specific promoters, photoreceptor-specific promoters, etc. Neuron-specific spatially restricted promoters include, but are not limited to, a neuron-specific enolase (NSE) promoter (see, ENTBL HSENO2, X51956); an aromatic amino acid decarboxiase (AADC) promoter, a neurofilament promoter (see, e.g., GenBank HUMNFL, L04147); a syna.psin promoter (see, e.g., GenBank liUMSYNIB,1V155301); a thy-1 promoter (see, e.g., Chen et al. (1987) Cell 51:7-19; and Llewellyn, et al. (2010) Nat. Med. 16(10): 1161-1166); a serotonin receptor promoter (see, e.g., GenBank S62283); a tyrosine hydroxylase promoter (TH) (see, e.g., Oh et al. (2009) Gene Ther 16:437; Sasaoka et al. (1992) Mol. Brain Res. 16:274; Boundy et al. (1998) J. Neurosci. 18:9989; and Kaneda et al. (1991) Neuron 6:583-594), a GnRH promoter (see, e.g., Radovick et al. (1991) Proc. Natl. Aca.d. Sci. USA 88:3402-3406); an L7 promoter (see, e.g., Oherdick et al. (1990) Science 248:223-226); a DNMT promoter (see, e.g., Bartge et al. (1988) Proc. Natl. Acad Sci. USA 85:3648-3652); an enkephalin promoter (see, e.g., Comb et al. (1988) EMBO J. 17:3793-3805); a myelin basic protein (MBP) promoter; a Ca2+-calmodulin-dependent protein kinase (CainK110.) promoter (see, e.g., Mayford et al. (1996) Proc. Natl. Acad. Sci. USA 93:13250; and Casanova et al. (2001) Genesis 31:37); a CMV enhancer/platelet-derived growth factor-13 promoter (see, e.g., Liu et al. (2004) Gene Therapy 11:52-60); and the like.

[0623] Adipocyte-specific spatially restricted promoters include, but are not limited to, the aP2 gene promoter/enhancer, region from kb to +21 hp of a human aP2 gene (see, e.g., Tozzo et al. (1997) Endocrinol. 138:1604; Ross et al. (1990) Proc. Natl. Acad. Sci. USA 87:9590; and Payjani. et al. (2005) Nat. Med. 11:797); a glucose transporter-4 (GLI-l174) promoter (see, e.g., Knight et al. (2003) Proc. Natl. Acad. Sci. USA 100:14725); a fatty acid translocase (FAT/CD36) promoter (see, e.g., Kuriki et al. (2002) Biol. Pharm. Ball. 2511476, and Sato et al. (2002) J. Biol. Chem. 277:15703); a stearoyl-CoA desaturase-1 (SCD1) promoter (Tabor et al. (1999) J. Biol. Chem. 274:20603); a leptin promoter (see, e.g., Mason et al. (1998) Endocrinol. 139:1013; and (Then et al. (1999) Biochem. Biophys. Res. Comm. 262:187); an adiponectin promoter (see, e.g., Kita et al. (2005) Biochem. Biophys. Res. Comm. 331:484; and Chakraharti (2010) Endocrinol. 151:2408); an adipsin promoter (see, e.g., Platt et al. (1989) Proc. Natl. Acad. Sci. USA 86:7490); a resistin promoter (see, e.g., Seo et al. (2003) Molec. Endocrinol. 17:1522); and the like.

[0624] Cardiomyocyte-specific spatially restricted promoters include, but are not limited to; control sequences derived from the following genes: myosin light chain-2, α-myosin heavy chain, AE3, cardiac troponin C, cardiac actin, and the like. Franz et al (1997) Cardiova sc. Res. 35:560-566; Robbins et al. (1995) Ann. N.Y. Acad. Sci. 752:492-505; Linn et al. (1995) Circ. Res. 76:584-591; Parmacek et al. (1994) Mol. Cell. Biol. 14:1870-1885; Hunter et al. (1993) Hypertension 22:608-617; and Sartorelli et al. (1992) Proc. Natl. Acad. Sci. USA 89:4047-4051.

[0625] Smooth muscle-specific spatially restricted promoters include, but are not limited to an SM22u, promoter (see, e.g., Akvarek et al. (2000) Mol. Med. 6:983; and U.S. Pat. No. 7,169,874); a smoothelin promoter (see, WO 2001/018048); an α--smooth muscle actin promoter; and the like. For example, a 0.4 kb region of the SM22u promoter, within which lie two CArG elements, has been shown to mediate vascular smooth muscle cell-specific expression (see, e.g., Kim, et al. (1997) Mol. Cell. Biol. 17, 2266-2278; Li, et as, (1996) J. Cell Biol. 132, 849-859; and Moessier, et al. (1996) Development 122, 2415-2425).

[0626] Photoreceptor-specific spatially restricted promoters include, but are not limited to, a rhodopsin promoter; a rhodopsin kinase promoter (Young et al. (2003) Ophthalmol. Vis. Sci. 44:4076); a beta phosphodiesterase gene promoter (Nicoud et al. (2007) J. Gene Med. 9:1015); a retinitis pigmentosa gene promoter (Nicoud et al. (2007) supra); an interphotoreceptor retinoid-binding protein (IRBP) gene enhancer (Nicoud et al. (2007) supra); an IRBP gene promoter (Yokoyama et al. (1992) Exp Eye Res. 55:225); and the like.

[0627] In some embodiments, a gene modifying system, e.g., DNA encoding a gene modifying polypeptide, DNA encoding a template RNA, or DNA or RNA encoding a heterologous object sequence, is designed such that one or more elements is operably linked to a tissue-specific promoter, e.g., a promoter that is active in T-cells. In further embodiments, the T-cell active promoter is inactive in other cell types, e.g., B-cells, NK cells. In some embodiments, the T-cell active promoter is derived from a promoter for a gene encoding a component of the T-cell receptor, e.g., TRAC, TRBC, TRGC, TRDC. In some embodiments, the T-cell active promoter is derived from a promoter for a gene encoding a component of a T-cell-specific cluster of differentiation protein, e.g., CD3, e.g., CD3D, CD3E, CD3G, CD3Z. In some embodiments, T-cell-specific promoters in gene modifying systems are discovered by comparing publicly available gene expression data across cell types and selecting promoters from the genes with enhanced expression in T-cells. In some embodiments, promoters may be selecting depending on the desired expression breadth, e.g., promoters that are active in T-cells only, promoters that are active in NK cells only, promoters that are active in both T-cells and NK cells.

[0628] Cell-specific promoters known in the art may be used to direct expression of a gene modifying protein, e.g., as described herein. Nonlimiting exemplary mammalian cell-specific promoters have been characterized and used in mice expressing Cre recombinase in a cell-specific manner. Certain nonlimiting exemplary mammalian cell-specific promoters are listed in Table 1 of U.S. Pat. No. 9,845,481, incorporated herein by reference.

[0629] In some embodiments, a vector as described herein comprises an expression cassette. Typically, an expression cassette comprises the nucleic acid molecule of the instant invention operatively linked to a promoter sequence. For example, a promoter is operatively linked with a. coding sequence when it is capable of affecting the expression of that coding sequence (e.g., the coding sequence is under the transcriptional control of the promoter). Encoding sequences can be operatively linked to regulatory sequences in sense or antisense orientation. In certain embodiments, the promoter is a heterologous promoter. In certain embodiments, an expression cassette may comprise additional elements, for example, an intron, an enhancer, a polyadenylation site, a woodchuck response element (WRE), and/or other elements known to affect expression levels of the encoding sequence. A promoter typically controls the expression of a coding sequence or functional RNA. In certain embodiments, a promoter sequence comprises proximal and more distal upstream elements and can further comprise an enhancer element. An enhancer can typically stimulate promoter activity and may be an innate element of the promoter or a heterologous element inserted to enhance the level. or tissue-specificity of a promoter. In certain embodiments, the promoter is derived in its entirety from a native gene. In certain embodiments, the promoter is composed of different elements derived from different naturally occurring promoters. In certain embodiments, the promoter comprises a synthetic nucleotide sequence. It will be understood by those skilled. in the art that different promoters will direct the expression of a gene in different tissues or cell types, or at different stages of development, or in response to different environmental conditions or to the presence or the absence of a drug or transcriptional co-factor. Ubiquitous, cell-type-specific, tissue-specific, developmental stage-specific, and conditional promoters, for example, drug-responsive promoters (e.g., tetracycline-responsive promoters) are well known to those of skill in the art. Exemplary promoters include, but are not limited to, the phosphoglycerate kinase (PKG) promoter, CAG (composite of the CMV enhancer the chicken beta actin promoter (CBA and the rabbit beta globin intron), NSE (neuronal specific enolase), synapsin or NeuN promoters, the SV40 early promoter, mouse mammary tumor virus LTR promoter; adenovirus major late promoter (Ad MLP), a herpes simplex virus (HSV) promoter, a cytomegalovirus (CMV) promoter such as the CMV immediate early promoter region (CMV IE), SFFV promoter, rous sarcoma virus (RSV) promoter, synthetic promoters, hybrid promoters, and the like. Other promoters can be of human origin or from other species, including from mice. Common promoters include, e.g., the human cytomegalovirus (CMV) immediate early gene promoter, the SV40 early promoter, the Rous sarcoma virus long terminal repeat, [beta]-actin, rat insulin promoter, the phosphoglycerate kinase promoter, the human alpha-1 antitrypsin (hAAT) promoter, the transthyretin promoter, the TBG promoter and other liver-specific, promoters, the desmin promoter and similar muscle-specific promoters, the EF1-alpha promoter, hybrid promoters with multi-tissue specificity, promoters specific for neurons like synapsin and glyceraldehyde-3-phosphate dehydrogenase promoter, all of which are promoters well known and readily available to those of skill in the art, can be used to obtain high-level expression of the coding sequence of interest. In addition, sequences derived from non-viral genes, such as the murine metallothionein gene, will also find use herein. Such promoter sequences are commercially available from, e.g., Stratagene (San Diego, CA). Additional exemplary promoter sequences are described, for example, in WO2018213786A1 (incorporated by reference herein in its entirety).

[0630] In some embodiments, the apolipoprotein E enhancer (ApoE) or a functional fragment thereof is used, e.g., to drive expression in the liver. In some embodiments, two copies of the ApoE enhancer or a functional fragment thereof are used. In some embodiments, the ApoE enhancer or functional fragment thereof is used in combination with a promoter, e.g., the human alpha-1 antitrypsin (hAAT) promoter.

[0631] In some embodiments, the regulatory sequences impart tissue-specific gene expression capabilities. In some cases, the tissue-specific regulatory sequences bind tissue-specific transcription factors that induce transcription in a tissue specific manner, Various tissue-specific regulatory sequences (e.g., promoters, enhancers, etc.) are known in the art, Exemplary tissue-specific regulatory sequences include, but are not limited to, the following tissue-specific promoters: a liver-specific thyroxin binding globulin (TBG) promoter, a insulin promoter, a glucagon promoter, a somatostatin promoter, a pancreatic polypeptide (PPY) promoter, a synapsin-1 (Syn) promoter, a creatine kinase (MCI( )promoter, a mammalian destnin (DES) promoter, a α-myosin heavy Chain (α-MHC) promoter, or a cardiac Troponin T (cTnT) promoter. Other exemplary promoters include Beta-actin promoter, hepatitis B virus core promoter, Sandig et al., Gene Ther., 3:1002-9 (1996); alpha-fetoprotein (ALT) promoter, Arbuthnot et al., Hum. Gene Ther., 7:1503-14 (1996)), hone osteocalcin promoter (Stein et al., Mol. Biol. Rep., 24:185-96 (1997)); bone sialoprotein promoter (Chen et al., I. Bone Miner. Res. 11:654-64 (1996)), CD2 promoter (Hansal et al., I. Immunol., 161:1063-8 (1998); immunoglobulin heavy chain promoter, T cell receptor α-chain promoter, neuronal. such as neuron-specific enolase (NSE) promoter (Andersen et al., Cell. Md. INeurobiol., 13:503-15 (1993)), neurofilament light-chain gene promoter (Piccioli et al., Proc. Natl. Acad. Sci. USA, 88:5611-5 (1991)), and the neuron-specific vgf gene promoter (Piccioli et al., Neuron, 15:373-84 (1995)), and others. Additional exemplary promoter sequences are described, for example, in U.S. patent Ser. No. 10/300,146 (incorporated herein by reference in its entirety). In some embodiments, a tissue-specific regulatory element, e.g., a tissue-specific promoter, is selected from one known to be operably linked to a gene that is highly expressed in a given tissue, e.g., as measured by RNA-seq or protein expression data, or a combination thereof. Methods for analyzing tissue specificity by expression are taught in Fagerberg et al. Mol Cell Proteomics 13(2):397-406 (2014), which is incorporated herein by reference in its entirety.

[0632] In some embodiments, a vector described herein is a multicistronic expression construct. Multicistronic expression constructs include, for example, constructs harboring a first expression cassette, e.g. comprising a first promoter and a first encoding nucleic acid sequence, and a second expression cassette, e.g. comprising a second promoter and a second encoding nucleic acid sequence. Such multicistronic expression constructs may, in some instances, be particularly useful in the delivery of non-translated gene products, such as hairpin RNAs, together with a polypeptide, for example, a gene modifying polypeptide and gene modifying template. In some embodiments, multicistronic expression constructs may exhibit reduced expression levels of one or more of the included transgenes, for example, because of promoter interference or the presence of incompatible nucleic acid elements in close proximity. If a multicistronic expression construct is part of a viral vector, the presence of a self-complementary nucleic acid sequence may; in some instances, interfere with the formation of structures necessary for viral reproduction or packaging.

[0633] In some embodiments, the sequence encodes an RNA with a hairpin. In some embodiments, the hairpin RNA is a guide RNA, a template RNA, a shRNA, or a microRNA. In some embodiments, the first promoter is an RNA polymerase 1 promoter. In some embodiments, the first promoter is an RNA polymerase H promoter. In some embodiments, the second promoter is an RNA polymerase Iii promoter. In some embodiments, the second promoter is a. U6 or H1 promoter.

[0634] Without wishing to be bound by theory, multicistronic expression constructs may not achieve optimal expression levels as compared to expression systems containing only one cistron. One of the suggested causes of lower expression levels achieved with multicistronic expression constructs comprising two or more promoter elements is the phenomenon of promoter interference (see, e.g., Curtin J A, Dane A P, Swanson A, Alexander I E, Ohm S L. Bidirectional promoter interference between two widely used internal heterologous promoters in a late-generation lentiviral construct. Gene Ther. 2008 March; 15(5):384-90; and Martin-Duque P, Jezzard S, Kaftansis L, Vassaux G. Direct comparison ofthe insulating properties of two genetic elements in an adenoviral vector containing two different expression cassettes. Hum Gene Tiler. 2004 October; 15(10):995-1002; both references incorporated herein by reference for disclosure of promoter interference phenomenon). In some embodiments, the problem of promoter interference may be overcome, e.g., by producing multicistronic expression constructs comprising only one promoter driving transcription of multiple encoding nucleic acid sequences separated by internal ribosomal entry sites, or by separating cistrons comprising their own promoter with transcriptional insulator elements. In some embodiments, single-promoter driven expression of multiple cistrons may result in uneven expression levels of the cistrons. In some embodiments, a promoter cannot efficiently: be isolated and isolation elements may not be compatible with some gene transfer vectors, for example, some retroviral vectors.

[0635] MicroRNAs

[0636] MicroRNAs (miRNAs) and other small interfering nucleic acids generally regulate gene expression via target RNA transcript cleavageldegradation or translational repression of the target messenger RNA (mRNA). miRNAs may, in some instances, be natively expressed, typically as final 19-25 non-translated RNA products. miRNAs generally exhibit their activity through sequence-.specific interactions with the 3′ untranslated regions (UTR) of target mRNAs. These endogenously expressed miRNAs may form hairpin precursors that are subsequently processed into an miRNA duplex, and further into a mature single stranded miRNA molecule This mature miRNA generally guides a multi protein complex, miRISC, which identifies target 3′ regions of target mRNAs based upon their complementarity to the mature miRNA. Useful transgene products may include, for example, miRNAs or miRNA binding sites that regulate the expression of a linked polypeptide. A non-limiting list of miRNA genes; the products of these genes and their homologues are useful as transgenes or as targets for small interfering nucleic acids (e.g., miRINA sponges, antisense oligonucleotides), e.g., in methods such as those listed in U.S. Ser. No. 10/300,146, 22:2525:48, are herein incorporated by reference. In some embodiments, one or more binding sites for one or more of the foregoing miRINAs are incorporated in a transgene, e.g., a transgene delivered by a rAAV vector, e.g., to inhibit the expression of the transgene in one or more tissues of an animal harboring the transgene. In some embodiments, a binding site may be selected to control the expression of a transgene in a tissue specific manner. For example, binding sites fix the liver-specific miR-122 may be incorporated into a transgene to inhibit expression of that transgene in the liver. Additional exemplary miRNA sequences are described, for example, in U.S. Pat. No. 10,300,146 (incorporated herein by reference in its entirety).

[0637] An miR inhibitor or miRNA inhibitor is generally an agent that blocks miRNA expression and/or processing. Examples of such agents include, but are not limited to, microRNA antagonists, microRNA specific antisense, microRNA sponges; and microRNA oligonucleotides (double-stranded, hairpin, short oligonucleotides) that inhibit miRNA interaction with a Drosha complex. MicroRNA inhibitors, e.g., miRNA sponges; can be expressed in cells from transgenes (e.g., as described in Ebert, M. S. Nature Methods, Epub Aug. 12, 2007; incorporated by reference herein in its entirety). In some embodiments, microRNA sponges, or other miR inhibitors, are used with the AAVs. InicroRNA sponges generally specifically inhibit miRNAs through a complementary heptameric seed sequence. In some embodiments, an entire family of miRNAs can be silenced using a single sponge sequence. Other methods for silencing miRNA function. (derepression of miRNA targets) in cells will be apparent to one of ordinary skill in the art.

[0638] In some embodiments, a gene modifying system, template RNA, or polypeptide described herein is administered to or is active in (e.g., is more active in) a target tissue, e.g., a first tissue. In some embodiments, the gene modifying system, template RNA, or polypeptide is not administered to or is less active in (e.g., not active in) a non-target tissue. In some embodiments, a gene modifying system, template RNA, or polypeptide described herein is useful for modifying DNA in a target tissue, e.g., a first tissue, (e.g., and not modifying DNA in a non-target tissue).

[0639] In some embodiments, a gene modifying system comprises (a) a polypeptide described herein or a nucleic acid encoding the same, (b) a template nucleic acid (e.g., template RNA) described herein, and (c) one or more first tissue-specific expression-control sequences specific to the target tissue, wherein the one or more first tissue-specific expression-control sequences specific to the target tissue are in operative association with (a), (b), or (a) and (b), wherein, when associated with (a), (a) comprises a nucleic acid encoding the polypeptide.

[0640] In some embodiments, the nucleic acid in (b) comprises RNA.

[0641] In some embodiments, the nucleic acid in (b) comprises DNA.

[0642] In some embodiments, the nucleic acid in (b): (i) is single-stranded or comprises a single-stranded segment, e.g., is single-stranded DNA or comprises a single-stranded segment and one or more double stranded segments; (ii) has inverted terminal repeats; or (iii) both (i) and (ii).

[0643] In some embodiments, the nucleic acid in (b) is double-stranded or comprises a double-stranded segment.

[0644] In some embodiments, (a) comprises a nucleic acid encoding the polypeptide.

[0645] In some embodiments, the nucleic acid in (a) comprises RNA.

[0646] In some embodiments, the nucleic acid in (a) comprises DNA.

[0647] In some embodiments, the nucleic acid in (a): (i) is single-stranded or comprises a single-stranded segment, e.g., is single-stranded DNA or comprises a single-stranded segment and one or more double stranded segments; (ii) has inverted terminal repeats; or (iii) both (i) and (ii).

[0648] In some embodiments, the nucleic acid in (a) is double-stranded or comprises a double-stranded segment.

[0649] In some embodiments, the nucleic acid in (a), (b), or (a) and (b) is linear.

[0650] In some embodiments, the nucleic acid in (a), (b), or (a) and (b) is circular, e.g., a plasmid or minicircle.

[0651] In some embodiments, the heterologous object sequence is in operative association with a first promoter.

[0652] In some embodiments, the one or more first tissue-specific expression-control sequences comprises a tissue specific promoter.

[0653] In some embodiments, the tissue-specific promoter comprises a first promoter in operative association with: (i) the heterologous object sequence, (ii) a nucleic acid encoding the retroviral RT, or (iii) (i) and (ii).

[0654] In some embodiments, the one or more first tissue-specific expression-control sequences comprises a tissue-specific microRNA recognition sequence in operative association with: (i) the heterologous object sequence, (ii) a nucleic acid encoding the retroviral RT domain, or (iii) (i) and (ii).

[0655] In some embodiments, a system comprises a tissue-specific promoter, and the system further comprises one or more tissue-specific microRNA recognition sequences, wherein: (i) the tissue specific promoter is in operative association with: (I) the heterologous object sequence, (II) a nucleic acid encoding the retroviral RT domain, or (III) (I) and (II); and/or (ii) the one or more tissue-specific microRNA recognition sequences are in operative association with: (I) the heterologous object sequence, (II) a nucleic acid encoding the retroviral RT, or (III) (I) and (II).

[0656] In some embodiments, wherein (a) comprises a nucleic acid encoding the polypeptide, the nucleic acid comprises a promoter in operative association with the nucleic acid encoding the polypeptide.

[0657] In some embodiments, the nucleic acid encoding the polypeptide comprises one or more second tissue-specific expression-control sequences specific to the target tissue in operative association with the polypeptide coding sequence.

[0658] In some embodiments, the one or more second tissue-specific expression-control sequences comprises a tissue specific promoter.

[0659] In some embodiments, the tissue-specific promoter is the promoter in operative association with the nucleic acid encoding the polypeptide.

[0660] In some embodiments, the one or more second tissue-specific expression-control sequences comprises a tissue-specific microRNA recognition sequence.

[0661] In some embodiments, the promoter in operative association with the nucleic acid encoding the polypeptide is a tissue-specific promoter, the system further comprising one or more tissue-specific microRNA recognition sequences.

[0662] In some embodiments, a nucleic acid component of a system provided by the invention is a sequence (e.g., encoding the polypeptide or comprising a heterologous object sequence) flanked by untranslated regions (UTRs) that modify protein expression levels. Various 5′ and 3′ UTRs can affect protein expression. For example, in some embodiments, the coding sequence may be preceded by a 5′ UTR that modifies RNA stability or protein translation. In some embodiments, the sequence may be followed by a 3′ UTR that modifies RNA stability or translation. In some embodiments, the sequence may be preceded by a 5′ UTR and followed by a 3′ UTR that modify RNA stability or translation. In some embodiments, the 5′ and/or 3′ UTR may be selected from the 5′ and 3′ UTRs of complement factor 3 (C3) (CACTCCTCCCCATCCTCTCCCTCTGTCCCTCTGTCCCTCTGACCCTGCACTGTCCCAG CACC; SEQ ID NO: 11,004) or orosomucoid 1 (ORM1) (CAGGACACAGCCTTGGATCAGGACAGAGACTTGGGGGCCATCCTGCCCCTCCAACC CGACATGTGTACCTCAGCTTTTTCCCTCACTTGCATCAATAAAGCTTCTGTGTTTGGA ACAGCTAA; SEQ ID NO: 11,005) (Asrani et al. RNA Biology 2018). In certain embodiments, the 5′ UTR is the 5′ UTR from C3 and the 3′ UTR is the 3′ UTR from ORM1. In certain embodiments, a 5′ UTR and 3′ UTR for protein expression, e.g., mRNA (or DNA encoding the RNA) for a gene modifying polypeptide or heterologous object sequence, comprise optimized expression sequences. In some embodiments, the 5′ UTR comprises GGGAAAUAAGAGAGAAAAGAAGAGUAAGAAGAAAUAUAAGAGCCACC (SEQ ID NO: 11,006) and/or the 3′ UTR comprising UGAUAAUAGGCUGGAGCCUCGGUGGCCAUGCUUCUUGCCCCUUGGGCCUCCCCCC AGCCCCUCCUCCCCUUCCUGCACCCGUACCCCCGUGGUCUUUGAAUAAAGUCUGA (SEQ ID NO: 11,007), e.g., as described in Richner et al. Cell 168(6): P1114-1125 (2017), the sequences of which are incorporated herein by reference.

[0663] In some embodiments, a 5′ and/or 3′ UTR may be selected to enhance protein expression. In some embodiments, a 5′ and/or 3′ UTR may be selected to modify protein expression such that overproduction inhibition is minimized. In some embodiments, UTRs are around a coding sequence, e.g., outside the coding sequence and in other embodiments proximal to the coding sequence, In some embodiments, additional regulatory elements (e.g., miRNA binding sites, cis-regulatory sites) are included in the UTRs.

[0664] In some embodiments, an open reading frame of a gene modifying system, e.g., an ORF of an mRNA (or DNA encoding an mRNA) encoding a gene modifying polypeptide or one or more ORFs of an mRNA (or DNA encoding an mRNA) of a heterologous object sequence, is flanked by a 5′ and/or 3′ untranslated region (UTR) that enhances the expression thereof. In some embodiments, the 5′ UTR of an mRNA component (or transcript produced from a DNA component) of the system comprises the sequence 5′-GGGAAAUAAGAGAGAAAAGAAGAGUAAGAAGAAAUAUAAGAGCCACC-3′; SEQ ID NO: 11,008). In some embodiments, the 3′ UTR of an mRNA component (or transcript produced from a DNA component) of the system comprises the sequence 5′-UGAUAAUAGGCUGGAGCCUCGGUGGCCAUGCUUCUUGCCCCUUGGGCCUCCCCCC AGCCCCUCCUCCCCUUCCUGCACCCGUACCCCCGUGGUCUUUGAAUAAAGUCUGA-3′ (SEQ ID NO: 11,009). This combination of 5′ UTR and 3′ UTR has been shown to result in desirable expression of an operably linked ORF by Richner et al. Cell 168(6): P1114-1125 (2017), the teachings and sequences of which are incorporated herein by reference. In some embodiments, a system described herein comprises a DNA encoding a transcript, wherein the DNA comprises the corresponding 5′ UTR and 3′ UTR sequences, with T substituting for U in the above-listed sequence). In some embodiments, a DNA vector used to produce an RNA component of the system further comprises a promoter upstream of the 5′ UTR for initiating in vitro transcription, e.g., a T7, T3, or SP6 promoter. The 5′ UTR above begins with GGG, which is a suitable start for optimizing transcription using T7 RNA polymerase. For tuning transcription levels and altering the transcription start site nucleotides to fit alternative 5′ UTRs, the teachings of Davidson et al. Pac Symp Biocomput 433-443 (2010) describe T7 promoter variants, and the methods of discovery thereof, that fulfill both of these traits.

### Viral Vectors and Components Thereof

[0665] Viruses are a useful source of delivery vehicles for the systems described herein, in addition to a source of relevant enzymes or domains as described herein, e.g., as sources of polymerases and polymerase functions used herein, e.g., DNA-dependent DNA polymerase, RNA-dependent RNA polymerase, RNA-dependent DNA polymerase, DNA-dependent RNA polymerase, reverse transcriptase. Some enzymes, e.g., reverse transcriptases, may have multiple activities, e.g., be capable of both RNA-dependent DNA polymerization and DNA-dependent DNA polymerization, e.g., first and second strand synthesis. In some embodiments, the virus used as a gene modifying delivery system or a source of components thereof may be selected from a group as described by Baltimore Bacteriol Rev 35(3):235-241 (1971).

[0666] In some embodiments, the virus is selected from a Group I virus, e.g., is a DNA virus and packages dsDNA into virions. In some embodiments, the Group I virus is selected from, e.g., Adenoviruses, Herpesviruses, Poxviruses.

[0667] In some embodiments, the virus is selected from a Group II virus, e.g., is a DNA virus and packages ssDNA into virions. In some embodiments, the Group II virus is selected from, e.g., Parvoviruses. In some embodiments, the parvovirus is a dependoparvovirus, e.g., an adeno-associated virus (AAV).

[0668] In some embodiments, the virus is selected from a Group III virus, e.g., is an RNA virus and packages dsRNA into virions. In some embodiments, the Group III virus is selected from, e.g., Reoviruses. In some embodiments, one or both strands of the dsRNA contained in such virions is a coding molecule able to serve directly as mRNA upon transduction into a host cell, e.g., can be directly translated into protein upon transduction into a host cell without requiring any intervening nucleic acid replication or polymerization steps.

[0669] In some embodiments, the virus is selected from a Group IV virus, e.g., is an RNA virus and packages ssRNA(+) into virions. In some embodiments, the Group IV virus is selected from, e.g., Coronaviruses, Picornaviruses, Togaviruses. In some embodiments, the ssRNA(+) contained in such virions is a coding molecule able to serve directly as mRNA upon transduction into a host cell, e.g., can be directly translated into protein upon transduction into a host cell without requiring any intervening nucleic acid replication or polymerization steps.

[0670] In some embodiments, the virus is selected from a Group V virus, e.g., is an RNA virus and packages ssRNA(−) into virions. In some embodiments, the Group V virus is selected from, e.g., Orthomyxoviruses, Rhabdoviruses. In some embodiments, an RNA virus with an ssRNA(−) genome also carries an enzyme inside the virion that is transduced to host cells with the viral genome, e.g., an RNA-dependent RNA polymerase, capable of copying the ssRNA(−) into ssRNA(+) that can be translated directly by the host.

[0671] In some embodiments, the virus is selected from a Group VI virus, e.g., is a retrovirus and packages ssRNA(+) into virions. In some embodiments, the Group VI virus is selected from, e.g., retroviruses. In some embodiments, the retrovirus is a lentivirus, e.g., HIV-1, HIV-2, SIV, BIV. In some embodiments, the retrovirus is a spumavirus, e.g., a foamy virus, e.g., HFV, SFV, BFV. In some embodiments, the ssRNA(+) contained in such virions is a coding molecule able to serve directly as mRNA upon transduction into a host cell, e.g., can be directly translated into protein upon transduction into a host cell without requiring any intervening nucleic acid replication or polymerization steps. In some embodiments, the ssRNA(+) is first reverse transcribed and copied to generate a dsDNA genome intermediate from which mRNA can be transcribed in the host cell. In some embodiments, an RNA virus with an ssRNA(+) genome also carries an enzyme inside the virion that is transduced to host cells with the viral genome, e.g., an RNA-dependent DNA polymerase, capable of copying the ssRNA(+) into dsDNA that can be transcribed into mRNA and translated by the host. In some embodiments, the reverse transcriptase from a Group VI retrovirus is incorporated as the reverse transcriptase domain of a gene modifying polypeptide.

[0672] In some embodiments, the virus is selected from a Group VII virus, e.g., is a retrovirus and packages dsRNA into virions. In some embodiments, the Group VII virus is selected from, e.g., Hepadnaviruses. In some embodiments, one or both strands of the dsRNA contained in such virions is a coding molecule able to serve directly as mRNA upon transduction into a host cell, e.g., can be directly translated into protein upon transduction into a host cell without requiring any intervening nucleic acid replication or polymerization steps. In some embodiments, one or both strands of the dsRNA contained in such virions is first reverse transcribed and copied to generate a dsDNA genome intermediate from which mRNA can be transcribed in the host cell. In some embodiments, an RNA virus with a dsRNA genome also carries an enzyme inside the virion that is transduced to host cells with the viral genome, e.g., an RNA-dependent DNA polymerase, capable of copying the dsRNA into dsDNA that can be transcribed into mRNA and translated by the host. In some embodiments, the reverse transcriptase from a Group VII retrovirus is incorporated as the reverse transcriptase domain of a gene modifying polypeptide.

[0673] In some embodiments, virions used to deliver nucleic acid in this invention may also carry enzymes involved in the process of gene modification. For example, a retroviral virion may contain a reverse transcriptase domain that is delivered into a host cell along with the nucleic acid. In some embodiments, an RNA template may be associated with a gene modifying polypeptide within a virion, such that both are co-delivered to a target cell upon transduction of the nucleic acid from the viral particle. In some embodiments, the nucleic acid in a virion may comprise DNA, e.g., linear ssDNA, linear dsDNA, circular ssDNA, circular dsDNA, minicircle DNA, dbDNA, ceDNA. In some embodiments, the nucleic acid in a virion may comprise RNA, e.g., linear ssRNA, linear dsRNA, circular ssRNA, circular dsRNA. In some embodiments, a viral genome may circularize upon transduction into a host cell, e.g., a linear ssRNA molecule may undergo a covalent linkage to form a circular ssRNA, a linear dsRNA molecule may undergo a covalent linkage to form a circular dsRNA or one or more circular ssRNA. In some embodiments, a viral genome may replicate by rolling circle replication in a host cell. In some embodiments, a viral genome may comprise a single nucleic acid molecule, e.g., comprise a non-segmented genome. In some embodiments, a viral genome may comprise two or more nucleic acid molecules, e.g., comprise a segmented genome. In some embodiments, a nucleic acid in a virion may be associated with one or proteins. In some embodiments, one or more proteins in a virion may be delivered to a host cell upon transduction. In some embodiments, a natural virus may be adapted for nucleic acid delivery by the addition of virion packaging signals to the target nucleic acid, wherein a host cell is used to package the target nucleic acid containing the packaging signals.

[0674] In some embodiments, a virion used as a delivery vehicle may comprise a commensal human virus. In some embodiments, a virion used as a delivery vehicle may comprise an anellovirus, the use of which is described in WO2018232017A1, which is incorporated herein by reference in its entirety.

### AAV Administration

[0675] In some embodiments, an adeno-associated virus (AAV) is used in conjunction with the system, template nucleic acid, and/or polypeptide described herein. In some embodiments, an AAV is used to deliver, administer, or package the system, template nucleic acid, and/or polypeptide described herein. In some embodiments, the AAV is a recombinant AAV (rAAV).

[0676] In some embodiments, a system comprises (a) a polypeptide described herein or a nucleic acid encoding the same, (b) a template nucleic acid (e.g., template RNA) described herein, and (c) one or more first tissue-specific expression-control sequences specific to the target tissue, wherein the one or more first tissue-specific expression-control sequences specific to the target tissue are in operative association with (a), (b), or (a) and (b), wherein, when associated with (a), (a) comprises a nucleic acid encoding the polypeptide.

[0677] In some embodiments, a system described herein further comprises a first recombinant adeno-associated virus (rAAV) capsid protein; wherein the at least one of (a) or (b) is associated with the first rAAV capsid protein, wherein at least one of (a) or (b) is flanked by AAV inverted terminal repeats (ITRs).

[0678] In some embodiments, (a) and (b) are associated with the first rAAV capsid protein.

[0679] In some embodiments, (a) and (b) are on a single nucleic acid.

[0680] In some embodiments, the system further comprises a second rAAV capsid protein, wherein at least one of (a) or (b) is associated with the second rAAV capsid protein, and wherein the at least one of (a) or (b) associated with the second rAAV capsid protein is different from the at least one of (a) or (b) is associated with the first rAAV capsid protein.

[0681] In some embodiments, the at least one of (a) or (b) is associated with the first or second rAAV capsid protein is dispersed in the interior of the first or second rAAV capsid protein, which first or second rAAV capsid protein is in the form of an AAV capsid particle.

[0682] In some embodiments, the system further comprises a nanoparticle, wherein the nanoparticle is associated with at least one of (a) or (b).

[0683] In some embodiments, (a) and (b), respectively are associated with: a) a first rAAV capsid protein and a second rAAV capsid protein; b) a nanoparticle and a first rAAV capsid protein; c) a first rAAV capsid protein; d) a first adenovirus capsid protein; e) a first nanoparticle and a second nanoparticle; or f) a first nanoparticle.

[0684] Viral vectors are useful for delivering all or part of a system provided by the invention, e.g., for use in methods provided by the invention. Systems derived from different viruses have been employed for the delivery of polypeptides or nucleic acids; for example: integrase-deficient lentivirus, adenovirus, adeno-associated virus (AAV), herpes simplex virus, and baculovirus (reviewed in Hodge et al. Hum Gene Ther 2017; Narayanavari et al. Crit Rev Biochem Mol Biol 2017; Boehme et al. Curr Gene Ther 2015).

[0685] Adenoviruses are common viruses that have been used as gene delivery vehicles given well-defined biology, genetic stability, high transduction efficiency, and ease of large-scale production (see, for example, review by Lee et al. Genes & Diseases 2017). They possess linear dsDNA genomes and come in a variety of serotypes that differ in tissue and cell tropisms. In order to prevent replication of infectious virus in recipient cells, adenovirus genomes used for packaging are deleted of some or all endogenous viral proteins, which are provided in trans in viral production cells. This renders the genomes helper-dependent, meaning they can only be replicated and packaged into viral particles in the presence of the missing components provided by so-called helper functions. A helper-dependent adenovirus system with all viral ORFs removed may be compatible with packaging foreign DNA of up to −37 kb (Parks et al. J Virol 1997). In some embodiments, an adenoviral vector is used to deliver DNA corresponding to the polypeptide or template component of the gene modifying system, or both are contained on separate or the same adenoviral vector. In some embodiments, the adenovirus is a helper-dependent adenovirus (HD-AdV) that is incapable of self-packaging. In some embodiments, the adenovirus is a high-capacity adenovirus (HC-AdV) that has had all or a substantial portion of endogenous viral ORFs deleted, while retaining the necessary sequence components for packaging into adenoviral particles. For this type of vector, the only adenoviral sequences required for genome packaging are noncoding sequences: the inverted terminal repeats (ITRs) at both ends and the packaging signal at the 5′-end (Jager et al. Nat Protoc 2009). In some embodiments, the adenoviral genome also comprises stuffer DNA to meet a minimal genome size for optimal production and stability (see, for example, Hausl et al. Mol Ther 2010). In some embodiments, an adenovirus is used to deliver a gene modifying system to the liver.

[0686] In some embodiments, an adenovirus is used to deliver a gene modifying system to HSCs, e.g., HDAd5/35++. HDAd5/35++is an adenovirus with modified serotype 35 fibers that de-target the vector from the liver (Wang et al. Blood Adv 2019). In some embodiments, the adenovirus that delivers a gene modifying system to HSCs utilizes a receptor that is expressed specifically on primitive HSCs, e.g., CD46.

[0687] Adeno-associated viruses (AAV) belong to the parvoviridae family and more specifically constitute the dependoparvovirus genus. The AAV genome is composed of a linear single-stranded DNA molecule which contains approximately 4.7 kilobases (kb) and consists of two major open reading frames (ORFs) encoding the non-structural Rep (replication) and structural Cap (capsid) proteins. A second ORF within the cap gene was identified that encodes the assembly-activating protein (AAP). The DNAs flanking the AAV coding regions are two cis-acting inverted terminal repeat (ITR) sequences, approximately 145 nucleotides in length, with interrupted palindromic sequences that can be folded into energetically stable hairpin structures that function as primers of DNA replication. In addition to their role in DNA replication, the ITR sequences have been shown to be involved in viral DNA integration into the cellular genome, rescue from the host genome or plasmid, and encapsidation of viral nucleic acid into mature virions (Muzyczka, (1992) Curr. Top. Micro. Immunol. 158:97-129). In some embodiments, one or more gene modifying nucleic acid components is flanked by ITRs derived from AAV for viral packaging. See, e.g., WO2019113310.

[0688] In some embodiments, one or more components of the gene modifying system are carried via at least one AAV vector. In some embodiments, the at least one AAV vector is selected for tropism to a particular cell, tissue, organism. In some embodiments, the AAV vector is pseudotyped, e.g., AAV2/8, wherein AAV2 describes the design of the construct but the capsid protein is replaced by that from AAV8. It is understood that any of the described vectors could be pseudotype derivatives, wherein the capsid protein used to package the AAV genome is derived from that of a different AAV serotype. Without wishing to be limited in vector choice, a list of exemplary AAV serotypes can be found in Table 18. In some embodiments, an AAV to be employed for gene modifying may be evolved for novel cell or tissue tropism as has been demonstrated in the literature (e.g., Davidsson et al. Proc Natl Acad Sci USA 2019).

[0689] In some embodiments, the AAV delivery vector is a vector which has two AAV inverted terminal repeats (ITRs) and a nucleotide sequence of interest (for example, a sequence coding for a gene modifying polypeptideor a DNA template, or both), each of said ITRs having an interrupted (or noncontiguous) palindromic sequence, i.e., a sequence composed of three segments: a first segment and a last segment that are identical when read 5′—>3′ but hybridize when placed against each other, and a segment that is different that separates the identical segments. See, for example, WO2012123430.

[0690] Conventionally, AAV virions with capsids are produced by introducing a plasmid or plasmids encoding the rAAV or scAAV genome, Rep proteins, and Cap proteins (Grimm et al, 1998). Upon introduction of these helper plasmids in trans, the AAV genome is “rescued” (i.e., released and subsequently recovered) from the host genome, and is further encapsidated to produce infectious AAV. In some embodiments, one or more gene modifying nucleic acids are packaged into AAV particles by introducing the ITR-flanked nucleic acids into a packaging cell in conjunction with the helper functions.

[0691] In some embodiments, the AAV genome is a so called self-complementary genome (referred to as scAAV), such that the sequence located between the ITRs contains both the desired nucleic acid sequence (e.g., DNA encoding the gene modifying polypeptide or template, or both) in addition to the reverse complement of the desired nucleic acid sequence, such that these two components can fold over and self-hybridize. In some embodiments, the self-complementary modules are separated by an intervening sequence that permits the DNA to fold back on itself, e.g., forms a stem-loop. An scAAV has the advantage of being poised for transcription upon entering the nucleus, rather than being first dependent on ITR priming and second-strand synthesis to form dsDNA. In some embodiments, one or more gene modifying components is designed as an scAAV, wherein the sequence between the AAV ITRs contains two reverse complementing modules that can self-hybridize to create dsDNA.

[0692] In some embodiments, nucleic acid (e.g., encoding a polypeptide, or a template, or both) delivered to cells is closed-ended, linear duplex DNA (CELiD DNA or ceDNA). In some embodiments, ceDNA is derived from the replicative form of the AAV genome (Li et al. PLoS One 2013). In some embodiments, the nucleic acid (e.g., encoding a polypeptide, or a template DNA, or both) is flanked by ITRs, e.g., AAV ITRs, wherein at least one of the ITRs comprises a terminal resolution site and a replication protein binding site (sometimes referred to as a replicative protein binding site). In some embodiments, the ITRs are derived from an adeno-associated virus, e.g., AAV1, AAV2, AAV3, AAV4, AAV5, AAV6, AAV7, AAV8, AAV9, AAV10, AAV11, AAV12, or a combination thereof. In some embodiments, the ITRs are symmetric. In some embodiments, the ITRs are asymmetric. In some embodiments, at least one Rep protein is provided to enable replication of the construct. In some embodiments, the at least one Rep protein is derived from an adeno-associated virus, e.g., AAV1, AAV2, AAV3, AAV4, AAV5, AAV6, AAV7, AAV8, AAV9, AAV10, AAV11, AAV12, or a combination thereof. In some embodiments, ceDNA is generated by providing a production cell with (i) DNA flanked by ITRs, e.g., AAV ITRs, and (ii) components required for ITR-dependent replication, e.g., AAV proteins Rep78 and Rep52 (or nucleic acid encoding the proteins). In some embodiments, ceDNA is free of any capsid protein, e.g., is not packaged into an infectious AAV particle. In some embodiments, ceDNA is formulated into LNPs (see, for example, WO2019051289A1).

[0693] In some embodiments, the ceDNA vector consists of two self-complementary sequences, e.g., asymmetrical or symmetrical or substantially symmetrical ITRs as defined herein, flanking said expression cassette, wherein the ceDNA vector is not associated with a capsid protein. In some embodiments, the ceDNA vector comprises two self-complementary sequences found in an AAV genome, where at least one ITR comprises an operative Rep-binding element (RBE) (also sometimes referred to herein as “RBS”) and a terminal resolution site (trs) of AAV or a functional variant of the RBE. See, for example, WO2019113310.

[0694] In some embodiments, the AAV genome comprises two genes that encode four replication proteins and three capsid proteins, respectively. In some embodiments, the genes are flanked on either side by 145-bp inverted terminal repeats (ITRs). In some embodiments, the virion comprises up to three capsid proteins (Vp1, Vp2, and/or Vp3), e.g., produced in a 1:1:10 ratio. In some embodiments, the capsid proteins are produced from the same open reading frame and/or from differential splicing (Vp1) and alternative translational start sites (Vp2 and Vp3, respectively). Generally, Vp3 is the most abundant subunit in the virion and participates in receptor recognition at the cell surface defining the tropism of the virus. In some embodiments, Vp1 comprises a phospholipase domain, e.g., which functions in viral infectivity, in the N-terminus of Vp1.

[0695] In some embodiments, packaging capacity of the viral vectors limits the size of the gene modifying system that can be packaged into the vector. For example, the packaging capacity of the AAVs can be about 4.5 kb (e.g., about 3.0, 3.5, 4.0, 4.5, 5.0, 5.5, or 6.0 kb), e.g., including one or two inverted terminal repeats (ITRs), e.g., 145 base ITRs.

[0696] In some embodiments, recombinant AAV (rAAV) comprises cis-acting 145-bp ITRs flanking vector transgene cassettes, e.g., providing up to 4.5 kb for packaging of foreign DNA. Subsequent to infection, rAAV can, in some instances, express a fusion protein of the invention and persist without integration into the host genome by existing episomally in circular head-to-tail concatemers. rAAV can be used, for example, in vitro and in vivo. In some embodiments, AAV-mediated gene delivery requires that the length of the coding sequence of the gene is equal or greater in size than the wild-type AAV genome.

[0697] AAV delivery of genes that exceed this size and/or the use of large physiological regulatory elements can be accomplished, for example, by dividing the protein(s) to be delivered into two or more fragments. In some embodiments, the N-terminal fragment is fused to an intein-N sequence. In some embodiments, the C-terminal fragment is fused to an intein-C sequence. In embodiments, the fragments are packaged into two or more AAV vectors.

[0698] In some embodiments, dual AAV vectors are generated by splitting a large transgene expression cassette in two separate halves (5′ and 3′ ends, or head and tail), e.g., wherein each half of the cassette is packaged in a single AAV vector (of <5 kb). The re-assembly of the full-length transgene expression cassette can, in some embodiments, then be achieved upon co-infection of the same cell by both dual AAV vectors. In some embodiments, co-infection is followed by one or more of: (1) homologous recombination (HR) between 5′ and 3′ genomes (dual AAV overlapping vectors); (2) ITR-mediated tail-to-head concatemerization of 5′ and 3′ genomes (dual AAV trans-splicing vectors); and/or (3) a combination of these two mechanisms (dual AAV hybrid vectors). In some embodiments, the use of dual AAV vectors in vivo results in the expression of full-length proteins. In some embodiments, the use of the dual AAV vector platform represents an efficient and viable gene transfer strategy for transgenes of greater than about 4.0, 4.1, 4.2, 4.3, 4.4, 4.5, 4.6, 4.7, 4.8, 4.9, or 5.0 kb in size. In some embodiments, AAV vectors can also be used to transduce cells with target nucleic acids, e.g., in the in vitro production of nucleic acids and peptides. In some embodiments, AAV vectors can be used for in vivo and ex vivo gene therapy procedures (see, e.g., West et al., Virology 160:38-47 (1987); U.S. Pat. No. 4,797,368; WO 93/24641; Kotin, Human Gene Therapy 5:793-801 (1994); Muzyczka, J. Clin. Invest.94:1351 (1994); each of which is incorporated herein by reference in their entirety). The construction of recombinant AAV vectors is described in a number of publications, including U.S. Pat. No. 5,173,414; Tratschin et al., Mol. Cell. Biol. 5:3251-3260 (1985); Tratschin, et al., Mol. Cell. Biol. 4:2072-2081 (1984); Hermonat & Muzyczka, PNAS 81:6466-6470 (1984); and Samulski et al., J. Viro1.63:03822-3828 (1989) (incorporated by reference herein in their entirety).

[0699] In some embodiments, a gene modifying polypeptide described herein (e.g., with or without one or more guide nucleic acids) can be delivered using AAV, lentivirus, adenovirus or other plasmid or viral vector types, in particular, using formulations and doses from, for example, U.S. Pat. No. 8,454,972 (formulations, doses for adenovirus), U.S. Pat. No. 8,404,658 (formulations, doses for AAV) and U.S. Pat. No. 5,846,946 (formulations, doses for DNA plasmids) and from clinical trials and publications regarding the clinical trials involving lentivirus, AAV and adenovirus. For example, for AAV, the route of administration, formulation and dose can be as described in U.S. Pat. No. 8,454,972 and as in clinical trials involving AAV. For adenovirus, the route of administration, formulation and dose can be as described in U.S. Pat. No. 8,404,658 and as in clinical trials involving adenovirus. For plasmid delivery, the route of administration, formulation and dose can be as described in U.S. Pat. No. 5,846,946 and as in clinical studies involving plasmids. Doses can be based on or extrapolated to an average 70 kg individual (e.g. a male adult human), and can be adjusted for patients, subjects, mammals of different weight and species. Frequency of administration is within the ambit of the medical or veterinary practitioner (e.g., physician, veterinarian), depending on usual factors including the age, sex, general health, other conditions of the patient or subject and the particular condition or symptoms being addressed. In some embodiments, the viral vectors can be injected into the tissue of interest. For cell-type specific gene modifying, the expression of the gene modifying polypeptide and optional guide nucleic acid can, in some embodiments, be driven by a cell-type specific promoter.

[0700] In some embodiments, AAV allows for low toxicity, for example, due to the purification method not requiring ultracentrifugation of cell particles that can activate the immune response. In some embodiments, AAV allows low probability of causing insertional mutagenesis, for example, because it does not substantially integrate into the host genome.

[0701] In some embodiments, AAV has a packaging limit of about 4.4, 4.5, 4.6, 4.7, or 4.75 kb. In some embodiments, a gene modifying polypeptide-encoding sequence, promoter, and transcription terminator can fit into a single viral vector. SpCas9 (4.1 kb) may, in some instances, be difficult to package into AAV. Therefore, in some embodiments, a gene modifying polypeptide coding sequence is used that is shorter in length than other gene modifying polypeptide coding sequences or base editors. In some embodiments, the gene modifying polypeptide encoding sequences are less than about 4.5 kb, 4.4 kb, 4.3 kb, 4.2 kb, 4.1 kb, 4 kb, 3.9 kb, 3.8 kb, 3.7 kb, 3.6 kb, 3.5 kb, 3.4 kb, 3.3 kb, 3.2 kb, 3.1 kb, 3 kb, 2.9 kb, 2.8 kb, 2.7 kb, 2.6 kb, 2.5 kb, 2 kb, or 1.5 kb.

[0702] An AAV can be AAV1, AAV2, AAVS or any combination thereof. In some embodiments, the type of AAV is selected with respect to the cells to be targeted; e.g., AAV serotypes 1, 2, 5 or a hybrid capsid AAV1, AAV2, AAV5 or any combination thereof can be selected for targeting brain or neuronal cells; or AAV4 can be selected for targeting cardiac tissue. In some embodiments, AAV8 is selected for delivery to the liver. Exemplary AAV serotypes as to these cells are described, for example, in Grimm, D. et al, J. Viro1.82:5887-5911 (2008) (incorporated herein by reference in its entirety). In some embodiments, AAV refers all serotypes, subtypes, and naturally-occurring AAV as well as recombinant AAV. AAV may be used to refer to the virus itself or a derivative thereof. In some embodiments, AAV includes AAV1, AAV2, AAV3, AAV3B, AAV4, AAV5, AAV6, AAV6.2, AAV7, AAVrh.64R1, AAVhu.37, AAVrh.8, AAVrh.32.33, AAV8, AAV9, AAV-DJ, AAV2/8, AAVrh10, AAVLK03, AV10, AAV11, AAV 12, rhlO, and hybrids thereof, avian AAV, bovine AAV, canine AAV, equine AAV, primate AAV, non-primate AAV, and ovine AAV. The genomic sequences of various serotypes of AAV, as well as the sequences of the native terminal repeats (TRs), Rep proteins, and capsid subunits are known in the art. Such sequences may be found in the literature or in public databases such as GenBank. Additional exemplary AAV serotypes are listed in Table 18.

TABLE 18
Exemplary AAV serotypes.

| Target Tissue | Vehicle | Reference |
|---|---|---|
| Liver | AAV (AAV8¹, AAVrh.8¹, | 1. Wang et al., Mol. Ther. 18, |
| | AAVhu.37¹, AAV2/8, | 118-25 (2010) |
| | AAV2/rh10², AAV9, AAV2, | 2. Ginn et al., JHEP Reports, |
| | NP40³, NP59^{2,3}, AAV3B⁵, | 100065 (2019) |
| | AAV-DJ⁴, AAV-LK01⁴, | 3. Paulk et al., Mol. Ther. 26, |
| | AAV-LK02⁴, AAV-LK03⁴, | 289-303 (2018). |
| | AAV-LK19⁴, AAV5⁷ | 4. L. Lisowski et al., Nature. |
| | Adenovirus (Ad5, HC-AdV⁶) | 506, 382-6 (2014). |
| | | 5. L. Wang et al., Mol. Ther. |
| | | 23, 1877-87 (2015). |
| | | 6. Hausl Mol Ther (2010) |
| | | 7. Davidoff et al., Mol. Ther. |
| | | 11, 875-88 (2005) |
| Lung | AAV (AAV4, AAV5, | 1. Duncan et al., Mol Ther |
| | AAV6¹, AAV9, H22²) | Methods Clin Dev (2018) |
| | Adenovirus (Ad5, Ad3, | 2. Cooney et al., Am J Respir |
| | Ad21, Ad14)³ | Cell Mol Biol (2019) |
| | | 3. Li et al., Mol Ther Methods |
| | | Clin Dev (2019) |
| Skin | AAV (AAV6¹, AAV-LK19²) | 1. Petek et al., Mol. Ther. |
| | | (2010) |
| | | 2. L. Lisowski et al., Nature. |
| | | 506, 382-6 (2014). |
| HSCs | Adenovirus (HDAd5/35⁺⁺) | Wang et al. Blood Adv (2019) |

[0703] In some embodiments, a pharmaceutical composition (e.g., comprising an AAV as described herein) has less than 10% empty capsids, less than 8% empty capsids, less than 7% empty capsids, less than 5% empty capsids, less than 3% empty capsids, or less than 1% empty capsids. In some embodiments, the pharmaceutical composition has less than about 5% empty capsids. In some embodiments, the number of empty capsids is below the limit of detection. In some embodiments, it is advantageous for the pharmaceutical composition to have low amounts of empty capsids, e.g., because empty capsids may generate an adverse response (e.g., immune response, inflammatory response, liver response, and/or cardiac response), e.g., with little or no substantial therapeutic benefit.

[0704] In some embodiments, the residual host cell protein (rHCP) in the pharmaceutical composition is less than or equal to 100 ng/ml rHCP per 1×10¹³ vg/ml, e.g., less than or equal to 40 ng/ml rHCP per 1×10¹³ vg/ml or 1-50 ng/ml rHCP per 1×10¹³ vg/ml. In some embodiments, the pharmaceutical composition comprises less than 10 ng rHCP per 1.0×10¹³ vg, or less than 5 ng rHCP per 1.0×10¹³ vg, less than 4 ng rHCP per 1.0×10¹³ vg, or less than 3 ng rHCP per 1.0×10¹³ vg, or any concentration in between. In some embodiments, the residual host cell DNA (hcDNA) in the pharmaceutical composition is less than or equal to 5×10⁶ pg/ml hcDNA per 1×10¹³ vg/ml, less than or equal to 1.2×10⁶ pg/ml hcDNA per 1×10¹³ vg/ml, or 1 ×10⁵ pg/ml hcDNA per 1×10¹³ vg/ml. In some embodiments, the residual host cell DNA in said pharmaceutical composition is less than 5.0×10⁵ pg per 1×10¹³ vg, less than 2.0×10⁵ pg per 1.0×10¹³ vg, less than 1.1×10⁵ pg per 1.0×10¹³ vg, less than 1.0×10⁵ pg hcDNA per 1.0×10¹³ vg, less than 0.9×10⁵ pg hcDNA per 1.0×10¹³ vg, less than 0.8×10⁵ pg hcDNA per 1.0×10¹³ vg, or any concentration in between.

[0705] In some embodiments, the residual plasmid DNA in the pharmaceutical composition is less than or equal to 1.7×10⁵ pg/ml per 1.0×10¹³ vg/ml, or 1×10⁵ pg/ml per 1×1.0×10¹³ vg/ml, or 1.7×10⁶ pg/ml per 1.0×10¹³ vg/ml. In some embodiments, the residual DNA plasmid in the pharmaceutical composition is less than 10.0×10⁵ pg by 1.0×10¹³ vg, less than 8.0×10⁵ pg by 1.0×10¹³ vg or less than 6.8×10⁵ pg by 1.0×10¹³ vg. In embodiments, the pharmaceutical composition comprises less than 0.5 ng per 1.0×10¹³ vg, less than 0.3 ng per 1.0 ×10¹³ vg, less than 0.22 ng per 1.0×10¹³ vg or less than 0.2 ng per 1.0×10¹³ vg or any intermediate concentration of bovine serum albumin (BSA). In embodiments, the benzonase in the pharmaceutical composition is less than 0.2 ng by 1.0×10¹³ vg, less than 0.1 ng by 1.0×10¹³ vg, less than 0.09 ng by 1.0×10¹³ vg, less than 0.08 ng by 1.0×10¹³ vg or any intermediate concentration. In embodiments, Poloxamer 188 in the pharmaceutical composition is about 10 to 150 ppm, about 15 to 100 ppm or about 20 to 80 ppm. In embodiments, the cesium in the pharmaceutical composition is less than 50 pg/g (ppm), less than 30 pg/g (ppm) or less than 20 pg/g (ppm) or any intermediate concentration.

[0706] In embodiments, the pharmaceutical composition comprises total impurities, e.g., as determined by SDS-PAGE, of less than 10%, less than 8%, less than 7%, less than 6%, less than 5%, less than 4%, less than 3%, less than 2%, or any percentage in between. In embodiments, the total purity, e.g., as determined by SDS-PAGE, is greater than 90%, greater than 92%, greater than 93%, greater than 94%, greater than 95%, greater than 96%, greater than 97%, greater than 98%, or any percentage in between. In embodiments, no single unnamed related impurity, e.g., as measured by SDS-PAGE, is greater than 5%, greater than 4%, greater than 3% or greater than 2%, or any percentage in between. In embodiments, the pharmaceutical composition comprises a percentage of filled capsids relative to total capsids (e.g., peak 1+peak 2 as measured by analytical ultracentrifugation) of greater than 85%, greater than 86%, greater than 87%, greater than 88%, greater than 89%, greater than 90%, greater than 91%, greater than 91.9%, greater than 92%, greater than 93%, or any percentage in between. In embodiments of the pharmaceutical composition, the percentage of filled capsids measured in peak 1 by analytical ultracentrifugation is 20-80%, 25-75%, 30-75%, 35-75%, or 37.4-70.3%. In embodiments of the pharmaceutical composition, the percentage of filled capsids measured in peak 2 by analytical ultracentrifugation is 20-80%, 20-70%, 22-65%, 24-62%, or 24.9-60.1%.

[0707] In one embodiment, the pharmaceutical composition comprises a genomic titer of 1.0 to 5.0×10¹³ vg/mL, 1.2 to 3.0×10¹³ vg/mL or 1.7 to 2.3×10¹³ vg/ml. In one embodiment, the pharmaceutical composition exhibits a biological load of less than 5 CFU/mL, less than 4 CFU/mL, less than 3 CFU/mL, less than 2 CFU/mL or less than 1 CFU/mL or any intermediate contraction. In embodiments, the amount of endotoxin according to USP, for example, USP <85>(incorporated by reference in its entirety) is less than 1.0 EU/mL, less than 0.8 EU/mL or less than 0.75 EU/mL. In embodiments, the osmolarity of a pharmaceutical composition according to USP, for example, USP <785>(incorporated by reference in its entirety) is 350 to 450 mOsm/kg, 370 to 440 mOsm/kg or 390 to 430 mOsm/kg. In embodiments, the pharmaceutical composition contains less than 1200 particles that are greater than 25 μm per container, less than 1000 particles that are greater than 25 μm per container, less than 500 particles that are greater than 25 μm per container or any intermediate value. In embodiments, the pharmaceutical composition contains less than 10,000 particles that are greater than 10 μm per container, less than 8000 particles that are greater than 10 μm per container or less than 600 particles that are greater than 10 μm per container.

[0708] In one embodiment, the pharmaceutical composition has a genomic titer of 0.5 to 5.0×10¹³ vg/mL, 1.0 to 4.0×10¹³ vg/mL, 1.5 to 3.0×10¹³ vg/ml or 1.7 to 2.3×10¹³ vg/ml. In one embodiment, the pharmaceutical composition described herein comprises one or more of the following: less than about 0.09 ng benzonase per 1.0×10¹³ vg, less than about 30 pg/g (ppm) of cesium, about 20 to 80 ppm Poloxamer 188, less than about 0.22 ng BSA per 1.0×10¹³ vg, less than about 6.8×10⁵ pg of residual DNA plasmid per 1.0×10¹³ vg, less than about 1.1×10⁵ pg of residual hcDNA per 1.0×10¹³ vg, less than about 4 ng of rHCP per 1.0×10¹³ vg, pH 7.7 to 8.3, about 390 to 430 mOsm/kg, less than about 600 particles that are >25 μm in size per container, less than about 6000 particles that are >10 μm in size per container, about 1.7×10¹³-2.3×10¹³ vg/mL genomic titer, infectious titer of about 3.9×10⁸ to 8.4×10¹⁰ IU per 1.0×10¹³ vg, total protein of about 100-300 μg per 1.0×10¹³ vg, mean survival of >24 days in A7SMA mice with about 7.5×10¹³ vg/kg dose of viral vector, about 70 to 130% relative potency based on an in vitro cell based assay and/or less than about 5% empty capsid. In various embodiments, the pharmaceutical compositions described herein comprise any of the viral particles discussed here, retain a potency of between ±20%, between ±15%, between ±10% or within ±5% of a reference standard. In some embodiments, potency is measured using a suitable in vitro cell assay or in vivo animal model.

[0709] Additional methods of preparation, characterization, and dosing AAV particles are taught in WO2019094253, which is incorporated herein by reference in its entirety.

[0710] Additional rAAV constructs that can be employed consonant with the invention include those described in Wang et al 2019, available at://doi.org/10.1038/s41573-019-0012-9, including Table 1 thereof, which is incorporated by reference in its entirety.

### Lipid Nanoparticles

[0711] The methods and systems provided herein may employ any suitable carrier or delivery modality, including, in certain embodiments, lipid nanoparticles (LNPs). Lipid nanoparticles, in some embodiments, comprise one or more ionic lipids, such as non-cationic lipids (e.g., neutral or anionic, or zwitterionic lipids); one or more conjugated lipids (such as PEG-conjugated lipids or lipids conjugated to polymers described in Table 5 of WO2019217941; incorporated herein by reference in its entirety); one or more sterols (e.g., cholesterol); and, optionally, one or more targeting molecules (e.g., conjugated receptors, receptor ligands, antibodies); or combinations of the foregoing.

[0712] Lipids that can be used in nanoparticle formations (e.g., lipid nanoparticles) include, for example those described in Table 4 of WO2019217941, which is incorporated by reference—e.g., a lipid-containing nanoparticle can comprise one or more of the lipids in Table 4 of WO2019217941. Lipid nanoparticles can include additional elements, such as polymers, such as the polymers described in Table 5 of WO2019217941, incorporated by reference.

[0713] In some embodiments, conjugated lipids, when present, can include one or more of PEG-diacylglycerol (DAG) (such as 1-(monomethoxy-polyethyleneglycol)-2,3-dimyristoylglycerol (PEG-DMG)), PEG-dialkyloxypropyl (DAA), PEG-phospholipid, PEG-ceramide (Cer), a pegylated phosphatidylethanoloamine (PEG-PE), PEG succinate diacylglycerol (PEGS-DAG) (such as 4-O-(2′,3′-di(tetradecanoyloxy)propyl-1-O-(w-methoxy(polyethoxy)ethyl) butanedioate (PEG-S-DMG)), PEG dialkoxypropylcarbam, N-(carbonyl-methoxypoly ethylene glycol 2000)-1,2-distearoyl-sn-glycero-3-phosphoethanolamine sodium salt, and those described in Table 2 of WO2019051289 (incorporated by reference), and combinations of the foregoing.

[0714] In some embodiments, sterols that can be incorporated into lipid nanoparticles include one or more of cholesterol or cholesterol derivatives, such as those in WO2009/127060 or US2010/0130588, which are incorporated by reference. Additional exemplary sterols include phytosterols, including those described in Eygeris et al (2020), dx.doi.org/10.1021/acs.nanolett.0c01386, incorporated herein by reference.

[0715] In some embodiments, the lipid particle comprises an ionizable lipid, a non-cationic lipid, a conjugated lipid that inhibits aggregation of particles, and a sterol. The amounts of these components can be varied independently and to achieve desired properties. For example, in some embodiments, the lipid nanoparticle comprises an ionizable lipid is in an amount from about 20 mol % to about 90 mol % of the total lipids (in other embodiments it may be 20-70% (mol), 30-60% (mol) or 40-50% (mol); about 50 mol % to about 90 mol % of the total lipid present in the lipid nanoparticle), a non-cationic lipid in an amount from about 5 mol % to about 30 mol % of the total lipids, a conjugated lipid in an amount from about 0.5 mol % to about 20 mol % of the total lipids, and a sterol in an amount from about 20 mol % to about 50 mol % of the total lipids. The ratio of total lipid to nucleic acid (e.g., encoding the gene modifying polypeptide or template nucleic acid) can be varied as desired. For example, the total lipid to nucleic acid (mass or weight) ratio can be from about 10:1 to about 30:1.

[0716] In some embodiments, an ionizable lipid may be a cationic lipid, an ionizable cationic lipid, e.g., a cationic lipid that can exist in a positively charged or neutral form depending on pH, or an amine-containing lipid that can be readily protonated. In some embodiments, the cationic lipid is a lipid capable of being positively charged, e.g., under physiological conditions. Exemplary cationic lipids include one or more amine group(s) which bear the positive charge. In some embodiments, the lipid particle comprises a cationic lipid in formulation with one or more of neutral lipids, ionizable amine-containing lipids, biodegradable alkyn lipids, steroids, phospholipids including polyunsaturated lipids, structural lipids (e.g., sterols), PEG, cholesterol and polymer conjugated lipids. In some embodiments, the cationic lipid may be an ionizable cationic lipid. An exemplary cationic lipid as disclosed herein may have an effective pKa over 6.0. In embodiments, a lipid nanoparticle may comprise a second cationic lipid having a different effective pKa (e.g., greater than the first effective pKa), than the first cationic lipid. A lipid nanoparticle may comprise between 40 and 60 mol percent of a cationic lipid, a neutral lipid, a steroid, a polymer conjugated lipid, and a therapeutic agent, e.g., a nucleic acid (e.g., RNA) described herein (e.g., a template nucleic acid or a nucleic acid encoding a gene modifying polypeptide), encapsulated within or associated with the lipid nanoparticle. In some embodiments, the nucleic acid is co-formulated with the cationic lipid. The nucleic acid may be adsorbed to the surface of an LNP, e.g., an LNP comprising a cationic lipid. In some embodiments, the nucleic acid may be encapsulated in an LNP, e.g., an LNP comprising a cationic lipid. In some embodiments, the lipid nanoparticle may comprise a targeting moiety, e.g., coated with a targeting agent. In embodiments, the LNP formulation is biodegradable. In some embodiments, a lipid nanoparticle comprising one or more lipid described herein, e.g., Formula (i), (ii), (ii), (vii) and/or (ix) encapsulates at least 1%, at least 5%, at least 10%, at least 20%, at least 30%, at least 40%, at least 50%, at least 60%, at least 70%, at least 80%, at least 90%, at least 92%, at least 95%, at least 97%, at least 98% or 100% of an RNA molecule, e.g., template RNA and/or a mRNA encoding the gene modifying polypeptide.

[0717] In some embodiments, the lipid to nucleic acid ratio (mass/mass ratio; w/w ratio) can be in the range of from about 1:1 to about 25:1, from about 10:1 to about 14:1, from about 3:1 to about 15:1, from about 4:1 to about 10:1, from about 5:1 to about 9:1, or about 6:1 to about 9:1. The amounts of lipids and nucleic acid can be adjusted to provide a desired N/P ratio, for example, N/P ratio of 3, 4, 5, 6, 7, 8, 9, 10 or higher. Generally, the lipid nanoparticle formulation's overall lipid content can range from about 5 mg/ml to about 30 mg/mL.

[0718] Exemplary ionizable lipids that can be used in lipid nanoparticle formulations include, without limitation, those listed in Table 1 of WO2019051289, incorporated herein by reference. Additional exemplary lipids include, without limitation, one or more of the following formulae: X of US2016/0311759; I of US20150376115 or in US2016/0376224; I, II or III of US20160151284; I, IA, II, or IIA of US20170210967; I-c of US20150140070; A of US2013/0178541; I of US2013/0303587 or US2013/0123338; I of US2015/0141678; II, III, IV, or V of US2015/0239926; I of US2017/0119904; I or II of WO2017/117528; A of US2012/0149894; A of US2015/0057373; A of WO2013/116126; A of US2013/0090372; A of US2013/0274523; A of US2013/0274504; A of US2013/0053572; A of WO2013/016058; A of WO2012/162210; I of US2008/042973; I, II, III, or IV of US2012/01287670; I or II of US2014/0200257; I, II, or III of US2015/0203446; I or III of US2015/0005363; I, IA, IB, IC, ID, II, IIA, IIB, IIC, IID, or III-XXIV of US2014/0308304; of US2013/0338210; I, II, III, or IV of WO2009/132131; A of US2012/01011478; I or XXXV of US2012/0027796; XIV or XVII of US2012/0058144; of US2013/0323269; I of US2011/0117125; I, II, or III of US2011/0256175; I, II, III, IV, V, VI, VII, VIII, IX, X, XI, XII of US2012/0202871; I, II, III, IV, V, VI, VII, VIII, X, XII, XIII, XIV, XV, or XVI of US2011/0076335; I or II of US2006/008378; I of US2013/0123338; I or X-A-Y-Z of US2015/0064242; XVI, XVII, or XVIII of US2013/0022649; I, II, or III of US2013/0116307; I, II, or III of US2013/0116307; I or II of US2010/0062967; I-X of US2013/0189351; I of US2014/0039032; V of US2018/0028664; I of US2016/0317458; I of US2013/0195920; 5, 6, or 10 of U.S. Pat. No. 10,221,127; 111-3 of WO2018/081480; 1-5 or 1-8 of WO2020/081938; 18 or 25 of U.S. Pat. No. 9,867,888; A of US2019/0136231; II of WO2020/219876; 1 of US2012/0027803; OF-02 of US2019/0240349; 23 of U.S. Pat. No. 10,086,013; cKK-E12/A6 of Miao et al (2020); C12-200 of WO2010/053572; 7C1 of Dahlman et al (2017); 304-013 or 503-013 of Whitehead et al; TS-P4C2 of U.S. Pat. No. 9,708,628; I of WO2020/106946; I of WO2020/106946.

[0719] In some embodiments, the ionizable lipid is MC3 (6Z,9Z,28Z,3 1Z)-heptatriaconta-6,9,28,3 1-tetraen-19-yl-4-(dimethylamino) butanoate (DLin-MC3-DMA or MC3), e.g., as described in Example 9 of WO2019051289A9 (incorporated by reference herein in its entirety). In some embodiments, the ionizable lipid is the lipid ATX-002, e.g., as described in Example 10 of WO2019051289A9 (incorporated by reference herein in its entirety). In some embodiments, the ionizable lipid is (13Z,16Z)-A,A-dimethyl-3-nonyldocosa-13,16-dien-1-amine (Compound 32), e.g., as described in Example 11 of WO2019051289A9 (incorporated by reference herein in its entirety). In some embodiments, the ionizable lipid is Compound 6 or Compound 22, e.g., as described in Example 12 of WO2019051289A9 (incorporated by reference herein in its entirety). In some embodiments, the ionizable lipid is heptadecan-9-yl 8-((2-hydroxyethyl)(6-oxo-6-(undecyloxy)hexyl)amino)octanoate (SM-102); e.g., as described in Example 1 of U.S. Pat. No. 9,867,888(incorporated by reference herein in its entirety). In some embodiments, the ionizable lipid is 9Z,12Z)-3-((4,4-bis(octyloxy)butanoyl)oxy)-2-((((3-(diethylamino)propoxy)carbonyl)oxy)methyl)propyl octadeca-9,12-dienoate (LP01) e.g., as synthesized in Example 13 of WO2015/095340(incorporated by reference herein in its entirety). In some embodiments, the ionizable lipid is Di((Z)-non-2-en-1-yl) 9-((4-dimethylamino)butanoyl)oxy)heptadecanedioate (L319), e.g. as synthesized in Example 7, 8, or 9 of US2012/0027803(incorporated by reference herein in its entirety). In some embodiments, the ionizable lipid is 1,1′-((2-(4-(2-((2-(Bis(2-hydroxydodecyl)amino)ethyl)(2-hydroxydodecyl) amino)ethyl)piperazin-1-yl)ethyl)azanediyl)bis(dodecan-2-01) (C12-200), e.g., as synthesized in Examples 14 and 16 of WO2010/053572(incorporated by reference herein in its entirety). In some embodiments, the ionizable lipid is; Imidazole cholesterol ester (ICE) lipid (3S, 10R, 13R, 17R)-10, 13-dimethyl-17-((R)-6-methylheptan-2-yl)-2, 3, 4, 7, 8, 9, 10, 11, 12, 13, 14, 15, 16, 17-tetradecahydro-1H-cyclopenta[a]phenanthren-3-yl3-(1H-imidazol-4-yl)propanoate, e.g., Structure (I) from WO2020/106946 (incorporated by reference herein in its entirety).

[0720] Some non-limiting examples of lipid compounds that may be used (e.g., in combination with other lipid components) to form lipid nanoparticles for the delivery of compositions described herein, e.g., nucleic acid (e.g., RNA) described herein (e.g., a template nucleic acid or a nucleic acid encoding a gene modifying polypeptide) includes,

[chemical structure]

[0721] In some embodiments an LNP comprising Formula (i) is used to deliver a gene modifying composition described herein to the liver and/or hepatocyte cells.

[chemical structure]

[0722] In some embodiments an LNP comprising Formula (ii) is used to deliver a gene modifying composition described herein to the liver and/or hepatocyte cells.

[chemical structure]

[0723] In some embodiments an LNP comprising Formula (iii) is used to deliver a gene modifying composition described herein to the liver and/or hepatocyte cells.

[chemical structure]

[0724] In some embodiments an LNP comprising Formula (v) is used to deliver a gene modifying composition described herein to the liver and/or hepatocyte cells.

[chemical structure]

[0725] In some embodiments an LNP comprising Formula (vi) is used to deliver a gene modifying composition described herein to the liver and/or hepatocyte cells.

[chemical structure]

[0726] In some embodiments an LNP comprising Formula (viii) is used to deliver a gene modifying composition described herein to the liver and/or hepatocyte cells.

[chemical structure]

[0727] In some embodiments an LNP comprising Formula (ix) is used to deliver a gene modifying composition described herein to the liver and/or hepatocyte cells.

[chemical structure]

wherein

[0728] X¹ is O, NR¹, or a direct bond, X² is C2-5 alkylene, X³ is C(=0) or a direct bond, R¹ is H or Me, R³ is Ci-3 alkyl, R² is Ci-3 alkyl, or R² taken together with the nitrogen atom to which it is attached and 1-3 carbon atoms of X² form a 4-, 5-, or 6-membered ring, or X¹ is NR¹, R¹ and R² taken together with the nitrogen atoms to which they are attached form a 5-or 6-membered ring, or R² taken together with R² and the nitrogen atom to which they are attached form a 5-, 6-, or 7-membered ring, Y¹ is C2-12 alkylene. Y² is selected from

[chemical structure]

n is 0 to 3, R⁴ is Ci-15 alkyl, Z¹ is Ci-6 alkylene or a direct bond,

### Z² is

[chemical structure]

(in either orientation.) or absent, provided that if Z¹ is a direct bond, Z² is absent.
R⁵ is C5-9 alkyl or C6-10 alkoxy, R⁶ is C5-9 alkyl or C6-10 alkoxy, W is methylene or a direct bond, and R⁷ is H or Me, or a salt thereof provided that if R³ and R² are C2 alkyls, X¹ is O, X² is linear C3 alkylene, X² is C(═O), Y¹ is linear Ce alkylene, (Y²)n-R⁴ is

[chemical structure]

R⁴ is linear C5 alkyl, Z¹ is C2 alkylene, Z² is absent, W is methylene, and R⁷ is H, then R⁵ and R² are not Cx alkoxy.

[0730] In some embodiments an LNP comprising Formula (xii) is used to deliver a gene modifying composition described herein to the liver and/or hepatocyte cells.

[chemical structure]

[0731] In some embodiments an LNP comprising Formula (xi) is used to deliver a gene modifying composition described herein to the liver and/or hepatocyte cells.

[chemical structure]

[0732] In some embodiments an LNP comprises a compound of Formula (xiii) and a compound of Formula (xiv).

[chemical structure]

[0733] In some embodiments an LNP comprising Formula (xv) is used to deliver a gene modifying composition described herein to the liver and/or hepatocyte cells.

[chemical structure]

[0734] In some embodiments an LNP comprising a formulation of Formula (xvi) is used to deliver a gene modifying composition described herein to the lung endothelial cells.

[chemical structure]

[0735] In some embodiments, a lipid compound used to form lipid nanoparticles for the delivery of compositions described herein, e.g., nucleic acid (e.g., RNA) described herein (e.g., a template nucleic acid or a nucleic acid encoding a gene modifying polypeptide) is made by one of the following reactions:

[chemical structure]

[0736] Exemplary non-cationic lipids include, but are not limited to, distearoyl-sn-glycero-phosphoethanolamine, di stearoylphosphatidylcholine (DSPC), dioleoylphosphatidylcholine (DOPC), dipalmitoylphosphatidylcholine (DPPC), dioleoylphosphatidylglycerol (DOPG), dipalmitoylphosphatidylglycerol (DPPG), dioleoyl-phosphatidylethanolamine (DOPE), 1,2-dioleoyl-sn-glycero-3-phosphoethanolamine (DOPE), palmitoyloleoylphosphatidylcholine (POPC), palmitoyloleoylphosphatidylethanolamine (POPE), dioleoyl-phosphatidylethanolamine 4-(N-maleimidomethyl)-cyclohexane-1-carboxylate (DOPE-mal), dipalmitoyl phosphatidyl ethanolamine (DPPE), dimyristoylphosphoethanolamine (DMPE), distearoyl-phosphatidyl-ethanolamine (DSPE), monomethyl-phosphatidylethanolamine (such as 16-O-monomethyl PE), dimethyl-phosphatidylethanolamine (such as 16-O-dimethyl PE), 18-1-trans PE, 1-stearoyl-2-oleoyl-phosphatidyethanolamine (SOPE), hydrogenated soy phosphatidylcholine (HSPC), egg phosphatidylcholine (EPC), dioleoylphosphatidylserine (DOPS), sphingomyelin (SM), dimyristoyl phosphatidylcholine (DMPC), dimyristoyl phosphatidylglycerol (DMPG), di stearoylphosphatidylglycerol (DSPG), dierucoylphosphatidylcholine (DEPC), palmitoyloleyolphosphatidylglycerol (POPG), dielaidoyl-phosphatidylethanolamine (DEPE), lecithin, phosphatidylethanolamine, lysolecithin, lysophosphatidylethanolamine, phosphatidylserine, phosphatidylinositol, sphingomyelin, egg sphingomyelin (ESM), cephalin, cardiolipin, phosphatidicacid,cerebrosides, dicetylphosphate, lysophosphatidylcholine, dilinoleoylphosphatidylcholine, or mixtures thereof. It is understood that other diacylphosphatidylcholine and diacylphosphatidylethanolamine phospholipids can also be used. The acyl groups in these lipids are preferably acyl groups derived from fatty acids having C10-C24 carbon chains, e.g., lauroyl, myristoyl, paimitoyl, stearoyl, or oleoyl. Additional exemplary lipids, in certain embodiments, include, without limitation, those described in Kim et al. (2020) dx.doi.org/10.1021/acs.nanolett.0c01386, incorporated herein by reference. Such lipids include, in some embodiments, plant lipids found to improve liver transfection with mRNA (e.g., DGTS). In some embodiments, the non-cationic lipid may have the following structure,

[chemical structure]

[0737] Other examples of non-cationic lipids suitable for use in the lipid nanopartieles include, without limitation, nonphosphorous lipids such as, e.g., stearylamine, dodeeylamine, hexadecylamine, acetyl palmitate, glycerol ricinoleate, hexadecyl stereate, isopropyl myristate, amphoteric acrylic polymers, triethanolamine-lauryl sulfate, alkyl-aryl sulfate polyethyloxylated fatty acid amides, dioctadecyl dimethyl ammonium bromide, ceramide, sphingomyelin, and the like. Other non-cationic lipids are described in WO2017/099823 or US patent publication US2018/0028664, the contents of which is incorporated herein by reference in their entirety.

[0738] In some embodiments, the non-cationic lipid is oleic acid or a compound of Formula I, II, or IV of US2018/0028664, incorporated herein by reference in its entirety. The non-cationic lipid can comprise, for example, 0-30% (mol) of the total lipid present in the lipid nanoparticle. In some embodiments, the non-cationic lipid content is 5-20% (mol) or 10-15% (mol) of the total lipid present in the lipid nanoparticle. In embodiments, the molar ratio of ionizable lipid to the neutral lipid ranges from about 2:1 to about 8:1 (e.g., about 2:1, 3:1, 4:1, 5:1, 6:1, 7:1, or 8:1).

[0739] In some embodiments, the lipid nanoparticles do not comprise any phospholipids.

[0740] In some aspects, the lipid nanoparticle can further comprise a component, such as a sterol, to provide membrane integrity. One exemplary sterol that can be used in the lipid nanoparticle is cholesterol and derivatives thereof. Non-limiting examples of cholesterol derivatives include polar analogues such as 5α-choiestanol, 53-coprostanol, choiesteryl-(2-hydroxy)-ethyl ether, choiesteryl-(4′-hydroxy)-butyl ether, and 6-ketocholestanol; non-polar analogues such as 5α-cholestane, cholestenone, 5α-cholestanone, 5p-cholestanone, and cholesteryl decanoate; and mixtures thereof. In some embodiments, the cholesterol derivative is a polar analogue, e.g., choiesteryl-(4′-hydroxy)-butyl ether. Exemplary cholesterol derivatives are described in PCT publication WO2009/127060 and US patent publication US2010/0130588, each of which is incorporated herein by reference in its entirety.

[0741] In some embodiments, the component providing membrane integrity, such as a sterol, can comprise 0-50% (mol) (e.g., 0-10%, 10-20%, 20-30%, 30-40%, or 40-50%) of the total lipid present in the lipid nanoparticle. In some embodiments, such a component is 20-50% (mol) 30-40% (mol) of the total lipid content of the lipid nanoparticle.

[0742] In some embodiments, the lipid nanoparticle can comprise a polyethylene glycol (PEG) or a conjugated lipid molecule. Generally, these are used to inhibit aggregation of lipid nanoparticles and/or provide steric stabilization. Exemplary conjugated lipids include, but are not limited to, PEG-lipid conjugates, polyoxazoline (POZ)-lipid conjugates, polyamide-lipid conjugates (such as ATTA-lipid conjugates), cationic-polymer lipid (CPL) conjugates, and mixtures thereof. In some embodiments, the conjugated lipid molecule is a PEG-lipid conjugate, for example, a (methoxy polyethylene glycol)-conjugated lipid.

[0743] Exemplary PEG-lipid conjugates include, but are not limited to, PEG-diacylglycerol (DAG) (such as 1-(monomethoxy-polyethyleneglycol)-2,3-dimyristoylglycerol (PEG-DMG)), PEG-dialkyloxypropyl (DAA), PEG-phospholipid, PEG-ceramide (Cer), a pegylated phosphatidylethanoloamine (PEG-PE), 1,2-dimyristoyl-sn-glycerol, methoxypoly ethylene glycol (DMG-PEG-2K), PEG succinate diacylglycerol (PEGS-DAG) (such as 4-O-(2′,3′-di(tetradecanoyloxy)propyl-1-O-(w-methoxy(polyethoxy)ethyl) butanedioate (PEG-S-DMG)), PEG dialkoxypropylcarbam, N-(carbonyl-methoxypolyethylene glycol 2000)-1,2-distearoyl-sn-glycero-3-phosphoethanolamine sodium salt, or a mixture thereof. Additional exemplary PEG-lipid conjugates are described, for example, in U.S. Pat. Nos. 5,885,613, 6,287,591, US2003/0077829, US2003/0077829, US2005/0175682, US2008/0020058, US2011/0117125, US2010/0130588, US2016/0376224, US2017/0119904, and US/099823, the contents of all of which are incorporated herein by reference in their entirety. In some embodiments, a PEG-lipid is a compound of Formula III, III-a-2, III-b-1, III-b-2, or V of US2018/0028664, the content of which is incorporated herein by reference in its entirety. In some embodiments, a PEG-lipid is of Formula II of US20150376115 or US2016/0376224, the content of both of which is incorporated herein by reference in its entirety. In some embodiments, the PEG-DAA conjugate can be, for example, PEG-dilauryloxypropyl, PEG-dimyristyloxypropyl, PEG-dipalmityloxypropyl, or PEG-distearyloxypropyl. The PEG-lipid can be one or more of PEG-DMG, PEG-dilaurylglycerol, PEG-dipalmitoylglycerol, PEG-di sterylglycerol, PEG-dilaurylglycamide, PEG-dimyristylglycamide, PEG-dipalmitoylglycamide, PEG-di sterylglycamide, PEG-cholesterol (1[8′-(Cholest-5-en-3[beta]-oxy)carboxamido-3′,6′-dioxaoctanyl] carbamoyl-[omega]-methyl-poly(ethylene glycol), PEG-DMB (3,4-Ditetradecoxylbenzyl-[omega]-methyl-poly(ethylene glycol) ether), and 1,2-dimyristoyl-sn-glycero-3-phosphoethanolamine-N-[methoxy(polyethylene glycol)-2000]. In some embodiments, the PEG-lipid comprises PEG-DMG, 1,2-dimyristoyl-sn-glycero-3-phosphoethanolamine-N-[methoxy(polyethylene glycol)-2000]. In some embodiments, the PEG-lipid comprises a structure selected from:

[chemical structure]

[0744] In some embodiments, lipids conjugated with a molecule other than a PEG can also be used in place of PEG-lipid. For example, polyoxazoline (POZ)-lipid conjugates, polyamide-lipid conjugates (such as ATTA-lipid conjugates), and cationic-polymer lipid (GPL) conjugates can be used in place of or in addition to the PEG-lipid.

[0745] Exemplary conjugated lipids, i.e., PEG-lipids, (POZ)-lipid conjugates, ATTA-lipid conjugates and cationic polymer-lipids are described in the PCT and LIS patent applications listed in Table 2 of WO2019051289A9 and in WO2020106946A1, the contents of all of which are incorporated herein by reference in their entirety.

[0746] In some embodiments an LNP comprises a compound of Formula (xix), a compound of Formula (xxi) and a compound of Formula (xxv). In some embodiments an LNP comprising a formulation of Formula (xix), Formula (xxi) and Formula (xxv)is used to deliver a gene modifying composition described herein to the lung or pulmonary cells.

[0747] In some embodiments, a lipid nanoparticle may comprise one or more cationic lipids selected from Formula (i), Formula (ii), Formula (iii), Formula (vii), and Formula (ix). In some embodiments, the LNP may further comprise one or more neutral lipid, e.g., DSPC, DPPC, D1ViPC, DOPC, POPC, DOPE, SM, a steroid, e.g., cholesterol, and/or one or more polymer conjugated lipid, e.g., a pegylated lipid, e.g., PEG-DAG, PEG-PE, PEG-S-DAG, PEG-cer or a PEG dialkyoxypropylcarbamate.

[0748] In some embodiments, the PEG or the conjugated lipid can comprise 0-20% (mol) of the total lipid present in the lipid nanoparticle. In some embodiments, PEG or the conjugated lipid content is 0.5-10% or 2-5% (mol) of the total lipid present in the lipid nanoparticle. Molar ratios of the ionizable lipid, non-cationic-lipid, sterol, and PEG/conjugated lipid can be varied as needed. For example, the lipid particle can comprise 30-70% ionizable lipid by mole or by total weight of the composition, 0-60% cholesterol by mole or by total weight of the composition, 0-30% non-cationic-lipid by mole or by total weight of the composition and 1-10% conjugated lipid by mole or by total weight of the composition. Preferably, the composition comprises 30-40% ionizable lipid by mole or by total weight of the composition, 40-50% cholesterol by mole or by total weight of the composition, and 10-20% non-cationic-lipid by mole or by total weight of the composition. In some other embodiments, the composition is 50-75% ionizable lipid by mole or by total weight of the composition, 20-40% cholesterol by mole or by total weight of the composition, and 5 to 10% non-cationic-lipid, by mole or by total weight of the composition and 1-10% conjugated lipid by mole or by total weight of the composition. The composition may contain 60-70% ionizable lipid by mole or by total weight of the composition, 25-35% cholesterol by mole or by total weight of the composition, and 5-10% non-cationic-lipid by mole or by total weight of the composition. The composition may also contain up to 90% ionizable lipid by mole or by total weight of the composition and 2 to 15% non-cationic lipid by mole or by total weight of the composition. The formulation may also be a lipid nanoparticle formulation, for example comprising 8-30% ionizable lipid by mole or by total weight of the composition, 5-30% non-cationic lipid by mole or by total weight of the composition, and 0-20% cholesterol by mole or by total weight of the composition; 4-25% ionizable lipid by mole or by total weight of the composition, 4-25% non-cationic lipid by mole or by total weight of the composition, 2 to 25% cholesterol by mole or by total weight of the composition, 10 to 35% conjugate lipid by mole or by total weight of the composition, and 5% cholesterol by mole or by total weight of the composition; or 2-30% ionizable lipid by mole or by total weight of the composition, 2-30% non-cationic lipid by mole or by total weight of the composition, 1 to 15% cholesterol by mole or by total weight of the composition, 2 to 35% conjugate lipid by mole or by total weight of the composition, and 1-20% cholesterol by mole or by total weight of the composition; or even up to 90% ionizable lipid by mole or by total weight of the composition and 2-10% non-cationic lipids by mole or by total weight of the composition, or even 100% cationic lipid by mole or by total weight of the composition. In some embodiments, the lipid particle formulation comprises ionizable lipid, phospholipid, cholesterol and a PEG-ylated lipid in a molar ratio of 50:10:38.5:1.5. In some other embodiments, the lipid particle formulation comprises ionizable lipid, cholesterol and a PEG-ylated lipid in a molar ratio of 60:38.5:1.5.

[0749] In some embodiments, the lipid particle comprises ionizable lipid, non-cationic lipid (e.g. phospholipid), a sterol (e.g., cholesterol) and a PEG-ylated lipid, where the molar ratio of lipids ranges from 20 to 70 mole percent for the ionizable lipid, with a target of 40-60, the mole percent of non-cationic lipid ranges from 0 to 30, with a target of 0 to 15, the mole percent of sterol ranges from 20 to 70, with a target of 30 to 50, and the mole percent of PEG-ylated lipid ranges from 1 to 6, with a target of 2 to 5.

[0750] In some embodiments, the lipid particle comprises ionizable lipid/non-cationic-lipid/sterol/conjugated lipid at a molar ratio of 50:10:38.5:1.5.

[0751] In an aspect, the disclosure provides a lipid nanoparticle formulation comprising phospholipids, lecithin, phosphatidylcholine and phosphatidylethanolamine.

[0752] In some embodiments, one or more additional compounds can also be included. Those compounds can be administered separately or the additional compounds can be included in the lipid nanoparticles of the invention. In other words, the lipid nanoparticles can contain other compounds in addition to the nucleic acid or at least a second nucleic acid, different than the first. Without limitations, other additional compounds can be selected from the group consisting of small or large organic or inorganic molecules, monosaccharides, disaccharides, trisaccharides, oligosaccharides, polysaccharides, peptides, proteins, peptide analogs and derivatives thereof, peptidomimetics, nucleic acids, nucleic acid analogs and derivatives, an extract made from biological materials, or any combinations thereof.

[0753] In some embodiments, a lipid nanoparticle (or a formulation comprising lipid nanoparticles) lacks reactive impurities (e.g., aldehydes or ketones), or comprises less than a preselected level of reactive impurities (e.g., aldehydes or ketones). While not wishing to be bound by theory, in some embodiments, a lipid reagent is used to make a lipid nanoparticle formulation, and the lipid reagent may comprise a contaminating reactive impurity (e.g., an aldehyde or ketone). A lipid regent may be selected for manufacturing based on having less than a preselected level of reactive impurities (e.g., aldehydes or ketones). Without wishing to be bound by theory, in some embodiments, aldehydes can cause modification and damage of RNA, e.g., cross-linking between bases and/or covalently conjugating lipid to RNA (e.g., forming lipid-RNA adducts). This may, in some instances, lead to failure of a reverse transcriptase reaction and/or incorporation of inappropriate bases, e.g., at the site(s) of lesion(s), e.g., a mutation in a newly synthesized target DNA.

[0754] In some embodiments, a lipid nanoparticle formulation is produced using a lipid reagent comprising less than 5%, 4%, 3%, 2%, 1%, 0.9%, 0.8%, 0.7%, 0.6%, 0.5%, 0.4%, 0.3%, 0.2%, or 0.1% total reactive impurity (e.g., aldehyde) content. In some embodiments, a lipid nanoparticle formulation is produced using a lipid reagent comprising less than 5%, 4%, 3%, 2%, 1%, 0.9%, 0.8%, 0.7%, 0.6%, 0.5%, 0.4%, 0.3%, 0.2%, or 0.1% of any single reactive impurity (e.g., aldehyde) species. In some embodiments, a lipid nanoparticle formulation is produced using a lipid reagent comprising: (i) less than 5%, 4%, 3%, 2%, 1%, 0.9%, 0.8%, 0.7%, 0.6%, 0.5%, 0.4%, 0.3%, 0.2%, or 0.1% total reactive impurity (e.g., aldehyde) content; and (ii) less than 5%, 4%, 3%, 2%, 1%, 0.9%, 0.8%, 0.7%, 0.6%, 0.5%, 0.4%, 0.3%, 0.2%, or 0.1% of any single reactive impurity (e.g., aldehyde) species. In some embodiments, the lipid nanoparticle formulation is produced using a plurality of lipid reagents, and each lipid reagent of the plurality independently meets one or more criterion described in this paragraph. In some embodiments, each lipid reagent of the plurality meets the same criterion, e.g., a criterion of this paragraph.

[0755] In some embodiments, the lipid nanoparticle formulation comprises less than 5%, 4%, 3%, 2%, 1%, 0.9%, 0.8%, 0.7%, 0.6%, 0.5%, 0.4%, 0.3%, 0.2%, or 0.1% total reactive impurity (e.g., aldehyde) content. In some embodiments, the lipid nanoparticle formulation comprises less than 5%, 4%, 3%, 2%, 1%, 0.9%, 0.8%, 0.7%, 0.6%, 0.5%, 0.4%, 0.3%, 0.2%, or 0.1% of any single reactive impurity (e.g., aldehyde) species. In some embodiments, the lipid nanoparticle formulation comprises: (i) less than 5%, 4%, 3%, 2%, 1%, 0.9%, 0.8%, 0.7%, 0.6%, 0.5%, 0.4%, 0.3%, 0.2%, or 0.1% total reactive impurity (e.g., aldehyde) content; and (ii) less than 5%, 4%, 3%, 2%, 1%, 0.9%, 0.8%, 0.7%, 0.6%, 0.5%, 0.4%, 0.3%, 0.2%, or 0.1% of any single reactive impurity (e.g., aldehyde) species.

[0756] In some embodiments, one or more, or optionally all, of the lipid reagents used for a lipid nanoparticle as described herein or a formulation thereof comprise less than 5%, 4%, 3%, 2%, 1%, 0.9%, 0.8%, 0.7%, 0.6%, 0.5%, 0.4%, 0.3%, 0.2%, or 0.1% total reactive impurity (e.g., aldehyde) content. In some embodiments, one or more, or optionally all, of the lipid reagents used for a lipid nanoparticle as described herein or a formulation thereof comprise less than 5%, 4%, 3%, 2%, 1%, 0.9%, 0.8%, 0.7%, 0.6%, 0.5%, 0.4%, 0.3%, 0.2%, or 0.1% of any single reactive impurity (e.g., aldehyde) species. In some embodiments, one or more, or optionally all, of the lipid reagents used for a lipid nanoparticle as described herein or a formulation thereof comprise: (i) less than 5%, 4%, 3%, 2%, 1%, 0.9%, 0.8%, 0.7%, 0.6%, 0.5%, 0.4%, 0.3%, 0.2%, or 0.1% total reactive impurity (e.g., aldehyde) content; and (ii) less than 5%, 4%, 3%, 2%, 1%, 0.9%, 0.8%, 0.7%, 0.6%, 0.5%, 0.4%, 0.3%, 0.2%, or 0.1% of any single reactive impurity (e.g., aldehyde) species.

[0757] In some embodiments, total aldehyde content and/or quantity of any single reactive impurity (e.g., aldehyde) species is determined by liquid chromatography (LC), e.g., coupled with tandem mass spectrometry (MS/MS), e.g., according to the method described in Example 40 of PCT/US21/20948. In some embodiments, reactive impurity (e.g., aldehyde) content and/or quantity of reactive impurity (e.g., aldehyde) species is determined by detecting one or more chemical modifications of a nucleic acid molecule (e.g., an RNA molecule, e.g., as described herein) associated with the presence of reactive impurities (e.g., aldehydes), e.g., in the lipid reagents. In some embodiments, reactive impurity (e.g., aldehyde) content and/or quantity of reactive impurity (e.g., aldehyde) species is determined by detecting one or more chemical modifications of a nucleotide or nucleoside (e.g., a ribonucleotide or ribonucleoside, e.g., comprised in or isolated from a template nucleic acid, e.g., as described herein) associated with the presence of reactive impurities (e.g., aldehydes), e.g., in the lipid reagents, e.g., according to the method described in Example 41 of PCT/US21/20948. In embodiments, chemical modifications of a nucleic acid molecule, nucleotide, or nucleoside are detected by determining the presence of one or more modified nucleotides or nucleosides, e.g., using LC-MS/MS analysis, e.g., according to the method described in Example 41 of PCT/US21/20948.

[0758] In some embodiments, a nucleic acid (e.g., RNA) described herein (e.g., a template nucleic acid or a nucleic acid encoding a gene modifying polypeptide) does not comprise an aldehyde modification, or comprises less than a preselected amount of aldehyde modifications. In some embodiments, on average, a nucleic acid has less than 50, 20, 10, 5, 2, or 1 aldehyde modifications per 1000 nucleotides, e.g., wherein a single cross-linking of two nucleotides is a single aldehyde modification. In some embodiments, the aldehyde modification is an RNA adduct (e.g., a lipid-RNA adduct). In some embodiments, the aldehyde-modified nucleotide is cross-linking between bases. In some embodiments, a nucleic acid (e.g., RNA) described herein comprises less than 50, 20, 10, 5, 2, or 1 cross-links between nucleotide.

[0759] In some embodiments, LNPs are directed to specific tissues by the addition of targeting domains. For example, biological ligands may be displayed on the surface of LNPs to enhance interaction with cells displaying cognate receptors, thus driving association with and cargo delivery to tissues wherein cells express the receptor. In some embodiments, the biological ligand may be a ligand that drives delivery to the liver, e.g., LNPs that display GalNAc result in delivery of nucleic acid cargo to hepatocytes that display asialoglycoprotein receptor (ASGPR). The work of Akinc et al. Mol Ther 18(7):1357-1364 (2010) teaches the conjugation of a trivalent GalNAc ligand to a PEG-lipid (GalNAc-PEG-DSG) to yield LNPs dependent on ASGPR for observable LNP cargo effect (see, e.g., FIG. 6 therein). Other ligand-displaying LNP formulations, e.g., incorporating folate, transferrin, or antibodies, are discussed in WO2017223135, which is incorporated herein by reference in its entirety, in addition to the references used therein, namely Kolhatkar et al., Curr Drug Discov Technol. 2011 8:197-206; Musacchio and Torchilin, Front Biosci. 2011 16:1388-1412; Yu et al., Mol Membr Biol. 2010 27:286-298; Patil et al., Crit Rev Ther Drug Carrier Syst. 2008 25:1-61; Benoit et al., Biomacromolecules. 2011 12:2708-2714; Zhao et al., Expert Opin Drug Deliv. 2008 5:309-319; Akinc et al., Mol Ther. 2010 18:1357-1364; Srinivasan et al., Methods Mol Biol. 2012 820:105-116; Ben-Arie et al., Methods Mol Biol. 2012 757:497-507; Peer 2010 J Control Release. 20:63-68; Peer et al., Proc Natl Acad Sci USA. 2007 104:4095-4100; Kim et al., Methods Mol Biol. 2011 721:339-353; Subramanya et al., Mol Ther. 2010 18:2028-2037; Song et al., Nat Biotechnol. 2005 23:709-717; Peer et al., Science. 2008 319:627-630; and Peer and Lieberman, Gene Ther. 2011 18:1127-1133.

[0760] In some embodiments, LNPs are selected for tissue-specific activity by the addition of a Selective ORgan Targeting (SORT) molecule to a formulation comprising traditional components, such as ionizable cationic lipids, amphipathic phospholipids, cholesterol and poly(ethylene glycol) (PEG) lipids. The teachings of Cheng et al. Nat Nanotechnol 15(4):313-320 (2020) demonstrate that the addition of a supplemental “SORT” component precisely alters the in vivo RNA delivery profile and mediates tissue-specific (e.g., lungs, liver, spleen) gene delivery and editing as a function of the percentage and biophysical property of the SORT molecule.

[0761] In some embodiments, the LNPs comprise biodegradable, ionizable lipids. In some embodiments, the LNPs comprise (9Z,12Z)-3-((4,4-bis(octyloxy)butanoyl)oxy)-2-((((3-(diethylamino)propoxy)carbonyl)oxy)methyl)propyl octadeca-9,12-dienoate, also called 3-((4,4-bis(octyloxy)butanoyl)oxy)-2-((((3-(diethylamino)propoxy)carbonyl)oxy)methyl)propyl (9Z,12Z)-octadeca-9,12-dienoate) or another ionizable lipid. See, e.g, lipids of WO2019/067992, WO/2017/173054, WO2015/095340, and WO2014/136086, as well as references provided therein. In some embodiments, the term cationic and ionizable in the context of LNP lipids is interchangeable, e.g., wherein ionizable lipids are cationic depending on the pH.

[0762] In some embodiments, an LNP described herein comprises a lipid described in Table 19.

TABLE 19
Exemplary Lipids

| | | Molecular | |
|---|---|---|---|
| LIPID ID | Chemical Name | Weight | Structure |
| LIPIDV003 | (9Z,12Z)-3-((4,4- bis(octyloxy)butanoyl) oxy)-2-((((3- (diethylamino)propoxy) carbonyl)oxy)methyl) propyl octadeca-9,12- dienoate | 852.29 | [chemical structure] |
| LIPIDV004 | Heptadecan-9-y1 8-((2- hydroxyethyl)(8- (nonyloxy)-8- oxooctyl)amino)octanoate | 710.18 | [chemical structure] |
| LIPIDV005 | | 919.56 | [chemical structure] |

[0763] In some embodiments, multiple components of a gene modifying system may be prepared as a single LNP formulation, e.g., an LNP formulation comprises mRNA encoding for the gene modifying polypeptide and an RNA template. Ratios of nucleic acid components may be varied in order to maximize the properties of a therapeutic. In some embodiments, the ratio of RNA template to mRNA encoding a gene modifying polypeptide is about 1:1 to 100:1, e.g., about 1:1 to 20:1, about 20:1 to 40:1, about 40:1 to 60:1, about 60:1 to 80:1, or about 80:1 to 100:1, by molar ratio. In other embodiments, a system of multiple nucleic acids may be prepared by separate formulations, e.g., one LNP formulation comprising a template RNA and a second

[0764] LNP formulation comprising an mRNA encoding a gene modifying polypeptide. In some embodiments, the system may comprise more than two nucleic acid components formulated into LNPs. In some embodiments, the system may comprise a protein, e.g., a gene modifying polypeptide, and a template RNA formulated into at least one LNP formulation.

[0765] In some embodiments, the average LNP diameter of the LNP formulation may be between 10s of nm and 100s of nm, e.g., measured by dynamic light scattering (DLS). In some embodiments, the average LNP diameter of the LNP formulation may be from about 40 nm to about 150 nm, such as about 40 nm, 45 nm, 50 nm, 55 nm, 60 nm, 65 nm, 70 nm, 75 nm, 80 nm, 85 nm, 90 nm, 95 nm, 100 nm, 105 nm, 110 nm, 115 nm, 120 nm, 125 nm, 130 nm, 135 nm, 140 nm, 145 nm, or 150 nm. In some embodiments, the average LNP diameter of the LNP formulation may be from about 50 nm to about 100 nm, from about 50 nm to about 90 nm, from about 50 nm to about 80 nm, from about 50 nm to about 70 nm, from about 50 nm to about 60 nm, from about 60 nm to about 100 nm, from about 60 nm to about 90 nm, from about 60 nm to about 80 nm, from about 60 nm to about 70 nm, from about 70 nm to about 100 nm, from about 70 nm to about 90 nm, from about 70 nm to about 80 nm, from about 80 nm to about 100 nm, from about 80 nm to about 90 nm, or from about 90 nm to about 100 nm. In some embodiments, the average LNP diameter of the LNP formulation may be from about 70 nm to about 100 nm. In a particular embodiment, the average LNP diameter of the LNP formulation may be about 80 nm. In some embodiments, the average LNP diameter of the LNP formulation may be about 100 nm. In some embodiments, the average LNP diameter of the LNP formulation ranges from about 1 mm to about 500 mm, from about 5 mm to about 200 mm, from about 10 mm to about 100 mm, from about 20 mm to about 80 mm, from about 25 mm to about 60 mm, from about 30 mm to about 55 mm, from about 35 mm to about 50 mm, or from about 38 mm to about 42 mm.

[0766] An LNP may, in some instances, be relatively homogenous. A polydispersity index may be used to indicate the homogeneity of an LNP, e.g., the particle size distribution of the lipid nanoparticles. A small (e.g., less than 0.3) polydispersity index generally indicates a narrow particle size distribution. An LNP may have a polydispersity index from about 0 to about 0.25, such as 0.01, 0.02, 0.03, 0.04, 0.05, 0.06, 0.07, 0.08, 0.09, 0.10, 0.11, 0.12, 0.13, 0.14, 0.15, 0.16, 0.17, 0.18, 0.19, 0.20, 0.21, 0.22, 0.23, 0.24, or 0.25. In some embodiments, the polydispersity index of an LNP may be from about 0.10 to about 0.20.

[0767] The zeta potential of an LNP may be used to indicate the electrokinetic potential of the composition. In some embodiments, the zeta potential may describe the surface charge of an LNP. Lipid nanoparticles with relatively low charges, positive or negative, are generally desirable, as more highly charged species may interact undesirably with cells, tissues, and other elements in the body. In some embodiments, the zeta potential of an LNP may be from about −10 mV to about +20 mV, from about −10 mV to about +15 mV, from about −10 mV to about +10 mV, from about −10 mV to about +5 mV, from about −10 mV to about 0 mV, from about −10 mV to about −5 mV, from about −5 mV to about +20 mV, from about −5 mV to about +15 mV, from about −5 mV to about +10 mV, from about −5 mV to about +5 mV, from about −5 mV to about 0 mV, from about 0 mV to about +20 mV, from about 0 mV to about +15 mV, from about 0 mV to about +10 mV, from about 0 mV to about +5 mV, from about +5 mV to about +20 mV, from about +5 mV to about +15 mV, or from about +5 mV to about +10 mV.

[0768] The efficiency of encapsulation of a protein and/or nucleic acid, e.g., gene modifying polypeptide or mRNA encoding the polypeptide, describes the amount of protein and/or nucleic acid that is encapsulated or otherwise associated with an LNP after preparation, relative to the initial amount provided. The encapsulation efficiency is desirably high (e.g., close to 100%). The encapsulation efficiency may be measured, for example, by comparing the amount of protein or nucleic acid in a solution containing the lipid nanoparticle before and after breaking up the lipid nanoparticle with one or more organic solvents or detergents. An anion exchange resin may be used to measure the amount of free protein or nucleic acid (e.g., RNA) in a solution. Fluorescence may be used to measure the amount of free protein and/or nucleic acid (e.g., RNA) in a solution. For the lipid nanoparticles described herein, the encapsulation efficiency of a protein and/or nucleic acid may be at least 50%, for example 50%, 55%, 60%, 65%, 70%, 75%, 80%, 85%, 90%, 91%, 92%, 93%, 94%, 95%, 96%, 97%, 98%, 99%, or 100%. In some embodiments, the encapsulation efficiency may be at least 80%. In some embodiments, the encapsulation efficiency may be at least 90%. In some embodiments, the encapsulation efficiency may be at least 95%.

[0769] An LNP may optionally comprise one or more coatings. In some embodiments, an LNP may be formulated in a capsule, film, or table having a coating. A capsule, film, or tablet including a composition described herein may have any useful size, tensile strength, hardness or density.

[0770] Additional exemplary lipids, formulations, methods, and characterization of LNPs are taught by WO2020061457, which is incorporated herein by reference in its entirety.

[0771] In some embodiments, in vitro or ex vivo cell lipofections are performed using Lipofectamine MessengerMax (Thermo Fisher) or TranslT-mRNA Transfection Reagent (Minis Bio). In certain embodiments, LNPs are formulated using the GenVoy ILM ionizable lipid mix (Precision NanoSystems). In certain embodiments, LNPs are formulated using 2,2-dilinoleyl-4-dimethylaminoethyl-[1,3]-dioxolane (DLin-KC2-DMA) or dilinoleylmethyl-4-dimethylaminobutyrate (DLin-MC3-DMA or MC3), the formulation and in vivo use of which are taught in Jayaraman et al. Angew Chem Int Ed Engl 51(34):8529-8533 (2012), incorporated herein by reference in its entirety.

[0772] LNP formulations optimized for the delivery of CRISPR-Cas systems, e.g., Cas9-gRNA RNP, gRNA, Cas9 mRNA, are described in WO2019067992 and WO2019067910, both incorporated by reference.

[0773] Additional specific LNP formulations useful for delivery of nucleic acids are described in U.S. Pat. Nos. 8,158,601 and 8,168,775, both incorporated by reference, which include formulations used in patisiran, sold under the name ONPATTRO.

[0774] Exemplary dosing of gene modifying LNP may include about 0.1, 0.25, 0.3, 0.5, 1, 2, 3, 4, 5, 6, 8, 10, or 100 mg/kg (RNA). Exemplary dosing of AAV comprising a nucleic acid encoding one or more components of the system may include an MOI of about 10¹¹, 10¹², 10¹³, and 10¹⁴ vg/kg.

[0775] An mRNA encoding a gene modifying polypeptide may have a cap, 5′ UTR containing a Kozak, 3′ UTR, and polyA tail containing at least 60 As (SEQ ID NO: 25695). An mRNA encoding a gene modifying polypeptide may have a reduced Uridine content through codon selection/optimization. An mRNA encoding a gene modifying polypeptide may have uridines that are about 1%, 2%, 5%, 10%, 20%, 30%, 40%, 50%, 60%, 70%, 80%, 90%, or 100% substituted with 5-methoxy uridine. An mRNA encoding a gene modifying polypeptide may have uridines that are about 1%, 2%, 5%, 10%, 20%, 30%, 40%, 50%, 60%, 70%, 80%, 90%, or 100% substituted with N1-methyl-pseudouridine. An mRNA encoding a gene modifying polypeptide may have cytosines in the mRNA are about 1%, 2%, 5%, 10%, 20%, 30%, 40%, 50%, 60%, 70%, 80%, 90%, or 100% substituted with 5-methylcytosine. An mRNA encoding a gene modifying polypeptide may have a combination of about 1%, 2%, 5%, 10%, 20%, 30%, 40%, 50%, 60%, 70%, 80%, 90%, or 100% substitution of cytosine with 5-methylcytosine and about 1%, 2%, 5%, 10%, 20%, 30%, 40%, 50%, 60%, 70%, 80%, 90%, or 100% substitution of uridine with 5-methoxy uridine. An mRNA encoding a gene modifying polypeptide may have a combination of about 1%, 2%, 5%, 10%, 20%, 30%, 40%, 50%, 60%, 70%, 80%, 90%, or 100% substitution of cytosine with 5-methylcytosine and about 1%, 2%, 5%, 10%, 20%, 30%, 40%, 50%, 60%, 70%, 80%, 90%, or 100% substitution of uridine with N1-methyl-pseudouridine.

[0776] A guide RNA may be synthesized by T7 RNA polymerase. A guide RNA may be chemically synthesized and contain modifications such as, e.g., 2′-O-methyl, 2′-Fluoro, and/or phosphorothioate. The 3 most terminal nucleotides of a guide RNA may contain 2′-O-methyl modifications with 3 phosphorothioate linkages between the nucleotides. A guide RNA may contain 2′-O-methyl modified nucleotides where there are cytosines and uridines, except at nucleotides found in the “seed” of the guide RNA where cytosines and uridines contain 2′-fluoro modifications.

[0777] A gene modifying mRNA and a guide RNA may be co-formulated in an LNP as described herein. They may be separately formulated. They may be combined prior to injection. They may be combined at a molar ratio in the range of about 1:10 to 1:250 mRNA:gRNA. They may be formulated in a molar ratio of about 1:20, 1:30, 1:40, 1:50, 1:60, 1:70, 1:80, 1:90, 1:100, 1:110, 1:120, 1:130, 1:140, 1:150, 1:160, 1:170, 1:180, 1:190, 1:200, 1:210, 1:220, 1:230, 1:240, or 1:250 mRNA:gRNA. The mRNA and guide RNA may be injected 30-180 minutes apart where the mRNA LNPs are delivered first followed by the guide RNA LNPs. The may be delivered about 30, 40, 50, 60, 70, 80, 90, 100, 110, 120, 130, 140, 150, 160, 170, or 180 minutes apart. The mRNA and/or gRNA may be dosed at 0.01-6 mg/kg either separately or together as a total amount of RNA-LNP. The RNA-LNPs may be injected IV bolus. The RNA-LNPs may be infused over a period of 30-360 minutes. The RNA-LNPs may be infused over a period of about 30, 60, 90, 120, 150, 180, 210, 240, 270, 300, 330 or 360 minutes.

### Exemplary Gene Modifying Systems for Correcting an E342K Mutation

[0778] In some embodiments, the compositions of the gene modifying system used to correct the E342K mutation in the PiZ model, as described herein, are modified as follows to optimize efficiency and precision of editing.

[0779] Gene modifying polypeptide-encoding mRNA. In some embodiments, the gene modifying polypeptide comprises the bipartite SV40 NLS sequences (doi: 10.1074/jbc.M601718200) at its N-terminus and C-terminus. In some embodiments, The gene modifying system construct contains modified c-myc NLS and bipartite SV40 NLS at its N-terminus and at the C-terminus a modified bipartite SV40 NLS followed by a SV40 NLS is linked to the reverse transcriptase through a SGGS (SEQ ID NO: 25694) linker. In some embodiments, the linker between each NLS and the NLS and the fusion protein is a SGGS (SEQ ID NO: 25694) linker. In some embodiments, the 32 amino acid linker of the fusion protein encoded by the mRNA is:

(SEQ ID NO: 19525)
SGGSSGGSSGSETPGTSESATPESSGGSSGGSS.

[0780] In some embodiments, the catalytic mutation of the Cas9 domain to generate the Cas9 nickase activity is H840A or N863A. In some embodiments, the mRNA has a cap, 5′ UTR containing a Kozak sequence, 3′ UTR, and a polyA tail containing at least 60 As (SEQ ID NO: 25695). In some embodiments, the mRNA has a reduced uridine content through codon selection/optimization. In some embodiments, the uridines in the mRNA are 100% substituted with 5-methoxy uridine. In some embodiments, the uridines in the mRNA are 100% substituted with N1-methyl-pseudouridine. In some embodiments, the cytosines in the mRNA are 100% substituted with 5-methylcytosine. In some embodiments, the mRNA contains a combination of 100% substitution of cytosine with 5-methylcytosine and 100% substitution of uridine with 5-methoxy uridine. In some embodiments, the mRNA contains a combination of 100% substitution of cytosine with 5-methylcytosine and 100% substitution of uridine with N1-methyl-pseudouridine. In some embodiments, combinations of modifications described above include 0-100% substitution of unmodified nucleotides, e.g., 0-10%, 10-20%, 20-30%, 30-40%, 40-50%, 50-60%, 60-70%, 70-80%, 80-90%, or less than 90-100% substitution. In some embodiments, the gene modifying polypeptide encoded by the mRNA of the system comprises the sequence:

c-Myc NLS-BPSV40 NLS-SpCas9H840A-linker-M-
MLV_reverse_transcriptase-SGGS linker-BPSV40 NLS-SV40
(SEQ ID NO:19526)

[chemical structure]

KFKVLGNTDRHSIKKNLIGALLFDSGETAEATRLKRTARRRYTRRKNRICYLQEIFSNEM
AKVDDSFFHRLEESFLVEEDKKHERHPIFGNIVDEVAYHEKYPTIYHLRKKLVDSTDKA
DLRLIYLALAHMIKFRGHFLIEGDLNPDNSDVDKLFIQLVQTYNQLFEENPINASGVDAK
AILSARLSKSRRLENLIAQLPGEKKNGLFGNLIALSLGLTPNFKSNFDLAEDAKLQLSKDT
YDDDLDNLLAQIGDQYADLFLAAKNLSDAILLSDILRVNTEITKAPLSASMIKRYDEHHQ
DLTLLKALVRQQLPEKYKEIFFDQSKNGYAGYIDGGASQEEFYKFIKPILEKMDGTEELL
VKLNREDLLRKQRTFDNGSIPHQIHLGELHAILRRQEDFYPFLKDNREKIEKILTFRIPYY
VGPLARGNSRFAWMTRKSEETITPWNFEEVVDKGASAQSFIERMTNFDKNLPNEKVLPK
HSLLYEYFTVYNELTKVKYVTEGMRKPAFLSGEQKKAIVDLLFKTNRKVTVKQLKEDY
FKKIECFDSVEISGVEDRFNASLGTYHDLLKIIKDKDFLDNEENEDILEDIVLTLTLFEDR
EMIEERLKTYAHLFDDKVMKQLKRRRYTGWGRLSRKLINGIRDKQSGKTILDFLKSDGFA
NRNFMQLIHDDSLTFKEDIQKAQVSGQGDSLHEHIANLAGSPAIKKGILQTVKVVDELV
KVMGRHKPENIVIEMARENQTTQKGQKNSRERMKRIEEGIKELGSQILKEHPVENTQLQ
NEKLYLYYLQNGRDMYVDQELDINRLSDYDVDAIVPQSFLKDDSIDNKVLTRSDKNRG
KSDNVPSEEVVKKMKNYWRQLLNAKLITQRKFDNLTKAERGGLSELDKAGFIKRQLVE
TRQITKHVAQILDSRMNTKYDENDKLIREVKVITLKSKLVSDFRKDFQFYKVREINNYH
HAHDAYLNAVVGTALIKKYPKLESEFVYGDYKVYDVRKMIAKSEQEIGKATAKYFFYS
NIMNFFKTEITLANGEIRKRPLIETNGETGEIVWDKGRDFATVRKVLSMPQVNIVKKTEV
QTGGFSKESILPKRNSDKLIARKKDWDPKKYGGFDSPTVAYSVLVVAKVEKGKSKKLK
SVKELLGITIMERSSFEKNPIDFLEAKGYKEVKKDLIIKLPKYSLFELENGRKRMLASAGE
LQKGNELALPSKYVNFLYLASHYEKLKGSPEDNEQKQLFVEQHKHYLDEIIEQISEFSKR
VILADANLDKVLSAYNKHRDKPIREQAENIIHLFTLTNLGAPAAFKYFDTTIDRKRYTST

[chemical structure]

[chemical structure]

[chemical structure]

[chemical structure]

[chemical structure]

[chemical structure]

[chemical structure]

[chemical structure]

[chemical structure]

[chemical structure]

[chemical structure]

[chemical structure]

[chemical structure]

VEFEPKKKRKV

[0781] Template RNA and Optional Second-Nick Guide RNA.

[0782] In some embodiments, the gene modifying system employs only a Template RNA in addition to the mRNA encoding the gene modifying polypeptide. In some embodiments, the gene modifying system additionally employs a second-nick guide RNA that targets the Cas9 nickase of the system to the non-edited strand of the target DNA. In some embodiments, the gene modifying Template RNA for targeting SERPINA1 is: UCCCCUCCAGGCCGUGCAUAGUUUUAGAGCUAGAAAUAGCAAGUUAAAAUAAGG CUAGUCCGUUAUCAACUUGAAAAAGUGGCACCGAGUCGGUCCUCUCGUCGAUGGU CAGCACAGCUUUAUGCACGGCCUGGAG (SEQ ID NO: 19527). In some embodiments, the optional guide RNA for second nicking is: GGUUUGUUGAACUUGACCUGUUUUAGAGCUAGAAAUAGCAAGUUAAAAUAAGGC UAGUCCGUUAUCAACUUGAAAAAGUGGCACCGAGUCGGUGCUUUUU (SEQ ID NO: 19528). In some embodiments, the Template RNA and optional second-nick guide RNA are synthesized by T7 RNA polymerase. In some embodiments, the Template RNA and optional second-nick guide RNA are chemically synthesized and contain a combination of one or multiple modifications of the following: 2′-O-methyl, 2′-Fluoro, and/or Phosphorothioate. In some embodiments, the 3 most terminal nucleotides contain 2′-O-methyl modifications with 3 phosphorothioate linkages between the nucleotides. In some embodiments, the Template RNA and optional second-nick guide RNA contain 2′-O-methyl modified nucleotides, where there are cytosines and uridines, except at nucleotides found in the seed sequence of the gRNA spacers, e.g., the seed sequences in the 3′ end of the spacer regions, where cytosines and uridines contain 2′-fluoro modifications and/or combination of 2′-fluoro and 2′ hydroxyl. In some embodiments, combinations of modifications described above include 0-100% substitution of unmodified nucleotides, e.g., 0-10%, 10-20%, 20-30%, 30-40%, 40-50%, 50-60%, 60-70%, 70-80%, 80-90%, or less than 90-100% substitution.

[0783] Formulations. In some embodiments, the gene modifying polypeptide mRNA and Template RNA (and optional second-nick guide RNA) are separately formulated as described above, combined prior to injection at a 1:20 RNA molar ratio, mRNA:Template RNA (and optionally mRNA:second-nick guide RNA), respectively. In some embodiments, the gene modifying polypeptide mRNA and Template RNA (and optional second-nick guide RNA) are separately formulated as described above, combined prior to injection at a 1:50 RNA molar ratio, mRNA:guide RNAs (and optionally mRNA:second-nick guide RNA), respectively. In some embodiments, the gene modifying polypeptide mRNA and Template RNA (and optional second-nick guide RNA) are separately formulated, combined prior to injection at ratio ranges from 1:10-1:250, mRNA:Template RNA (and optionally mRNA:second-nick guide RNA), respectively. In some embodiments, the mRNA and Template RNA (and optional second-nick guide NRA) are mixed together at a 1:10-1:250, mRNA:Template RNA (and optionally mRNA:second-nick guide RNA), and then formulated as described above, where the RNA concentration going into formulation is 0.1 mg/mL. In some embodiments, the mRNA and Template RNA (and optional second-nick guide RNA) are formulated separately and are injected 30-180 minutes apart, where the mRNA LNPs are delivered first followed by the Template RNA (and optional second-nick guide RNA) LNPs. In some embodiments, the ionizable lipid is LIPIDV005 from Table 19.

[0784] Dosing. In some embodiments, the gene modifying polypeptide mRNA and/or Template RNA (and optional second-nick guide RNA) are dosed at 0.01-6 mg/kg, either separately or together as a total amount of RNA-LNP. In some embodiments, the RNA-LNPs is injected as an IV bolus. In some embodiments, the RNA-LNPs is infused over a period of 30-360 minutes.

### Kits, Articles of Manufacture, and Pharmaceutical Compositions

[0785] In an aspect the disclosure provides a kit comprising a gene modifying polypeptide or a gene modifying system, e.g., as described herein. In some embodiments, the kit comprises a gene modifying polypeptide (or a nucleic acid encoding the polypeptide) and a template RNA (or DNA encoding the template RNA). In some embodiments, the kit further comprises a reagent for introducing the system into a cell, e.g., transfection reagent, LNP, and the like. In some embodiments, the kit is suitable for any of the methods described herein. In some embodiments, the kit comprises one or more elements, compositions (e.g., pharmaceutical compositions), gene modifying polypeptides, and/or gene modifying systems, or a functional fragment or component thereof, e.g., disposed in an article of manufacture. In some embodiments, the kit comprises instructions for use thereof.

[0786] In an aspect, the disclosure provides an article of manufacture, e.g., in which a kit as described herein, or a component thereof, is disposed.

[0787] In an aspect, the disclosure provides a pharmaceutical composition comprising a gene modifying polypeptide or a gene modifying system, e.g., as described herein. In some embodiments, the pharmaceutical composition further comprises a pharmaceutically acceptable carrier or excipient. In some embodiments, the pharmaceutical composition comprises a template RNA and/or an RNA encoding the polypeptide. In embodiments, the pharmaceutical composition has one or more (e.g., 1, 2, 3, or 4) of the following characteristics:
[0788] (a) less than 1% (e.g., less than 0.5%, 0.4%, 0.3%, 0.2%, or 0.1%) DNA template relative to the template RNA and/or the RNA encoding the polypeptide, e.g., on a molar basis;
[0789] (b) less than 1% (e.g., less than 0.5%, 0.4%, 0.3%, 0.2%, or 0.1%) uncapped RNA relative to the template RNA and/or the RNA encoding the polypeptide, e.g., on a molar basis;
[0790] (c) less than 1% (e.g., less than 0.5%, 0.4%, 0.3%, 0.2%, or 0.1%) partial length RNAs relative to the template RNA and/or the RNA encoding the polypeptide, e.g., on a molar basis;
[0791] (d) substantially lacks unreacted cap dinucleotides.

### Chemistry, Manufacturing, and Controls (CMC)

[0792] Purification of protein therapeutics is described, for example, in Franks, Protein Biotechnology: Isolation, Characterization, and Stabilization, Humana Press (2013); and in Cutler, Protein Purification Protocols (Methods in Molecular Biology), Humana Press (2010).

[0793] In some embodiments, a gene modifying system, polypeptide, and/or template nucleic acid (e.g., template RNA) conforms to certain quality standards. In some embodiments, a gene modifying system, polypeptide, and/or template nucleic acid (e.g., template RNA) produced by a method described herein conforms to certain quality standards. Accordingly, the disclosure is directed, in some aspects, to methods of manufacturing a gene modifying system, polypeptide, and/or template nucleic acid (e.g., template RNA) that conforms to certain quality standards, e.g., in which said quality standards are assayed. The disclosure is also directed, in some aspects, to methods of assaying said quality standards in a gene modifying system, polypeptide, and/or template nucleic acid (e.g., template RNA). In some embodiments, quality standards include, but are not limited to, one or more (e.g., 1, 2, 3, 4, 5, 6, 7, 8, 9, 10, 11, or 12) of the following:
[0794] (i) the length of the template RNA, e.g., whether the template RNA has a length that is above a reference length or within a reference length range, e.g., whether at least 80%, 85%, 90%, 95%, 96%, 97%, 98%, or 99% of the template RNA present is greater than 100, 125, 150, 175, or 200 nucleotides long;
[0795] (ii) the presence, absence, and/or length of a polyA tail on the template RNA, e.g., whether at least 80%, 85%, 90%, 95%, 96%, 97%, 98%, or 99% of the template RNA present contains a polyA tail (e.g., a polyA tail that is at least 5, 10, 20, 30, 50, 70, 100 nucleotides in length (SEQ ID NO: 25697));
[0796] (iii) the presence, absence, and/or type of a 5′ cap on the template RNA, e.g., whether at least 80%, 85%, 90%, 95%, 96%, 97%, 98%, or 99% of the template RNA present contains a 5′ cap, e.g., whether that cap is a 7-methylguanosine cap, e.g., a O-Me-m7G cap;
[0797] (iv) the presence, absence, and/or type of one or more modified nucleotides (e.g., selected from pseudouridine, dihydrouridine, inosine, 7-methylguanosine, 1-N-methylpseudouridine (1-5-methoxyuridine (5-MO-U), 5-methylcytidine (5mC), or a locked nucleotide) in the template RNA, e.g., whether at least 80%, 85%, 90%, 95%, 96%, 97%, 98%, or 99% of the template RNA present contains one or more modified nucleotides;
[0798] (v) the stability of the template RNA (e.g., over time and/or under a pre-selected condition), e.g., whether at least 80%, 85%, 90%, 95%, 96%, 97%, 98%, or 99% of the template RNA remains intact (e.g., greater than 100, 125, 150, 175, or 200 nucleotides long) after a stability test;
[0799] (vi) the potency of the template RNA in a system for modifying DNA, e.g., whether at least 1% of target sites are modified after a system comprising the template RNA is assayed for potency;
[0800] (vii) the length of the polypeptide, first polypeptide, or second polypeptide, e.g., whether the polypeptide, first polypeptide, or second polypeptide has a length that is above a reference length or within a reference length range, e.g., whether at least 80%, 85%, 90%, 95%, 96%, 97%, 98%, or 99% of the polypeptide, first polypeptide, or second polypeptide present is greater than 600, 650, 700, 750, 800, 850, 900, 950, 1000, 1050, 1100, 1150, 1200, 1250, 1300, 1350, 1400, 1450, 1500, 1600, 1700, 1800, 1900, or 2000 amino acids long (and optionally, no larger than 2500, 2000, 1500, 1400, 1300, 1200, 1100, 1000, 900, 800, 700, or 600 amino acids long);
[0801] (viii) the presence, absence, and/or type of post-translational modification on the polypeptide, first polypeptide, or second polypeptide, e.g., whether at least 80, 85, 90, 95, 96, 97, 98, or 99% of the polypeptide, first polypeptide, or second polypeptide contains phosphorylation, methylation, acetylation, myristoylation, palmitoylation, isoprenylation, glipyatyon, or lipoylation, or any combination thereof;
[0802] (ix) the presence, absence, and/or type of one or more artificial, synthetic, or non-canonical amino acids (e.g., selected from ornithine, (3-alanine, GABA, 6-Aminolevulinic acid, PABA, a D-amino acid (e.g., D-alanine or D-glutamate), aminoisobutyric acid, dehydroalanine, cystathionine, lanthionine, Djenkolic acid, Diaminopimelic acid, Homoalanine, Norvaline, Norleucine, Homonorleucine, homoserine, O-methyl-homoserine and O-ethyl-homoserine, ethionine, selenocysteine, selenohomocysteine, selenomethionine, selenoethionine, tellurocysteine, or telluromethionine) in the polypeptide, first polypeptide, or second polypeptide, e.g., whether at least 80%, 85%, 90%, 95%, 96%, 97%, 98%, or 99% of the polypeptide, first polypeptide, or second polypeptide present contains one or more artificial, synthetic, or non-canonical amino acids;
[0803] (x) the stability of the polypeptide, first polypeptide, or second polypeptide (e.g., over time and/or under a pre-selected condition), e.g., whether at least 80%, 85%, 90%, 95%, 96%, 97%, 98%, or 99% of the polypeptide, first polypeptide, or second polypeptide remains intact (e.g., greater than 600, 650, 700, 750, 800, 850, 900, 950, 1000, 1050, 1100, 1150, 1200, 1250, 1300, 1350, 1400, 1450, 1500, 1600, 1700, 1800, 1900, or 2000 amino acids long (and optionally, no larger than 2500, 2000, 1500, 1400, 1300, 1200, 1100, 1000, 900, 800, 700, or 600 amino acids long)) after a stability test;
[0804] (xi) the potency of the polypeptide, first polypeptide, or second polypeptide in a system for modifying DNA, e.g., whether at least 1% of target sites are modified after a system comprising the polypeptide, first polypeptide, or second polypeptide is assayed for potency; or
[0805] (xii) the presence, absence, and/or level of one or more of a pyrogen, virus, fungus, bacterial pathogen, or host cell protein, e.g., whether the system is free or substantially free of pyrogen, virus, fungus, bacterial pathogen, or host cell protein contamination.

[0806] In some embodiments, a system or pharmaceutical composition described herein is endotoxin free.

[0807] In some embodiments, the presence, absence, and/or level of one or more of a pyrogen, virus, fungus, bacterial pathogen, and/or host cell protein is determined. In embodiments, whether the system is free or substantially free of pyrogen, virus, fungus, bacterial pathogen, and/or host cell protein contamination is determined.

[0808] In some embodiments, a pharmaceutical composition or system as described herein has one or more (e.g., 1, 2, 3, or 4) of the following characteristics:
[0809] (a) less than 1% (e.g., less than 0.5%, 0.4%, 0.3%, 0.2%, or 0.1%) DNA template relative to the template RNA and/or the RNA encoding the polypeptide, e.g., on a molar basis;
[0810] (b) less than 1% (e.g., less than 0.5%, 0.4%, 0.3%, 0.2%, or 0.1%) uncapped RNA relative to the template RNA and/or the RNA encoding the polypeptide, e.g., on a molar basis;
[0811] (c) less than 1% (e.g., less than 0.5%, 0.4%, 0.3%, 0.2%, or 0.1%) partial length RNAs relative to the template RNA and/or the RNA encoding the polypeptide, e.g., on a molar basis;
[0812] (d) substantially lacks unreacted cap dinucleotides.

### EXAMPLES

### Example 1: Screening Configurations of Template RNAs that Correct the AATD Mutation in a Genomic Landing Pad in Human Cells

[0813] This example describes the use of gene modifying system containing a gene modifying polypeptide and template RNAs comprising varied lengths of heterologous object sequences and PBS sequences to quantify the activity of template RNAs for correction of the AATD mutation. In this example, a template RNA contains:
[0814] (1) a gRNA spacer;
[0815] (2) a gRNA scaffold;
[0816] (3) a heterologous object sequence; and
[0817] (4) a primer binding site (PBS) sequence.

[0818] One or more template RNAs described in Tables 1-5 can be tested as described in this example. The heterologous object sequences and PBS sequences were designed to correct the AATD mutation in a landing pad by replacing an “A” nucleotide with a “G” nucleotide at the mutation site via gene editing, to reverse an E342K mutation in the corresponding protein.

[0819] A cell line is created to have a “landing pad” or a stable integration that mimics a region of the SERPINA1 gene that contains the SERPINA1 mutation site and flanking sequences. The DNA for the landing pad is chemically synthesized and cloned into the pLenti-N-tGFP vector. The cloned landing pad sequence in the lentiviral expression vector is confirmed and the sequence is verified by Sanger sequencing of the landing pad. The sequence verified plasmids (9 μg) along with the lentiviral packaging mix (9 μg, Biosettia) are transfected using Lipofectamine2000™ according to the manufacturer instructions into a packaging cell line, LentiX-293T (Takara Bio). The transfected cells are incubated at 37° C., 5% CO₂ for 48 hours (including one medium change at 24 hrs) and the viral particle containing medium is collected from the cell culture dish. The collected medium is filtered through a 0.2 μm filter to remove cell debris and is prepared for transduction of HEK293T cells. The virus-containing medium is diluted in DMEM and mixed with polybrene to prepare a dilution series for transduction of HEK293T cells where the final concentration of polybrene is 8 pg/ml. The HEK293T cells are grown in virus containing medium for 48 hours and then split with fresh medium. The split cells are grown to confluence and transduction efficiency of the different dilutions of virus is measured by GFP expression via flow cytometry and ddPCR detection of the genomic integrated lentivirus that contained GFP and the SERPINA1 landing pads.

[0820] A gene modifying system comprising (i) a compatible gene modifying polypeptide described herein, e.g., having: an NLS of Table 11, a compatible Cas9 domain having a sequence of Table 8, a linker of Table 10, an RT sequence of Table 6 (e.g., MLVMS P03355 PLV919), and a second NLS of Table 11 and (ii) a template RNA of any of Tables 1-5 is transfected into the HEK293T landing pad cell line. The gene modifying polypeptide and the template RNAs are delivered by nucleofection in RNA format. Specifically, 1 μg of gene modifying polypeptide mRNA is combined with 10 μM template RNAs. The mRNA and template RNAs are added to 254, SF buffer containing 250,000 HEK293T landing pad cells and cells are nucleofected using program DS-150. After nucleofection, are were grown at 37° C., 5% CO₂ for 3 days prior to cell lysis and genomic DNA extraction. To analyze gene editing activity, primers flanking the SERPINA1 site are used to amplify across the locus. Amplicons are analyzed via short read sequencing using an Illumina MiSeq. In some embodiments, the assay will indicate that at least 30%, 40%, 50%, 60%, 70%, 80%, 90%, or 100% of copies of the SERPINA1 gene in the sample are converted to the desired wild-type sequence.

### Example 2: Gene Modifying Polypeptide Selection by Pooled Screening in HEK293T & U2OS Cells

[0821] This example describes the use of an RNA gene modifying system for the targeted editing of a coding sequence in the human genome. More specifically, this example describes the infection of HEK293T and U2OS cells with a library of gene modifying candidates, followed by transfection of a template guide RNA (tgRNA) for in vitro gene modifying in the cells, e.g., as a means of evaluating a new gene modifying polypeptide for editing activity in human cells by a pooled screening approach.

[0822] The gene modifying polypeptide library candidates assayed herein each comprise: 1) a S. pyogenes (Spy) Cas9 nickase containing an N863A mutation that inactivates one endonuclease active site; 2) one of the 122 peptide linkers depicted at Table 10; and 3) a reverse transcriptase (RT) domain from Table 6 of retroviral origin. The particular retroviral RT domains utilized were selected if they were expected to function as a monomer. For each selected RT domain, the wild-type sequences were tested, as well as versions with point mutations installed in the primary wild-type sequence. In particular, 143 RT domains were tested, either wild type or containing various mutations. In total, 17,446 Cas-linker-RT gene modifying polypeptides were tested.

[0823] The system described here is a two-component system comprising: 1) an expression plasmid encoding a human codon-optimized gene modifying polypeptide library candidate within a lentiviral cassette, and 2) a tgRNA expression plasmid expressing a non-coding tgRNA sequence that is recognized by Cas and localizes it to the genomic locus of interest, and that also templates reverse transcription of the desired edit into the genome by the RT domain, driven by a U6 promoter. The lentiviral cassette comprises: (i) a CMV promoter for expression in mammalian cells; (ii) a gene modifying polypeptide library candidate as shown; (iii) a self-cleaving T2A polypeptide; (iv) a puromycin resistance gene enabling selection in mammalian cells; and (v) a polyA tail termination signal.

[0824] To prepare a pool of cells expressing gene modifying polypeptide library candidates, HEK293T or U2OS cells were transduced with pooled lentiviral preparations of the gene modifying candidate plasmid library. HEK293 Lenti-X cells were seeded in 15 cm plates (12×10⁶ cells) prior to lentiviral plasmid transfection. Lentiviral plasmid transfection using the Lentiviral Packaging Mix (Biosettia, 27 ug) and the plasmid DNA for the gene modifying candidate library (27 ug) was performed the following day using Lipofectamine 2000 and Opti-MEM media according to the manufacturer's protocol. Extracellular DNA was removed by a full media change the next day and virus-containing media was harvested 48 hours after. Lentiviral media was concentrated using Lenti-X Concentrator (TaKaRa Biosciences) and 5 mL lentiviral aliquots were made and stored at −80° C. Lentiviral titering was performed by enumerating colony forming units post Puromycin selection. HEK293T or U2OS cells carrying a BFP-expressing genomic landing pad were seeded at 6×10⁷ cells in culture plates and transduced at a 0.3 multiplicity of infection (MOI) to minimize multiple infections per cell. Puromycin (2.5 ug/mL) was added 48 hours post infection to allow for selection of infected cells. Cells were kept under puromycin selection for at least 7 days and then scaled up for tgRNA electroporation.

[0825] To determine the genome-editing capacity of the gene modifying library candidates in the assay, infected BFP-expressing HEK293T or U2OS cells were then transfected by electroporation of 250,000 cells/well with 200 ng of a tgRNA (either g4 or g10) plasmid, designed to convert BFP to GFP, at sufficient cell count for >1000× coverage per library candidate.

[0826] The g4 tgRNA (5′ to 3′) is as follows: 20 nucleotide spacer region (GCCGAAGCACTGCACGCCGT; SEQ ID NO: 11,011), a scaffold region (GTTTTAGAGCTAGAAATAGCAAGTTAAAATAAGGCTAGTCCGTTATCAACTTGAAA AAGTGGCACCGAGTCGGTGC; SEQ ID NO: 11,012), the template region encoding the single base pair substitution to change BFP to GFP (bold) and a PAM inactivation that introduces a synonymous point mutation in the SpyCas9 PAM (NGG to NCG) that prevents re-engagement of the gene modifying polypeptide upon completion of a functional gene modifying reaction (underline) (ACCCTGACGTACG; SEQ ID NO: 11,013), and the 13 nucleotide PBS (GCGTGCAGTGCTT; SEQ ID NO: 11,014).

[0827] Similarly, the g10 tgRNA (5′ to 3′) is as follows: 20 nucleotide spacer region (AGAAGTCGTGCTGCTTCATG; SEQ ID NO: 11,015), a scaffold region (GTTTTAGAGCTAGAAATAGCAAGTTAAAATAAGGCTAGTCCGTTATCAACTTGAAA AAGTGGCACCGAGTCGGTGC; SEQ ID NO: 11,016), the template region encoding the single base pair substitution to change BFP to GFP (bold) and a PAM inactivation that introduces a synonymous point mutation in the SpyCas9 PAM (NGG to NGA) that prevents re-engagement of the gene modifying polypeptide upon completion of a functional gene modifying reaction (underline) (ACCCTGACCTACGGCGTGCAGTGCTTCGGCCGCTACCCCGATCACAT; SEQ ID NO: 11,017), and 13 nucleotide PBS (GAAGCAGCACGAC; SEQ ID NO: 11,018).

[0828] To assess the genome-editing capacity of the various constructs in the assay, cells were sorted by Fluorescence-Activated Cell Sorting (FACS) for GFP expression 6-7 days post-electroporation. Cells were sorted and harvested as distinct populations of unedited (BFP+) cells, edited (GFP+) cells and imperfect edit (BFP-, GFP-) cells. A sample of unsorted cells was also harvested as the input population to determine enrichment during analysis.

[0829] To determine which gene modifying library candidates have genome-editing capacity in this assay, genomic DNA (gDNA) was harvested from sorted and unsorted cell populations, and analyzed by sequencing the gene modifying library candidates in each population. Briefly, gene modifying sequences were amplified from the genome using primers specific to the lentiviral cassette, amplified in a second round of PCR to dilute genomic DNA, and then sequenced using Oxford Nanopore Sequencing Technology according to the manufacturer's protocol.

[0830] After quality control of sequencing reads, reads of at least 1500 and no more than 3200 nucleotides were mapped to the gene modifying polypeptide library sequences and those containing a minimum of an 80% match to a library sequence were considered to be successfully aligned to a given candidate. To identify gene modifying candidates capable of performing gene editing in the assay, the read count of each library candidate in the edited population was compared to its read count in the initial, unsorted population. For purposes of this pooled screen, gene modifying candidates with genome-editing capacity were selected as those candidates that were enriched in the converted (GFP+) population relative to unsorted (input) cells and wherein the enrichment was determined to be at or above the enrichment level of a reference (Element ID No: 17380).

[0831] A large number of gene modifying polypeptide candidates were determined to be enriched in the GFP+ cell populations. For example, of the 17,446 candidates tested, over 3,300 exhibited enrichment in GFP+sorted populations (relative to unsorted) that was at least equivalent to that of the reference under similar experimental conditions (HEK293T using g4 tgRNA; HEK293T cells using g10 tgRNA; or U2OS cells using g4 tgRNA), shown in Table D. Although the 17,446 candidates were also tested in U2OS cells using g10 tgRNA, the pooled screen did not yield candidates that were enriched in the converted (GFP+) population relative to unsorted (input) cells under that experimental condition; further investigation is required to explain these results.

TABLE D
Combinations of linker and RT sequences
screened. The amino acid sequence of
each RT in this table is provided in
Table 6.

| | SEQ | |
|---|---|---|
| Linker amino | ID | RT domain |
| acid sequence | NO: | name |
| EAAAKGSS | 12,001 | PERV_Q4VFZ2_3mutA_WS |
| EAAAKEAAAKEAAAKEAA | 12,002 | MLVMS_P03355_PLV919 |
| AK | | |
| PAPEAAAK | 12,003 | MLVFF_P26809_3mutA |
| EAAAKPAPGGG | 12,004 | MLVFF_P26809_3mutA |
| GSSGSSGSSGSSGSSGSS | 12,005 | PERV_Q4VFZ2_3mut |
| PAPGGGEAAAK | 12,006 | MLVAV_P03356_3mutA |
| AEAAAKEAAAKEAAAKEA | 12,007 | MLVMS_P03355_PLV919 |
| AAKALEAEAAAKEAAAKE | | |
| AAAKEAAAKA | | |
| GSSEAAAK | 12,008 | MLVFF_P26809_3mutA |
| EAAAKPAPGGS | 12,009 | MLVFF_P26809_3mutA |
| GGSGGSGGSGGSGGSGGS | 12,010 | MLVFF_P26809_3mutA |
| AEAAAKEAAAKEAAAKEA | 12,011 | XMRV6_A1Z651_3mutA |
| AAKALEAEAAAKEAAAKE | | |
| AAAKEAAAKA | | |
| AEAAAKEAAAKEAAAKEA | 12,012 | PERV_Q4VFZ2_3mutA_WS |
| AAKALEAEAAAKEAAAKE | | |
| AAAKEAAAKA | | |
| EAAAKEAAAKEAAAK | 12,013 | MLVFF_P26809_3mutA |
| PAPEAAAKGSS | 12,014 | MLVFF_P26809_3mutA |
| AEAAAKEAAAKEAAAKEA | 12,015 | PERV_Q4VFZ2_3mutA_WS |
| AAKALEAEAAAKEAAAKE | | |
| AAAKEAAAKA | | |
| EAAAKEAAAKEAAAK | 12,016 | PERV_Q4VFZ2_3mutA_WS |
| AEAAAKEAAAKEAAAKEA | 12,017 | AVIRE_P03360_3mutA |
| AAKALEAEAAAKEAAAKE | | |
| AAAKEAAAKA | | |
| PAPAPAPAPAP | 12,018 | MLVCB_P08361_3mutA |
| PAPAPAPAPAP | 12,019 | MLVFF_P26809_3mutA |
| EAAAKGGSPAP | 12,020 | PERV_Q4VFZ2_3mutA_WS |
| PAP | | MLVMS_P03355_PLV919 |
| PAPGGGGSS | 12,022 | WMSV_P03359_3mutA |
| SGSETPGTSESATPES | 12,023 | MLVFF_P26809_3mutA |
| PAPEAAAKGSS | 12,024 | XMRV6_A1Z651_3mutA |
| EAAAKGGSGGG | 12,025 | MLVMS_P03355_PLV919 |
| GGGGSGGGGS | 12,026 | MLVFF_P26809_3mutA |
| GGGPAPGSS | 12,027 | MLVAV_P03356_3mutA |
| GGSGGSGGSGGSGGSGGS | 12,028 | XMRV6_A1Z651_3mut |
| GGGGSGGGGSGGGGSGGG | 12,029 | MLVCB_P08361_3mutA |
| GSGGGGSGGGGS | | |
| GSSPAP | 12,030 | AVIRE_P03360_3mutA |
| EAAAKGSSPAP | 12,031 | MLVFF_P26809_3mutA |
| GSSGGGEAAAK | 12,032 | MLVFF_P26809_3mutA |
| GGSGGSGGSGGSGGSGGS | 12,033 | MLVMS_P03355_3mutA_WS |
| PAPAPAPAP | 12,034 | MLVFF_P26809_3mutA |
| EAAAKEAAAKEAAAKEAA | 12,035 | XMRV6_A1Z651_3mutA |
| AK | | |
| EAAAKGGSPAP | 12,036 | MLVMS_P03355_3mutA_WS |
| PAPGGSEAAAK | 12,037 | AVIRE_P03360_3mutA |
| GGGGSGGGGSGGGGSGGG | 12,038 | AVIRE_P03360_3mutA |
| GSGGGGSGGGGS | | |
| EAAAKGGGGSEAAAK | 12,039 | MLVCB_P08361_3mutA |
| AEAAAKEAAAKEAAAKEA | 12,040 | WMSV_P03359_3mutA |
| AAKALEAEAAAKEAAAKE | | |
| AAAKEAAAKA | | |
| GSS | | MLVMS_P03355_PLV919 |
| GSSGSSGSSGSS | 12,042 | MLVMS_P03355_PLV919 |
| GSSPAPEAAAK | 12,043 | XMRV6_A1Z651_3mutA |
| GGSPAPEAAAK | 12,044 | MLVFF_P26809_3mutA |
| GGGEAAAKGGS | 12,045 | MLVFF_P26809_3mutA |
| EAAAKEAAAKEAAAKEAA | 12,046 | PERV_Q4VFZ2_3mutA_WS |
| AKEAAAK | | |
| GGGGGGGG | 12,047 | PERV_Q4VFZ2_3mut |
| GGGPAP | 12,048 | MLVCB_P08361_3mutA |
| PAPAPAPAPAPAP | 12,049 | MLVCB_P08361_3mutA |
| GGSGGSGGSGGSGGSGGS | 12,050 | MLVCB_P08361_3mutA |
| PAP | | MLVMS_P03355_3mutA_WS |
| GGSGGSGGSGGSGGSGGS | 12,052 | PERV_Q4VFZ2_3mutA_WS |
| PAPAPAPAPAPAP | 12,053 | MLVMS_P03355_PLV919 |
| EAAAKPAPGSS | 12,054 | MLVMS_P03355_3mutA_WS |
| EAAAKEAAAKEAAAKEAA | 12,055 | MLVMS_P03355_3mutA_WS |
| AK | | |
| EAAAKGGS | 12,056 | MLVMS_P03355_3mutA_WS |
| GGGGSEAAAKGGGGS | 12,057 | MLVFF_P26809_3mutA |
| EAAAKPAPGSS | 12,058 | MLVFF_P26809_3mutA |
| GGGGSGGGGSGGGGSGGG | 12,059 | MLVMS_P03355_PLV919 |
| GS | | |
| EAAAKGGGGGS | 12,060 | MLVMS_P03355_PLV919 |
| GGSPAP | 12,061 | XMRV6_A1Z651_3mutA |
| EAAAKGGGPAP | 12,062 | MLVMS_P03355_PLV919 |
| EAAAKEAAAKEAAAKEAA | 12,063 | MLVFF_P26809_3mutA |
| AKEAAAK | | |
| PAP | | MLVCB_P08361_3mutA |
| EAAAK | 12,065 | XMRV6_A1Z651_3mutA |
| GGSGSSPAP | 12,066 | PERV_Q4VFZ2_3mutA_WS |
| GSSGSSGSSGSSGSSGSS | 12,067 | MLVMS_P03355_PLV919 |
| GSSEAAAKGGG | 12,068 | MLVAV_P03356_3mutA |
| GGGEAAAKGGS | 12,069 | XMRV6_A1Z651_3mutA |
| EAAAKGGGGSEAAAK | 12,070 | MLVAV_P03356_3mutA |
| GGGGSGGGGSGGGGS | 12,071 | MLVFF_P26809_3mutA |
| GGGGSGGGGSGGGGSGGG | 12,072 | AVIRE_P03360_3mutA |
| GS | | |
| SGSETPGTSESATPES | 12,073 | AVIRE_P03360_3mutA |
| GGGEAAAKPAP | 12,074 | MLVFF_P26809_3mutA |
| EAAAKGSSGGG | 12,075 | MLVMS_P03355_3mutA_WS |
| EAAAKEAAAKEAAAKEAA | 12,076 | WMSV_P03359_3mut |
| AKEAAAK | | |
| GGSGGSGGSGGS | 12,077 | XMRV6_A1Z651_3mutA |
| GGSEAAAKPAP | 12,078 | MLVFF_P26809_3mutA |
| EAAAKGSSGGG | 12,079 | XMRV6_A1Z651_3mutA |
| GGGGS | 12,080 | MLVFF_P26809_3mutA |
| GGGEAAAKGSS | 12,081 | MLVMS_P03355_PLV919 |
| PAPAPAPAPAPAP | 12,082 | MLVAV_P03356_3mutA |
| GGGGSGGGGSGGGGSGGG | 12,083 | MLVCB_P08361_3mutA |
| GS | | |
| GGGEAAAKGSS | 12,084 | MLVCB_P08361_3mutA |
| PAPGGSGSS | 12,085 | MLVFF_P26809_3mutA |
| GSAGSAAGSGEF | 12,086 | MLVCB_P08361_3mutA |
| PAPGGSEAAAK | 12,087 | MLVMS_P03355_3mutA_WS |
| GGSGSS | 12,088 | XMRV6_A1Z651_3mutA |
| PAPGGGGSS | 12,089 | MLVMS_P03355_PLV919 |
| GSSGSSGSS | 12,090 | XMRV6_A1Z651_3mut |
| AEAAAKEAAAKEAAAKEA | 12,091 | MLVMS_P03355_3mutA_WS |
| AAKALEAEAAAKEAAAKE | | |
| AAAKEAAAKA | | |
| EAAAK | 12,092 | MLVMS_P03355_PLV919 |
| GSSGSSGSSGSS | 12,093 | MLVFF_P26809_3mutA |
| PAPGGGGSS | 12,094 | MLVCB_P08361_3mutA |
| GGGEAAAKGGS | 12,095 | MLVCB_P08361_3mutA |
| PAPGGGEAAAK | 12,096 | MLVMS_P03355_PLV919 |
| GGGGGSPAP | 12,097 | XMRV6_A1Z651_3mutA |
| EAAAKGGS | 12,098 | XMRV6_A1Z651_3mutA |
| EAAAKGSSPAP | 12,099 | XMRV6_A1Z651_3mut |
| PAPEAAAK | 12,100 | MLVAV_P03356_3mutA |
| GGSGGSGGSGGS | 12,101 | MLVMS_P03355_3mutA_WS |
| GGGPAPGGS | 12,102 | MLVMS_P03355_PLV919 |
| GSSGSSGSSGSS | 12,103 | PERV_Q4VFZ2_3mutA_WS |
| EAAAKPAPGGS | 12,104 | MLVCB_P08361_3mutA |
| GSSGSS | 12,105 | MLVFF_P26809_3mutA |
| EAAAKEAAAKEAAAKEAA | 12,106 | MLVCB_P08361_3mutA |
| AK | | |
| EAAAKEAAAKEAAAKEAA | 12,107 | FLV_P10273_3mutA |
| AK | | |
| GSS | | MLVFF_P26809_3mutA |
| EAAAKEAAAK | 12,109 | MLVMS_P03355_3mutA_WS |
| PAPEAAAKGGG | 12,110 | MLVAV_P03356_3mutA |
| GGSGSSEAAAK | 12,111 | MLVFF_P26809_3mutA |
| EAAAKEAAAKEAAAKEAA | 12,112 | PERV_Q4VFZ2 |
| AKEAAAK | | |
| GSSEAAAKPAP | 12,113 | AVIRE_P03360_3mutA |
| EAAAKEAAAKEAAAKEAA | 12,114 | MLVCB_P08361_3mutA |
| AKEAAAK | | |
| EAAAKGGG | 12,115 | MLVFF_P26809_3mutA |
| GSSPAPGGG | 12,116 | MLVCB_P08361_3mutA |
| GGGPAPGSS | 12,117 | MLVMS_P03355_PLV919 |
| GGGGGS | 12,118 | MLVMS_P03355_3mutA_WS |
| EAAAKEAAAKEAAAKEAA | 12,119 | PERV_Q4VFZ2_3mut |
| AKEAAAKEAAAK | | |
| GGGGSGGGGSGGGGSGGG | 12,120 | WMSV_P03359_3mutA |
| GSGGGGS | | |
| EAAAKEAAAKEAAAK | 12,121 | PERV_Q4VFZ2_3mut |
| PAPAPAPAP | 12,122 | MLVCB_P08361_3mutA |
| GSSGSSGSSGSSGSS | 12,123 | PERV_Q4VFZ2_3mut |
| GGGGSSEAAAK | 12,124 | MLVMS_P03355_3mutA_WS |
| GGSGGSGGSGGS | 12,125 | MLVCB_P08361_3mutA |
| PAPEAAAKGGS | 12,126 | MLVCB_P08361_3mutA |
| EAAAKEAAAKEAAAKEAA | 12,127 | MLVCB_P08361_3mutA |
| AKEAAAKEAAAK | | |
| EAAAKGGGGSEAAAK | 12,128 | MLVMS_P03355_PLV919 |
| EAAAKGGGGSEAAAK | 12,129 | MLVMS_P03355_3mutA_WS |
| EAAAKGGGPAP | 12,130 | XMRV6_A1Z651_3mut |
| EAAAKEAAAKEAAAKEAA | 12,131 | MLVMS_P03355_3mutA_WS |
| AKEAAAK | | |
| AEAAAKEAAAKEAAAKEA | 12,132 | FLV_P10273_3mutA |
| AAKALEAEAAAKEAAAKE | | |
| AAAKEAAAKA | | |
| GGSEAAAKGGG | 12,133 | MLVMS_P03355_3mutA_WS |
| GGGGSGGGGSGGGGSGGG | 12,134 | KORV_Q9TTC1-Pro_3mutA |
| GSGGGGSGGGGS | | |
| GGGPAPGGS | 12,135 | MLVCB_P08361_3mutA |
| PAPAPAPAPAPAP | 12,136 | XMRV6_A1Z651_3mutA |
| GGSGSSGGG | 12,137 | XMRV6_A1Z651_3mutA |
| GGSGSSGGG | 12,138 | MLVCB_P08361_3mutA |
| GGGEAAAKGGS | 12,139 | MLVMS_P03355_3mutA_WS |
| EAAAK | 12,140 | MLVCB_P08361_3mutA |
| GGSPAPGSS | 12,141 | MLVMS_P03355_3mutA_WS |
| GGGGSSEAAAK | 12,142 | PERV_Q4VFZ2_3mut |
| PAPAPAPAPAP | 12,143 | MLVBM_Q7SVK7_3mut |
| EAAAKEAAAKEAAAKEAA | 12,144 | MLVAV_P03356_3mutA |
| AK | | |
| GGGGGSGSS | 12,145 | MLVCB_P08361_3mutA |
| EAAAKGSSPAP | 12,146 | MLVMS_P03355_3mutA_WS |
| PAPAPAPAPAPAP | 12,147 | MLVMS_P03355_3mutA_WS |
| GSSGGGGGS | 12,148 | MLVMS_P03355_3mutA_WS |
| PAPGSSGGG | 12,149 | MLVMS_P03355_PLV919 |
| GGSGGGPAP | 12,150 | MLVCB_P08361_3mutA |
| GGGGGGG | 12,151 | MLVCB_P08361_3mutA |
| GSSGSSGSSGSSGSSGSS | 12,152 | MLVCB_P08361_3mutA |
| GGGPAPGGS | 12,153 | MLVFF_P26809_3mutA |
| EAAAKGGSGGG | 12,154 | PERV_Q4VFZ2_3mut |
| EAAAKGGGGSS | 12,155 | MLVMS_P03355_3mutA_WS |
| GSSGSSGSSGSSGSSGSS | 12,156 | MLVMS_P03355_3mut |
| GGGGSGGGGSGGGGSGGG | 12,157 | MLVBM_Q7SVK7_3mutA_WS |
| GS | | |
| PAPAPAPAPAP | 12,158 | MLVMS_P03355_PLV919 |
| GGGEAAAKGGS | 12,159 | MLVMS_P03355_PLV919 |
| AEAAAKEAAAKEAAAKEA | 12,160 | MLVMS_P03355_3mut |
| AAKALEAEAAAKEAAAKE | | |
| AAAKEAAAKA | | |
| GSAGSAAGSGEF | 12,161 | MLVMS_P03355_3mutA_WS |
| GSSGSSGSSGSSGSS | 12,162 | MLVFF_P26809_3mutA |
| EAAAKGGSGSS | 12,163 | MLVFF_P26809_3mutA |
| PAPGGG | 12,164 | MLVFF_P26809_3mutA |
| GGGPAPGSS | 12,165 | XMRV6_A1Z651_3mutA |
| PAPEAAAKGGS | 12,166 | AVIRE_P03360_3mutA |
| PAPGGGEAAAK | 12,167 | MLVFF_P26809_3mut |
| GGGGSSEAAAK | 12,168 | MLVCB_P08361_3mutA |
| EAAAK | 12,169 | MLVMS_P03355_PLV919 |
| GGGGSGGGGSGGGGSGGG | 12,170 | BAEVM_P10272_3mutA |
| GGGGGSGGGGS | | |
| GGSGGGEAAAK | 12,171 | MLVMS_P03355_PLV919 |
| AEAAAKEAAAKEAAAKEA | 12,172 | MLVFF_P26809_3mutA |
| AAKALEAEAAAKEAAAKE | | |
| AAAKEAAAKA | | |
| GSSPAPGGS | 12,173 | XMRV6_A1Z651_3mutA |
| GGSGGGPAP | 12,174 | MLVMS_P03355_PLV919 |
| EAAAK | 12,175 | AVIRE_P03360_3mutA |
| GSS | | XMRV6_A1Z651_3mutA |
| GGSGGSGGS | 12,177 | MLVFF_P26809_3mutA |
| EAAAKEAAAKEAAAKEAA | 12,178 | AVIRE_P03360_3mut |
| AK | | |
| PAPEAAAKGGG | 12,179 | PERV_Q4VFZ2_3mutA_WS |
| GGGGGSEAAAK | 12,180 | BAEVM_P10272_3mutA |
| GGSGSSGGG | 12,181 | MLVMS_P03355_3mutA_WS |
| GGGGGGG | 12,182 | MLVMS_P03355_3mutA_WS |
| GSSEAAAKPAP | 12,183 | PERV_Q4VFZ2_3mut |
| GGGGGSEAAAK | 12,184 | WMSV_P03359_3mut |
| GGGGSGGGGSGGGGSGGG | 12,185 | MLVFF_P26809_3mut |
| GSGGGGS | | |
| GGGEAAAKGGS | 12,186 | AVIRE_P03360_3mutA |
| GGSPAPGGG | 12,187 | AVIRE_P03360_3mutA |
| GSAGSAAGSGEF | 12,188 | MLVAV_P03356_3mutA |
| EAAAK | 12,189 | MLVAV_P03356_3mutA |
| EAAAKPAPGSS | 12,190 | WMSV_P03359_3mutA |
| EAAAKEAAAKEAAAKEAA | 12,191 | PERV_Q4VFZ2_3mutA_WS |
| AKEAAAKEAAAK | | |
| GGSEAAAKPAP | 12,192 | MLVCB_P08361_3mutA |
| PAPAPAPAPAPAP | 12,193 | MLVBM_Q7SVK7_3mutA_WS |
| GGSPAPGGG | 12,194 | MLVMS_P03355_3mutA_WS |
| GGSEAAAKGGG | 12,195 | MLVMS_P03355_3mut |
| GGSGGSGGSGGS | 12,196 | MLVFF_P26809_3mutA |
| EAAAKEAAAKEAAAKEAA | 12,197 | MLVFF_P26809_3mutA |
| AKEAAAKEAAAK | | |
| GGG | | AVIRE_P03360_3mutA |
| AEAAAKEAAAKEAAAKEA | 12,199 | PERV_Q4VFZ2_3mut |
| AAKALEAEAAAKEAAAKE | | |
| AAAKEAAAKA | | |
| GGSGGSGGSGGS | 12,200 | MLVMS_P03355_3mutA_WS |
| GGGEAAAK | 12,201 | MLVCB_P08361_3mutA |
| GSSGSSGSSGSSGSSGSS | 12,202 | MLVMS_P03355_3mutA_WS |
| GSSGGGPAP | 12,203 | MLVMS_P03355_3mutA_WS |
| GSSEAAAKPAP | 12,204 | MLVFF_P26809_3mutA |
| EAAAKEAAAK | 12,205 | MLVMS_P03355_PLV919 |
| GGGGSGGGGGGGGSGGGG | 12,206 | MLVCB_P08361_3mut |
| SGGGGSGGGGS | | |
| GGGGGG | 12,207 | MLVMS_P03355_3mutA_WS |
| GGSGSSGGG | 12,208 | MLVFF_P26809_3mutA |
| GSSGGGEAAAK | 12,209 | PERV_Q4VFZ2_3mutA_WS |
| PAPAPAPAPAP | 12,210 | PERV_Q4VFZ2_3mut |
| EAAAKEAAAKEAAAKEAA | 12,211 | SFV3L_P27401_2mut |
| AKEAAAKEAAAK | | |
| EAAAKGGSGGG | 12,212 | BAEVM_P10272_3mutA |
| GGGGSSPAP | 12,213 | PERV_Q4VFZ2_3mutA_WS |
| GGGEAAAKPAP | 12,214 | MLVMS_P03355_PLV919 |
| GGSGGGPAP | 12,215 | BAEVM_P10272_3mutA |
| PAPGSSGGS | 12,216 | MLVMS_P03355_PLV919 |
| GGSGGGPAP | 12,217 | MLVMS_P03355_3mutA_WS |
| EAAAKGGSPAP | 12,218 | PERV_Q4VFZ2_3mutA_WS |
| EAAAKGGSGGG | 12,219 | MLVMS_P03355_3mutA_WS |
| PAPGSSGGG | 12,220 | MLVFF_P26809_3mutA |
| GSSEAAAKGGS | 12,221 | MLVFF_P26809_3mutA |
| PAPGSSEAAAK | 12,222 | MLVFF_P26809_3mutA |
| EAAAKGSSPAP | 12,223 | KORV_Q9TTC1-Pro_3mutA |
| EAAAKEAAAKEAAAKEAA | 12,224 | MLVBM_Q7SVK7_3mutA_WS |
| AKEAAAK | | |
| PAPGSSEAAAK | 12,225 | MLVMS_P03355_PLV919 |
| EAAAKGSSGGG | 12,226 | MLVMS_P03355_3mutA_WS |
| EAAAKGGGGGS | 12,227 | AVIRE_P03360_3mutA |
| EAAAKEAAAKEAAAK | 12,228 | MLVMS_P03355_PLV919 |
| PAPAPAPAPAPAP | 12,229 | MLVFF_P26809_3mutA |
| GGGGSGGGGSGGGGS | 12,230 | MLVCB_P08361_3mutA |
| PAPGGSEAAAK | 12,231 | MLVCB_P08361_3mutA |
| PAPGSSEAAAK | 12,232 | MLVBM_Q7SVK7_3mutA_WS |
| PAPEAAAKGSS | 12,233 | AVIRE_P03360_3mutA |
| GGSPAPGSS | 12,234 | WMSV_P03359_3mutA |
| PAPGGSGGG | 12,235 | MLVMS_P03355_PLV919 |
| EAAAKGGSGSS | 12,236 | MLVMS_P03355_3mutA_WS |
| GGSGGG | 12,237 | MLVFF_P26809_3mutA |
| GGSEAAAKGSS | 12,238 | KORV_Q9TTC1_3mutA |
| AEAAAKEAAAKEAAAKEA | 12,239 | MLVCB_P08361_3mutA |
| AAKALEAEAAAKEAAAKE | | |
| AAAKEAAAKA | | |
| PAPAPAPAPAPAP | 12,240 | PERV_Q4VFZ2_3mutA_WS |
| PAPEAAAK | 12,241 | MLVMS_P03355_3mutA_WS |
| GGSEAAAKGGG | 12,242 | MLVMS_P03355_PLV919 |
| GSSPAP | 12,243 | MLVMS_P03355_3mutA_WS |
| GGGGSS | 12,244 | MLVMS_P03355_PLV919 |
| GGGEAAAKPAP | 12,245 | AVIRE_P03360_3mutA |
| EAAAKPAPGGS | 12,246 | MLVAV_P03356_3mutA |
| EAAAKGGGPAP | 12,247 | MLVAV_P03356_3mutA |
| PAPGGSEAAAK | 12,248 | BAEVM_P10272_3mutA |
| PAPGGSGSS | 12,249 | MLVMS_P03355_3mutA_WS |
| PAPGGSGSS | 12,250 | AVIRE_P03360_3mutA |
| GGSGGGPAP | 12,251 | MLVMS_P03355_3mutA_WS |
| EAAAKEAAAKEAAAKEAA | 12,252 | BAEVM_P10272_3mutA |
| AK | | |
| GGGGSGGGGSGGGGSGGG | 12,253 | MLVMS_P03355_PLV919 |
| GSGGGGS | | |
| GGGGSSPAP | 12,254 | MLVCB_P08361_3mutA |
| GSSGGGPAP | 12,255 | MLVFF_P26809_3mutA |
| GGGGSSGGS | 12,256 | MLVMS_P03355_PLV919 |
| GGSGGG | 12,257 | MLVCB_P08361_3mutA |
| GSSGGGGGS | 12,258 | MLVMS_P03355_PLV919 |
| SGGSSGGSSGSETPGTSE | 12,259 | XMRV6_A1Z651_3mutA |
| SATPESSGGSSGGSS | | |
| GGGGGSGSS | 12,260 | KORV_Q9TTC1_3mut |
| GGGEAAAKGGS | 12,261 | BAEVM_P10272_3mutA |
| GGSGGG | 12,262 | BAEVM_P10272_3mutA |
| PAPAPAP | 12,263 | KORV_Q9TTC1-Pro_3mut |
| AEAAAKEAAAKEAAAKEA | 12,264 | SFV3L_P27401_2mutA |
| AAKALEAEAAAKEAAAKE | | |
| AAAKEAAAKA | | |
| AEAAAKEAAAKEAAAKEA | 12,265 | MLVBM_Q7SVK7_3mutA_WS |
| AAKALEAEAAAKEAAAKE | | |
| AAAKEAAAKA | | |
| GSSGSSGSSGSSGSS | 12,266 | MLVMS_P03355_3mutA_WS |
| GSSGGGEAAAK | 12,267 | MLVMS_P03355_3mutA_WS |
| GSSGGSEAAAK | 12,268 | MLVFF_P26809_3mutA |
| PAP | | MLVMS_P03355_PLV919 |
| EAAAKGGGGSEAAAK | 12,270 | MLVBM_Q7SVK7_3mutA_WS |
| PAPAP | 12,271 | AVIRE_P03360_3mutA |
| PAP | | MLVFF_P26809_3mutA |
| GSSGGG | 12,273 | MLVMS_P03355_3mut |
| GSSPAPGGS | 12,274 | MLVFF_P26809_3mutA |
| PAPAPAPAP | 12,275 | XMRV6_A1Z651_3mutA |
| EAAAKGSSGGS | 12,276 | PERV_Q4VFZ2_3mut |
| PAPEAAAKGGG | 12,277 | KORV_Q9TTC1-Pro_3mutA |
| PAPGGS | 12,278 | MLVCB_P08361_3mutA |
| EAAAKGGG | 12,279 | MLVCB_P08361_3mutA |
| GSSEAAAKPAP | 12,280 | MLVMS_P03355_PLV919 |
| PAPGGS | 12,281 | MLVFF_P26809_3mutA |
| EAAAKGGS | 12,282 | MLVCB_P08361_3mutA |
| EAAAKEAAAKEAAAKEAA | 12,283 | FLV_P10273_3mutA |
| AKEAAAKEAAAK | | |
| PAPGGSEAAAK | 12,284 | MLVAV_P03356_3mutA |
| GSS | | MLVCB_P08361_3mutA |
| GSSGSSGSSGSS | 12,286 | AVIRE_P03360_3mutA |
| GSSGSSGSS | 12,287 | MLVFF_P26809_3mutA |
| GSSGGG | 12,288 | MLVMS_P03355_PLV919 |
| EAAAK | 12,289 | MLVFF_P26809_3mutA |
| GGSPAPEAAAK | 12,290 | MLVCB_P08361_3mutA |
| GGSGSS | 12,291 | MLVCB_P08361_3mutA |
| GSSPAPGGG | 12,292 | MLVMS_P03355_PLV919 |
| EAAAKEAAAKEAAAKEAA | 12,293 | MLVAV_P03356_3mutA |
| AKEAAAK | | |
| EAAAKGSSPAP | 12,294 | FLV_P10273_3mutA |
| GGGGSS | 12,295 | XMRV6_A1Z651_3mutA |
| GGSPAPGSS | 12,296 | MLVMS_P03355_PLV919 |
| EAAAKEAAAKEAAAKEAA | 12,297 | MLVMS_P03355_3mutA_WS |
| AKEAAAK | | |
| PAPEAAAKGGG | 12,298 | FLV_P10273_3mutA |
| EAAAKPAPGGS | 12,299 | XMRV6_A1Z651_3mut |
| PAPAP | 12,300 | BAEVM_P10272_3mutA |
| EAAAKEAAAKEAAAKEAA | 12,301 | MLVMS_P03355_PLV919 |
| AK | | |
| GSSPAPGGG | 12,302 | MLVMS_P03355_PLV919 |
| EAAAKGGGPAP | 12,303 | KORV_Q9TTC1_3mutA |
| PAPEAAAK | 12,304 | MLVMS_P03355_PLV919 |
| PAPGGGEAAAK | 12,305 | PERV_Q4VFZ2_3mutA_WS |
| EAAAKGSSGGS | 12,306 | MLVMS_P03355_3mutA_WS |
| EAAAKEAAAKEAAAK | 12,307 | MLVMS_P03355_PLV919 |
| GSSEAAAK | 12,308 | MLVMS_P03355_3mutA_WS |
| GSSGSSGSSGSS | 12,309 | MLVMS_P03355_3mutA_WS |
| GGGGSGGGGSGGGGSGGG | 12,310 | MLVMS_P03355_3mutA_WS |
| GS | | |
| EAAAKGGGGSEAAAK | 12,311 | MLVMS_P03355_3mut |
| GGS | | MLVCB_P08361_3mutA |
| GGGGSGGGGSGGGGSGGG | 12,313 | XMRV6_A1Z651_3mutA |
| GSGGGGGGGGS | | |
| GGSGSSPAP | 12,314 | MLVCB_P08361_3mutA |
| GGGGSGGGGSGGGGS | 12,315 | XMRV6_A1Z651_3mutA |
| PAPAPAPAPAP | 12,316 | BAEVM_P10272_3mutA |
| PAPAPAPAPAP | 12,317 | MLVMS_P03355_3mutA_WS |
| EAAAKEAAAKEAAAKEAA | 12,318 | MLVBM_Q7SVK7_3mut |
| AK | | |
| GGGGSGGGGSGGGGSGGG | 12,319 | BAEVM_P10272_3mutA |
| GSGGGGS | | |
| GGSGGSGGS | 12,320 | MLVMS_P03355_3mutA_WS |
| EAAAKPAPGSS | 12,321 | MLVMS_P03355_PLV919 |
| GSS | | MLVMS_P03355_3mutA_WS |
| PAPEAAAKGGS | 12,323 | MLVMS_P03355_3mutA_WS |
| GGGPAPGGS | 12,324 | MLVMS_P03355_3mutA_WS |
| EAAAKGGGGSS | 12,325 | MLVAV_P03356_3mutA |
| GSSGSSGSSGSSGSS | 12,326 | MLVFF_P26809_3mut |
| SGSETPGTSESATPES | 12,327 | PERV_Q4VFZ2_3mut |
| GGSEAAAKGGG | 12,328 | MLVMS_P03355_3mut |
| GSSGSSGSSGSSGSSGSS | 12,329 | AVIRE_P03360_3mutA |
| PAPAPAPAPAPAP | 12,330 | AVIRE_P03360_3mut |
| GGSGGS | 12,331 | XMRV6_A1Z651_3mutA |
| PAPGSSEAAAK | 12,332 | MLVCB_P08361_3mut |
| GGSPAPEAAAK | 12,333 | PERV_Q4VFZ2_3mut |
| EAAAKGGGGGS | 12,334 | MLVCB_P08361_3mutA |
| GGSGGSGGSGGS | 12,335 | MLVMS_P03355_PLV919 |
| GGGGSSEAAAK | 12,336 | MLVMS_P03355_PLV919 |
| GSSEAAAKGGG | 12,337 | MLVFF_P26809_3mutA |
| PAPGGS | 12,338 | MLVMS_P03355_3mutA_WS |
| EAAAKGGSGGG | 12,339 | MLVCB_P08361_3mutA |
| EAAAKGGG | 12,340 | PERV_Q4VFZ2_3mut |
| PAPGGS | 12,341 | XMRV6_A1Z651_3mutA |
| GSSPAPGGG | 12,342 | XMRV6_A1Z651_3mutA |
| PAPEAAAKGGG | 12,343 | MLVMS_P03355_3mutA_WS |
| GSSEAAAKGGG | 12,344 | PERV_Q4VFZ2_3mutA_WS |
| PAPGGSEAAAK | 12,345 | XMRV6_A1Z651_3mutA |
| GGGGGS | 12,346 | MLVMS_P03355_3mutA_WS |
| GGSPAPEAAAK | 12,347 | MLVMS_P03355_3mutA_WS |
| GGGPAP | 12,348 | MLVFF_P26809_3mutA |
| PAPGSSGGG | 12,349 | XMRV6_A1Z651_3mutA |
| PAPGSSGGG | 12,350 | MLVBM_Q7SVK7_3mutA_WS |
| GGGEAAAKGSS | 12,351 | MLVMS_P03355_3mutA_WS |
| GSSEAAAKGGS | 12,352 | MLVCB_P08361_3mutA |
| PAPGGSGSS | 12,353 | MLVCB_P08361_3mutA |
| EAAAKGGGGSEAAAK | 12,354 | BAEVM_P10272_3mutA |
| PAPAPAP | 12,355 | PERV_Q4VFZ2_3mutA_WS |
| GGGGGG | 12,356 | MLVAV_P03356_3mutA |
| GSSPAPEAAAK | 12,357 | MLVCB_P08361_3mutA |
| GGSGGSGGS | 12,358 | MLVMS_P03355_3mutA_WS |
| GSSGSSGSSGSSGSS | 12,359 | XMRV6_A1Z651_3mut |
| GGGPAPGGS | 12,360 | XMRV6_A1Z651_3mutA |
| GGGPAPEAAAK | 12,361 | BAEVM_P10272_3mutA |
| GGSGGG | 12,362 | AVIRE_P03360_3mutA |
| SGSETPGTSESATPES | 12,363 | PERV_Q4VFZ2_3mutA_WS |
| EAAAKGSSPAP | 12,364 | MLVMS_P03355_PLV919 |
| GSSEAAAK | 12,365 | XMRV6_A1Z651_3mut |
| GSSGGSGGG | 12,366 | MLVFF_P26809_3mutA |
| EAAAKEAAAKEAAAKEAA | 12,367 | WMSV_P03359_3mutA |
| AKEAAAK | | |
| GGGGSEAAAKGGGGS | 12,368 | MLVMS_P03355_PLV919 |
| PAPGGGGSS | 12,369 | MLVMS_P03355_3mutA_WS |
| SGSETPGTSESATPES | 12,370 | MLVMS_P03355_3mutA_WS |
| GGSPAPEAAAK | 12,371 | KORV_Q9TTC1-Pro_3mutA |
| GSSEAAAKGGG | 12,372 | MLVMS_P03355_3mutA_WS |
| GSSEAAAK | 12,373 | WMSV_P03359_3mutA |
| GGGGSEAAAKGGGGS | 12,374 | AVIRE_P03360_3mutA |
| GSS | | WMSV_P03359_3mutA |
| PAPGGSEAAAK | 12,376 | MLVFF_P26809_3mutA |
| GGGGS | 12,377 | MLVMS_P03355_3mutA_WS |
| GGGPAP | 12,378 | MLVMS_P03355_3mutA_WS |
| EAAAKEAAAKEAAAKEAA | 12,379 | MLVMS_P03355_3mutA_WS |
| AKEAAAKEAAAK | | |
| EAAAKPAPGSS | 12,380 | PERV_Q4VFZ2_3mut |
| EAAAKPAPGSS | 12,381 | MLVCB_P08361_3mutA |
| GGGGGG | 12,382 | WMSV_P03359_3mutA |
| EAAAKPAPGGS | 12,383 | MLVMS_P03355_PLV919 |
| PAPGGGEAAAK | 12,384 | PERV_Q4VFZ2_3mut |
| EAAAKEAAAKEAAAKEAA | 12,385 | AVIRE_P03360_3mutA |
| AKEAAAK | | |
| GSSEAAAKPAP | 12,386 | XMRV6_A1Z651_3mutA |
| PAPGGSEAAAK | 12,387 | MLVBM_Q7SVK7_3mutA_WS |
| PAPGSS | 12,388 | MLVCB_P08361_3mutA |
| EAAAKGGG | 12,389 | MLVMS_P03355_3mutA_WS |
| EAAAKPAP | 12,390 | MLVCB_P08361_3mutA |
| PAPEAAAKGGS | 12,391 | MLVBM_Q7SVK7_3mutA_WS |
| GGSPAPGGG | 12,392 | MLVCB_P08361_3mutA |
| PAPGGSGSS | 12,393 | WMSV_P03359_3mutA |
| EAAAKEAAAKEAAAKEAA | 12,394 | MLVMS_P03355_PLV919 |
| AKEAAAKEAAAK | | |
| GGSGGGPAP | 12,395 | MLVMS_P03355_PLV919 |
| AEAAAKEAAAKEAAAKEA | 12,396 | MLVMS_P03355 |
| AAKALEAEAAAKEAAAKE | | |
| AAAKEAAAKA | | |
| PAPEAAAKGSS | 12,397 | MLVCB_P08361_3mutA |
| EAAAKGSS | 12,398 | MLVMS_P03355_3mutA_WS |
| GGSGGS | 12,399 | MLVMS_P03355_3mutA_WS |
| EAAAKEAAAKEAAAKEAA | 12,400 | BAEVM_P10272_3mutA |
| AKEAAAK | | |
| GGGGSEAAAKGGGGS | 12,401 | FLV_P10273_3mutA |
| GGSEAAAKGGG | 12,402 | MLVCB_P08361_3mutA |
| GSSGSSGSSGSSGSS | 12,403 | BAEVM_P10272_3mutA |
| GGGGGGGGSGGGGSGGGG | 12,404 | MLVFF_P26809_3mutA |
| SGGGGSGGGGS | | |
| EAAAKGGG | 12,405 | PERV_Q4VFZ2_3mut |
| GGGGGSEAAAK | 12,406 | MLVCB_P08361_3mutA |
| EAAAKPAPGGS | 12,407 | MLVMS_P03355_3mutA_WS |
| GGGGGSGSS | 12,408 | XMRV6_A1Z651_3mutA |
| PAPGSSEAAAK | 12,409 | MLVMS_P03355_3mutA_WS |
| GSSEAAAKPAP | 12,410 | MLVCB_P08361_3mutA |
| EAAAKGSSPAP | 12,411 | MLVAV_P03356_3mutA |
| GGGPAPGGS | 12,412 | WMSV_P03359_3mutA |
| GGSPAP | 12,413 | MLVMS_P03355_3mutA_WS |
| GGSEAAAKGGG | 12,414 | MLVMS_P03355_3mutA_WS |
| GGGGGGGG | 12,415 | MLVFF_P26809_3mutA |
| GGGGSGGGGSGGGGSGGG | 12,416 | MLVMS_P03355_3mutA_WS |
| GSGGGGSGGGGS | | |
| GGGGSGGGGSGGGGSGGG | 12,417 | MLVBM_Q7SVK7_3mutA_WS |
| GSGGGGSGGGGS | | |
| GSSPAPGGG | 12,418 | MLVAV_P03356_3mutA |
| GGGGGG | 12,419 | AVIRE_P03360_3mutA |
| GSSGGS | 12,420 | MLVMS_P03355_3mutA_WS |
| GGSPAPGSS | 12,421 | MLVFF_P26809_3mutA |
| PAPEAAAKGGG | 12,422 | PERV_Q4VFZ2_3mut |
| EAAAKGGGPAP | 12,423 | MLVFF_P26809_3mutA |
| GGGEAAAKGGS | 12,424 | MLVMS_P03355_PLV919 |
| GGSGSSPAP | 12,425 | MLVFF_P26809_3mutA |
| SGSETPGTSESATPES | 12,426 | WMSV_P03359_3mutA |
| PAPGGSEAAAK | 12,427 | MLVBM_Q7SVK7_3mutA_WS |
| GGSGGG | 12,428 | MLVMS_P03355_PLV919 |
| GGGGSSPAP | 12,429 | PERV_Q4VFZ2_3mut |
| GGGEAAAKGSS | 12,430 | MLVAV_P03356_3mutA |
| PAPAPAPAPAPAP | 12,431 | MLVMS_P03355_3mutA_WS |
| EAAAKGGGGSEAAAK | 12,432 | PERV_Q4VFZ2 |
| EAAAKEAAAKEAAAKEAA | 12,433 | MLVMS_P03355_PLV919 |
| AKEAAAK | | |
| GGGGGSEAAAK | 12,434 | PERV_Q4VFZ2_3mut |
| PAPGSSEAAAK | 12,435 | MLVCB_P08361_3mutA |
| GSAGSAAGSGEF | 12,436 | PERV_Q4VFZ2_3mutA_WS |
| EAAAKGGGGSEAAAK | 12,437 | MLVFF_P26809_3mutA |
| GGSPAPGGG | 12,438 | PERV_Q4VFZ2_3mutA_WS |
| GSSEAAAKGGG | 12,439 | AVIRE_P03360_3mutA |
| GGGEAAAKPAP | 12,440 | MLVMS_P03355_3mutA_WS |
| GGGPAP | 12,441 | AVIRE_P03360_3mutA |
| GGSEAAAK | 12,442 | MLVCB_P08361_3mutA |
| SGGSSGGSSGSETPGTSE | 12,443 | PERV_Q4VFZ2_3mut |
| SATPESSGGSSGGSS | | |
| EAAAKPAPGGS | 12,444 | MLVBM_Q7SVK7_3mutA_WS |
| AEAAAKEAAAKEAAAKEA | 12,445 | XMRV6_A1Z651_3mut |
| AAKALEAEAAAKEAAAKE | | |
| AAAKEAAAKA | | |
| GGGGGGGG | 12,446 | MLVCB_P08361_3mutA |
| PAPGSS | 12,447 | PERV_Q4VFZ2_3mut |
| EAAAK | 12,448 | PERV_Q4VFZ2_3mut |
| GSAGSAAGSGEF | 12,449 | MLVMS_P03355_3mutA_WS |
| PAPGGGEAAAK | 12,450 | PERV_Q4VFZ2_3mut |
| EAAAKGSSGGS | 12,451 | MLVFF_P26809_3mut |
| GGGGSEAAAKGGGGS | 12,452 | BAEVM_P10272_3mutA |
| GGGGSGGGGSGGGGS | 12,453 | MLVMS_P03355_PLV919 |
| EAAAKGGGGSEAAAK | 12,454 | BAEVM_P10272_3mut |
| PAPGGGEAAAK | 12,455 | MLVMS_P03355_3mutA_WS |
| GGSEAAAKPAP | 12,456 | MLVMS_P03355_3mutA_WS |
| PAPAP | 12,457 | MLVCB_P08361_3mutA |
| PAPAP | 12,458 | MLVFF_P26809_3mutA |
| GGSPAP | 12,459 | AVIRE_P03360_3mutA |
| EAAAKGSSGGS | 12,460 | MLVCB_P08361_3mutA |
| PAPGSSGGS | 12,461 | AVIRE_P03360_3mutA |
| EAAAKGGGGSEAAAK | 12,462 | XMRV6_A1Z651_3mutA |
| PAPAPAP | 12,463 | BAEVM_P10272_3mutA |
| GGSGGSGGSGGSGGSGGS | 12,464 | MLVMS_P03355_PLV919 |
| GGGGGSGSS | 12,465 | MLVMS_P03355_PLV919 |
| PAPGSSEAAAK | 12,466 | XMRV6_A1Z651_3mut |
| GGSEAAAKPAP | 12,467 | XMRV6_A1Z651_3mutA |
| EAAAKEAAAKEAAAKEAA | 12,468 | XMRV6_A1Z651_3mut |
| AK | | |
| AEAAAKEAAAKEAAAKEA | 12,469 | WMSV_P03359_3mut |
| AAKALEAEAAAKEAAAKE | | |
| AAAKEAAAKA | | |
| GGSGGGEAAAK | 12,470 | XMRV6_A1Z651_3mutA |
| GGGEAAAK | 12,471 | XMRV6_A1Z651_3mutA |
| GGGGSGGGGSGGGGS | 12,472 | MLVMS_P03355_3mutA_WS |
| GGSGGSGGSGGSGGS | 12,473 | MLVFF_P26809_3mutA |
| GSSGGGGGS | 12,474 | MLVMS_P03355_3mut |
| PAPGGSEAAAK | 12,475 | MLVMS_P03355_3mutA_WS |
| GSSGGSPAP | 12,476 | MLVMS_P03355_3mutA_WS |
| SGSETPGTSESATPES | 12,477 | XMRV6_A1Z651_3mutA |
| GGGGSGGGGS | 12,478 | MLVMS_P03355_PLV919 |
| PAPAPAPAPAP | 12,479 | MLVMS_P03355_3mut |
| GSSGSS | 12,480 | XMRV6_A1Z651_3mutA |
| GSSEAAAKPAP | 12,481 | PERV_Q4VFZ2_3mut |
| GGSGSSGGG | 12,482 | MLVMS_P03355_3mutA_WS |
| EAAAKEAAAK | 12,483 | MLVCB_P08361_3mutA |
| GSSGSSGSSGSS | 12,484 | MLVMS_P03355_3mutA_WS |
| GSSPAPGGG | 12,485 | PERV_Q4VFZ2_3mutA_WS |
| EAAAKEAAAKEAAAK | 12,486 | MLVMS_P03355_3mutA_WS |
| AEAAAKEAAAKEAAAKEA | 12,487 | SFV1_P23074_2mutA |
| AAKALEAEAAAKEAAAKE | | |
| AAAKEAAAKA | | |
| GGGGSGGGGSGGGGSGGG | 12,488 | MLVMS_P03355_PLV919 |
| GSGGGGSGGGGS | | |
| GSAGSAAGSGEF | 12,489 | MLVMS_P03355_PLV919 |
| PAPGSSEAAAK | 12,490 | MLVMS_P03355_3mutA_WS |
| GGSEAAAK | 12,491 | MLVMS_P03355_3mutA_WS |
| GSSGSSGSSGSSGSS | 12,492 | PERV_Q4VFZ2_3mutA_WS |
| GGSEAAAKPAP | 12,493 | PERV_Q4VFZ2_3mutA_WS |
| GGSGGSGGS | 12,494 | MLVCB_P08361_3mutA |
| EAAAKGGSGSS | 12,495 | MLVCB_P08361_3mutA |
| GGGGSGGGGSGGGGSGGG | 12,496 | FLV_P10273_3mutA |
| GSGGGGS | | |
| EAAAKEAAAKEAAAKEAA | 12,497 | MLVBM_Q7SVK7_3mutA_WS |
| AK | | |
| GGSGSSPAP | 12,498 | BAEVM_P10272_3mutA |
| EAAAKEAAAKEAAAKEAA | 12,499 | XMRV6_A1Z651_3mutA |
| AKEAAAK | | |
| GGGGSGGGGSGGGGSGGG | 12,500 | MLVBM_Q7SVK7_3mutA_WS |
| GSGGGGS | | |
| GGSGSS | 12,501 | WMSV_P03359_3mutA |
| PAPEAAAK | 12,502 | MLVCB_P08361_3mutA |
| EAAAKPAP | 12,503 | BAEVM_P10272_3mutA |
| GSSPAP | 12,504 | PERV_Q4VFZ2_3mutA_WS |
| GGGPAP | 12,505 | PERV_Q4VFZ2_3mutA_WS |
| EAAAKGGSGSS | 12,506 | MLVMS_P03355_3mutA_WS |
| EAAAKGGGGSEAAAK | 12,507 | AVIRE_P03360_3mutA |
| GGSGGG | 12,508 | KORV_Q9TTC1-Pro_3mutA |
| GSSPAP | 12,509 | MLVFF_P26809_3mutA |
| GGSGSSEAAAK | 12,510 | BAEVM_P10272_3mutA |
| PAPGSSGGS | 12,511 | BAEVM_P10272_3mutA |
| GGGGGG | 12,512 | MLVFF_P26809_3mutA |
| PAPGGSEAAAK | 12,513 | MLVMS_P03355_PLV919 |
| PAPGGS | 12,514 | MLVMS_P03355_PLV919 |
| GGSGGSGGSGGS | 12,515 | BAEVM_P10272_3mutA |
| GSSPAP | 12,516 | MLVCB_P08361_3mutA |
| PAPAPAPAP | 12,517 | MLVMS_P03355_3mutA_WS |
| GGGGGG | 12,518 | MLVCB_P08361_3mutA |
| GSSGSSGSSGSSGSSGSS | 12,519 | KORV_Q9TTC1-Pro_3mutA |
| GSSEAAAKGGS | 12,520 | BAEVM_P10272_3mutA |
| GGSEAAAK | 12,521 | FLV_P10273_3mutA |
| GGSGGSGGSGGSGGS | 12,522 | KORV_Q9TTC1-Pro_3mutA |
| GSSPAPEAAAK | 12,523 | PERV_Q4VFZ2_3mut |
| GSSGSSGSSGSSGSS | 12,524 | XMRV6_A1Z651_3mutA |
| EAAAKPAPGGS | 12,525 | MLVMS_P03355_3mut |
| SGGSSGGSSGSETPGTSE | 12,526 | FLV_P10273_3mut |
| SATPESSGGSSGGSS | | |
| GGSPAPEAAAK | 12,527 | XMRV6_A1Z651_3mut |
| EAAAKGGSGGG | 12,528 | MLVFF_P26809_3mutA |
| EAAAKEAAAKEAAAKEAA | 12,529 | MLVFF_P26809_3mutA |
| AK | | |
| GSSPAP | 12,530 | WMSV_P03359_3mutA |
| PAPAPAPAP | 12,531 | MLVAV_P03356_3mutA |
| PAPGGSEAAAK | 12,532 | KORV_Q9TTC1_3mut |
| GGSGSSEAAAK | 12,533 | MLVBM_Q7SVK7_3mutA_WS |
| GSSGGG | 12,534 | MLVCB_P08361_3mutA |
| GGGEAAAKGSS | 12,535 | PERV_Q4VFZ2_3mut |
| PAPGGSGGG | 12,536 | MLVFF_P26809_3mutA |
| AEAAAKEAAAKEAAAKEA | 12,537 | FFV_O93209 |
| AAKALEAEAAAKEAAAKE | | |
| AAAKEAAAKA | | |
| PAPGGGGSS | 12,538 | MLVMS_P03355_3mutA_WS |
| EAAAKGGS | 12,539 | MLVAV_P03356_3mutA |
| EAAAKEAAAKEAAAKEAA | 12,540 | MLVBM_Q7SVK7_3mutA_WS |
| AKEAAAKEAAAK | | |
| GGSGGSGGS | 12,541 | WMSV_P03359_3mutA |
| PAPAP | 12,542 | MLVMS_P03355_3mutA_WS |
| GSSGGGEAAAK | 12,543 | MLVAV_P03356_3mutA |
| GGGGSSEAAAK | 12,544 | MLVFF_P26809_3mutA |
| EAAAKGSSGGS | 12,545 | MLVMS_P03355_PLV919 |
| EAAAKGGGGSEAAAK | 12,546 | MLVMS_P03355_3mutA_WS |
| GGGGGGGG | 12,547 | MLVMS_P03355_PLV919 |
| GSSGSSGSS | 12,548 | MLVMS_P03355_PLV919 |
| GGGEAAAKPAP | 12,549 | PERV_Q4VFZ2_3mutA_WS |
| GGGGGSGSS | 12,550 | MLVMS_P03355_3mutA_WS |
| GGGGGGG | 12,551 | MLVMS_P03355_PLV919 |
| GGS | | MLVMS_P03355_PLV919 |
| GSSGGG | 12,553 | MLVMS_P03355_3mutA_WS |
| EAAAKGGSGSS | 12,554 | PERV_Q4VFZ2_3mutA_WS |
| PAPGSSEAAAK | 12,555 | MLVMS_P03355_PLV919 |
| GSSEAAAKPAP | 12,556 | MLVMS_P03355_PLV919 |
| GGSPAPGSS | 12,557 | BAEVM_P10272_3mutA |
| GSAGSAAGSGEF | 12,558 | MLVCB_P08361_3mut |
| GGSPAPGGG | 12,559 | PERV_Q4VFZ2_3mut |
| GGGGSGGGGSGGGGSGGG | 12,560 | MLVMS_P03355_3mut |
| GS | | |
| GSSGSSGSS | 12,561 | PERV_Q4VFZ2_3mutA_WS |
| EAAAKEAAAKEAAAKEAA | 12,562 | PERV_Q4VFZ2_3mut |
| AKEAAAKEAAAK | | |
| GGGGSEAAAKGGGGS | 12,563 | MLVCB_P08361_3mutA |
| GGSEAAAKGSS | 12,564 | MLVAV_P03356_3mutA |
| EAAAKGGGGSEAAAK | 12,565 | MLVCB_P08361_3mut |
| EAAAKEAAAKEAAAKEAA | 12,566 | XMRV6_A1Z651_3mutA |
| AKEAAAKEAAAK | | |
| PAPGGGEAAAK | 12,567 | MLVMS_P03355_3mutA_WS |
| GSSGGGEAAAK | 12,568 | PERV_Q4VFZ2_3mutA_WS |
| GSSGSS | 12,569 | MLVCB_P08361_3mut |
| PAPAPAPAPAPAP | 12,570 | PERV_Q4VFZ2_3mut |
| GGSPAPGGG | 12,571 | MLVFF_P26809_3mutA |
| GGSGGSGGSGGSGGS | 12,572 | MLVCB_P08361_3mutA |
| EAAAKEAAAK | 12,573 | MLVFF_P26809_3mutA |
| AEAAAKEAAAKEAAAKEA | 12,574 | GALV_P21414_3mut |
| AAKALEAEAAAKEAAAKE | | |
| AAAKEAAAKA | | |
| PAPAPAPAPAPAP | 12,575 | WMSV_P03359_3mutA |
| GGGEAAAKGGS | 12,576 | KORV_Q9TTC1_3mutA |
| EAAAKGGGPAP | 12,577 | KORV_Q9TTC1_3mut |
| PAPEAAAKGSS | 12,578 | MLVBM_Q7SVK7_3mutA_WS |
| PAPEAAAKGSS | 12,579 | FLV_P10273_3mutA |
| PAPGGSEAAAK | 12,580 | MLVMS_P03355_3mut |
| GSSPAPGGG | 12,581 | BAEVM_P10272_3mutA |
| GGGEAAAKPAP | 12,582 | KORV_Q9TTC1-Pro_3mutA |
| GGGGSGGGGS | 12,583 | MLVMS_P03355_PLV919 |
| GGGEAAAKGSS | 12,584 | MLVFF_P26809_3mutA |
| PAPGGGGSS | 12,585 | MLVBM_Q7SVK7_3mutA_WS |
| GSSEAAAK | 12,586 | BAEVM_P10272_3mutA |
| GGGGGGGG | 12,587 | MLVMS_P03355_PLV919 |
| PAPGSSGGS | 12,588 | MLVAV_P03356_3mutA |
| GGGGGGGGSGGGGSGGGG | 12,589 | BAEVM_P10272_3mutA |
| S | | |
| PAP | | MLVMS_P03355_3mut |
| EAAAKGSSPAP | 12,591 | XMRV6_A1Z651_3mutA |
| PAPEAAAKGGS | 12,592 | MLVFF_P26809_3mutA |
| GSSGGGEAAAK | 12,593 | BAEVM_P10272_3mutA |
| PAPAPAP | 12,594 | MLVMS_P03355_3mutA_WS |
| GGSEAAAKGGG | 12,595 | MLVMS_P03355_PLV919 |
| GSSEAAAK | 12,596 | PERV_Q4VFZ2_3mut |
| GGGG | 12,597 | MLVMS_P03355_3mutA_WS |
| GGGGGS | 12,598 | MLVMS_P03355_3mut |
| GGGGSSEAAAK | 12,599 | PERV_Q4VFZ2_3mut |
| EAAAKEAAAKEAAAKEAA | 12,600 | SFV3L_P27401-Pro_2mutA |
| AKEAAAKEAAAK | | |
| GGSEAAAKGSS | 12,601 | MLVMS_P03355_3mutA_WS |
| PAPGSSGGS | 12,602 | XMRV6_A1Z651_3mutA |
| GGSPAP | 12,603 | MLVMS_P03355_3mutA_WS |
| GGGGSSEAAAK | 12,604 | BAEVM_P10272_3mut |
| GGSGGSGGSGGS | 12,605 | AVIRE_P03360_3mutA |
| PAPGSSGGS | 12,606 | MLVFF_P26809_3mutA |
| GSSPAPGGG | 12,607 | MLVMS_P03355_3mutA_WS |
| GGGGGGG | 12,608 | MLVMS_P03355_3mutA_WS |
| EAAAKGGGGGS | 12,609 | MLVMS_P03355_3mutA_WS |
| EAAAKGGSGGG | 12,610 | MLVMS_P03355_PLV919 |
| GGGGSSEAAAK | 12,611 | XMRV6_A1Z651_3mutA |
| GGGGSEAAAKGGGGS | 12,612 | MLVBM_Q7SVK7_3mutA_WS |
| GSSGSS | 12,613 | MLVMS_P03355_PLV919 |
| GGSGGG | 12,614 | MLVMS_P03355_PLV919 |
| PAPEAAAKGGG | 12,615 | AVIRE_P03360_3mutA |
| AEAAAKEAAAKEAAAKEA | 12,616 | FOAMV_P14350-Pro_2mutA |
| AAKALEAEAAAKEAAAKE | | |
| AAAKEAAAKA | | |
| GGGGGSGSS | 12,617 | PERV_Q4VFZ2_3mut |
| GSSGSSGSSGSSGSS | 12,618 | KORV_Q9TTC1-Pro_3mut |
| GGGGSEAAAKGGGGS | 12,619 | MLVMS_P03355_3mutA_WS |
| GGGGGSPAP | 12,620 | FLV_P10273_3mut |
| GGGEAAAK | 12,621 | MLVMS_P03355_3mutA_WS |
| GGSGGSGGSGGS | 12,622 | FLV_P10273_3mutA |
| GGG | | MLVMS_P03355_PLV919 |
| GGSPAPEAAAK | 12,624 | BAEVM_P10272_3mutA |
| EAAAKEAAAK | 12,625 | FLV_P10273_3mutA |
| GGGEAAAKPAP | 12,626 | BAEVM_P10272_3mutA |
| GGGEAAAKGGS | 12,627 | PERV_Q4VFZ2_3mut |
| GGSGGSGGS | 12,628 | PERV_Q4VFZ2_3mut |
| EAAAKGGGPAP | 12,629 | XMRV6_A1Z651_3mutA |
| EAAAK | 12,630 | MLVBM_Q7SVK7_3mutA_WS |
| PAPEAAAKGGG | 12,631 | PERV_Q4VFZ2_3mut |
| EAAAKGSS | 12,632 | MLVCB_P08361_3mutA |
| GGSEAAAKGGG | 12,633 | MLVBM_Q7SVK7_3mutA_WS |
| GGGGSGGGGSGGGGSGGG | 12,634 | XMRV6_A1Z651_3mutA |
| GS | | |
| GGGGSGGGGSGGGGSGGG | 12,635 | BAEVM_P10272_3mut |
| GSGGGGS | | |
| GGGGSSPAP | 12,636 | PERV_Q4VFZ2_3mutA_WS |
| GGSGGSGGSGGSGGSGGS | 12,637 | PERV_Q4VFZ2_3mut |
| GGGEAAAKPAP | 12,638 | PERV_Q4VFZ2_3mut |
| EAAAKEAAAK | 12,639 | BAEVM_P10272_3mutA |
| GGSGSSEAAAK | 12,640 | XMRV6_A1Z651_3mutA |
| PAPEAAAKGSS | 12,641 | WMSV_P03359_3mutA |
| PAPAPAPAPAP | 12,642 | XMRV6_A1Z651_3mutA |
| GSSGGGEAAAK | 12,643 | MLVMS_P03355_PLV919 |
| GSSPAPGGG | 12,644 | MLVFF_P26809_3mutA |
| GGSPAPEAAAK | 12,645 | MLVFF_P26809_3mut |
| PAPGGSEAAAK | 12,646 | PERV_Q4VFZ2_3mut |
| GGGGSS | 12,647 | MLVFF_P26809_3mutA |
| GGSGSSGGG | 12,648 | BAEVM_P10272_3mutA |
| GSSGGGEAAAK | 12,649 | MLVMS_P03355_3mutA_WS |
| EAAAKGGS | 12,650 | MLVBM_Q7SVK7_3mutA_WS |
| GGGPAPGGS | 12,651 | MLVMS_P03355_PLV919 |
| EAAAKEAAAK | 12,652 | MLVMS_P03355_PLV919 |
| GSSGSSGSS | 12,653 | MLVMS_P03355_PLV919 |
| GGGEAAAKPAP | 12,654 | MLVAV_P03356_3mutA |
| SGSETPGTSESATPES | 12,655 | FLV_P10273_3mutA |
| PAPAPAPAPAP | 12,656 | KORV_Q9TTC1-Pro_3mut |
| AEAAAKEAAAKEAAAKEA | 12,657 | BAEVM_P10272_3mutA |
| AAKALEAEAAAKEAAAKE | | |
| AAAKEAAAKA | | |
| PAPGSSGGG | 12,658 | MLVMS_P03355_3mutA_WS |
| GSSGGGEAAAK | 12,659 | XMRV6_A1Z651_3mutA |
| GGGGSGGGGSGGGGSGGG | 12,660 | XMRV6_A1Z651_3mutA |
| GSGGGGS | | |
| GGGGSSPAP | 12,661 | MLVFF_P26809_3mutA |
| GGSGGGPAP | 12,662 | PERV_Q4VFZ2_3mutA_WS |
| GSS | | PERV_Q4VFZ2_3mut |
| EAAAKGSSPAP | 12,664 | MLVMS_P03355_3mut |
| EAAAKGGG | 12,665 | XMRV6_A1Z651_3mutA |
| GSSGSSGSSGSS | 12,666 | WMSV_P03359_3mutA |
| PAPEAAAKGSS | 12,667 | MLVMS_P03355_PLV919 |
| GSSEAAAK | 12,668 | AVIRE_P03360_3mutA |
| EAAAKGGSGSS | 12,669 | AVIRE_P03360_3mutA |
| GSSEAAAK | 12,670 | MLVMS_P03355_3mut |
| GGSGSSEAAAK | 12,671 | MLVMS_P03355_PLV919 |
| GGSEAAAKGGG | 12,672 | MLVFF_P26809_3mutA |
| GGGGSGGGGSGGGGSGGG | 12,673 | MLVAV_P03356_3mutA |
| GS | | |
| PAPAPAPAPAPAP | 12,674 | MLVFF_P26809_3mut |
| EAAAKPAPGSS | 12,675 | KORV_Q9TTC1-Pro_3mut |
| PAPGSSEAAAK | 12,676 | MLVAV_P03356_3mutA |
| GGGGSSPAP | 12,677 | WMSV_P03359_3mutA |
| EAAAKGGGGGS | 12,678 | MLVMS_P03355_3mutA_WS |
| GGGEAAAKGGS | 12,679 | MLVMS_P03355_3mut |
| GGSGSSGGG | 12,680 | MLVMS_P03355_3mut |
| GGGPAPGGS | 12,681 | MLVAV_P03356_3mutA |
| PAPGGGGGS | 12,682 | MLVMS_P03355_PLV919 |
| GGGPAPGSS | 12,683 | PERV_Q4VFZ2_3mut |
| GGGGGGG | 12,684 | MLVFF_P26809_3mutA |
| GGSGGGGSS | 12,685 | MLVCB_P08361_3mutA |
| GGGGGG | 12,686 | FLV_P10273_3mutA |
| GGSEAAAKGSS | 12,687 | PERV_Q4VFZ2_3mut |
| GGSPAPGGG | 12,688 | BAEVM_P10272_3mutA |
| GGSPAPGSS | 12,689 | AVIRE_P03360_3mutA |
| GGSGGSGGSGGS | 12,690 | KORV_Q9TTC1_3mut |
| EAAAKEAAAKEAAAKEAA | 12,691 | MLVBM_Q7SVK7_3mut |
| AKEAAAK | | |
| PAPGSSGGS | 12,692 | XMRV6_A1Z651_3mut |
| EAAAKGGGGSS | 12,693 | PERV_Q4VFZ2_3mutA_WS |
| GGSGGSGGSGGSGGS | 12,694 | PERV_Q4VFZ2_3mutA_WS |
| PAPGGSGGG | 12,695 | MLVMS_P03355_PLV919 |
| PAPGSSGGG | 12,696 | PERV_Q4VFZ2_3mutA_WS |
| GSSGSS | 12,697 | BAEVM_P10272_3mutA |
| EAAAKGSS | 12,698 | MLVFF_P26809_3mutA |
| GGGPAP | 12,699 | MLVMS_P03355_PLV919 |
| EAAAKGGGGGS | 12,700 | MLVFF_P26809_3mutA |
| EAAAKGGSPAP | 12,701 | MLVBM_Q7SVK7_3mutA_WS |
| EAAAKEAAAKEAAAKEAA | 12,702 | WMSV_P03359_3mutA |
| AKEAAAKEAAAK | | |
| GSSPAPGGG | 12,703 | MLVBM_Q7SVK7_3mutA_WS |
| GGGEAAAKGSS | 12,704 | AVIRE_P03360_3mutA |
| GGGGSSEAAAK | 12,705 | AVIRE_P03360_3mutA |
| GGGGGGGG | 12,706 | PERV_Q4VFZ2_3mutA_WS |
| PAPGSSEAAAK | 12,707 | BAEVM_P10272_3mutA |
| EAAAKGSS | 12,708 | MLVFF_P26809_3mut |
| GSSEAAAKGGG | 12,709 | MLVCB_P08361_3mutA |
| GGSEAAAK | 12,710 | MLVBM_Q7SVK7_3mutA_WS |
| GSSEAAAKGGG | 12,711 | PERV_Q4VFZ2_3mutA_WS |
| PAPGGSGGG | 12,712 | WMSV_P03359_3mutA |
| GSSGGSGGG | 12,713 | MLVCB_P08361_3mutA |
| EAAAKGSSGGG | 12,714 | FLV_P10273_3mutA |
| GSSEAAAK | 12,715 | MLVCB_P08361_3mutA |
| GSSGGGEAAAK | 12,716 | MLVMS_P03355_3mut |
| GGGGSGGGGS | 12,717 | MLVCB_P08361_3mutA |
| EAAAKGGGGSEAAAK | 12,718 | MLVBM_Q7SVK7_3mutA_WS |
| EAAAKGGG | 12,719 | PERV_Q4VFZ2_3mutA_WS |
| EAAAKGGSPAP | 12,720 | MLVMS_P03355_PLV919 |
| GGGPAPGGS | 12,721 | AVIRE_P03360_3mutA |
| GSSEAAAK | 12,722 | MLVBM_Q7SVK7_3mutA_WS |
| GSSGGGEAAAK | 12,723 | PERV_Q4VFZ2_3mut |
| SGSETPGTSESATPES | 12,724 | MLVMS_P03355_PLV919 |
| GGSGSSPAP | 12,725 | MLVMS_P03355_3mut |
| GGGGGG | 12,726 | MLVBM_Q7SVK7_3mutA_WS |
| GGSPAPGGG | 12,727 | XMRV6_A1Z651_3mutA |
| GGSGSS | 12,728 | PERV_Q4VFZ2_3mutA_WS |
| PAP | | MLVBM_Q7SVK7_3mutA_WS |
| EAAAKPAPGSS | 12,730 | MLVMS_P03355_PLV919 |
| EAAAKGGG | 12,731 | MLVMS_P03355_3mut |
| GSSEAAAKPAP | 12,732 | PERV_Q4VFZ2_3mutA_WS |
| GGGGSS | 12,733 | MLVMS_P03355_3mutA_WS |
| GGSGSSEAAAK | 12,734 | PERV_Q4VFZ2_3mut |
| GGGGSS | 12,735 | BAEVM_P10272_3mutA |
| PAPAP | 12,736 | MLVFF_P26809_3mut |
| PAPEAAAKGGG | 12,737 | BAEVM_P10272_3mutA |
| EAAAKGGS | 12,738 | MLVMS_P03355_PLV919 |
| PAPAPAPAPAPAP | 12,739 | PERV_Q4VFZ2_3mutA_WS |
| GGGGGSEAAAK | 12,740 | MLVMS_P03355_3mut |
| PAPGGS | 12,741 | PERV_Q4VFZ2_3mut |
| GGGGSS | 12,742 | MLVCB_P08361_3mutA |
| GGGGS | 12,743 | MLVAV_P03356_3mutA |
| GSSPAPEAAAK | 12,744 | MLVMS_P03355_PLV919 |
| GGGGSSGGS | 12,745 | MLVFF_P26809_3mutA |
| PAPEAAAKGSS | 12,746 | MLVMS_P03355_PLV919 |
| GGSGSSEAAAK | 12,747 | MLVMS_P03355_3mutA_WS |
| EAAAKGGG | 12,748 | MLVAV_P03356_3mutA |
| PAPGSSEAAAK | 12,749 | FLV_P10273_3mutA |
| EAAAKGSSGGG | 12,750 | MLVCB_P08361_3mutA |
| PAPEAAAK | 12,751 | KORV_Q9TTC1-Pro_3mutA |
| GGSPAPEAAAK | 12,752 | KORV_Q9TTC1-Pro_3mut |
| GGSGGSGGSGGSGGSGGS | 12,753 | MLVAV_P03356_3mutA |
| GSSEAAAKPAP | 12,754 | MLVBM_Q7SVK7_3mutA_WS |
| AEAAAKEAAAKEAAAKEA | 12,755 | KORV_Q9TTC1-Pro_3mutA |
| AAKALEAEAAAKEAAAKE | | |
| AAAKEAAAKA | | |
| GSSGGGEAAAK | 12,756 | XMRV6_A1Z651_3mut |
| PAPGGSGGG | 12,757 | AVIRE_P03360_3mutA |
| PAPGGSEAAAK | 12,758 | PERV_Q4VFZ2_3mutA_WS |
| GGGGS | 12,759 | MLVMS_P03355_3mutA_WS |
| GGGGSGGGGSGGGGS | 12,760 | MLVBM_Q7SVK7_3mutA_WS |
| PAPAPAPAPAP | 12,761 | PERV_Q4VFZ2_3mutA_WS |
| EAAAKEAAAKEAAAKEAA | 12,762 | MLVMS_P03355_3mut |
| AKEAAAK | | |
| GSSGGSEAAAK | 12,763 | MLVMS_P03355_3mutA_WS |
| GGSGGSGGSGGS | 12,764 | WMSV_P03359_3mutA |
| EAAAKGSSGGG | 12,765 | WMSV_P03359_3mutA |
| EAAAKGGG | 12,766 | PERV_Q4VFZ2_3mutA_WS |
| SGSETPGTSESATPES | 12,767 | PERV_Q4VFZ2_3mut |
| PAPGSSGGS | 12,768 | MLVMS_P03355_3mutA_WS |
| PAPEAAAKGSS | 12,769 | PERV_Q4VFZ2_3mut |
| PAPEAAAK | 12,770 | AVIRE_P03360_3mutA |
| GSSEAAAKGGG | 12,771 | BAEVM_P10272_3mutA |
| GSSPAP | 12,772 | MLVAV_P03356_3mutA |
| EAAAKEAAAKEAAAKEAA | 12,773 | MLVFF_P26809_3mut |
| AK | | |
| PAPGGSGSS | 12,774 | MLVAV_P03356_3mutA |
| GGGGSGGGGSGGGGS | 12,775 | PERV_Q4VFZ2_3mutA_WS |
| GSSGGSEAAAK | 12,776 | MLVCB_P08361_3mutA |
| EAAAKGGS | 12,777 | KORV_Q9TTC1-Pro_3mutA |
| EAAAKGGS | 12,778 | MLVFF_P26809_3mutA |
| GGSPAP | 12,779 | MLVMS_P03355_PLV919 |
| GGSGSS | 12,780 | MLVMS_P03355_PLV919 |
| SGSETPGTSESATPES | 12,781 | WMSV_P03359_3mut |
| GGGGGGG | 12,782 | WMSV_P03359_3mut |
| GGSPAPGSS | 12,783 | MLVCB_P08361_3mutA |
| GGGGSSGGS | 12,784 | WMSV_P03359_3mut |
| PAPGGS | 12,785 | MLVMS_P03355_PLV919 |
| PAPGSSGGS | 12,786 | MLVCB_P08361_3mutA |
| EAAAKEAAAKEAAAKEAA | 12,787 | MLVFF_P26809_3mut |
| AKEAAAK | | |
| SGGSSGGSSGSETPGTSE | 12,788 | PERV_Q4VFZ2_3mut |
| SATPESSGGSSGGSS | | |
| GGSGGSGGSGGSGGS | 12,789 | BAEVM_P10272_3mutA |
| GSSEAAAK | 12,790 | PERV_Q4VFZ2_3mut |
| EAAAKEAAAKEAAAKEAA | 12,791 | KORV_Q9TTC1-Pro_3mutA |
| AK | | |
| GGSGGSGGSGGSGGS | 12,792 | MLVMS_P03355_3mut |
| PAPAPAPAPAPAP | 12,793 | MLVMS_P03355_3mut |
| GGSPAPEAAAK | 12,794 | MLVMS_P03355_PLV919 |
| EAAAK | 12,795 | WMSV_P03359_3mutA |
| EAAAKGSSGGS | 12,796 | MLVBM_Q7SVK7_3mutA_WS |
| GGSGGGGSS | 12,797 | MLVMS_P03355_3mutA_WS |
| GGGEAAAKPAP | 12,798 | MLVMS_P03355_3mut |
| EAAAKGGSGGG | 12,799 | XMRV6_A1Z651_3mutA |
| GGGGGSEAAAK | 12,800 | KORV_Q9TTC1-Pro_3mutA |
| GGGGGG | 12,801 | BAEVM_P10272_3mutA |
| GGGGGG | 12,802 | MLVMS_P03355_3mut |
| GGGGGGG | 12,803 | MLVBM_Q7SVK7_3mutA_WS |
| AEAAAKEAAAKEAAAKEA | 12,804 | AVIRE_P03360 |
| AAKALEAEAAAKEAAAKE | | |
| AAAKEAAAKA | | |
| PAPGSSGGS | 12,805 | PERV_Q4VFZ2_3mut |
| GGGGGS | 12,806 | XMRV6_A1Z651_3mut |
| EAAAKPAP | 12,807 | XMRV6_A1Z651_3mutA |
| GGG | | MLVMS_P03355_3mutA_WS |
| AEAAAKEAAAKEAAAKEA | 12,809 | FLV_P10273_3mut |
| AAKALEAEAAAKEAAAKE | | |
| AAAKEAAAKA | | |
| EAAAKGSSPAP | 12,810 | MLVMS_P03355_3mut |
| SGSETPGTSESATPES | 12,811 | BAEVM_P10272_3mutA |
| GGSPAPEAAAK | 12,812 | MLVMS_P03355_3mut |
| GSSGSSGSSGSS | 12,813 | MLVAV_P03356_3mutA |
| AEAAAKEAAAKEAAAKEA | 12,814 | MLVMS_P03355_3mut |
| AAKALEAEAAAKEAAAKE | | |
| AAAKEAAAKA | | |
| GGSPAP | 12,815 | MLVCB_P08361_3mutA |
| GGGGGSEAAAK | 12,816 | MLVMS_P03355_3mutA_WS |
| GGGGG | 12,817 | MLVFF_P26809_3mutA |
| GSSEAAAK | 12,818 | MLVAV_P03356_3mutA |
| GGS | | BAEVM_P10272_3mut |
| EAAAKGGSPAP | 12,820 | MLVCB_P08361_3mutA |
| PAPAPAPAP | 12,821 | FLV_P10273_3mutA |
| PAPGGGEAAAK | 12,822 | MLVCB_P08361_3mutA |
| GGGGSSEAAAK | 12,823 | MLVMS_P03355_3mutA_WS |
| GGGGG | 12,824 | PERV_Q4VFZ2_3mutA_WS |
| GGSGGSGGSGGSGGSGGS | 12,825 | PERV_Q4VFZ2_3mut |
| GGGGG | 12,826 | MLVMS_P03355_3mut |
| PAPEAAAKGGG | 12,827 | MLVBM_Q7SVK7_3mutA_WS |
| GSSGGGPAP | 12,828 | XMRV6_A1Z651_3mutA |
| GSSGSSGSSGSSGSSGSS | 12,829 | PERV_Q4VFZ2_3mutA_WS |
| EAAAKGGSPAP | 12,830 | PERV_Q4VFZ2_3mut |
| GSSGGSEAAAK | 12,831 | MLVMS_P03355_PLV919 |
| GSS | | PERV_Q4VFZ2_3mut |
| EAAAKGGS | 12,833 | WMSV_P03359_3mutA |
| GGGGGSPAP | 12,834 | PERV_Q4VFZ2_3mutA_WS |
| EAAAKGSS | 12,835 | MLVMS_P03355_PLV919 |
| EAAAKGGGGSS | 12,836 | KORV_Q9TTC1-Pro_3mutA |
| PAPGSSGGG | 12,837 | PERV_Q4VFZ2_3mut |
| GGGGSSEAAAK | 12,838 | MLVFF_P26809_3mut |
| PAPAPAP | 12,839 | MLVMS_P03355_3mut |
| GSSGGSEAAAK | 12,840 | XMRV6_A1Z651_3mut |
| PAPEAAAKGSS | 12,841 | MLVMS_P03355_3mutA_WS |
| GGSGGSGGSGGSGGS | 12,842 | MLVMS_P03355_3mutA_WS |
| GGSGSSPAP | 12,843 | XMRV6_A1Z651_3mutA |
| GGGGSSPAP | 12,844 | MLVMS_P03355_PLV919 |
| GGGGS | 12,845 | MLVCB_P08361_3mutA |
| EAAAKEAAAKEAAAKEAA | 12,846 | PERV_Q4VFZ2_3mutA_WS |
| AK | | |
| EAAAKEAAAK | 12,847 | KORV_Q9TTC1_3mutA |
| PAPGGGEAAAK | 12,848 | BAEVM_P10272_3mutA |
| GSSGGSEAAAK | 12,849 | XMRV6_A1Z651_3mutA |
| EAAAKEAAAKEAAAKEAA | 12,850 | FLV_P10273_3mut |
| AKEAAAKEAAAK | | |
| GSSEAAAKPAP | 12,851 | MLVMS_P03355_3mutA_WS |
| EAAAKPAPGSS | 12,852 | PERV_Q4VFZ2_3mutA_WS |
| GSSGGSPAP | 12,853 | XMRV6_A1Z651_3mutA |
| GSSEAAAKGGG | 12,854 | PERV_Q4VFZ2_3mut |
| GGGEAAAKGGS | 12,855 | WMSV_P03359_3mutA |
| GSSEAAAKGGG | 12,856 | MLVFF_P26809_3mut |
| PAPAPAP | 12,857 | KORV_Q9TTC1-Pro_3mutA |
| EAAAKGGSPAP | 12,858 | MLVMS_P03355_3mutA_WS |
| PAPGGSEAAAK | 12,859 | PERV_Q4VFZ2_3mut |
| GGGGS | 12,860 | MLVBM_Q7SVK7_3mutA_WS |
| EAAAKGSSGGG | 12,861 | KORV_Q9TTC1_3mut |
| EAAAKGGGPAP | 12,862 | MLVCB_P08361_3mutA |
| EAAAKGSS | 12,863 | BAEVM_P10272_3mutA |
| GGSPAPGGG | 12,864 | MLVBM_Q7SVK7_3mutA_WS |
| GGGGSEAAAKGGGGS | 12,865 | MLVMS_P03355_3mutA_WS |
| GGGEAAAKGGS | 12,866 | PERV_Q4VFZ2_3mutA_WS |
| EAAAKGGGGSS | 12,867 | MLVMS_P03355_3mutA_WS |
| EAAAKGGGPAP | 12,868 | MLVFF_P26809_3mut |
| GSSPAP | 12,869 | PERV_Q4VFZ2_3mutA_WS |
| EAAAKGGS | 12,870 | MLVMS_P03355_3mut |
| GGGGSS | 12,871 | KORV_Q9TTC1-Pro_3mutA |
| EAAAKGSSPAP | 12,872 | MLVMS_P03355_3mutA_WS |
| GGGPAP | 12,873 | PERV_Q4VFZ2_3mut |
| EAAAKGSSGGS | 12,874 | XMRV6_A1Z651_3mutA |
| PAPGGG | 12,875 | MLVAV_P03356_3mutA |
| GSSPAPEAAAK | 12,876 | BAEVM_P10272_3mutA |
| GGGPAP | 12,877 | MLVBM_Q7SVK7_3mutA_WS |
| GSSGGGGGS | 12,878 | AVIRE_P03360_3mutA |
| SGSETPGTSESATPES | 12,879 | MLVMS_P03355_PLV919 |
| GGGPAP | 12,880 | MLVFF_P26809_3mut |
| EAAAKGGGGSS | 12,881 | XMRV6_A1Z651_3mutA |
| GGGGSSPAP | 12,882 | XMRV6_A1Z651_3mut |
| GGGGSEAAAKGGGGS | 12,883 | MLVMS_P03355_3mut |
| GSSPAP | 12,884 | MLVBM_Q7SVK7_3mutA_WS |
| GGSGSSEAAAK | 12,885 | FLV_P10273_3mutA |
| SGSETPGTSESATPES | 12,886 | MLVBM_Q7SVK7_3mutA_WS |
| PAPGGG | 12,887 | AVIRE_P03360_3mutA |
| GGGEAAAKPAP | 12,888 | MLVMS_P03355_3mutA_WS |
| EAAAKGGSGSS | 12,889 | PERV_Q4VFZ2_3mut |
| GGSPAPGGG | 12,890 | MLVAV_P03356_3mutA |
| PAPGGSGSS | 12,891 | BAEVM_P10272_3mutA |
| GSSGGSPAP | 12,892 | MLVFF_P26809_3mutA |
| EAAAKGSSGGG | 12,893 | PERV_Q4VFZ2_3mut |
| GGGGSGGGGS | 12,894 | PERV_Q4VFZ2_3mutA_WS |
| GSSGGGGGS | 12,895 | BAEVM_P10272_3mutA |
| GGGGSSGGS | 12,896 | MLVBM_Q7SVK7_3mutA_WS |
| EAAAKGGS | 12,897 | PERV_Q4VFZ2_3mutA_WS |
| GSSGSSGSSGSS | 12,898 | MLVMS_P03355_3mut |
| GGS | | MLVMS_P03355_3mutA_WS |
| GSSGGSEAAAK | 12,900 | MLVBM_Q7SVK7_3mutA_WS |
| SGGSSGGSSGSETPGTSE | 12,901 | XMRV6_A1Z651 |
| SATPESSGGSSGGSS | | |
| GGGGG | 12,902 | FLV_P10273_3mutA |
| PAPEAAAKGSS | 12,903 | PERV_Q4VFZ2_3mut |
| GGGGGG | 12,904 | WMSV_P03359_3mut |
| EAAAKGGG | 12,905 | BAEVM_P10272_3mutA |
| GGGGSS | 12,906 | MLVMS_P03355_3mutA_WS |
| GSSGGGEAAAK | 12,907 | KORV_Q9TTC1_3mut |
| GGSGSS | 12,908 | AVIRE_P03360_3mutA |
| EAAAKPAP | 12,909 | MLVMS_P03355_3mut |
| EAAAKEAAAKEAAAK | 12,910 | FLV_P10273_3mutA |
| GGGG | 12,911 | XMRV6_A1Z651_3mutA |
| GSSPAPGGS | 12,912 | BAEVM_P10272_3mutA |
| GSSGGGGGS | 12,913 | MLVFF_P26809_3mutA |
| GGGGSSGGS | 12,914 | MLVAV_P03356_3mutA |
| GGS | | PERV_Q4VFZ2_3mut |
| GGGGG | 12,916 | WMSV_P03359_3mutA |
| GSSGSSGSSGSSGSSGSS | 12,917 | FLV_P10273_3mutA |
| PAPGGGGSS | 12,918 | MLVAV_P03356_3mutA |
| GGGGGGGG | 12,919 | BAEVM_P10272_3mutA |
| SGSETPGTSESATPES | 12,920 | MLVCB_P08361_3mutA |
| PAPGGG | 12,921 | BAEVM_P10272_3mutA |
| GSSGSSGSS | 12,922 | MLVCB_P08361_3mutA |
| GGSGSS | 12,923 | MLVMS_P03355_3mutA_WS |
| EAAAKGGGGSEAAAK | 12,924 | WMSV_P03359_3mutA |
| GGGGGGGG | 12,925 | FLV_P10273_3mutA |
| GSSGSS | 12,926 | MLVMS_P03355_3mutA_WS |
| PAPEAAAKGGS | 12,927 | XMRV6_A1Z651_3mutA |
| EAAAKEAAAK | 12,928 | MLVMS_P03355_3mut |
| GGGGSGGGGSGGGGS | 12,929 | BAEVM_P10272_3mutA |
| EAAAKGSSPAP | 12,930 | MLVMS_P03355_PLV919 |
| GGGGSSEAAAK | 12,931 | MLVMS_P03355_3mut |
| GGGGSSEAAAK | 12,932 | BAEVM_P10272_3mutA |
| PAPGGSGSS | 12,933 | PERV_Q4VFZ2_3mut |
| GGSGGGEAAAK | 12,934 | MLVFF_P26809_3mut |
| PAPEAAAKGGS | 12,935 | PERV_Q4VFZ2_3mut |
| GGGPAPGSS | 12,936 | AVIRE_P03360_3mut |
| PAPGGSGGG | 12,937 | PERV_Q4VFZ2_3mutA_WS |
| GGGGGGGG | 12,938 | PERV_Q4VFZ2_3mutA_WS |
| GSSEAAAK | 12,939 | MLVMS_P03355_3mutA_WS |
| GGGGSGGGGSGGGGS | 12,940 | PERV_Q4VFZ2_3mutA_WS |
| EAAAKGGS | 12,941 | MLVMS_P03355_3mut |
| GGGGGSGSS | 12,942 | MLVCB_P08361_3mut |
| GGGPAP | 12,943 | KORV_Q9TTC1-Pro_3mutA |
| EAAAKPAPGGG | 12,944 | MLVCB_P08361_3mut |
| GSSGGSPAP | 12,945 | MLVCB_P08361_3mutA |
| SGGSSGGSSGSETPGTSE | 12,946 | MLVMS_P03355_3mut |
| SATPESSGGSSGGSS | | |
| PAPAPAPAP | 12,947 | MLVMS_P03355_3mut |
| GSSGGS | 12,948 | XMRV6_A1Z651_3mutA |
| GSSEAAAKGGG | 12,949 | MLVMS_P03355_3mut |
| GGSGSSPAP | 12,950 | MLVMS_P03355_3mutA_WS |
| GSSEAAAKGGS | 12,951 | MLVMS_P03355_PLV919 |
| EAAAKEAAAKEAAAKEAA | 12,952 | BAEVM_P10272_3mut |
| AKEAAAK | | |
| PAPGGGGSS | 12,953 | KORV_Q9TTC1_3mutA |
| EAAAKGSS | 12,954 | MLVMS_P03355_3mutA_WS |
| AEAAAKEAAAKEAAAKEA | 12,955 | FFV_O93209_2mut |
| AAKALEAEAAAKEAAAKE | | |
| AAAKEAAAKA | | |
| GGSGGSGGSGGSGGSGGS | 12,956 | BAEVM_P10272_3mutA |
| GGGGGG | 12,957 | MLVMS_P03355_PLV919 |
| PAPEAAAK | 12,958 | BAEVM_P10272_3mutA |
| GGSGSSEAAAK | 12,959 | MLVAV_P03356_3mutA |
| GGG | | MLVCB_P08361_3mutA |
| GGGGG | 12,961 | MLVCB_P08361_3mutA |
| GGSGGSGGSGGS | 12,962 | KORV_Q9TTC1-Pro_3mutA |
| GSSGSSGSSGSSGSSGSS | 12,963 | XMRV6_A1Z651_3mutA |
| GSSEAAAKPAP | 12,964 | FLV_P10273_3mutA |
| GGGEAAAKPAP | 12,965 | MLVCB_P08361_3mutA |
| GSSGSSGSS | 12,966 | MLVMS_P03355_3mutA_WS |
| PAPAPAPAP | 12,967 | MLVMS_P03355_PLV919 |
| EAAAKGGG | 12,968 | MLVMS_P03355_PLV919 |
| PAPAPAPAPAPAP | 12,969 | FLV_P10273_3mutA |
| EAAAKGGSGSS | 12,970 | MLVMS_P03355_3mut |
| GGGGGG | 12,971 | PERV_Q4VFZ2_3mutA_WS |
| PAPGGG | 12,972 | MLVCB_P08361_3mutA |
| GGGGGSGSS | 12,973 | KORV_Q9TTC1_3mutA |
| GGGGSGGGGGGGGSGGGG | 12,974 | XMRV6_A1Z651_3mut |
| S | | |
| GGSGGSGGS | 12,975 | KORV_Q9TTC1-Pro_3mutA |
| EAAAKPAPGGG | 12,976 | MLVMS_P03355_3mutA_WS |
| AEAAAKEAAAKEAAAKEA | 12,977 | XMRV6_A1Z651 |
| AAKALEAEAAAKEAAAKE | | |
| AAAKEAAAKA | | |
| GGGGSGGGGSGGGGSGGG | 12,978 | FLV_P10273_3mutA |
| GSGGGGSGGGGS | | |
| EAAAKGGGGSEAAAK | 12,979 | PERV_Q4VFZ2_3mutA_WS |
| GGGPAPGSS | 12,980 | AVIRE_P03360_3mutA |
| GGGGG | 12,981 | MLVMS_P03355_3mutA_WS |
| GGGGSGGGGSGGGGSGGG | 12,982 | MLVMS_P03355_3mut |
| GSGGGGSGGGGS | | |
| GGGGSGGGGS | 12,983 | MLVMS_P03355_3mutA_WS |
| EAAAKGGSPAP | 12,984 | XMRV6_A1Z651_3mutA |
| EAAAKGSSPAP | 12,985 | AVIRE_P03360_3mutA |
| PAPGGSGSS | 12,986 | KORV_Q9TTC1-Pro_3mutA |
| GSS | | MLVBM_Q7SVK7_3mutA_WS |
| GSS | | WMSV_P03359_3mut |
| GGGPAPGSS | 12,989 | MLVFF_P26809_3mutA |
| EAAAKPAP | 12,990 | MLVMS_P03355_3mut |
| GSSPAPEAAAK | 12,991 | FLV_P10273_3mutA |
| GGSPAPGSS | 12,992 | MLVBM_Q7SVK7_3mutA_WS |
| GGGGGSEAAAK | 12,993 | XMRV6_A1Z651_3mut |
| PAPEAAAKGGG | 12,994 | WMSV_P03359_3mutA |
| PAPGGG | 12,995 | PERV_Q4VFZ2_3mut |
| GGSPAPEAAAK | 12,996 | WMSV_P03359_3mutA |
| GGSGGGGSS | 12,997 | PERV_Q4VFZ2_3mut |
| EAAAKGGGGSS | 12,998 | PERV_Q4VFZ2_3mut |
| EAAAKGGSPAP | 12,999 | AVIRE_P03360_3mut |
| GGSGGGGSS | 13,000 | WMSV_P03359_3mutA |
| PAPGSSEAAAK | 13,001 | MLVFF_P26809_3mut |
| GSSEAAAK | 13,002 | MLVMS_P03355_PLV919 |
| GSAGSAAGSGEF | 13,003 | AVIRE_P03360_3mutA |
| EAAAKGGSGSS | 13,004 | MLVMS_P03355_3mut |
| GGSEAAAKPAP | 13,005 | MLVMS_P03355_PLV919 |
| GGGGSGGGGSGGGGSGGG | 13,006 | MLVFF_P26809_3mutA |
| GSGGGGS | | |
| PAPGSSEAAAK | 13,007 | PERV_Q4VFZ2_3mutA_WS |
| GGGGSSPAP | 13,008 | MLVMS_P03355_3mutA_WS |
| PAPAPAP | 13,009 | MLVCB_P08361_3mutA |
| EAAAKPAPGGG | 13,010 | MLVBM_Q7SVK7_3mutA_WS |
| GGGPAPGSS | 13,011 | BAEVM_P10272_3mutA |
| PAP | | MLVMS_P03355_3mutA_WS |
| PAPGGSGGG | 13,013 | MLVMS_P03355_3mutA_WS |
| GGSGGSGGSGGSGGS | 13,014 | MLVBM_Q7SVK7_3mutA_WS |
| PAPAPAPAP | 13,015 | XMRV6_A1Z651_3mut |
| GSSPAPGGG | 13,016 | MLVMS_P03355_3mutA_WS |
| GSSPAPGGG | 13,017 | MLVMS_P03355_3mut |
| PAPGGG | 13,018 | MLVMS_P03355_PLV919 |
| GGGEAAAKGSS | 13,019 | WMSV_P03359_3mut |
| EAAAKGSS | 13,020 | KORV_Q9TTC1-Pro_3mutA |
| EAAAKGGS | 13,021 | PERV_Q4VFZ2_3mut |
| EAAAKEAAAKEAAAKEAA | 13,022 | PERV_Q4VFZ2_3mut |
| AKEAAAK | | |
| PAPEAAAKGGG | 13,023 | MLVMS_P03355_PLV919 |
| EAAAKGSSGGG | 13,024 | MLVFF_P26809_3mut |
| AEAAAKEAAAKEAAAKEA | 13,025 | PERV_Q4VFZ2 |
| AAKALEAEAAAKEAAAKE | | |
| AAAKEAAAKA | | |
| EAAAKEAAAKEAAAKEAA | 13,026 | MLVAV_P03356_3mutA |
| AKEAAAKEAAAK | | |
| GSSGGSGGG | 13,027 | MLVFF_P26809_3mut |
| GSSGSSGSSGSS | 13,028 | PERV_Q4VFZ2_3mutA_WS |
| GGSPAPGGG | 13,029 | MLVMS_P03355_PLV919 |
| GSS | | BAEVM_P10272_3mut |
| GGGPAPGSS | 13,031 | MLVMS_P03355_3mutA_WS |
| GGGGSS | 13,032 | KORV_Q9TTC1_3mutA |
| GSSGGSGGG | 13,033 | BAEVM_P10272_3mutA |
| EAAAKEAAAKEAAAK | 13,034 | MLVCB_P08361_3mutA |
| SGGSSGGSSGSETPGTSE | 13,035 | FLV_P10273_3mutA |
| SATPESSGGSSGGSS | | |
| PAPGGGGGS | 13,036 | PERV_Q4VFZ2_3mut |
| PAPAPAPAPAP | 13,037 | KORV_Q9TTC1-Pro_3mutA |
| EAAAK | 13,038 | MLVMS_P03355_3mutA_WS |
| GGG | | MLVCB_P08361_3mut |
| GGSEAAAKGGG | 13,040 | BAEVM_P10272_3mutA |
| GGGGGSGSS | 13,041 | MLVAV_P03356_3mutA |
| EAAAKGSSPAP | 13,042 | MLVBM_Q7SVK7_3mutA_WS |
| GGSGGSGGS | 13,043 | XMRV6_A1Z651_3mut |
| EAAAKPAPGGG | 13,044 | KORV_Q9TTC1-Pro_3mutA |
| GGGPAPEAAAK | 13,045 | FLV_P10273_3mutA |
| GGSPAPEAAAK | 13,046 | MLVMS_P03355_3mutA_WS |
| GGSGGSGGSGGSGGS | 13,047 | MLVFF_P26809_3mut |
| EAAAKGGSGSS | 13,048 | MLVMS_P03355_PLV919 |
| GGGEAAAKGGS | 13,049 | MLVBM_Q7SVK7_3mutA_WS |
| PAPAPAPAP | 13,050 | BAEVM_P10272_3mutA |
| EAAAKEAAAKEAAAKEAA | 13,051 | MLVMS_P03355_3mut |
| AK | | |
| EAAAKPAP | 13,052 | XMRV6_A1Z651_3mut |
| EAAAKEAAAK | 13,053 | MLVBM_Q7SVK7_3mutA_WS |
| EAAAKGGG | 13,054 | BAEVM_P10272_3mut |
| EAAAKGSS | 13,055 | MLVAV_P03356_3mutA |
| EAAAKEAAAKEAAAKEAA | 13,056 | MLVFF_P26809_3mut |
| AKEAAAKEAAAK | | |
| GGGPAPGSS | 13,057 | PERV_Q4VFZ2_3mutA_WS |
| GGGG | 13,058 | PERV_Q4VFZ2_3mut |
| EAAAKGGSGSS | 13,059 | MLVMS_P03355_PLV919 |
| GGGGSGGGGSGGGGS | 13,060 | MLVMS_P03355_3mutA_WS |
| EAAAK | 13,061 | MLVMS_P03355_3mutA_WS |
| GGGGSS | 13,062 | PERV_Q4VFZ2 |
| PAPEAAAKGGS | 13,063 | MLVCB_P08361_3mut |
| GSS | | MLVMS_P03355_3mut |
| GSAGSAAGSGEF | 13,065 | MLVFF_P26809_3mutA |
| EAAAKEAAAKEAAAKEAA | 13,066 | KORV_Q9TTC1-Pro_3mut |
| AKEAAAKEAAAK | | |
| GGGGSGGGGS | 13,067 | AVIRE_P03360_3mutA |
| EAAAK | 13,068 | MLVMS_P03355_3mut |
| GGGPAPGGS | 13,069 | PERV_Q4VFZ2_3mut |
| GGGGSGGGGSGGGGS | 13,070 | MLVMS_P03355_PLV919 |
| PAPGGG | 13,071 | MLVMS_P03355_3mutA_WS |
| GGGEAAAKPAP | 13,072 | PERV_Q4VFZ2_3mutA_WS |
| EAAAKPAPGSS | 13,073 | KORV_Q9TTC1-Pro_3mutA |
| PAPGSS | 13,074 | KORV_Q9TTC1_3mutA |
| GSAGSAAGSGEF | 13,075 | PERV_Q4VFZ2_3mut |
| PAPGGGGSS | 13,076 | KORV_Q9TTC1-Pro_3mutA |
| GSSGGGEAAAK | 13,077 | MLVCB_P08361_3mutA |
| GSS | | AVIRE_P03360_3mutA |
| GSSGSSGSSGSS | 13,079 | XMRV6_A1Z651_3mutA |
| PAPEAAAKGGG | 13,080 | MLVMS_P03355_PLV919 |
| GGGPAPEAAAK | 13,081 | MLVCB_P08361_3mutA |
| PAPGGGGGS | 13,082 | MLVCB_P08361_3mutA |
| EAAAKEAAAKEAAAKEAA | 13,083 | PERV_Q4VFZ2_3mutA_WS |
| AK | | |
| GGGGGSPAP | 13,084 | MLVFF_P26809_3mutA |
| GSSGSSGSSGSSGSS | 13,085 | PERV_Q4VFZ2 |
| GSSPAPEAAAK | 13,086 | MLVMS_P03355_PLV919 |
| GSSGSSGSSGSSGSSGSS | 13,087 | MLVBM_Q7SVK7_3mutA_WS |
| GSSGSSGSSGSSGSSGSS | 13,088 | MLVMS_P03355_3mutA_WS |
| GGSPAPEAAAK | 13,089 | MLVAV_P03356_3mutA |
| GSSGGG | 13,090 | BAEVM_P10272_3mut |
| EAAAKGSSGGS | 13,091 | KORV_Q9TTC1-Pro_3mutA |
| GGSGSSEAAAK | 13,092 | MLVMS_P03355_3mutA_WS |
| GGGPAPEAAAK | 13,093 | MLVFF_P26809_3mutA |
| GGGPAPGGS | 13,094 | MLVMS_P03355_3mutA_WS |
| GGGGG | 13,095 | MLVMS_P03355_PLV919 |
| GGGEAAAKPAP | 13,096 | MLVBM_Q7SVK7_3mutA_WS |
| GGGGSGGGGS | 13,097 | WMSV_P03359_3mut |
| GGGPAPEAAAK | 13,098 | PERV_Q4VFZ2_3mut |
| GGSGSSEAAAK | 13,099 | MLVMS_P03355_PLV919 |
| EAAAKGGGPAP | 13,100 | MLVMS_P03355_3mutA_WS |
| GSSGSSGSSGSSGSS | 13,101 | KORV_Q9TTC1-Pro_3mutA |
| PAPAP | 13,102 | WMSV_P03359_3mutA |
| GGSPAPGSS | 13,103 | MLVAV_P03356_3mutA |
| GGSGGGPAP | 13,104 | MLVMS_P03355_3mut |
| GGSPAP | 13,105 | MLVMS_P03355_PLV919 |
| EAAAKGGSPAP | 13,106 | PERV_Q4VFZ2_3mut |
| GSSPAPGGG | 13,107 | KORV_Q9TTC1-Pro_3mutA |
| GSAGSAAGSGEF | 13,108 | MLVMS_P03355_3mut |
| GGSPAP | 13,109 | PERV_Q4VFZ2_3mut |
| GSSGSS | 13,110 | KORV_Q9TTC1-Pro_3mut |
| GGGPAPGSS | 13,111 | MLVMS_P03355_3mutA_WS |
| AEAAAKEAAAKEAAAKEA | 13,112 | FOAMV_P14350 |
| AAKALEAEAAAKEAAAKE | | |
| AAAKEAAAKA | | |
| PAPGSSGGG | 13,113 | MLVMS_P03355_PLV919 |
| GGSEAAAKPAP | 13,114 | BAEVM_P10272_3mutA |
| GGGGGS | 13,115 | MLVCB_P08361_3mutA |
| PAPEAAAKGGS | 13,116 | MLVMS_P03355_3mutA_WS |
| EAAAKEAAAKEAAAKEAA | 13,117 | BAEVM_P10272_3mutA |
| AKEAAAKEAAAK | | |
| GGSEAAAK | 13,118 | BAEVM_P10272_3mutA |
| GSSPAPEAAAK | 13,119 | MLVMS_P03355_3mutA_WS |
| PAPGGG | 13,120 | WMSV_P03359_3mut |
| EAAAKPAP | 13,121 | PERV_Q4VFZ2_3mut |
| GSSGSSGSSGSSGSS | 13,122 | WMSV_P03359_3mut |
| PAPGGG | 13,123 | MLVBM_Q7SVK7_3mutA_WS |
| GGSGGGEAAAK | 13,124 | BAEVM_P10272_3mutA |
| PAPGGS | 13,125 | MLVMS_P03355_3mut |
| GGSGGSGGSGGS | 13,126 | MLVBM_Q7SVK7_3mutA_WS |
| EAAAKEAAAKEAAAKEAA | 13,127 | PERV_Q4VFZ2_3mut |
| AK | | |
| GGSEAAAKGGG | 13,128 | WMSV_P03359_3mutA |
| GGGPAP | 13,129 | BAEVM_P10272_3mutA |
| GGGGSGGGGGGGGSGGGG | 13,130 | XMRV6_A1Z651_3mut |
| SGGGGSGGGGS | | |
| GGSPAPGSS | 13,131 | KORV_Q9TTC1_3mut |
| GGGPAPGSS | 13,132 | MLVMS_P03355_3mut |
| GGGGSSGGS | 13,133 | BAEVM_P10272_3mutA |
| GGGEAAAKGSS | 13,134 | KORV_Q9TTC1-Pro_3mutA |
| PAPAP | 13,135 | MLVBM_Q7SVK7_3mutA_WS |
| GGSPAPGGG | 13,136 | PERV_Q4VFZ2_3mut |
| PAPGSS | 13,137 | PERV_Q4VFZ2_3mutA_WS |
| GSSGGSPAP | 13,138 | MLVBM_Q7SVK7_3mutA_WS |
| EAAAKGGGGSEAAAK | 13,139 | PERV_Q4VFZ2_3mut |
| GSSEAAAKGGS | 13,140 | KORV_Q9TTC1-Pro_3mut |
| PAPAPAPAP | 13,141 | KORV_Q9TTC1-Pro_3mutA |
| GGSEAAAKPAP | 13,142 | WMSV_P03359_3mutA |
| PAPGGS | 13,143 | FLV_P10273_3mutA |
| EAAAKGGGPAP | 13,144 | PERV_Q4VFZ2_3mut |
| GGSGSSGGG | 13,145 | AVIRE_P03360_3mutA |
| EAAAKGGSGSS | 13,146 | BAEVM_P10272_3mutA |
| SGGSSGGSSGSETPGTSE | 13,147 | MLVCB_P08361_3mutA |
| SATPESSGGSSGGSS | | |
| GSSEAAAKGGS | 13,148 | XMRV6_A1Z651_3mutA |
| GGGGG | 13,149 | BAEVM_P10272_3mutA |
| GGGGSGGGGSGGGGSGGG | 13,150 | SFV3L_P27401_2mutA |
| GSGGGGSGGGGS | | |
| GGGEAAAKGSS | 13,151 | MLVMS_P03355_PLV919 |
| EAAAKGGGGSEAAAK | 13,152 | KORV_Q9TTC1_3mutA |
| EAAAKGGG | 13,153 | AVIRE_P03360_3mut |
| GGSGGG | 13,154 | MLVMS_P03355_3mutA_WS |
| GGSGSSGGG | 13,155 | MLVMS_P03355_PLV919 |
| GGGGSGGGGSGGGGSGGG | 13,156 | KORV_Q9TTC1_3mut |
| GSGGGGSGGGGS | | |
| GGGGSEAAAKGGGGS | 13,157 | KORV_Q9TTC1_3mutA |
| PAPAPAPAPAP | 13,158 | FLV_P10273_3mutA |
| GGS | | MLVBM_Q7SVK7_3mutA_WS |
| GGGGGSEAAAK | 13,160 | MLVBM_Q7SVK7_3mutA_WS |
| GSSGSSGSSGSSGSS | 13,161 | MLVMS_P03355_3mutA_WS |
| EAAAKEAAAKEAAAKEAA | 13,162 | MLVMS_P03355_3mut |
| AKEAAAK | | |
| GGSGSSGGG | 13,163 | PERV_Q4VFZ2_3mut |
| PAP | | MLVFF_P26809_3mut |
| GSSPAPEAAAK | 13,165 | MLVAV_P03356_3mutA |
| EAAAKGGGGSS | 13,166 | MLVMS_P03355_3mut |
| GGGEAAAKGGS | 13,167 | XMRV6_A1Z651_3mut |
| GGSGGGPAP | 13,168 | MLVBM_Q7SVK7_3mutA_WS |
| GSAGSAAGSGEF | 13,169 | BAEVM_P10272_3mutA |
| GSSEAAAK | 13,170 | MLVCB_P08361_3mut |
| PAPGSS | 13,171 | MLVMS_P03355_3mut |
| EAAAKEAAAKEAAAK | 13,172 | MLVAV_P03356_3mutA |
| GSAGSAAGSGEF | 13,173 | XMRV6_A1Z651_3mutA |
| GSSGSSGSSGSS | 13,174 | BAEVM_P10272_3mutA |
| AEAAAKEAAAKEAAAKEA | 13,175 | KORV_Q9TTC1-Pro_3mut |
| AAKALEAEAAAKEAAAKE | | |
| AAAKEAAAKA | | |
| GGGGSSEAAAK | 13,176 | WMSV_P03359_3mut |
| GSSGGGEAAAK | 13,177 | MLVBM_Q7SVK7_3mutA_WS |
| EAAAKPAP | 13,178 | MLVFF_P26809_3mutA |
| GGSPAPGGG | 13,179 | KORV_Q9TTC1_3mutA |
| PAPEAAAK | 13,180 | FLV_P10273_3mutA |
| GSSGSSGSS | 13,181 | MLVBM_Q7SVK7_3mutA_WS |
| GSSGGGEAAAK | 13,182 | FLV_P10273_3mutA |
| GGSPAP | 13,183 | MLVBM_Q7SVK7_3mutA_WS |
| GSAGSAAGSGEF | 13,184 | KORV_Q9TTC1-Pro_3mutA |
| PAPGGSEAAAK | 13,185 | MLVMS_P03355_PLV919 |
| GGSPAPEAAAK | 13,186 | MLVBM_Q7SVK7_3mutA_WS |
| GGGGGSPAP | 13,187 | MLVBM_Q7SVK7_3mutA_WS |
| EAAAKGSSPAP | 13,188 | WMSV_P03359_3mut |
| EAAAKGGGPAP | 13,189 | MLVBM_Q7SVK7_3mutA_WS |
| PAPGSS | 13,190 | KORV_Q9TTC1-Pro_3mutA |
| GGSGSSGGG | 13,191 | BAEVM_P10272_3mut |
| SGGSSGGSSGSETPGTSE | 13,192 | FFV_O93209-Pro_2mut |
| SATPESSGGSSGGSS | | |
| GGSGGSGGSGGSGGSGGS | 13,193 | WMSV_P03359_3mutA |
| GGSGGSGGS | 13,194 | PERV_Q4VFZ2_3mutA_WS |
| GGGGG | 13,195 | PERV_Q4VFZ2_3mutA_WS |
| GGGPAP | 13,196 | FLV_P10273_3mutA |
| PAPGGSGGG | 13,197 | XMRV6_A1Z651_3mutA |
| GGGGSEAAAKGGGGS | 13,198 | XMRV6_A1Z651_3mut |
| EAAAKGSSGGG | 13,199 | KORV_Q9TTC1-Pro_3mutA |
| GSSGGSEAAAK | 13,200 | WMSV_P03359_3mut |
| EAAAKGGSGSS | 13,201 | PERV_Q4VFZ2_3mut |
| PAPAPAPAPAP | 13,202 | PERV_Q4VFZ2_3mut |
| GGGGSGGGGSGGGGSGGG | 13,203 | MLVMS_P03355_3mutA_WS |
| GGGGGSGGGGS | | |
| GGGGGGG | 13,204 | KORV_Q9TTC1_3mutA |
| EAAAK | 13,205 | KORV_Q9TTC1-Pro_3mutA |
| GGGEAAAKGGS | 13,206 | KORV_Q9TTC1-Pro_3mutA |
| GGGEAAAKGGS | 13,207 | PERV_Q4VFZ2_3mutA_WS |
| GGGGGSPAP | 13,208 | XMRV6_A1Z651_3mut |
| GGGGSGGGGSGGGGSGGG | 13,209 | MLVFF_P26809_3mut |
| GS | | |
| GGGGGGG | 13,210 | MLVFF_P26809_3mut |
| PAPAPAPAPAPAP | 13,211 | AVIRE_P03360_3mutA |
| GSSPAPGGG | 13,212 | FLV_P10273_3mutA |
| GGGGGSPAP | 13,213 | MLVMS_P03355_3mutA_WS |
| GGGGSGGGGSGGGGS | 13,214 | MLVMS_P03355_3mut |
| GGGGSGGGGSGGGGS | 13,215 | KORV_Q9TTC1_3mut |
| GSSEAAAKGGS | 13,216 | MLVAV_P03356_3mutA |
| GSSGSSGSSGSSGSS | 13,217 | MLVMS_P03355_3mut |
| EAAAKGGGGGS | 13,218 | PERV_Q4VFZ2_3mutA_WS |
| GSSGGGGGS | 13,219 | PERV_Q4VFZ2_3mut |
| GGGEAAAKPAP | 13,220 | MLVMS_P03355_3mut |
| GSSGGSPAP | 13,221 | PERV_Q4VFZ2_3mutA_WS |
| GSSGGGPAP | 13,222 | BAEVM_P10272_3mutA |
| GGGGGSGSS | 13,223 | MLVMS_P03355_PLV919 |
| AEAAAKEAAAKEAAAKEA | 13,224 | BAEVM_P10272_3mut |
| AAKALEAEAAAKEAAAKE | | |
| AAAKEAAAKA | | |
| PAPEAAAK | 13,225 | MLVMS_P03355_3mut |
| GGGGSGGGGSGGGGS | 13,226 | FLV_P10273_3mutA |
| GGSGSSGGG | 13,227 | WMSV_P03359_3mutA |
| EAAAKGGS | 13,228 | PERV_Q4VFZ2_3mut |
| EAAAKGSSPAP | 13,229 | MLVCB_P08361_3mut |
| EAAAKGGSGSS | 13,230 | WMSV_P03359_3mutA |
| GSSGSS | 13,231 | PERV_Q4VFZ2_3mutA_WS |
| PAPAPAPAP | 13,232 | MLVMS_P03355_PLV919 |
| GGSGGG | 13,233 | PERV_Q4VFZ2_3mutA_WS |
| GSS | | MLVBM_Q7SVK7_3mutA_WS |
| PAP | | KORV_Q9TTC1-Pro_3mutA |
| GGSGSSEAAAK | 13,236 | MLVFF_P26809_3mut |
| PAPEAAAKGSS | 13,237 | KORV_Q9TTC1-Pro_3mutA |
| GGSGGS | 13,238 | MLVCB_P08361_3mutA |
| GGGGGGG | 13,239 | PERV_Q4VFZ2_3mutA_WS |
| GGSPAPEAAAK | 13,240 | MLVBM_Q7SVK7_3mut |
| EAAAKEAAAKEAAAKEAA | 13,241 | KORV_Q9TTC1_3mutA |
| AKEAAAKEAAAK | | |
| GGSPAP | 13,242 | MLVMS_P03355_3mut |
| GGSEAAAKGGG | 13,243 | PERV_Q4VFZ2_3mut |
| GGGGSGGGGS | 13,244 | FLV_P10273_3mutA |
| GGGEAAAK | 13,245 | BAEVM_P10272_3mutA |
| GGGGSGGGGSGGGGSGGG | 13,246 | SFV3L_P27401_2mut |
| GGGGGSGGGGS | | |
| GGSEAAAKPAP | 13,247 | KORV_Q9TTC1-Pro_3mutA |
| GSSGGGEAAAK | 13,248 | MLVMS_P03355_PLV919 |
| GGGGGSEAAAK | 13,249 | MLVMS_P03355_PLV919 |
| EAAAKGGSGGG | 13,250 | MLVMS_P03355_3mutA_WS |
| GGGGSSPAP | 13,251 | MLVAV_P03356_3mutA |
| EAAAKEAAAK | 13,252 | MLVMS_P03355_3mutA_WS |
| AEAAAKEAAAKEAAAKEA | 13,253 | SFV3L_P27401_2mut |
| AAKALEAEAAAKEAAAKE | | |
| AAAKEAAAKA | | |
| GSSGSSGSSGSSGSS | 13,254 | MLVMS_P03355_PLV919 |
| GSSGGG | 13,255 | KORV_Q9TTC1-Pro_3mutA |
| GSSGGS | 13,256 | MLVFF_P26809_3mutA |
| GGGGSGGGGS | 13,257 | XMRV6_A1Z651_3mutA |
| PAPGSS | 13,258 | MLVBM_Q7SVK7_3mutA_WS |
| GGGPAPEAAAK | 13,259 | XMRV6_A1Z651_3mutA |
| EAAAKGGS | 13,260 | MLVFF_P26809_3mut |
| GSS | | KORV_Q9TTC1_3mutA |
| GGGG | 13,262 | PERV_Q4VFZ2_3mut |
| GGGGGSEAAAK | 13,263 | AVIRE_P03360_3mutA |
| GSSGSSGSSGSSGSS | 13,264 | MLVMS_P03355_PLV919 |
| PAPGGSGGG | 13,265 | PERV_Q4VFZ2_3mut |
| GGGPAP | 13,266 | PERV_Q4VFZ2_3mut |
| GGGPAPEAAAK | 13,267 | AVIRE_P03360_3mutA |
| GGGEAAAK | 13,268 | MLVCB_P08361_3mut |
| GGG | | MLVFF_P26809_3mutA |
| EAAAKPAPGSS | 13,270 | XMRV6_A1Z651_3mutA |
| GGSGSSEAAAK | 13,271 | PERV_Q4VFZ2_3mutA_WS |
| EAAAKGSS | 13,272 | MLVMS_P03355_3mut |
| GGSGSSEAAAK | 13,273 | BAEVM_P10272_3mut |
| GGSGGG | 13,274 | MLVBM_Q7SVK7_3mutA_WS |
| GGGPAP | 13,275 | MLVMS_P03355_PLV919 |
| GGSPAPGGG | 13,276 | PERV_Q4VFZ2_3mutA_WS |
| GGGGGSEAAAK | 13,277 | MLVFF_P26809_3mutA |
| EAAAKGSSGGS | 13,278 | MLVBM_Q7SVK7_3mut |
| PAPAP | 13,279 | XMRV6_A1Z651_3mut |
| GSSPAPGGS | 13,280 | MLVBM_Q7SVK7_3mutA_WS |
| GSSEAAAKGGG | 13,281 | WMSV_P03359_3mutA |
| EAAAKGGGGGS | 13,282 | PERV_Q4VFZ2_3mut |
| GSSGSSGSSGSSGSS | 13,283 | MLVCB_P08361_3mutA |
| EAAAKGGGGSS | 13,284 | PERV_Q4VFZ2_3mut |
| EAAAKGSS | 13,285 | PERV_Q4VFZ2_3mut |
| EAAAKEAAAKEAAAKEAA | 13,286 | AVIRE_P03360_3mutA |
| AKEAAAKEAAAK | | |
| EAAAKGGS | 13,287 | MLVCB_P08361_3mut |
| GSSGGSEAAAK | 13,288 | MLVAV_P03356_3mutA |
| EAAAKPAPGGS | 13,289 | PERV_Q4VFZ2_3mut |
| GGSGGS | 13,290 | MLVAV_P03356_3mutA |
| EAAAKGSSGGG | 13,291 | AVIRE_P03360_3mutA |
| GGSGGSGGSGGS | 13,292 | PERV_Q4VFZ2_3mut |
| GGGGGGGG | 13,293 | KORV_Q9TTC1_3mutA |
| GGSGSSEAAAK | 13,294 | MLVCB_P08361_3mutA |
| EAAAKGGG | 13,295 | MLVBM_Q7SVK7_3mutA_WS |
| GGGGGGGGSGGGGS | 13,296 | MLVCB_P08361_3mut |
| GGSGGSGGSGGS | 13,297 | PERV_Q4VFZ2_3mutA_WS |
| PAPAPAPAPAP | 13,298 | WMSV_P03359_3mut |
| EAAAKEAAAKEAAAKEAA | 13,299 | PERV_Q4VFZ2_3mut |
| AK | | |
| GGSGGSGGS | 13,300 | XMRV6_A1Z651_3mutA |
| PAPGGGGSS | 13,301 | BAEVM_P10272_3mutA |
| GSSEAAAKGGS | 13,302 | MLVCB_P08361_3mut |
| GSSGGGPAP | 13,303 | MLVCB_P08361_3mutA |
| GGSGSS | 13,304 | MLVBM_Q7SVK7_3mutA_WS |
| GGGGGSEAAAK | 13,305 | MLVAV_P03356_3mutA |
| GSSEAAAK | 13,306 | PERV_Q4VFZ2_3mutA_WS |
| GGGGGSGSS | 13,307 | MLVBM_Q7SVK7_3mutA_WS |
| EAAAKGGSGSS | 13,308 | MLVFF_P26809_3mut |
| PAP | | FLV_P10273_3mutA |
| GGGGG | 13,310 | MLVMS_P03355_3mutA_WS |
| EAAAK | 13,311 | PERV_Q4VFZ2_3mut |
| GSS | | FLV_P10273_3mutA |
| PAPAPAPAPAPAP | 13,313 | KORV_Q9TTC1-Pro_3mutA |
| EAAAKEAAAKEAAAKEAA | 13,314 | MLVCB_P08361_3mut |
| AK | | |
| EAAAKGGGGSEAAAK | 13,315 | XMRV6_A1Z651_3mut |
| PAPGGSGGG | 13,316 | MLVBM_Q7SVK7_3mutA_WS |
| GGSGGGPAP | 13,317 | WMSV_P03359_3mutA |
| GGGGSSEAAAK | 13,318 | MLVBM_Q7SVK7_3mutA_WS |
| PAPGGGGSS | 13,319 | MLVCB_P08361_3mut |
| GGSGGSGGSGGS | 13,320 | PERV_Q4VFZ2_3mutA_WS |
| PAPGGSGGG | 13,321 | MLVMS_P03355_3mutA_WS |
| GSSPAPGGS | 13,322 | MLVCB_P08361_3mutA |
| GSSGSSGSS | 13,323 | MLVFF_P26809_3mut |
| PAPGGGGGS | 13,324 | MLVBM_Q7SVK7_3mutA_WS |
| GSSPAP | 13,325 | PERV_Q4VFZ2_3mut |
| GGSGGG | 13,326 | KORV_Q9TTC1-Pro_3mut |
| EAAAKGGGGSEAAAK | 13,327 | PERV_Q4VFZ2_3mutA_WS |
| GGSPAPEAAAK | 13,328 | PERV_Q4VFZ2_3mutA_WS |
| EAAAKPAP | 13,329 | BAEVM_P10272_3mut |
| GGGGSGGGGSGGGGSGGG | 13,330 | MLVMS_P03355_3mut |
| GSGGGGSGGGGS | | |
| EAAAKGGGGSS | 13,331 | MLVFF_P26809_3mut |
| EAAAKEAAAK | 13,332 | MLVCB_P08361_3mut |
| GSSEAAAKGGS | 13,333 | PERV_Q4VFZ2_3mut |
| GGSPAP | 13,334 | KORV_Q9TTC1-Pro_3mutA |
| EAAAKEAAAKEAAAKEAA | 13,335 | MLVMS_P03355_3mutA_WS |
| AK | | |
| GSSGSSGSSGSSGSS | 13,336 | BAEVM_P10272_3mut |
| PAPEAAAK | 13,337 | MLVMS_P03355_3mut |
| GSSGGSPAP | 13,338 | PERV_Q4VFZ2 |
| GGGPAPGGS | 13,339 | BAEVM_P10272_3mutA |
| EAAAKPAPGGS | 13,340 | MLVMS_P03355_PLV919 |
| GGGGSGGGGS | 13,341 | PERV_Q4VFZ2 |
| GGGEAAAK | 13,342 | KORV_Q9TTC1-Pro_3mut |
| EAAAKGGGGGS | 13,343 | FLV_P10273_3mutA |
| GGSPAPGSS | 13,344 | MLVMS_P03355_3mut |
| GSSPAPEAAAK | 13,345 | MLVMS_P03355_3mutA_WS |
| GSAGSAAGSGEF | 13,346 | MLVBM_Q7SVK7_3mutA_WS |
| EAAAK | 13,347 | BAEVM_P10272_3mutA |
| EAAAKGGGGSS | 13,348 | BAEVM_P10272_3mutA |
| GGG | | WMSV_P03359_3mut |
| GGSGSSPAP | 13,350 | BAEVM_P10272_3mut |
| GGSEAAAKPAP | 13,351 | MLVBM_Q7SVK7_3mutA_WS |
| EAAAKGGSGSS | 13,352 | MLVCB_P08361_3mut |
| PAPGSS | 13,353 | MLVAV_P03356_3mutA |
| PAPEAAAKGGG | 13,354 | MLVCB_P08361_3mutA |
| AEAAAKEAAAKEAAAKEA | 13,355 | FOAMV_P14350-Pro_2mut |
| AAKALEAEAAAKEAAAKE | | |
| AAAKEAAAKA | | |
| GSSGSSGSS | 13,356 | PERV_Q4VFZ2_3mut |
| PAPGGG | 13,357 | MLVMS_P03355_3mut |
| PAPGGS | 13,358 | PERV_Q4VFZ2_3mut |
| GSSGGG | 13,359 | MLVMS_P03355_PLV919 |
| GSSGSSGSSGSSGSSGSS | 13,360 | WMSV_P03359_3mut |
| PAP | | AVIRE_P03360_3mutA |
| EAAAKGSSPAP | 13,362 | MLVBM_Q7SVK7_3mutA_WS |
| GSSGSSGSSGSS | 13,363 | MLVMS_P03355_PLV919 |
| GGGGSGGGGSGGGGSGGG | 13,364 | AVIRE_P03360 |
| GSGGGGS | | |
| GGGGS | 13,365 | PERV_Q4VFZ2_3mut |
| EAAAKGSSGGG | 13,366 | MLVBM_Q7SVK7_3mutA_WS |
| GGGGGG | 13,367 | KORV_Q9TTC1-Pro_3mut |
| GGSGSSEAAAK | 13,368 | PERV_Q4VFZ2_3mut |
| GSSPAPEAAAK | 13,369 | MLVBM_Q7SVK7_3mutA_WS |
| GGGGSGGGGS | 13,370 | MLVBM_Q7SVK7_3mutA_WS |
| GSSGGGGGS | 13,371 | MLVAV_P03356_3mutA |
| GSAGSAAGSGEF | 13,372 | WMSV_P03359_3mutA |
| GGGEAAAKGSS | 13,373 | BAEVM_P10272_3mutA |
| AEAAAKEAAAKEAAAKEA | 13,374 | FFV_O93209-Pro_2mut |
| AAKALEAEAAAKEAAAKE | | |
| AAAKEAAAKA | | |
| PAPGGSGGG | 13,375 | MLVCB_P08361_3mutA |
| EAAAKEAAAKEAAAKEAA | 13,376 | SFV3L_P27401_2mut |
| AKEAAAK | | |
| GGSGSSPAP | 13,377 | MLVMS_P03355_PLV919 |
| GGGGGG | 13,378 | PERV_Q4VFZ2_3mut |
| EAAAKEAAAKEAAAKEAA | 13,379 | PERV_Q4VFZ2_3mut |
| AKEAAAK | | |
| EAAAKGSSPAP | 13,380 | MLVFF_P26809_3mut |
| GGGPAPGGS | 13,381 | MLVBM_Q7SVK7_3mutA_WS |
| AEAAAKEAAAKEAAAKEA | 13,382 | SFV3L_P27401 |
| AAKALEAEAAAKEAAAKE | | |
| AAAKEAAAKA | | |
| PAP | | PERV_Q4VFZ2_3mut |
| EAAAKGGS | 13,384 | MLVMS_P03355_PLV919 |
| GSSGGSEAAAK | 13,385 | WMSV_P03359_3mutA |
| GGSGSSEAAAK | 13,386 | KORV_Q9TTC1-Pro_3mutA |
| EAAAKEAAAKEAAAK | 13,387 | PERV_Q4VFZ2 |
| GGSGGGEAAAK | 13,388 | MLVMS_P03355_3mutA_WS |
| GGGGSGGGGSGGGGSGGG | 13,389 | BAEVM_P10272_3mut |
| GS | | |
| EAAAKGSS | 13,390 | XMRV6_A1Z651_3mutA |
| GSSGGGGGS | 13,391 | WMSV_P03359_3mutA |
| GSSGSSGSSGSSGSSGSS | 13,392 | MLVFF_P26809_3mutA |
| GGSGSS | 13,393 | MLVAV_P03356_3mutA |
| EAAAKGGGGSEAAAK | 13,394 | MLVMS_P03355_PLV919 |
| EAAAKGGGPAP | 13,395 | PERV_Q4VFZ2 |
| GGSEAAAKGGG | 13,396 | MLVAV_P03356_3mutA |
| EAAAKEAAAKEAAAKEAA | 13,397 | MLVBM_Q7SVK7_3mut |
| AKEAAAKEAAAK | | |
| EAAAKEAAAKEAAAKEAA | 13,398 | KORV_Q9TTC1-Pro_3mutA |
| AKEAAAKEAAAK | | |
| GSSPAPEAAAK | 13,399 | MLVFF_P26809_3mutA |
| GGGGSEAAAKGGGGS | 13,400 | PERV_Q4VFZ2_3mut |
| GSSGSSGSSGSS | 13,401 | PERV_Q4VFZ2_3mut |
| GGSEAAAK | 13,402 | MLVFF_P26809_3mutA |
| GGGGGGGG | 13,403 | MLVMS_P03355_3mut |
| GSSGGG | 13,404 | XMRV6_A1Z651_3mutA |
| EAAAKGGS | 13,405 | BAEVM_P10272_3mutA |
| GGGGS | 13,406 | BAEVM_P10272_3mutA |
| GGSEAAAKGGG | 13,407 | KORV_Q9TTC1-Pro_3mutA |
| GGSGSSGGG | 13,408 | KORV_Q9TTC1_3mutA |
| GGSGSSEAAAK | 13,409 | WMSV_P03359_3mut |
| EAAAKGGSGSS | 13,410 | MLVBM_Q7SVK7_3mutA_WS |
| GGS | | BAEVM_P10272_3mutA |
| GGGPAPGSS | 13,412 | WMSV_P03359_3mutA |
| GSSGSSGSSGSSGSS | 13,413 | AVIRE_P03360_3mut |
| GGGEAAAKPAP | 13,414 | XMRV6_A1Z651_3mut |
| GSSGGG | 13,415 | MLVFF_P26809_3mutA |
| GGSPAPGSS | 13,416 | PERV_Q4VFZ2_3mut |
| PAPGGS | 13,417 | MLVCB_P08361_3mut |
| PAPAPAPAPAP | 13,418 | KORV_Q9TTC1_3mutA |
| GSSGGS | 13,419 | MLVCB_P08361_3mutA |
| GSSGGSEAAAK | 13,420 | PERV_Q4VFZ2_3mut |
| EAAAKGSSGGS | 13,421 | MLVMS_P03355_PLV919 |
| EAAAKGGG | 13,422 | WMSV_P03359_3mut |
| PAPGGGGGS | 13,423 | BAEVM_P10272_3mutA |
| GGGGSEAAAKGGGGS | 13,424 | WMSV_P03359_3mutA |
| EAAAKEAAAKEAAAKEAA | 13,425 | MLVMS_P03355_3mutA_WS |
| AKEAAAKEAAAK | | |
| GGS | | KORV_Q9TTC1-Pro_3mutA |
| GSSGGSPAP | 13,427 | BAEVM_P10272_3mutA |
| GGG | | MLVMS_P03355_PLV919 |
| PAPGSS | 13,429 | KORV_Q9TTC1-Pro_3mut |
| GGSEAAAKGGG | 13,430 | FLV_P10273_3mutA |
| GGSEAAAKPAP | 13,431 | PERV_Q4VFZ2_3mutA_WS |
| GGGGSSPAP | 13,432 | XMRV6_A1Z651_3mutA |
| EAAAKEAAAKEAAAKEAA | 13,433 | PERV_Q4VFZ2_3mutA_WS |
| AKEAAAK | | |
| GGGG | 13,434 | PERV_Q4VFZ2_3mutA_WS |
| GGSEAAAKPAP | 13,435 | MLVMS_P03355_3mut |
| PAPGSSGGG | 13,436 | MLVMS_P03355_3mutA_WS |
| PAPEAAAKGGS | 13,437 | AVIRE_P03360_3mut |
| GGGGSSPAP | 13,438 | MLVMS_P03355_3mutA_WS |
| GGGGSGGGGGGGGSGGGG | 13,439 | PERV_Q4VFZ2_3mut |
| S | | |
| GGGEAAAK | 13,440 | MLVMS_P03355_3mut |
| GGGGSS | 13,441 | MLVFF_P26809_3mut |
| GGSPAPGSS | 13,442 | XMRV6_A1Z651_3mut |
| GGGGS | 13,443 | KORV_Q9TTC1-Pro_3mutA |
| EAAAKGSSGGS | 13,444 | FLV_P10273_3mutA |
| GSS | | MLVMS_P03355_PLV919 |
| GGGG | 13,446 | MLVMS_P03355_PLV919 |
| GSSGGS | 13,447 | MLVMS_P03355_PLV919 |
| GGSGGSGGSGGS | 13,448 | MLVMS_P03355_3mut |
| PAPEAAAKGGS | 13,449 | MLVMS_P03355_3mut |
| EAAAKGSSGGG | 13,450 | BAEVM_P10272_3mutA |
| GSSEAAAK | 13,451 | KORV_Q9TTC1-Pro_3mutA |
| GSAGSAAGSGEF | 13,452 | KORV_Q9TTC1_3mutA |
| GGGGGSEAAAK | 13,453 | MLVCB_P08361_3mut |
| GGGG | 13,454 | WMSV_P03359_3mut |
| GGGGSSEAAAK | 13,455 | MLVMS_P03355_PLV919 |
| PAPGGG | 13,456 | WMSV_P03359_3mutA |
| EAAAKGGSGGG | 13,457 | MLVAV_P03356_3mutA |
| GGGPAPGGS | 13,458 | MLVMS_P03355_3mut |
| EAAAKPAP | 13,459 | PERV_Q4VFZ2_3mutA_WS |
| GSSGSSGSS | 13,460 | KORV_Q9TTC1-Pro_3mutA |
| GSSPAPGGS | 13,461 | XMRV6_A1Z651_3mut |
| GGGGGSPAP | 13,462 | BAEVM_P10272_3mutA |
| GGSGSSGGG | 13,463 | PERV_Q4VFZ2_3mutA_WS |
| GGGEAAAKGSS | 13,464 | AVIRE_P03360_3mut |
| GSSEAAAK | 13,465 | FLV_P10273_3mutA |
| EAAAK | 13,466 | MLVMS_P03355_3mut |
| EAAAKGGSGSS | 13,467 | WMSV_P03359_3mut |
| GSSEAAAKGGG | 13,468 | PERV_Q4VFZ2_3mut |
| PAPGSSGGG | 13,469 | BAEVM_P10272_3mutA |
| EAAAKGGGGGS | 13,470 | MLVMS_P03355_3mut |
| GGSEAAAKPAP | 13,471 | AVIRE_P03360_3mut |
| GGGPAPGGS | 13,472 | XMRV6_A1Z651_3mut |
| GGGGS | 13,473 | KORV_Q9TTC1_3mutA |
| GGSGGSGGSGGSGGS | 13,474 | XMRV6_A1Z651_3mut |
| GGGPAP | 13,475 | KORV_Q9TTC1-Pro_3mut |
| EAAAKPAP | 13,476 | MLVBM_Q7SVK7_3mutA_WS |
| GGSEAAAK | 13,477 | MLVMS_P03355_PLV919 |
| GSSEAAAKPAP | 13,478 | KORV_Q9TTC1-Pro_3mutA |
| GGSGSS | 13,479 | MLVMS_P03355_3mut |
| EAAAKPAPGGG | 13,480 | PERV_Q4VFZ2_3mut |
| GGSPAPEAAAK | 13,481 | KORV_Q9TTC1_3mutA |
| GGSEAAAKGGG | 13,482 | AVIRE_P03360_3mutA |
| GGGGSEAAAKGGGGS | 13,483 | MLVMS_P03355_PLV919 |
| GSSGGGEAAAK | 13,484 | KORV_Q9TTC1-Pro_3mutA |
| EAAAKGGGPAP | 13,485 | WMSV_P03359_3mut |
| GSSPAP | 13,486 | XMRV6_A1Z651_3mutA |
| AEAAAKEAAAKEAAAKEA | 13,487 | SFV3L_P27401-Pro |
| AAKALEAEAAAKEAAAKE | | |
| AAAKEAAAKA | | |
| GGSEAAAKGSS | 13,488 | MLVMS_P03355_PLV919 |
| GSSGGSEAAAK | 13,489 | KORV_Q9TTC1-Pro_3mutA |
| GGSEAAAKGSS | 13,490 | KORV_Q9TTC1-Pro_3mutA |
| EAAAKGGG | 13,491 | AVIRE_P03360_3mutA |
| GSSGGSEAAAK | 13,492 | BAEVM_P10272_3mutA |
| GGGGSEAAAKGGGGS | 13,493 | KORV_Q9TTC1-Pro_3mut |
| PAPGSSEAAAK | 13,494 | MLVMS_P03355_3mut |
| PAPEAAAK | 13,495 | WMSV_P03359_3mut |
| PAPGGSGSS | 13,496 | PERV_Q4VFZ2_3mutA_WS |
| PAPGSS | 13,497 | BAEVM_P10272_3mut |
| PAPGGGGGS | 13,498 | MLVMS_P03355_3mut |
| EAAAKPAPGSS | 13,499 | MLVBM_Q7SVK7_3mutA_WS |
| GSSPAPGGS | 13,500 | MLVMS_P03355_PLV919 |
| GGSGSSEAAAK | 13,501 | MLVMS_P03355_3mut |
| GGGGGG | 13,502 | KORV_Q9TTC1-Pro_3mutA |
| EAAAKEAAAKEAAAKEAA | 13,503 | MLVBM_Q7SVK7_3mut |
| AK | | |
| GGSPAPGSS | 13,504 | MLVMS_P03355_PLV919 |
| PAPAPAPAPAP | 13,505 | MLVCB_P08361_3mut |
| GGSGSSPAP | 13,506 | WMSV_P03359_3mutA |
| EAAAKGGSGGG | 13,507 | PERV_Q4VFZ2_3mutA_WS |
| GSSGSSGSSGSSGSS | 13,508 | PERV_Q4VFZ2_3mut |
| AEAAAKEAAAKEAAAKEA | 13,509 | KORV_Q9TTC1_3mutA |
| AAKALEAEAAAKEAAAKE | | |
| AAAKEAAAKA | | |
| GSSGGGEAAAK | 13,510 | WMSV_P03359_3mutA |
| GSSGGSEAAAK | 13,511 | FLV_P10273_3mutA |
| GGGGGGGG | 13,512 | PERV_Q4VFZ2_3mut |
| PAPGGSEAAAK | 13,513 | FLV_P10273_3mutA |
| GGGGSSPAP | 13,514 | BAEVM_P10272_3mutA |
| PAPAPAPAP | 13,515 | WMSV_P03359_3mut |
| GGSEAAAKPAP | 13,516 | PERV_Q4VFZ2_3mut |
| PAPGGSGGG | 13,517 | BAEVM_P10272_3mutA |
| EAAAKEAAAKEAAAKEAA | 13,518 | MLVMS_P03355_3mut |
| AKEAAAKEAAAK | | |
| GGGGSGGGGSGGGGS | 13,519 | PERV_Q4VFZ2_3mut |
| GGSGGGPAP | 13,520 | PERV_Q4VFZ2_3mut |
| GGGPAPEAAAK | 13,521 | MLVFF_P26809_3mut |
| GGGGGSGSS | 13,522 | MLVMS_P03355_3mutA_WS |
| GSS | | MLVCB_P08361_3mut |
| GGGGGSPAP | 13,524 | MLVMS_P03355_PLV919 |
| GGSPAP | 13,525 | MLVAV_P03356_3mutA |
| GGGPAPGGS | 13,526 | KORV_Q9TTC1-Pro_3mutA |
| PAPGSSGGG | 13,527 | FLV_P10273_3mutA |
| PAPGSSGGG | 13,528 | WMSV_P03359_3mutA |
| PAPGGS | 13,529 | MLVBM_Q7SVK7_3mutA_WS |
| GGGEAAAKGSS | 13,530 | PERV_Q4VFZ2_3mutA_WS |
| GGSEAAAKGSS | 13,531 | MLVBM_Q7SVK7_3mutA_WS |
| PAPGGSEAAAK | 13,532 | MLVCB_P08361_3mut |
| GGSEAAAKGGG | 13,533 | XMRV6_A1Z651_3mutA |
| GGSGGGGSS | 13,534 | WMSV_P03359_3mut |
| GGGEAAAKPAP | 13,535 | KORV_Q9TTC1_3mutA |
| EAAAKGSS | 13,536 | KORV_Q9TTC1-Pro_3mut |
| PAPEAAAKGSS | 13,537 | MLVFF_P26809_3mut |
| GSAGSAAGSGEF | 13,538 | PERV_Q4VFZ2_3mut |
| EAAAKGGGGGS | 13,539 | WMSV_P03359_3mut |
| EAAAKGSSPAP | 13,540 | WMSV_P03359_3mutA |
| GGGGSEAAAKGGGGS | 13,541 | XMRV6_A1Z651_3mutA |
| GSSEAAAKPAP | 13,542 | SFV3L_P27401-Pro_2mutA |
| GGGGGG | 13,543 | PERV_Q4VFZ2_3mutA_WS |
| PAPGGS | 13,544 | BAEVM_P10272_3mut |
| PAP | | AVIRE_P03360_3mut |
| PAPAPAP | 13,546 | MLVBM_Q7SVK7_3mutA_WS |
| GGGG | 13,547 | PERV_Q4VFZ2_3mutA_WS |
| GSSGGSEAAAK | 13,548 | MLVBM_Q7SVK7_3mut |
| GGSGGGGSS | 13,549 | MLVFF_P26809_3mut |
| GGGGSSGGS | 13,550 | AVIRE_P03360_3mutA |
| GSSPAPGGG | 13,551 | PERV_Q4VFZ2_3mutA_WS |
| GGSEAAAKPAP | 13,552 | MLVMS_P03355_PLV919 |
| PAP | | KORV_Q9TTC1-Pro_3mut |
| GSSGGS | 13,554 | PERV_Q4VFZ2_3mut |
| GGGGG | 13,555 | PERV_Q4VFZ2_3mut |
| GSSGGGPAP | 13,556 | FLV_P10273_3mutA |
| GSSEAAAKGGG | 13,557 | KORV_Q9TTC1-Pro_3mut |
| EAAAKEAAAKEAAAKEAA | 13,558 | MLVCB_P08361_3mut |
| AKEAAAKEAAAK | | |
| GGSEAAAKPAP | 13,559 | MLVCB_P08361_3mut |
| PAPAPAPAPAPAP | 13,560 | BAEVM_P10272_3mutA |
| GGGGSEAAAKGGGGS | 13,561 | MLVMS_P03355_3mut |
| EAAAKPAPGSS | 13,562 | MLVMS_P03355_3mut |
| GSSGSSGSSGSSGSS | 13,563 | MLVBM_Q7SVK7_3mutA_WS |
| PAPEAAAKGSS | 13,564 | MLVAV_P03356_3mut |
| AEAAAKEAAAKEAAAKEA | 13,565 | AVIRE_P03360_3mut |
| AAKALEAEAAAKEAAAKE | | |
| AAAKEAAAKA | | |
| AEAAAKEAAAKEAAAKEA | 13,566 | PERV_Q4VFZ2_3mut |
| AAKALEAEAAAKEAAAKE | | |
| AAAKEAAAKA | | |
| GGSEAAAKGGG | 13,567 | PERV_Q4VFZ2_3mutA_WS |
| GGSGGGGSS | 13,568 | MLVFF_P26809_3mutA |
| PAPEAAAKGSS | 13,569 | MLVCB_P08361_3mut |
| GGG | | PERV_Q4VFZ2_3mutA_WS |
| GGSGGGEAAAK | 13,571 | MLVMS_P03355_3mut |
| EAAAKGGGGSS | 13,572 | WMSV_P03359_3mut |
| GSSPAPGGG | 13,573 | WMSV_P03359_3mutA |
| EAAAKGSSGGG | 13,574 | PERV_Q4VFZ2_3mut |
| GGSGGGEAAAK | 13,575 | PERV_Q4VFZ2_3mutA_WS |
| GGSGGSGGSGGSGGS | 13,576 | PERV_Q4VFZ2_3mutA_WS |
| EAAAKPAPGGS | 13,577 | PERV_Q4VFZ2_3mutA_WS |
| GGGGGSEAAAK | 13,578 | PERV_Q4VFZ2_3mutA_WS |
| GSSPAP | 13,579 | MLVFF_P26809_3mut |
| GGGEAAAKPAP | 13,580 | AVIRE_P03360_3mut |
| GSSGGSEAAAK | 13,581 | MLVMS_P03355_PLV919 |
| EAAAKPAPGGS | 13,582 | WMSV_P03359_3mutA |
| PAPGGG | 13,583 | KORV_Q9TTC1_3mutA |
| EAAAKGSSPAP | 13,584 | KORV_Q9TTC1-Pro_3mut |
| GSSPAPEAAAK | 13,585 | MLVFF_P26809_3mut |
| GGSGGGEAAAK | 13,586 | MLVFF_P26809_3mutA |
| GSSGSSGSS | 13,587 | WMSV_P03359_3mutA |
| EAAAKGGS | 13,588 | BAEVM_P10272_3mut |
| EAAAKPAPGGS | 13,589 | KORV_Q9TTC1_3mutA |
| EAAAKPAPGGS | 13,590 | BAEVM_P10272_3mutA |
| GSSGGGGGS | 13,591 | PERV_Q4VFZ2_3mut |
| PAPGGGGSS | 13,592 | PERV_Q4VFZ2_3mut |
| GSSGSSGSS | 13,593 | WMSV_P03359_3mut |
| EAAAKEAAAKEAAAKEAA | 13,594 | WMSV_P03359_3mut |
| AK | | |
| GGS | | AVIRE_P03360_3mut |
| EAAAKPAPGSS | 13,596 | MLVFF_P26809_3mut |
| EAAAKGGG | 13,597 | KORV_Q9TTC1_3mut |
| PAPGSSEAAAK | 13,598 | MLVMS_P03355_3mut |
| PAPGSSGGS | 13,599 | MLVMS_P03355_PLV919 |
| GSSPAPEAAAK | 13,600 | MLVMS_P03355_3mut |
| GSSGSSGSSGSSGSSGSS | 13,601 | WMSV_P03359_3mutA |
| GGGGS | 13,602 | BAEVM_P10272_3mut |
| GSSPAP | 13,603 | MLVMS_P03355_3mut |
| EAAAKGGGGSEAAAK | 13,604 | KORV_Q9TTC1-Pro_3mutA |
| EAAAKEAAAK | 13,605 | WMSV_P03359_3mutA |
| GGGGSSGGS | 13,606 | MLVCB_P08361_3mutA |
| PAPGGSEAAAK | 13,607 | BAEVM_P10272_3mut |
| EAAAKGGSPAP | 13,608 | MLVFF_P26809_3mut |
| GSSGGSGGG | 13,609 | MLVBM_Q7SVK7_3mutA_WS |
| GSSGGS | 13,610 | PERV_Q4VFZ2_3mut |
| PAPGGSGSS | 13,611 | PERV_Q4VFZ2_3mutA_WS |
| EAAAKGGSGSS | 13,612 | KORV_Q9TTC1-Pro_3mutA |
| PAPAP | 13,613 | MLVCB_P08361_3mut |
| EAAAKGSSPAP | 13,614 | PERV_Q4VFZ2_3mutA_WS |
| EAAAKPAPGGG | 13,615 | MLVMS_P03355_PLV919 |
| GGGGSGGGGSGGGGSGGG | 13,616 | MLVBM_Q7SVK7_3mut |
| GSGGGGSGGGGS | | |
| EAAAKGGGGSS | 13,617 | MLVMS_P03355_PLV919 |
| PAPEAAAK | 13,618 | PERV_Q4VFZ2_3mut |
| EAAAKPAPGSS | 13,619 | BAEVM_P10272_3mutA |
| GGSPAP | 13,620 | PERV_Q4VFZ2_3mutA_WS |
| GGSGGS | 13,621 | BAEVM_P10272_3mutA |
| PAPEAAAKGSS | 13,622 | KORV_Q9TTC1_3mut |
| PAPGSS | 13,623 | MLVMS_P03355_PLV919 |
| PAPAPAPAPAP | 13,624 | MLVAV_P03356_3mutA |
| GGG | | XMRV6_A1Z651_3mutA |
| GGGPAP | 13,626 | PERV_Q4VFZ2_3mutA_WS |
| GSSPAPEAAAK | 13,627 | KORV_Q9TTC1_3mutA |
| PAP | | BAEVM_P10272_3mutA |
| GGSPAP | 13,629 | BAEVM_P10272_3mutA |
| PAPEAAAKGGS | 13,630 | MLVMS_P03355_PLV919 |
| PAPGSSGGS | 13,631 | PERV_Q4VFZ2_3mutA_WS |
| PAPAPAPAPAPAP | 13,632 | PERV_Q4VFZ2_3mut |
| EAAAKEAAAKEAAAK | 13,633 | MLVCB_P08361_3mut |
| GGSGGSGGSGGSGGS | 13,634 | MLVMS_P03355_PLV919 |
| EAAAKPAPGGS | 13,635 | MLVMS_P03355_3mut |
| GGSGGS | 13,636 | MLVMS_P03355_PLV919 |
| EAAAKPAP | 13,637 | MLVMS_P03355_3mutA_WS |
| GGSEAAAK | 13,638 | XMRV6_A1Z651_3mutA |
| GGSGGG | 13,639 | KORV_Q9TTC1_3mut |
| GGSGGGEAAAK | 13,640 | PERV_Q4VFZ2_3mut |
| PAPEAAAKGGG | 13,641 | AVIRE_P03360 |
| PAPAP | 13,642 | PERV_Q4VFZ2_3mut |
| GSS | | KORV_Q9TTC1-Pro_3mutA |
| EAAAKGSSGGG | 13,644 | MLVAV_P03356_3mutA |
| GGSPAPGSS | 13,645 | MLVBM_Q7SVK7_3mutA_WS |
| PAPEAAAK | 13,646 | MLVAV_P03356_3mut |
| EAAAKGGSPAP | 13,647 | BAEVM_P10272_3mutA |
| PAPAPAPAP | 13,648 | WMSV_P03359_3mutA |
| PAPGGSEAAAK | 13,649 | MLVMS_P03355_3mut |
| GGSGGSGGSGGS | 13,650 | WMSV_P03359_3mut |
| GGGGGSGSS | 13,651 | XMRV6_A1Z651_3mut |
| PAPGGSGGG | 13,652 | KORV_Q9TTC1_3mutA |
| GGS | | MLVMS_P03355_3mut |
| EAAAK | 13,654 | WMSV_P03359_3mut |
| GGGEAAAKGSS | 13,655 | MLVBM_Q7SVK7_3mutA_WS |
| GGSPAPGSS | 13,656 | MLVCB_P08361_3mut |
| GGSEAAAKPAP | 13,657 | PERV_Q4VFZ2_3mut |
| GGGGSGGGGGGGGSGGGG | 13,658 | MLVCB_P08361_3mutA |
| SGGGGS | | |
| GGSGSS | 13,659 | BAEVM_P10272_3mutA |
| GGGEAAAKGSS | 13,660 | WMSV_P03359_3mutA |
| EAAAKGGSPAP | 13,661 | WMSV_P03359_3mut |
| GSSPAPEAAAK | 13,662 | MLVMS_P03355_3mut |
| GGSGGSGGSGGS | 13,663 | MLVMS_P03355_PLV919 |
| GSSPAPEAAAK | 13,664 | WMSV_P03359_3mut |
| GSSGSSGSSGSS | 13,665 | PERV_Q4VFZ2 |
| GGSGSSEAAAK | 13,666 | WMSV_P03359_3mutA |
| GGSGGG | 13,667 | MLVFF_P26809_3mut |
| GGSPAPGGG | 13,668 | MLVFF_P26809_3mut |
| GGSGGSGGS | 13,669 | BAEVM_P10272_3mutA |
| GGGGSSEAAAK | 13,670 | MLVBM_Q7SVK7_3mut |
| GGSPAPGSS | 13,671 | MLVMS_P03355_3mut |
| EAAAKPAPGSS | 13,672 | AVIRE_P03360_3mut |
| GGGGSSGGS | 13,673 | FLV_P10273_3mutA |
| GGSPAPEAAAK | 13,674 | PERV_Q4VFZ2_3mut |
| GGSEAAAK | 13,675 | MLVMS_P03355_3mutA_WS |
| GSSGSSGSSGSS | 13,676 | MLVCB_P08361_3mutA |
| EAAAKEAAAKEAAAKEAA | 13,677 | MLVMS_P03355_PLV919 |
| AKEAAAK | | |
| GGGGG | 13,678 | PERV_Q4VFZ2_3mut |
| GGSEAAAKGSS | 13,679 | MLVCB_P08361_3mutA |
| GSSGGG | 13,680 | MLVBM_Q7SVK7_3mutA_WS |
| PAPGSSGGG | 13,681 | KORV_Q9TTC1-Pro_3mutA |
| GGSGGS | 13,682 | BAEVM_P10272_3mut |
| EAAAKGGGGGS | 13,683 | MLVBM_Q7SVK7_3mutA_WS |
| GGSGSSPAP | 13,684 | MLVCB_P08361_3mut |
| PAPGSSGGG | 13,685 | KORV_Q9TTC1 |
| PAPGGSGGG | 13,686 | MLVMS_P03355_3mut |
| GGGG | 13,687 | WMSV_P03359_3mutA |
| EAAAKGGSPAP | 13,688 | MLVCB_P08361_3mut |
| GSSGSS | 13,689 | FLV_P10273_3mutA |
| GGSEAAAKPAP | 13,690 | SFV3L_P27401_2mut |
| EAAAKGSSGGS | 13,691 | MLVAV_P03356_3mutA |
| AEAAAKEAAAKEAAAKEA | 13,692 | MLVAV_P03356_3mutA |
| AAKALEAEAAAKEAAAKE | | |
| AAAKEAAAKA | | |
| EAAAKGGSGSS | 13,693 | PERV_Q4VFZ2_3mutA_WS |
| GGGGG | 13,694 | MLVCB_P08361_3mut |
| GGGEAAAK | 13,695 | BAEVM_P10272_3mut |
| GGSGGSGGSGGS | 13,696 | MLVCB_P08361_3mut |
| EAAAKEAAAKEAAAKEAA | 13,697 | PERV_Q4VFZ2 |
| AKEAAAKEAAAK | | |
| PAPAPAPAPAP | 13,698 | MLVMS_P03355_3mutA_WS |
| EAAAKEAAAK | 13,699 | XMRV6_A1Z651_3mut |
| GSSGGSEAAAK | 13,700 | PERV_Q4VFZ2_3mutA_WS |
| PAPGGSEAAAK | 13,701 | KORV_Q9TTC1-Pro_3mutA |
| EAAAKGGGPAP | 13,702 | MLVBM_Q7SVK7_3mutA_WS |
| PAPGGSGSS | 13,703 | PERV_Q4VFZ2 |
| SGSETPGTSESATPES | 13,704 | MLVMS_P03355_3mut |
| GGSGGS | 13,705 | MLVMS_P03355_PLV919 |
| EAAAKGGS | 13,706 | FLV_P10273_3mut |
| GGSPAPGSS | 13,707 | MLVMS_P03355_3mutA_WS |
| EAAAKEAAAKEAAAKEAA | 13,708 | FFV_O93209_2mut |
| AK | | |
| GSSGGSGGG | 13,709 | MLVMS_P03355_3mutA_WS |
| PAPGSSEAAAK | 13,710 | WMSV_P03359_3mut |
| PAPAPAPAPAPAP | 13,711 | KORV_Q9TTC1_3mutA |
| GGGGSS | 13,712 | BAEVM_P10272_3mut |
| GGGGSEAAAKGGGGS | 13,713 | AVIRE_P03360_3mut |
| GSSPAPEAAAK | 13,714 | KORV_Q9TTC1-Pro_3mutA |
| PAPEAAAKGGG | 13,715 | MLVBM_Q7SVK7_3mut |
| EAAAKEAAAK | 13,716 | WMSV_P03359_3mut |
| EAAAK | 13,717 | SFV3L_P27401-Pro_2mutA |
| GSSGGSGGG | 13,718 | XMRV6_A1Z651_3mutA |
| GGGEAAAKPAP | 13,719 | WMSV_P03359_3mutA |
| GGSGGS | 13,720 | MLVFF_P26809_3mutA |
| EAAAKEAAAKEAAAKEAA | 13,721 | FOAMV_P14350_2mutA |
| AKEAAAKEAAAK | | |
| GGGGG | 13,722 | MLVAV_P03356_3mutA |
| GSSGGSEAAAK | 13,723 | BAEVM_P10272_3mut |
| SGGSSGGSSGSETPGTSE | 13,724 | SFV1_P23074 |
| SATPESSGGSSGGSS | | |
| GGSGGGPAP | 13,725 | MLVCB_P08361_3mut |
| GGSGSS | 13,726 | PERV_Q4VFZ2_3mut |
| SGSETPGTSESATPES | 13,727 | MLVFF_P26809_3mut |
| EAAAKGGSPAP | 13,728 | MLVMS_P03355_3mut |
| PAPAP | 13,729 | PERV_Q4VFZ2_3mut |
| AEAAAKEAAAKEAAAKEA | 13,730 | MLVBM_Q7SVK7_3mut |
| AAKALEAEAAAKEAAAKE | | |
| AAAKEAAAKA | | |
| GGGGGS | 13,731 | BAEVM_P10272_3mutA |
| EAAAKEAAAK | 13,732 | AVIRE_P03360_3mut |
| GSSGGSEAAAK | 13,733 | PERV_Q4VFZ2_3mut |
| GGGEAAAK | 13,734 | WMSV_P03359_3mut |
| GSSGGGEAAAK | 13,735 | AVIRE_P03360_3mutA |
| GGG | | XMRV6_A1Z651_3mut |
| GGGGSEAAAKGGGGS | 13,737 | BAEVM_P10272_3mut |
| GGGG | 13,738 | MLVMS_P03355_3mut |
| GGSGGS | 13,739 | MLVMS_P03355_3mutA_WS |
| GGSGGGGSS | 13,740 | MLVBM_Q7SVK7_3mutA_WS |
| GSSPAPGGS | 13,741 | PERV_Q4VFZ2_3mut |
| GSSPAPEAAAK | 13,742 | PERV_Q4VFZ2_3mutA_WS |
| EAAAKGGS | 13,743 | WMSV_P03359_3mut |
| GGSGGSGGSGGS | 13,744 | PERV_Q4VFZ2_3mut |
| GGGGSSEAAAK | 13,745 | KORV_Q9TTC1-Pro_3mut |
| PAPAPAPAPAPAP | 13,746 | MLVAV_P03356_3mut |
| EAAAKGSSGGG | 13,747 | MLVMS_P03355_PLV919 |
| GGGGG | 13,748 | MLVBM_Q7SVK7_3mutA_WS |
| AEAAAKEAAAKEAAAKEA | 13,749 | FFV_O93209_2mutA |
| AAKALEAEAAAKEAAAKE | | |
| AAAKEAAAKA | | |
| SGGSSGGSSGSETPGTSE | 13,750 | KORV_Q9TTC1-Pro_3mut |
| SATPESSGGSSGGSS | | |
| GGSPAPGGG | 13,751 | MLVMS_P03355_3mutA_WS |
| GGGEAAAKGGS | 13,752 | MLVMS_P03355_3mut |
| GGGEAAAK | 13,753 | PERV_Q4VFZ2_3mut |
| PAPEAAAKGGG | 13,754 | MLVMS_P03355_3mut |
| GSSGSSGSSGSSGSSGSS | 13,755 | BAEVM_P10272_3mutA |
| AEAAAKEAAAKEAAAKEA | 13,756 | GALV_P21414_3mutA |
| AAKALEAEAAAKEAAAKE | | |
| AAAKEAAAKA | | |
| EAAAKGGSPAP | 13,757 | FFV_O93209-Pro |
| EAAAKEAAAK | 13,758 | MLVFF_P26809_3mut |
| GGGGSGGGGSGGGGSGGG | 13,759 | PERV_Q4VFZ2_3mutA_WS |
| GSGGGGSGGGGS | | |
| GGSGGSGGSGGS | 13,760 | MLVAV_P03356_3mutA |
| EAAAKEAAAKEAAAKEAA | 13,761 | SFV3L_P27401_2mutA |
| AKEAAAK | | |
| GSSGSSGSSGSSGSSGSS | 13,762 | BAEVM_P10272_3mut |
| GGGGS | 13,763 | MLVMS_P03355_PLV919 |
| AEAAAKEAAAKEAAAKEA | 13,764 | SFV1_P23074 |
| AAKALEAEAAAKEAAAKE | | |
| AAAKEAAAKA | | |
| GGGGSGGGGS | 13,765 | KORV_Q9TTC1-Pro_3mutA |
| GGGGSGGGGS | 13,766 | MLVMS_P03355_3mut |
| GGSGSS | 13,767 | KORV_Q9TTC1_3mutA |
| GSSPAPGGG | 13,768 | PERV_Q4VFZ2_3mut |
| GSSGGSPAP | 13,769 | PERV_Q4VFZ2_3mutA_WS |
| PAPGGS | 13,770 | PERV_Q4VFZ2_3mutA_WS |
| GGSPAPEAAAK | 13,771 | FOAMV_P14350_2mutA |
| GGGPAPGGS | 13,772 | SFV3L_P27401_2mut |
| PAPGSSGGG | 13,773 | MLVCB_P08361_3mut |
| GSSGGGEAAAK | 13,774 | AVIRE_P03360_3mut |
| GSSGGG | 13,775 | XMRV6_A1Z651_3mut |
| GSSGSS | 13,776 | PERV_Q4VFZ2_3mut |
| GSSGGG | 13,777 | MLVAV_P03356_3mutA |
| PAPGGGGGS | 13,778 | PERV_Q4VFZ2_3mut |
| GSSEAAAK | 13,779 | MLVMS_P03355_3mut |
| PAPGGG | 13,780 | FLV_P10273_3mutA |
| GGGGSGGGGS | 13,781 | PERV_Q4VFZ2_3mut |
| GSSGGS | 13,782 | MLVMS_P03355_PLV919 |
| GGGGSGGGGS | 13,783 | SFV3L_P27401_2mut |
| EAAAKGGSGSS | 13,784 | FLV_P10273_3mutA |
| GSSEAAAKGGS | 13,785 | MLVMS_P03355_3mutA_WS |
| PAPGSSEAAAK | 13,786 | SFV3L_P27401_2mutA |
| GGGGSGGGGS | 13,787 | SFV3L_P27401-Pro_2mutA |
| PAPGSSEAAAK | 13,788 | PERV_Q4VFZ2_3mut |
| PAPGSSEAAAK | 13,789 | PERV_Q4VFZ2 |
| GGSPAPGGG | 13,790 | AVIRE_P03360_3mut |
| GGGGGS | 13,791 | PERV_Q4VFZ2_3mutA_WS |
| GGGGSSGGS | 13,792 | PERV_Q4VFZ2_3mut |
| PAPAPAPAP | 13,793 | AVIRE_P03360_3mutA |
| GGSGGS | 13,794 | WMSV_P03359_3mutA |
| GGGPAPGGS | 13,795 | PERV_Q4VFZ2_3mut |
| GGSGGSGGSGGSGGS | 13,796 | MLVMS_P03355_PLV919 |
| GGSGGG | 13,797 | PERV_Q4VFZ2_3mut |
| EAAAKEAAAK | 13,798 | SFV3L_P27401_2mut |
| PAPGSS | 13,799 | XMRV6_A1Z651_3mut |
| GSSEAAAK | 13,800 | MLVFF_P26809_3mut |
| GGSPAPGGG | 13,801 | MLVMS_P03355_3mut |
| EAAAKGGG | 13,802 | WMSV_P03359_3mutA |
| GSSEAAAKGGS | 13,803 | PERV_Q4VFZ2_3mutA_WS |
| GSSGGSPAP | 13,804 | FFV_O93209 |
| GGGGGS | 13,805 | KORV_Q9TTC1-Pro_3mut |
| GSSGGG | 13,806 | MLVCB_P08361_3mut |
| GSSGSS | 13,807 | MLVCB_P08361_3mutA |
| GGSEAAAKPAP | 13,808 | BAEVM_P10272_3mut |
| EAAAKGGGGSS | 13,809 | MLVCB_P08361_3mut |
| EAAAKPAPGGS | 13,810 | KORV_Q9TTC1-Pro_3mutA |
| GSSGSSGSSGSSGSS | 13,811 | MLVAV_P03356_3mutA |
| GGGGSEAAAKGGGGS | 13,812 | PERV_Q4VFZ2_3mutA_WS |
| GGSGSS | 13,813 | KORV_Q9TTC1-Pro_3mut |
| GSS | | SFV3L_P27401-Pro_2mutA |
| PAPAP | 13,815 | BAEVM_P10272_3mut |
| EAAAKPAP | 13,816 | BAEVM_P10272 |
| EAAAKEAAAKEAAAKEAA | 13,817 | KORV_Q9TTC1-Pro_3mut |
| AKEAAAK | | |
| GGGGGGG | 13,818 | PERV_Q4VFZ2_3mutA_WS |
| GGGGS | 13,819 | MLVMS_P03355_3mut |
| GSSGGG | 13,820 | FLV_P10273_3mutA |
| PAPAPAPAPAP | 13,821 | FLV_P10273_3mut |
| EAAAKEAAAKEAAAK | 13,822 | WMSV_P03359_3mutA |
| GSSGGS | 13,823 | MLVBM_Q7SVK7_3mutA_WS |
| EAAAKPAPGGG | 13,824 | MLVMS_P03355_3mut |
| GSSPAPGGS | 13,825 | WMSV_P03359_3mut |
| PAPGSSGGG | 13,826 | PERV_Q4VFZ2_3mutA_WS |
| GSSGGG | 13,827 | AVIRE_P03360_3mutA |
| PAPGGSGSS | 13,828 | MLVFF_P26809_3mut |
| PAPGSS | 13,829 | PERV_Q4VFZ2_3mut |
| GGGGGSGSS | 13,830 | WMSV_P03359_3mutA |
| EAAAKGGGGSS | 13,831 | MLVBM_Q7SVK7_3mutA_WS |
| GGGGGGG | 13,832 | BAEVM_P10272_3mut |
| PAPEAAAKGSS | 13,833 | MLVMS_P03355_3mut |
| GGSGGGEAAAK | 13,834 | MLVMS_P03355_PLV919 |
| EAAAKGGGGGS | 13,835 | MLVCB_P08361_3mut |
| PAPGGS | 13,836 | KORV_Q9TTC1-Pro_3mut |
| GGGG | 13,837 | FLV_P10273_3mutA |
| EAAAKGGSGSS | 13,838 | MLVBM_Q7SVK7_3mutA_WS |
| GGGGSSGGS | 13,839 | MLVMS_P03355_3mutA_WS |
| GGGGGGGG | 13,840 | WMSV_P03359_3mut |
| GGSGSSGGG | 13,841 | MLVMS_P03355_PLV919 |
| GSSEAAAKGGS | 13,842 | KORV_Q9TTC1-Pro_3mutA |
| EAAAKPAPGSS | 13,843 | MLVCB_P08361_3mut |
| GGSPAPGSS | 13,844 | KORV_Q9TTC1_3mutA |
| PAPGSSGGG | 13,845 | BAEVM_P10272_3mut |
| EAAAKPAPGSS | 13,846 | WMSV_P03359_3mut |
| GGSPAPEAAAK | 13,847 | XMRV6_A1Z651_3mutA |
| GSSPAP | 13,848 | FLV_P10273_3mutA |
| GSS | | BAEVM_P10272_3mutA |
| EAAAKPAPGGS | 13,850 | FLV_P10273_3mutA |
| GGSGSSPAP | 13,851 | FLV_P10273_3mutA |
| PAPGSSGGS | 13,852 | MLVMS_P03355_3mut |
| GSAGSAAGSGEF | 13,853 | PERV_Q4VFZ2_3mutA_WS |
| GSSGGSEAAAK | 13,854 | KORV_Q9TTC1_3mutA |
| GSSGGS | 13,855 | MLVMS_P03355_3mutA_WS |
| EAAAKGGGGSEAAAK | 13,856 | SFV3L_P27401_2mut |
| GSSGGS | 13,857 | PERV_Q4VFZ2_3mutA_WS |
| GGSPAPEAAAK | 13,858 | FLV_P10273_3mut |
| GGSEAAAKGSS | 13,859 | PERV_Q4VFZ2_3mutA_WS |
| GSSPAPEAAAK | 13,860 | PERV_Q4VFZ2_3mutA_WS |
| GGSGSSGGG | 13,861 | PERV_Q4VFZ2_3mut |
| GGGG | 13,862 | AVIRE_P03360_3mutA |
| GGSEAAAKPAP | 13,863 | WMSV_P03359_3mut |
| GSSGGSPAP | 13,864 | MLVAV_P03356_3mutA |
| GSSGGSEAAAK | 13,865 | MLVMS_P03355_3mut |
| PAPEAAAKGGS | 13,866 | KORV_Q9TTC1-Pro_3mut |
| GGSPAP | 13,867 | PERV_Q4VFZ2_3mutA_WS |
| GGSEAAAK | 13,868 | MLVAV_P03356_3mutA |
| EAAAKGGGGSEAAAK | 13,869 | KORV_Q9TTC1-Pro_3mut |
| SGGSSGGSSGSETPGTSE | 13,870 | MLVMS_P03355_PLV919 |
| SATPESSGGSSGGSS | | |
| GSSEAAAK | 13,871 | KORV_Q9TTC1_3mutA |
| GGG | | AVIRE_P03360 |
| GGSEAAAKGSS | 13,873 | MLVBM_Q7SVK7_3mut |
| GGSEAAAKGSS | 13,874 | MLVMS_P03355_3mut |
| GGSPAPEAAAK | 13,875 | MLVCB_P08361_3mut |
| GGSGGGEAAAK | 13,876 | MLVCB_P08361_3mut |
| GGSEAAAKPAP | 13,877 | MLVMS_P03355_3mutA_WS |
| EAAAKGGSGSS | 13,878 | KORV_Q9TTC1-Pro_3mut |
| GGGEAAAKGGS | 13,879 | MLVCB_P08361_3mut |
| EAAAKGGGGSEAAAK | 13,880 | FLV_P10273_3mutA |
| GGSPAP | 13,881 | MLVFF_P26809_3mut |
| GGGGSSGGS | 13,882 | XMRV6_A1Z651_3mutA |
| PAP | | MLVCB_P08361_3mut |
| GGS | | SFV3L_P27401-Pro_2mutA |
| GGGGSGGGGS | 13,885 | MLVMS_P03355_3mut |
| GGGEAAAKGGS | 13,886 | MLVAV_P03356_3mutA |
| GSSGSSGSSGSSGSSGSS | 13,887 | MLVMS_P03355_PLV919 |
| PAPGSS | 13,888 | MLVCB_P08361_3mut |
| GGSGGSGGS | 13,889 | MLVMS_P03355_PLV919 |
| PAPGGSGGG | 13,890 | FLV_P10273_3mutA |
| GGGGSGGGGSGGGGS | 13,891 | FLV_P10273_3mut |
| GGSGSSGGG | 13,892 | KORV_Q9TTC1-Pro_3mutA |
| GGSGGSGGS | 13,893 | GALV_P21414_3mutA |
| GGGEAAAKGGS | 13,894 | WMSV_P03359_3mut |
| SGSETPGTSESATPES | 13,895 | KORV_Q9TTC1_3mutA |
| EAAAKGGGGGS | 13,896 | KORV_Q9TTC1-Pro_3mut |
| EAAAKGSSPAP | 13,897 | BAEVM_P10272_3mut |
| GGGG | 13,898 | MLVCB_P08361_3mut |
| GGGGSGGGGSGGGGSGGG | 13,899 | MLVBM_Q7SVK7_3mut |
| GSGGGGS | | |
| GSSGGSGGG | 13,900 | MLVMS_P03355_PLV919 |
| GGSGSS | 13,901 | MLVFF_P26809_3mut |
| EAAAKGGS | 13,902 | AVIRE_P03360_3mutA |
| GSSEAAAKGGS | 13,903 | MLVBM_Q7SVK7_3mutA_WS |
| EAAAKPAPGGG | 13,904 | WMSV_P03359_3mut |
| PAPGSSGGG | 13,905 | MLVCB_P08361_3mutA |
| GGGGSSEAAAK | 13,906 | KORV_Q9TTC1-Pro_3mutA |
| GSSEAAAKPAP | 13,907 | BAEVM_P10272_3mutA |
| PAPGGGEAAAK | 13,908 | MLVBM_Q7SVK7_3mutA_WS |
| GGSGGGEAAAK | 13,909 | MLVCB_P08361_3mutA |
| GGGGSGGGGGGGGSGGGG | 13,910 | FFV_O93209 |
| SGGGGSGGGGS | | |
| EAAAKGGGGGS | 13,911 | GALV_P21414_3mutA |
| GGSPAPGGG | 13,912 | MLVMS_P03355_3mut |
| GSSGSSGSS | 13,913 | FLV_P10273_3mutA |
| EAAAK | 13,914 | MLVBM_Q7SVK7_3mut |
| GGGGSSGGS | 13,915 | MLVMS_P03355_3mut |
| GGSGSSPAP | 13,916 | PERV_Q4VFZ2_3mut |
| EAAAKEAAAKEAAAKEAA | 13,917 | BAEVM_P10272_3mut |
| AK | | |
| GGGPAPGSS | 13,918 | MLVMS_P03355_3mut |
| GSSPAPGGS | 13,919 | PERV_Q4VFZ2_3mutA_WS |
| PAPAP | 13,920 | FLV_P10273_3mutA |
| PAPAPAPAP | 13,921 | PERV_Q4VFZ2_3mut |
| GGGGGSEAAAK | 13,922 | GALV_P21414_3mutA |
| GGGGGSGSS | 13,923 | BAEVM_P10272_3mutA |
| GGGEAAAKGSS | 13,924 | KORV_Q9TTC1_3mutA |
| GGGGGSPAP | 13,925 | AVIRE_P03360_3mut |
| GGGGGSEAAAK | 13,926 | SFV3L_P27401_2mutA |
| GGS | | KORV_Q9TTC1_3mutA |
| GGGGGGG | 13,928 | PERV_Q4VFZ2_3mut |
| SGSETPGTSESATPES | 13,929 | SFV3L_P27401_2mutA |
| EAAAKGGSGGG | 13,930 | MLVMS_P03355_3mut |
| GGGGS | 13,931 | MLVFF_P26809_3mut |
| EAAAKGSSGGG | 13,932 | BAEVM_P10272_3mut |
| EAAAKPAPGGS | 13,933 | MLVF5_P26810_3mutA |
| SGGSSGGSSGSETPGTSE | 13,934 | SFV3L_P27401_2mutA |
| SATPESSGGSSGGSS | | |
| GGSPAPGGG | 13,935 | WMSV_P03359_3mutA |
| GSAGSAAGSGEF | 13,936 | MLVFF_P26809_3mut |
| GGGGSSGGS | 13,937 | MLVMS_P03355_3mutA_WS |
| GGGGGGG | 13,938 | MLVCB_P08361_3mut |
| GSSEAAAK | 13,939 | WMSV_P03359_3mut |
| PAPGSS | 13,940 | FLV_P10273_3mutA |
| GSSGGG | 13,941 | PERV_Q4VFZ2_3mutA_WS |
| PAPGGG | 13,942 | MLVFF_P26809_3mut |
| GGGGGSPAP | 13,943 | MLVMS_P03355_3mut |
| GGSEAAAK | 13,944 | XMRV6_A1Z651_3mut |
| GSSGGG | 13,945 | PERV_Q4VFZ2_3mut |
| GGSGGSGGSGGS | 13,946 | MLVMS_P03355_3mut |
| PAPAP | 13,947 | AVIRE_P03360_3mut |
| GGSEAAAK | 13,948 | PERV_Q4VFZ2_3mut |
| GGGGS | 13,949 | MLVMS_P03355_PLV919 |
| GGGG | 13,950 | BAEVM_P10272_3mutA |
| EAAAKGGGGSS | 13,951 | MLVCB_P08361_3mutA |
| EAAAKEAAAKEAAAK | 13,952 | GALV_P21414_3mutA |
| PAPGGGEAAAK | 13,953 | KORV_Q9TTC1 |
| EAAAKGGSPAP | 13,954 | MLVMS_P03355_3mut |
| GGSGSSEAAAK | 13,955 | MLVMS_P03355_3mut |
| GGSPAPEAAAK | 13,956 | FLV_P10273_3mutA |
| GGGGGGG | 13,957 | PERV_Q4VFZ2_3mut |
| EAAAKEAAAKEAAAKEAA | 13,958 | SFV1_P23074_2mutA |
| AKEAAAKEAAAK | | |
| EAAAKGSSGGS | 13,959 | MLVMS_P03355_3mut |
| GSSEAAAKPAP | 13,960 | MLVFF_P26809_3mut |
| GGGGSS | 13,961 | FLV_P10273_3mutA |
| EAAAKGGSGGG | 13,962 | AVIRE_P03360_3mutA |
| GGSGGS | 13,963 | PERV_Q4VFZ2_3mutA_WS |
| GGGGGSPAP | 13,964 | AVIRE_P03360_3mutA |
| EAAAKEAAAKEAAAK | 13,965 | XMRV6_A1Z651_3mut |
| PAPEAAAKGGS | 13,966 | FLV_P10273_3mutA |
| GSSGGSEAAAK | 13,967 | MLVCB_P08361_3mut |
| EAAAKGGSGGG | 13,968 | MLVMS_P03355 |
| GGSGGGPAP | 13,969 | MLVMS_P03355_3mut |
| GGS | | XMRV6_A1Z651_3mut |
| GGSEAAAKPAP | 13,971 | MLVFF_P26809_3mut |
| EAAAKGGG | 13,972 | MLVMS_P03355_PLV919 |
| GSSGSSGSSGSS | 13,973 | WMSV_P03359_3mut |
| GGSGSSPAP | 13,974 | PERV_Q4VFZ2_3mut |
| GGGEAAAK | 13,975 | MLVMS_P03355_3mutA_WS |
| GSSPAPGGS | 13,976 | KORV_Q9TTC1-Pro_3mutA |
| GSSEAAAKGGG | 13,977 | SFV3L_P27401_2mut |
| EAAAKPAPGGS | 13,978 | MLVCB_P08361_3mut |
| GGSGGGEAAAK | 13,979 | PERV_Q4VFZ2 |
| GGSGSS | 13,980 | MLVCB_P08361_3mut |
| GGSGGGEAAAK | 13,981 | MLVBM_Q7SVK7_3mutA_WS |
| GGSGGSGGSGGSGGSGGS | 13,982 | FLV_P10273_3mut |
| PAPEAAAKGSS | 13,983 | MLVMS_P03355_3mut |
| EAAAKGSSGGS | 13,984 | WMSV_P03359_3mutA |
| GGSGSSEAAAK | 13,985 | MLVCB_P08361_3mut |
| GGSGSSEAAAK | 13,986 | KORV_Q9TTC1_3mutA |
| GSSGGSGGG | 13,987 | MLVMS_P03355_PLV919 |
| EAAAKGGSGGG | 13,988 | SFV3L_P27401-Pro_2mutA |
| GGSGGS | 13,989 | AVIRE_P03360_3mutA |
| GSAGSAAGSGEF | 13,990 | MLVMS_P03355_PLV919 |
| GGSGSS | 13,991 | GALV_P21414_3mutA |
| GGGG | 13,992 | MLVFF_P26809_3mutA |
| GGGGSGGGGSGGGGSGGG | 13,993 | WMSV_P03359_3mut |
| GS | | |
| SGSETPGTSESATPES | 13,994 | BAEVM_P10272_3mut |
| EAAAKEAAAKEAAAKEAA | 13,995 | FOAMV_P14350_2mutA |
| AK | | |
| GGGEAAAKGGS | 13,996 | FLV_P10273_3mutA |
| GSSGGSEAAAK | 13,997 | MLVFF_P26809_3mut |
| EAAAKGGGGSS | 13,998 | MLVAV_P03356_3mut |
| PAPGGSEAAAK | 13,999 | KORV_Q9TTC1-Pro_3mut |
| EAAAK | 14,000 | XMRV6_A1Z651_3mut |
| GSSGSSGSSGSSGSSGSS | 14,001 | PERV_Q4VFZ2_3mut |
| GGGG | 14,002 | MLVCB_P08361_3mutA |
| GSSGSS | 14,003 | WMSV_P03359_3mutA |
| GSSGGSPAP | 14,004 | AVIRE_P03360_3mut |
| GGSGGSGGS | 14,005 | MLVCB_P08361_3mut |
| EAAAKGGGPAP | 14,006 | FLV_P10273_3mutA |
| GGGGSGGGGS | 14,007 | MLVCB_P08361_3mut |
| GGSEAAAKGSS | 14,008 | PERV_Q4VFZ2_3mutA_WS |
| EAAAKEAAAKEAAAKEAA | 14,009 | SFV3L_P27401_2mutA |
| AKEAAAKEAAAK | | |
| GGSGSSEAAAK | 14,010 | PERV_Q4VFZ2_3mutA_WS |
| EAAAKEAAAKEAAAKEAA | 14,011 | SFV3L_P27401-Pro_2mutA |
| AK | | |
| GSSEAAAKGGS | 14,012 | FLV_P10273_3mutA |
| GGSGSS | 14,013 | PERV_Q4VFZ2 |
| GGSGSSEAAAK | 14,014 | SFV3L_P27401-Pro_2mutA |
| GSSGSSGSS | 14,015 | XMRV6_A1Z651_3mutA |
| EAAAKGSSPAP | 14,016 | KORV_Q9TTC1_3mutA |
| EAAAKPAP | 14,017 | FLV_P10273_3mutA |
| GGSGSSEAAAK | 14,018 | KORV_Q9TTC1-Pro_3mut |
| GGGGSGGGGSGGGGSGGG | 14,019 | KORV_Q9TTC1_3mutA |
| GSGGGGSGGGGS | | |
| GGGGSGGGGSGGGGS | 14,020 | KORV_Q9TTC1-Pro_3mutA |
| GGGGGGG | 14,021 | FLV_P10273_3mut |
| EAAAKGSS | 14,022 | WMSV_P03359_3mut |
| EAAAKGGGPAP | 14,023 | MLVCB_P08361_3mut |
| GSSGSS | 14,024 | MLVBM_Q7SVK7_3mutA_WS |
| EAAAKGGGGGS | 14,025 | MLVFF_P26809_3mut |
| GGSGGGEAAAK | 14,026 | FLV_P10273_3mutA |
| PAPGSS | 14,027 | MLVFF_P26809_3mutA |
| PAPGSS | 14,028 | BAEVM_P10272_3mutA |
| GGSPAPGSS | 14,029 | AVIRE_P03360_3mut |
| GGGGSSEAAAK | 14,030 | MLVMS_P03355_3mut |
| GSSGGGGGS | 14,031 | FFV_O93209-Pro |
| EAAAKGSSPAP | 14,032 | PERV_Q4VFZ2_3mut |
| GSSPAPGGS | 14,033 | PERV_Q4VFZ2_3mut |
| GGGGGG | 14,034 | BAEVM_P10272_3mut |
| EAAAKGGGGSS | 14,035 | PERV_Q4VFZ2_3mutA_WS |
| PAPGGSEAAAK | 14,036 | KORV_Q9TTC1_3mutA |
| SGGSSGGSSGSETPGTSE | 14,037 | MLVMS_P03355_3mutA_WS |
| SATPESSGGSSGGSS | | |
| GSSGSSGSSGSS | 14,038 | MLVMS_P03355_3mut |
| EAAAKGSSGGG | 14,039 | MLVMS_P03355_PLV919 |
| GGSEAAAKPAP | 14,040 | AVIRE_P03360_3mutA |
| GSSGSSGSSGSSGSS | 14,041 | WMSV_P03359_3mutA |
| GGGEAAAKPAP | 14,042 | FLV_P10273_3mutA |
| PAPGSSGGG | 14,043 | KORV_Q9TTC1_3mutA |
| GSSGSS | 14,044 | MLVMS_P03355_3mutA_WS |
| PAPEAAAK | 14,045 | BAEVM_P10272_3mut |
| GGGPAPGSS | 14,046 | PERV_Q4VFZ2 |
| GSSGGSPAP | 14,047 | MLVFF_P26809_3mut |
| GGGGSS | 14,048 | SFV3L_P27401_2mut |
| PAPEAAAKGSS | 14,049 | SFV3L_P27401_2mut |
| GGSGGGPAP | 14,050 | XMRV6_A1Z651_3mutA |
| PAPGGS | 14,051 | BAEVM_P10272_3mutA |
| EAAAKGGGGGS | 14,052 | AVIRE_P03360_3mut |
| GSSGGSPAP | 14,053 | KORV_Q9TTC1-Pro_3mutA |
| GSSGGGGGS | 14,054 | WMSV_P03359_3mut |
| GGGEAAAKGGS | 14,055 | AVIRE_P03360_3mut |
| GGGEAAAKGSS | 14,056 | BAEVM_P10272_3mut |
| PAPEAAAKGSS | 14,057 | MLVAV_P03356_3mutA |
| GSSGSSGSSGSSGSS | 14,058 | MLVCB_P08361_3mut |
| GGSPAPGSS | 14,059 | FLV_P10273_3mutA |
| EAAAKGSSPAP | 14,060 | BAEVM_P10272_3mutA |
| GGSGGSGGSGGSGGSGGS | 14,061 | PERV_Q4VFZ2 |
| GGGGSSEAAAK | 14,062 | FLV_P10273_3mutA |
| GGGGSSPAP | 14,063 | FFV_O93209 |
| GSSGGSPAP | 14,064 | MLVMS_P03355_3mut |
| GGGPAPGSS | 14,065 | MLVMS_P03355_PLV919 |
| PAPGSSGGS | 14,066 | PERV_Q4VFZ2_3mut |
| GGGGGSPAP | 14,067 | MLVFF_P26809_3mut |
| SGSETPGTSESATPES | 14,068 | MLVMS_P03355_3mutA_WS |
| GSSGSSGSSGSSGSS | 14,069 | KORV_Q9TTC1_3mutA |
| GSSPAPGGG | 14,070 | WMSV_P03359_3mut |
| PAPAPAPAPAPAP | 14,071 | SFV3L_P27401_2mutA |
| GGGPAPGGS | 14,072 | MLVMS_P03355_3mut |
| PAPGGSEAAAK | 14,073 | WMSV_P03359_3mut |
| GGGGSSEAAAK | 14,074 | FFV_O93209-Pro |
| GGSPAPGGG | 14,075 | FLV_P10273_3mutA |
| GSSPAPEAAAK | 14,076 | AVIRE_P03360_3mut |
| GGGEAAAK | 14,077 | FLV_P10273_3mutA |
| PAPEAAAKGGG | 14,078 | MLVCB_P08361_3mut |
| GGSPAPGGG | 14,079 | MLVCB_P08361_3mut |
| GGSGGGGSS | 14,080 | BAEVM_P10272_3mutA |
| GSSPAPEAAAK | 14,081 | MLVCB_P08361_3mut |
| GGSPAPGGG | 14,082 | KORV_Q9TTC1-Pro_3mutA |
| PAPGGSGSS | 14,083 | KORV_Q9TTC1_3mutA |
| GSSPAP | 14,084 | KORV_Q9TTC1-Pro_3mutA |
| SGSETPGTSESATPES | 14,085 | MLVMS_P03355 |
| GSSGSSGSS | 14,086 | MLVAV_P03356_3mutA |
| PAPGSSGGS | 14,087 | PERV_Q4VFZ2_3mutA_WS |
| PAPGGS | 14,088 | KORV_Q9TTC1-Pro_3mutA |
| PAPEAAAKGGG | 14,089 | SFV3L_P27401-Pro_2mutA |
| GGSGGSGGS | 14,090 | BAEVM_P10272_3mut |
| PAPGGS | 14,091 | MLVFF_P26809_3mut |
| GSSGGSPAP | 14,092 | MLVMS_P03355_PLV919 |
| GSSGGGGGS | 14,093 | FLV_P10273_3mutA |
| GGGGGSPAP | 14,094 | KORV_Q9TTC1-Pro_3mut |
| EAAAKPAPGSS | 14,095 | SFV3L_P27401-Pro_2mutA |
| EAAAKGGSPAP | 14,096 | KORV_Q9TTC1-Pro |
| GGGPAPEAAAK | 14,097 | MLVMS_P03355_PLV919 |
| GGSEAAAKGSS | 14,098 | MLVMS_P03355 |
| PAPEAAAKGSS | 14,099 | KORV_Q9TTC1_3mutA |
| PAPEAAAKGGS | 14,100 | WMSV_P03359_3mutA |
| GSSGGG | 14,101 | PERV_Q4VFZ2_3mutA_WS |
| EAAAKGGGGSS | 14,102 | MLVMS_P03355_PLV919 |
| EAAAKGGSPAP | 14,103 | AVIRE_P03360_3mutA |
| GGGGSSGGS | 14,104 | MLVMS_P03355_PLV919 |
| PAPEAAAKGSS | 14,105 | PERV_Q4VFZ2_3mutA_WS |
| EAAAKGGGGGS | 14,106 | BAEVM_P10272_3mut |
| GSSGGGGGS | 14,107 | MLVMS_P03355_3mut |
| PAPAPAPAP | 14,108 | KORV_Q9TTC1_3mutA |
| GGSGGSGGSGGS | 14,109 | MLVAV_P03356_3mut |
| PAPAPAPAP | 14,110 | SFV3L_P27401_2mut |
| GSSEAAAKPAP | 14,111 | MLVMS_P03355_3mut |
| GGSGGGEAAAK | 14,112 | SFV3L_P27401_2mutA |
| GSSGGSGGG | 14,113 | MLVMS_P03355_3mutA_WS |
| GGGGGSPAP | 14,114 | MLVCB_P08361_3mutA |
| GGGEAAAKGSS | 14,115 | XMRV6_A1Z651_3mutA |
| GGGGSSPAP | 14,116 | BAEVM_P10272_3mut |
| GGSGGG | 14,117 | PERV_Q4VFZ2_3mut |
| GGGGSS | 14,118 | MLVBM_Q7SVK7_3mutA_WS |
| EAAAKGSSGGS | 14,119 | PERV_Q4VFZ2_3mutA_WS |
| GSSGGGGGS | 14,120 | PERV_Q4VFZ2 |
| EAAAKGSSGGS | 14,121 | PERV_Q4VFZ2_3mut |
| EAAAKEAAAK | 14,122 | MLVAV_P03356_3mut |
| GSSGGGEAAAK | 14,123 | MLVAV_P03356_3mut |
| GSSPAPGGG | 14,124 | XMRV6_A1Z651_3mut |
| GGGGSGGGGSGGGGS | 14,125 | PERV_Q4VFZ2_3mut |
| EAAAKEAAAKEAAAKEAA | 14,126 | KORV_Q9TTC1_3mutA |
| AK | | |
| EAAAKGGSGSS | 14,127 | MLVBM_Q7SVK7_3mut |
| PAPEAAAK | 14,128 | BLVJ_P03361 |
| GSSGGG | 14,129 | FFV_O93209-Pro |
| GGSGGGEAAAK | 14,130 | KORV_Q9TTC1-Pro_3mutA |
| EAAAK | 14,131 | FLV_P10273_3mutA |
| GGGGSSPAP | 14,132 | MLVMS_P03355_3mut |
| GSS | | SFV3L_P27401-Pro_2mut |
| PAPEAAAKGSS | 14,134 | BAEVM_P10272_3mut |
| GGGGGSPAP | 14,135 | PERV_Q4VFZ2_3mut |
| GSSGSSGSS | 14,136 | BAEVM_P10272_3mutA |
| GGGGSGGGGSGGGGSGGG | 14,137 | SFV1_P23074_2mut |
| GS | | |
| GGGGSSEAAAK | 14,138 | SFV3L_P27401_2mutA |
| GGGGSGGGGSGGGGSGGG | 14,139 | FOAMV_P14350-Pro_2mut |
| GS | | |
| PAPGSSEAAAK | 14,140 | MLVBM_Q7SVK7_3mutA_WS |
| GGGGGSGSS | 14,141 | MLVFF_P26809_3mutA |
| GGSEAAAKGGG | 14,142 | MLVBM_Q7SVK7_3mut |
| PAPGSSGGG | 14,143 | PERV_Q4VFZ2 |
| GGS | | PERV_Q4VFZ2_3mutA_WS |
| EAAAKGGSGSS | 14,145 | FLV_P10273_3mut |
| GGGEAAAK | 14,146 | WMSV_P03359_3mutA |
| GGSEAAAKPAP | 14,147 | MLVBM_Q7SVK7_3mut |
| SGSETPGTSESATPES | 14,148 | FOAMV_P14350-Pro_2mutA |
| EAAAKPAPGGS | 14,149 | AVIRE_P03360_3mut |
| EAAAKGGGGGS | 14,150 | KORV_Q9TTC1-Pro_3mutA |
| GGGGS | 14,151 | PERV_Q4VFZ2_3mut |
| GGSEAAAKGSS | 14,152 | MLVFF_P26809_3mutA |
| GGSEAAAKGGG | 14,153 | AVIRE_P03360 |
| GGSGGSGGSGGSGGSGGS | 14,154 | SFV3L_P27401_2mut |
| GGSEAAAKGSS | 14,155 | SFV3L_P27401-Pro_2mutA |
| GGGEAAAKPAP | 14,156 | MLVCB_P08361_3mut |
| GGSEAAAK | 14,157 | MLVMS_P03355_PLV919 |
| GGSPAPGSS | 14,158 | KORV_Q9TTC1-Pro_3mutA |
| GSSPAPEAAAK | 14,159 | WMSV_P03359_3mutA |
| GGSGSS | 14,160 | KORV_Q9TTC1-Pro_3mutA |
| PAPGGGGGS | 14,161 | AVIRE_P03360_3mut |
| PAPEAAAKGSS | 14,162 | FFV_O93209-Pro |
| GGSGGGEAAAK | 14,163 | WMSV_P03359_3mut |
| PAPGGG | 14,164 | MLVMS_P03355_3mut |
| EAAAKGGG | 14,165 | FLV_P10273_3mutA |
| GSSGSSGSSGSS | 14,166 | MLVCB_P08361_3mut |
| EAAAKGGSGGG | 14,167 | FFV_O93209 |
| GSSPAPGGS | 14,168 | PERV_Q4VFZ2_3mutA_WS |
| GSSPAPGGS | 14,169 | MLVCB_P08361_3mut |
| GGGPAP | 14,170 | WMSV_P03359_3mutA |
| GGGPAP | 14,171 | KORV_Q9TTC1_3mutA |
| GGSPAPGSS | 14,172 | KORV_Q9TTC1-Pro_3mut |
| PAPAP | 14,173 | MLVMS_P03355_3mut |
| GGGGGGG | 14,174 | MLVMS_P03355_3mut |
| GGGGG | 14,175 | KORV_Q9TTC1-Pro_3mut |
| GSAGSAAGSGEF | 14,176 | FOAMV_P14350_2mutA |
| PAPAP | 14,177 | KORV_Q9TTC1-Pro_3mutA |
| GGSEAAAKGGG | 14,178 | SFV3L_P27401-Pro_2mutA |
| PAPAP | 14,179 | WMSV_P03359_3mut |
| GGGGSGGGGSGGGGS | 14,180 | SFV3L_P27401_2mut |
| PAPGGS | 14,181 | KORV_Q9TTC1_3mutA |
| GGGEAAAKPAP | 14,182 | FLV_P10273_3mut |
| GGGGGS | 14,183 | MLVAV_P03356_3mutA |
| GSSEAAAKGGG | 14,184 | WMSV_P03359_3mut |
| EAAAKGGGGSS | 14,185 | GALV_P21414_3mutA |
| GSSGGS | 14,186 | MLVAV_P03356_3mutA |
| GSSGGG | 14,187 | MLVBM_Q7SVK7_3mut |
| PAPAPAP | 14,188 | SFV3L_P27401-Pro_2mutA |
| GGGG | 14,189 | KORV_Q9TTC1_3mutA |
| EAAAKPAPGGS | 14,190 | MLVFF_P26809_3mut |
| GGGGGGGGS | 14,191 | XMRV6_A1Z651_3mut |
| EAAAKGGG | 14,192 | MLVCB_P08361_3mut |
| GGGGSSPAP | 14,193 | KORV_Q9TTC1_3mutA |
| GSSEAAAKGGG | 14,194 | KORV_Q9TTC1-Pro_3mutA |
| GGGGG | 14,195 | BLVJ_P03361_2mutB |
| GGGEAAAKGSS | 14,196 | FFV_O93209-Pro |
| GSSGSSGSS | 14,197 | BAEVM_P10272_3mut |
| GSSGGSPAP | 14,198 | PERV_Q4VFZ2_3mut |
| EAAAKGGS | 14,199 | KORV_Q9TTC1_3mut |
| GGSPAPEAAAK | 14,200 | AVIRE_P03360_3mut |
| GGSEAAAK | 14,201 | WMSV_P03359_3mut |
| GSSGGS | 14,202 | KORV_Q9TTC1-Pro_3mutA |
| GGGPAPEAAAK | 14,203 | KORV_Q9TTC1_3mutA |
| PAPGSS | 14,204 | WMSV_P03359_3mutA |
| GGSEAAAKGSS | 14,205 | FLV_P10273_3mutA |
| EAAAKEAAAKEAAAKEAA | 14,206 | SFV3L_P27401 |
| AKEAAAK | | |
| GSSEAAAKGGG | 14,207 | SFV3L_P27401-Pro_2mutA |
| GGGGSEAAAKGGGGS | 14,208 | KORV_Q9TTC1-Pro_3mutA |
| GGSGGSGGS | 14,209 | WMSV_P03359_3mut |
| GGGGGSGSS | 14,210 | KORV_Q9TTC1-Pro |
| GGGGSGGGGGGGGSGGGG | 14,211 | MLVMS_P03355_3mut |
| S | | |
| EAAAKGGG | 14,212 | PERV_Q4VFZ2 |
| GGSEAAAKGGG | 14,213 | KORV_Q9TTC1-Pro_3mut |
| GSSGGSGGG | 14,214 | PERV_Q4VFZ2_3mutA_WS |
| GGGGGS | 14,215 | PERV_Q4VFZ2_3mut |
| GSAGSAAGSGEF | 14,216 | PERV_Q4VFZ2 |
| PAPEAAAKGSS | 14,217 | BAEVM_P10272_3mutA |
| GSSPAPGGG | 14,218 | MLVCB_P08361_3mut |
| GGGGSSPAP | 14,219 | KORV_Q9TTC1-Pro_3mutA |
| PAPGGSGGG | 14,220 | MLVFF_P26809_3mut |
| GSSPAP | 14,221 | KORV_Q9TTC1_3mutA |
| PAPGSS | 14,222 | SFV3L_P27401-Pro_2mut |
| GGSGGGGSS | 14,223 | MLVMS_P03355_PLV919 |
| GSSGGS | 14,224 | WMSV_P03359_3mutA |
| EAAAKGGGGGS | 14,225 | PERV_Q4VFZ2 |
| GGGGG | 14,226 | KORV_Q9TTC1_3mutA |
| EAAAKGSS | 14,227 | MLVMS_P03355_PLV919 |
| EAAAKEAAAKEAAAKEAA | 14,228 | FLV_P10273_3mut |
| AKEAAAK | | |
| EAAAKEAAAKEAAAKEAA | 14,229 | SFV3L_P27401-Pro_2mut |
| AK | | |
| GSAGSAAGSGEF | 14,230 | SFV3L_P27401_2mutA |
| GGGPAPGGS | 14,231 | FLV_P10273_3mutA |
| GGSEAAAKGGG | 14,232 | MLVCB_P08361_3mut |
| PAPGGGEAAAK | 14,233 | BAEVM_P10272_3mut |
| EAAAKPAPGSS | 14,234 | FOAMV_P14350_2mut |
| GGSEAAAK | 14,235 | KORV_Q9TTC1_3mutA |
| GGSGSS | 14,236 | AVIRE_P03360 |
| GGSPAPEAAAK | 14,237 | MLVMS_P03355_PLV919 |
| GGGGS | 14,238 | XMRV6_A1Z651_3mut |
| GGSPAPGGG | 14,239 | XMRV6_A1Z651_3mut |
| EAAAKPAPGGS | 14,240 | PERV_Q4VFZ2 |
| GSSPAP | 14,241 | BAEVM_P10272_3mut |
| GGSGSSGGG | 14,242 | FLV_P10273_3mutA |
| PAPGGG | 14,243 | PERV_Q4VFZ2_3mutA_WS |
| GSSGGSEAAAK | 14,244 | MLVBM_Q7SVK7_3mut |
| GGSEAAAK | 14,245 | MLVMS_P03355_3mut |
| GGGPAPGGS | 14,246 | MLVFF_P26809_3mut |
| GSAGSAAGSGEF | 14,247 | MLVBM_Q7SVK7_3mutA_WS |
| EAAAKPAPGGS | 14,248 | SFVCP_Q87040 |
| PAPGGG | 14,249 | PERV_Q4VFZ2_3mutA_WS |
| GSSPAPEAAAK | 14,250 | MLVBM_Q7SVK7 |
| PAPEAAAK | 14,251 | MLVBM_Q7SVK7_3mut |
| PAPGGGGGS | 14,252 | AVIRE_P03360_3mutA |
| GGSEAAAKPAP | 14,253 | MLVBM_Q7SVK7_3mut |
| EAAAKGSS | 14,254 | WMSV_P03359_3mutA |
| GGGEAAAK | 14,255 | MLVFF_P26809_3mutA |
| EAAAKEAAAKEAAAK | 14,256 | MLVMS_P03355_3mut |
| PAPEAAAKGGG | 14,257 | BAEVM_P10272_3mut |
| PAPAPAP | 14,258 | MLVCB_P08361_3mut |
| EAAAKPAPGGS | 14,259 | BAEVM_P10272_3mut |
| GGGGSGGGGS | 14,260 | FLV_P10273_3mut |
| GGGGSEAAAKGGGGS | 14,261 | KORV_Q9TTC1_3mut |
| EAAAK | 14,262 | FLV_P10273_3mut |
| PAPAPAP | 14,263 | WMSV_P03359_3mut |
| GGGGSEAAAKGGGGS | 14,264 | FFV_O93209-Pro |
| GGSPAPEAAAK | 14,265 | MLVMS_P03355_3mut |
| GGSGSSGGG | 14,266 | XMRV6_A1Z651_3mut |
| GGSPAPGSS | 14,267 | PERV_Q4VFZ2_3mut |
| SGGSSGGSSGSETPGTSE | 14,268 | SFV3L_P27401-Pro_2mutA |
| SATPESSGGSSGGSS | | |
| EAAAKGGGPAP | 14,269 | BAEVM_P10272_3mutA |
| GSSGGSEAAAK | 14,270 | MLVMS_P03355_3mutA_WS |
| SGSETPGTSESATPES | 14,271 | PERV_Q4VFZ2_3mutA_WS |
| EAAAKEAAAKEAAAKEAA | 14,272 | KORV_Q9TTC1-Pro_3mutA |
| AKEAAAK | | |
| GSSGSSGSS | 14,273 | KORV_Q9TTC1_3mutA |
| GSSPAPGGG | 14,274 | SFV3L_P27401-Pro_2mutA |
| GSSGGGEAAAK | 14,275 | KORV_Q9TTC1_3mutA |
| GGSGGGGSS | 14,276 | PERV_Q4VFZ2_3mutA_WS |
| GSSGGGEAAAK | 14,277 | MLVCB_P08361_3mut |
| GSSEAAAKGGG | 14,278 | MLVCB_P08361_3mut |
| GGSGGGGSS | 14,279 | KORV_Q9TTC1_3mutA |
| GGSGSSPAP | 14,280 | PERV_Q4VFZ2_3mutA_WS |
| GSSPAP | 14,281 | MLVMS_P03355_3mut |
| GGGGSSEAAAK | 14,282 | AVIRE_P03360 |
| GGS | | WMSV_P03359_3mut |
| EAAAKEAAAK | 14,284 | PERV_Q4VFZ2_3mut |
| PAPAPAPAP | 14,285 | MLVAV_P03356_3mut |
| GGSEAAAKGGG | 14,286 | KORV_Q9TTC1_3mutA |
| PAPGGG | 14,287 | MLVAV_P03356_3mut |
| EAAAKGSS | 14,288 | BAEVM_P10272_3mut |
| GGGGSGGGGS | 14,289 | WMSV_P03359_3mutA |
| GGSGGSGGS | 14,290 | SFV3L_P27401_2mut |
| EAAAK | 14,291 | MLVCB_P08361_3mut |
| GGGGSSGGS | 14,292 | WMSV_P03359_3mutA |
| GGGPAPEAAAK | 14,293 | MLVAV_P03356_3mutA |
| EAAAKEAAAKEAAAK | 14,294 | FFV_O93209 |
| GSSEAAAKGGG | 14,295 | MLVBM_Q7SVK7_3mut |
| GGGPAPGGS | 14,296 | FLV_P10273_3mut |
| GGSEAAAKGGG | 14,297 | WMSV_P03359_3mut |
| EAAAKGGGGGS | 14,298 | XMRV6_A1Z651_3mutA |
| EAAAKGGSGGG | 14,299 | FLV_P10273_3mutA |
| GGSEAAAKGGG | 14,300 | SFV3L_P27401_2mutA |
| GGGGS | 14,301 | PERV_Q4VFZ2_3mutA_WS |
| GSSGGS | 14,302 | MLVMS_P03355_3mut |
| GSSGSS | 14,303 | MLVAV_P03356_3mutA |
| GGSPAPGGG | 14,304 | MLVBM_Q7SVK7_3mutA_WS |
| GSSGGGGGS | 14,305 | MLVF5_P26810_3mut |
| PAPAPAPAP | 14,306 | MLVCB_P08361_3mut |
| PAPAP | 14,307 | PERV_Q4VFZ2_3mutA_WS |
| PAPGSSGGS | 14,308 | KORV_Q9TTC1_3mut |
| PAPGSSGGG | 14,309 | PERV_Q4VFZ2_3mut |
| GGGEAAAK | 14,310 | MLVMS_P03355_PLV919 |
| GGSGGSGGSGGSGGS | 14,311 | SFV3L_P27401-Pro_2mutA |
| GGSGGG | 14,312 | FLV_P10273_3mut |
| PAPEAAAKGGG | 14,313 | MLVFF_P26809_3mut |
| PAP | | PERV_Q4VFZ2_3mutA_WS |
| PAPGGSGSS | 14,315 | FFV_O93209_2mut |
| EAAAKEAAAKEAAAKEAA | 14,316 | FFV_O93209-Pro_2mut |
| AKEAAAKEAAAK | | |
| GSSGSSGSSGSS | 14,317 | FFV_O93209-Pro |
| GSSGSSGSSGSSGSS | 14,318 | FLV_P10273_3mutA |
| GGGEAAAKPAP | 14,319 | PERV_Q4VFZ2 |
| PAPGSSGGG | 14,320 | SFV3L_P27401_2mut |
| PAPGGSGSS | 14,321 | KORV_Q9TTC1-Pro_3mut |
| PAPAPAPAPAP | 14,322 | GALV_P21414_3mutA |
| GGSGGGEAAAK | 14,323 | PERV_Q4VFZ2_3mut |
| GSSPAP | 14,324 | MLVCB_P08361_3mut |
| EAAAKPAP | 14,325 | MLVF5_P26810_3mut |
| GGGGGGGGSGGGGSGGGG | 14,326 | MLVBM_Q7SVK7_3mut |
| S | | |
| GGSGGG | 14,327 | WMSV_P03359_3mut |
| GGSGGSGGS | 14,328 | KORV_Q9TTC1_3mut |
| GGGGGGGG | 14,329 | MLVFF_P26809_3mut |
| GGGGSS | 14,330 | MLVAV_P03356_3mut |
| GSSGGGGGS | 14,331 | SFV3L_P27401_2mut |
| EAAAKEAAAKEAAAKEAA | 14,332 | GALV_P21414_3mutA |
| AKEAAAKEAAAK | | |
| GSSGSSGSS | 14,333 | PERV_Q4VFZ2_3mut |
| GSSPAPGGS | 14,334 | MLVFF_P26809_3mut |
| PAPAPAP | 14,335 | AVIRE_P03360_3mutA |
| EAAAKEAAAKEAAAKEAA | 14,336 | WMSV_P03359_3mutA |
| AK | | |
| PAPAPAPAP | 14,337 | SFV3L_P27401_2mutA |
| GGGGSS | 14,338 | MLVAV_P03356_3mutA |
| GSSGSSGSSGSSGSS | 14,339 | SFV3L_P27401_2mutA |
| PAPGGS | 14,340 | WMSV_P03359_3mutA |
| GSSEAAAKGGG | 14,341 | PERV_Q4VFZ2 |
| GSSGGSPAP | 14,342 | MLVMS_P03355_PLV919 |
| GSSGSSGSSGSSGSSGSS | 14,343 | SFV3L_P27401_2mutA |
| GGSGSSGGG | 14,344 | MLVCB_P08361_3mut |
| GGGPAPGSS | 14,345 | SFV3L_P27401-Pro_2mutA |
| GSSEAAAKGGS | 14,346 | WMSV_P03359_3mut |
| GSSEAAAKGGG | 14,347 | MLVAV_P03356_3mut |
| GGSGGGPAP | 14,348 | FFV_O93209-Pro |
| GSSGSS | 14,349 | PERV_Q4VFZ2_3mut |
| PAPGGGGGS | 14,350 | GALV_P21414_3mutA |
| EAAAKPAPGGS | 14,351 | MLVAV_P03356_3mut |
| GSSGSS | 14,352 | MLVMS_P03355_3mut |
| EAAAKPAPGGS | 14,353 | FFV_O93209-Pro |
| GGGPAPEAAAK | 14,354 | MLVMS_P03355_3mutA_WS |
| GSSEAAAKGGG | 14,355 | MLVBM_Q7SVK7_3mut |
| GGGEAAAKGGS | 14,356 | BAEVM_P10272_3mut |
| GSSGSS | 14,357 | KORV_Q9TTC1-Pro_3mutA |
| EAAAKEAAAKEAAAK | 14,358 | SFV1_P23074 |
| PAPGSSGGS | 14,359 | KORV_Q9TTC1-Pro_3mut |
| PAPAPAPAPAP | 14,360 | MLVMS_P03355 |
| GSSEAAAK | 14,361 | SFV3L_P27401_2mut |
| PAP | | PERV_Q4VFZ2_3mut |
| GGSEAAAKGGG | 14,363 | MLVBM_Q7SVK7_3mut |
| GGSGGGPAP | 14,364 | MLVBM_Q7SVK7_3mutA_WS |
| GSSGSS | 14,365 | MLVMS_P03355_3mut |
| GGSEAAAK | 14,366 | MLVMS_P03355 |
| GSSEAAAKGGS | 14,367 | MLVMS_P03355_PLV919 |
| PAPGGGGGS | 14,368 | MLVFF_P26809_3mut |
| GSSGGG | 14,369 | PERV_Q4VFZ2_3mut |
| GSSGGS | 14,370 | PERV_Q4VFZ2_3mutA_WS |
| PAPGGG | 14,371 | BAEVM_P10272_3mut |
| PAPGSSGGG | 14,372 | MLVBM_Q7SVK7_3mut |
| GGSEAAAK | 14,373 | SFV3L_P27401_2mut |
| GSSPAPEAAAK | 14,374 | SFV3L_P27401-Pro_2mut |
| GSSGGSPAP | 14,375 | BAEVM_P10272_3mut |
| GGSPAPGSS | 14,376 | PERV_Q4VFZ2_3mutA_WS |
| GGSGGSGGS | 14,377 | PERV_Q4VFZ2 |
| GGSGGGPAP | 14,378 | FLV_P10273_3mut |
| GGGPAPEAAAK | 14,379 | SFV3L_P27401_2mutA |
| GGGGS | 14,380 | FLV_P10273_3mutA |
| GSSGGSGGG | 14,381 | XMRV6_A1Z651_3mut |
| EAAAKGGGGSS | 14,382 | PERV_Q4VFZ2 |
| GGSGSSGGG | 14,383 | SFV3L_P27401-Pro_2mutA |
| GGSGGSGGS | 14,384 | MLVFF_P26809_3mut |
| GGGPAPEAAAK | 14,385 | FLV_P10273_3mut |
| GSSGGGEAAAK | 14,386 | MLVMS_P03355_3mut |
| GGG | | SFV3L_P27401_2mut |
| GSAGSAAGSGEF | 14,388 | WMSV_P03359_3mut |
| GSSGGGPAP | 14,389 | MLVMS_P03355_PLV919 |
| GGGGSS | 14,390 | KORV_Q9TTC1-Pro_3mut |
| GGGGSSEAAAK | 14,391 | KORV_Q9TTC1 |
| PAPGGSGGG | 14,392 | SFV3L_P27401_2mut |
| GSSGSSGSSGSSGSS | 14,393 | FFV_O93209 |
| GSSGGSPAP | 14,394 | MLVMS_P03355_3mut |
| GGSEAAAK | 14,395 | KORV_Q9TTC1-Pro_3mutA |
| GGGGSGGGGS | 14,396 | BAEVM_P10272_3mut |
| GSSEAAAKGGG | 14,397 | AVIRE_P03360_3mut |
| EAAAKPAPGGG | 14,398 | FLV_P10273_3mut |
| EAAAKGGSPAP | 14,399 | SFV3L_P27401-Pro_2mutA |
| GSSEAAAKPAP | 14,400 | MLVBM_Q7SVK7_3mut |
| GGGPAPGGS | 14,401 | MLVCB_P08361_3mut |
| GGG | | SFV3L_P27401_2mutA |
| EAAAKGGGGSEAAAK | 14,403 | SFV3L_P27401_2mutA |
| GGSGSSGGG | 14,404 | MLVBM_Q7SVK7_3mut |
| GSAGSAAGSGEF | 14,405 | BAEVM_P10272_3mut |
| GGGEAAAK | 14,406 | FOAMV_P14350_2mutA |
| PAPEAAAKGGS | 14,407 | WMSV_P03359_3mut |
| PAPAPAPAPAPAP | 14,408 | MLVF5_P26810_3mutA |
| GGSGGGGSS | 14,409 | FLV_P10273_3mutA |
| PAPGSSGGS | 14,410 | BAEVM_P10272_3mut |
| PAPEAAAK | 14,411 | WMSV_P03359_3mutA |
| GSSGSSGSSGSSGSSGSS | 14,412 | FFV_O93209-Pro_2mut |
| GGGGGSGSS | 14,413 | FFV_O93209-Pro |
| GGGGGGGG | 14,414 | SFV3L_P27401-Pro_2mutA |
| GGGGGG | 14,415 | FLV_P10273_3mut |
| GSSGGSGGG | 14,416 | MLVAV_P03356_3mutA |
| GGGGSS | 14,417 | SFV3L_P27401-Pro_2mutA |
| GGSGGGPAP | 14,418 | FOAMV_P14350_2mut |
| GSSGSS | 14,419 | AVIRE_P03360_3mutA |
| EAAAKEAAAKEAAAKEAA | 14,420 | SFV3L_P27401-Pro_2mutA |
| AKEAAAK | | |
| EAAAKEAAAK | 14,421 | BAEVM_P10272_3mut |
| GSSPAPEAAAK | 14,422 | GALV_P21414_3mutA |
| GGSEAAAKPAP | 14,423 | SFV3L_P27401_2mutA |
| GGSGGGEAAAK | 14,424 | SFV3L_P27401-Pro_2mutA |
| EAAAKGSSPAP | 14,425 | FOAMV_P14350_2mut |
| GGSGSSEAAAK | 14,426 | SFV3L_P27401_2mut |
| GGG | | PERV_Q4VFZ2 |
| GGGGGSGSS | 14,428 | FOAMV_P14350_2mut |
| GGSGGGEAAAK | 14,429 | KORV_Q9TTC1-Pro_3mut |
| GSSGGSGGG | 14,430 | AVIRE_P03360_3mutA |
| EAAAKPAPGGG | 14,431 | SFV3L_P27401_2mutA |
| PAPGGSGGG | 14,432 | KORV_Q9TTC1-Pro_3mut |
| PAPAPAP | 14,433 | WMSV_P03359_3mutA |
| GSSEAAAKPAP | 14,434 | SFV1_P23074 |
| SGGSSGGSSGSETPGTSE | 14,435 | SRV2_P51517 |
| SATPESSGGSSGGSS | | |
| GSSGGSGGG | 14,436 | PERV_Q4VFZ2_3mutA_WS |
| GSSGSSGSSGSSGSSGSS | 14,437 | FFV_O93209 |
| GSSGGGPAP | 14,438 | WMSV_P03359_3mut |
| PAPAPAPAPAPAP | 14,439 | MLVBM_Q7SVK7_3mut |
| GGGGGSPAP | 14,440 | KORV_Q9TTC1-Pro_3mutA |
| PAPGSS | 14,441 | MLVBM_Q7SVK7_3mutA_WS |
| PAPEAAAKGGS | 14,442 | SFV3L_P27401-Pro_2mut |
| GGGGSSPAP | 14,443 | MLVMS_P03355_3mut |
| GGSEAAAK | 14,444 | FFV_O93209-Pro |
| EAAAKPAPGGS | 14,445 | AVIRE_P03360_3mutA |
| PAPGSS | 14,446 | WMSV_P03359_3mut |
| PAPGSSGGG | 14,447 | SFV3L_P27401-Pro_2mutA |
| EAAAKEAAAKEAAAK | 14,448 | SFV3L_P27401_2mut |
| GGS | | MLVRD_P11227_3mut |
| GGGGS | 14,450 | KORV_Q9TTC1-Pro_3mut |
| GGSGGGGSS | 14,451 | KORV_Q9TTC1 |
| GGSGGG | 14,452 | MLVMS_P03355_3mutA_WS |
| GGGEAAAKPAP | 14,453 | BAEVM_P10272_3mut |
| EAAAKEAAAKEAAAKEAA | 14,454 | FLV_P10273 |
| AKEAAAK | | |
| PAPGGSGGG | 14,455 | KORV_Q9TTC1-Pro_3mutA |
| GSSGSSGSSGSSGSSGSS | 14,456 | HTL1L_P0C211 |
| GGGEAAAKPAP | 14,457 | WMSV_P03359 |
| GSSGGSPAP | 14,458 | FFV_O93209-Pro |
| PAPAPAPAPAP | 14,459 | SFV3L_P27401-Pro_2mutA |
| GSSGGSEAAAK | 14,460 | SFV3L_P27401_2mutA |
| GGSPAPGSS | 14,461 | SFV3L_P27401_2mut |
| GGSGGSGGS | 14,462 | KORV_Q9TTC1-Pro_3mut |
| PAPEAAAKGSS | 14,463 | KORV_Q9TTC1-Pro_3mut |
| EAAAKGGS | 14,464 | KORV_Q9TTC1_3mutA |
| EAAAKGGGGSEAAAK | 14,465 | SFV3L_P27401-Pro_2mut |
| GGGGSSPAP | 14,466 | FFV_O93209-Pro |
| EAAAK | 14,467 | SFV3L_P27401_2mut |
| EAAAKGGGGSS | 14,468 | BAEVM_P10272_3mut |
| GGGGGSEAAAK | 14,469 | MLVBM_Q7SVK7_3mut |
| GGGG | 14,470 | PERV_Q4VFZ2 |
| GGGGGSEAAAK | 14,471 | FLV_P10273_3mut |
| EAAAKGGGPAP | 14,472 | KORV_Q9TTC1-Pro |
| GGGGSGGGGSGGGGSGGG | 14,473 | FFV_O93209_2mutA |
| GS | | |
| GSSGGSGGG | 14,474 | PERV_Q4VFZ2_3mut |
| GGGGSGGGGSGGGGS | 14,475 | GALV_P21414_3mutA |
| GGSGGGEAAAK | 14,476 | AVIRE_P03360_3mutA |
| PAPEAAAKGGG | 14,477 | SFV3L_P27401_2mut |
| GGGGSGGGGS | 14,478 | AVIRE_P03360 |
| GSSGGGEAAAK | 14,479 | SFV3L_P27401_2mutA |
| GGGGG | 14,480 | AVIRE_P03360_3mutA |
| GGSGSS | 14,481 | KORV_Q9TTC1_3mut |
| PAPAPAPAPAPAP | 14,482 | FOAMV_P14350_2mut |
| GGSEAAAKPAP | 14,483 | KORV_Q9TTC1-Pro_3mut |
| GGGGGG | 14,484 | PERV_Q4VFZ2_3mut |
| GSSGGGEAAAK | 14,485 | MLVBM_Q7SVK7 |
| SGGSSGGSSGSETPGTSE | 14,486 | MLVAV_P03356 |
| SATPESSGGSSGGSS | | |
| GGSPAPGSS | 14,487 | BAEVM_P10272_3mut |
| GGGGSSPAP | 14,488 | BAEVM_P10272 |
| GGGGSEAAAKGGGGS | 14,489 | SFV3L_P27401_2mut |
| GGGGGGGG | 14,490 | GALV_P21414_3mutA |
| PAPAP | 14,491 | MLVAV_P03356_3mut |
| GGGEAAAK | 14,492 | PERV_Q4VFZ2_3mutA_WS |
| GSSPAPGGG | 14,493 | FFV_O93209_2mut |
| GGSGGSGGSGGSGGS | 14,494 | BAEVM_P10272 |
| GGGGGS | 14,495 | MLVF5_P26810_3mutA |
| PAPGGGGSS | 14,496 | FLV_P10273_3mutA |
| GGGEAAAK | 14,497 | MLVBM_Q7SVK7_3mut |
| PAPEAAAKGGG | 14,498 | WMSV_P03359_3mut |
| GSSEAAAK | 14,499 | MLVBM_Q7SVK7_3mut |
| EAAAKEAAAK | 14,500 | AVIRE_P03360 |
| EAAAKGGGGGS | 14,501 | MLVBM_Q7SVK7_3mut |
| GGGEAAAKGGS | 14,502 | SFV3L_P27401-Pro_2mutA |
| PAPAPAPAPAP | 14,503 | MLVF5_P26810_3mut |
| PAPGSSEAAAK | 14,504 | SFV3L_P27401-Pro_2mutA |
| EAAAKEAAAKEAAAK | 14,505 | BAEVM_P10272_3mutA |
| GGSPAPGSS | 14,506 | MLVMS_P03355 |
| PAPGSSGGS | 14,507 | FLV_P10273_3mutA |
| EAAAKEAAAKEAAAKEAA | 14,508 | FOAMV_P14350-Pro_2mut |
| AK | | |
| EAAAKGGG | 14,509 | KORV_Q9TTC1_3mutA |
| EAAAKGGSGGG | 14,510 | MLVBM_Q7SVK7_3mut |
| GGGGGS | 14,511 | KORV_Q9TTC1-Pro_3mutA |
| PAPGGSGGG | 14,512 | WMSV_P03359_3mut |
| GGGPAPGGS | 14,513 | KORV_Q9TTC1_3mutA |
| GSS | | FFV_O93209 |
| GGSGGSGGS | 14,515 | PERV_Q4VFZ2_3mut |
| GGGGS | 14,516 | GALV_P21414_3mutA |
| GGGG | 14,517 | MLVF5_P26810_3mut |
| GGSEAAAKPAP | 14,518 | FFV_O93209-Pro_2mut |
| PAPAPAPAP | 14,519 | FFV_O93209-Pro |
| PAP | | MLVF5_P26810_3mut |
| EAAAKEAAAKEAAAK | 14,521 | FFV_O93209_2mut |
| EAAAKGSS | 14,522 | MLVCB_P08361_3mut |
| EAAAKGGG | 14,523 | MLVBM_Q7SVK7_3mut |
| PAPEAAAKGGG | 14,524 | FFV_O93209_2mut |
| GSSGGGEAAAK | 14,525 | SFV1_P23074-Pro_2mut |
| PAPGGGEAAAK | 14,526 | GALV_P21414_3mutA |
| GGGGSGGGGSGGGGSGGG | 14,527 | FOAMV_P14350-Pro_2mutA |
| GS | | |
| GSSGGG | 14,528 | FOAMV_P14350_2mut |
| GGGGSGGGGGGGGSGGGG | 14,529 | SFV3L_P27401_2mutA |
| S | | |
| GGSGSS | 14,530 | AVIRE_P03360_3mut |
| GGSGSSEAAAK | 14,531 | MMTVB_P03365_WS |
| PAPAPAP | 14,532 | MLVAV_P03356_3mutA |
| GSSGGSPAP | 14,533 | SFV3L_P27401-Pro_2mut |
| GGSPAP | 14,534 | AVIRE_P03360 |
| GGSGGGPAP | 14,535 | FFV_O93209 |
| GSSEAAAK | 14,536 | PERV_Q4VFZ2 |
| GSSGGGPAP | 14,537 | PERV_Q4VFZ2_3mutA_WS |
| GGGGSSEAAAK | 14,538 | KORV_Q9TTC1_3mutA |
| GGSEAAAKPAP | 14,539 | SFVCP_Q87040 |
| GGSGGGPAP | 14,540 | FOAMV_P14350_2mutA |
| GGGGSGGGGSGGGGSGGG | 14,541 | BLVJ_P03361_2mutB |
| GS | | |
| GGGGSSPAP | 14,542 | SFV3L_P27401_2mutA |
| EAAAKGGS | 14,543 | MLVF5_P26810_3mut |
| GGSEAAAKGSS | 14,544 | MLVCB_P08361_3mut |
| GGGGSSEAAAK | 14,545 | SFV3L_P27401_2mut |
| EAAAKGGSGGG | 14,546 | FOAMV_P14350_2mut |
| GGSGGS | 14,547 | FLV_P10273_3mut |
| EAAAKGGG | 14,548 | FFV_O93209-Pro |
| GSSGSSGSSGSSGSS | 14,549 | SFV3L_P27401 |
| GSSGGGPAP | 14,550 | PERV_Q4VFZ2_3mutA_WS |
| PAPGGSEAAAK | 14,551 | SFV3L_P27401-Pro_2mutA |
| GGSPAP | 14,552 | KORV_Q9TTC1 |
| EAAAKPAPGSS | 14,553 | KORV_Q9TTC1_3mutA |
| SGSETPGTSESATPES | 14,554 | SFV1_P23074 |
| GSSPAP | 14,555 | SFV3L_P27401-Pro_2mutA |
| GSSPAPGGG | 14,556 | SFV3L_P27401_2mut |
| GGGEAAAKGSS | 14,557 | SFV1_P23074_2mut |
| GGGPAPGGS | 14,558 | BAEVM_P10272_3mut |
| EAAAKGGG | 14,559 | KORV_Q9TTC1-Pro_3mutA |
| GSSGGG | 14,560 | SFV3L_P27401-Pro_2mut |
| GGSPAPEAAAK | 14,561 | BAEVM_P10272_3mut |
| EAAAKGSSPAP | 14,562 | FFV_O93209 |
| EAAAKGGGGSEAAAK | 14,563 | SFV3L_P27401-Pro_2mutA |
| GSSGSSGSSGSSGSS | 14,564 | SFV1_P23074_2mut |
| EAAAKGGSPAP | 14,565 | FOAMV_P14350_2mut |
| GGSGGS | 14,566 | KORV_Q9TTC1-Pro_3mutA |
| EAAAKGSSGGS | 14,567 | GALV_P21414 |
| GSSGGGPAP | 14,568 | MLVAV_P03356 |
| PAPEAAAKGGS | 14,569 | FOAMV_P14350_2mut |
| EAAAKPAPGGG | 14,570 | AVIRE_P03360_3mut |
| GGSPAP | 14,571 | SFV3L_P27401_2mutA |
| GGGGSGGGGS | 14,572 | SFV3L_P27401_2mutA |
| GGGGSS | 14,573 | AVIRE_P03360_3mutA |
| GGSPAPGGG | 14,574 | SFV3L_P27401-Pro_2mutA |
| EAAAKPAPGSS | 14,575 | SFV3L_P27401 |
| EAAAKPAP | 14,576 | FOAMV_P14350-Pro_2mut |
| PAPEAAAKGSS | 14,577 | PERV_Q4VFZ2_3mutA_WS |
| EAAAKGGSGSS | 14,578 | SFV3L_P27401_2mutA |
| GGGEAAAKGSS | 14,579 | GALV_P21414_3mutA |
| GGGGSEAAAKGGGGS | 14,580 | PERV_Q4VFZ2_3mut |
| PAPGGSGSS | 14,581 | FFV_O93209-Pro_2mutA |
| GGSEAAAKPAP | 14,582 | GALV_P21414_3mutA |
| GGSGGSGGSGGSGGS | 14,583 | FFV_O93209-Pro |
| GSSGGSEAAAK | 14,584 | SFV3L_P27401-Pro_2mut |
| GGS | | GALV_P21414_3mutA |
| PAPGGSEAAAK | 14,586 | MLVMS_P03355 |
| PAPEAAAKGGS | 14,587 | BAEVM_P10272_3mutA |
| GGSGSSPAP | 14,588 | SFV3L_P27401-Pro_2mutA |
| GSSPAP | 14,589 | WMSV_P03359_3mut |
| GGGEAAAK | 14,590 | MMTVB_P03365 |
| GGGGSS | 14,591 | PERV_Q4VFZ2_3mut |
| GGSPAPGSS | 14,592 | SFV3L_P27401-Pro_2mut |
| PAPGGS | 14,593 | MLVBM_Q7SVK7_3mut |
| EAAAKGSSPAP | 14,594 | MLVBM_Q7SVK7_3mut |
| GGGGSSGGS | 14,595 | PERV_Q4VFZ2_3mut |
| PAPAPAPAPAPAP | 14,596 | SFV1_P23074 |
| GGSEAAAKGGG | 14,597 | SFV3L_P27401-Pro_2mut |
| GGSGGS | 14,598 | SFV1_P23074_2mut |
| GSSGGGGGS | 14,599 | MLVF5_P26810_3mutA |
| EAAAKGGGPAP | 14,600 | SFV3L_P27401 |
| EAAAKEAAAKEAAAKEAA | 14,601 | FOAMV_P14350-Pro_2mutA |
| AK | | |
| GGGPAPGSS | 14,602 | SFV3L_P27401_2mutA |
| GGGGSGGGGSGGGGSGGG | 14,603 | SFV3L_P27401_2mut |
| GS | | |
| EAAAKEAAAKEAAAKEAA | 14,604 | MMTVB_P03365_WS |
| AK | | |
| PAPGSSGGS | 14,605 | KORV_Q9TTC1-Pro_3mutA |
| PAPGSSEAAAK | 14,606 | FOAMV_P14350-Pro_2mut |
| GSSPAPEAAAK | 14,607 | BAEVM_P10272_3mut |
| EAAAKGGGGSEAAAK | 14,608 | FFV_O93209-Pro |
| GGSPAP | 14,609 | PERV_Q4VFZ2 |
| GGSGSSEAAAK | 14,610 | XMRV6_A1Z651_3mut |
| GGSEAAAKGGG | 14,611 | GALV_P21414_3mutA |
| PAPGGGGSS | 14,612 | AVIRE_P03360_3mutA |
| GGSGGSGGSGGS | 14,613 | PERV_Q4VFZ2 |
| GGGGSSGGS | 14,614 | PERV_Q4VFZ2_3mutA_WS |
| SGGSSGGSSGSETPGTSE | 14,615 | BAEVM_P10272_3mutA |
| SATPESSGGSSGGSS | | |
| GGGPAP | 14,616 | MLVAV_P03356_3mut |
| GGGGSGGGGSGGGGSGGG | 14,617 | FFV_O93209_2mut |
| GS | | |
| GSSEAAAK | 14,618 | FFV_O93209 |
| GGSPAPEAAAK | 14,619 | FOAMV_P14350_2mut |
| GGGGGSEAAAK | 14,620 | FOAMV_P14350_2mut |
| GSSPAPGGS | 14,621 | MLVBM_Q7SVK7_3mut |
| GSS | | SFVCP_Q87040_2mut |
| EAAAKPAP | 14,623 | FOAMV_P14350-Pro |
| EAAAKGGG | 14,624 | SFV3L_P27401_2mut |
| GGGEAAAK | 14,625 | AVIRE_P03360_3mutA |
| PAPGSSGGG | 14,626 | WMSV_P03359_3mut |
| EAAAKGGSPAP | 14,627 | SFV3L_P27401 |
| GSSGGSGGG | 14,628 | SFV3L_P27401-Pro_2mutA |
| GSSGGGEAAAK | 14,629 | GALV_P21414_3mutA |
| GGGPAPGSS | 14,630 | MLVBM_Q7SVK7_3mutA_WS |
| PAPGGGEAAAK | 14,631 | FFV_O93209-Pro_2mut |
| GSSGSSGSSGSS | 14,632 | SFV1_P23074_2mut |
| GGSEAAAK | 14,633 | PERV_Q4VFZ2_3mutA_WS |
| GGGEAAAKPAP | 14,634 | SFV3L_P27401_2mut |
| EAAAKGGGPAP | 14,635 | SFV3L_P27401_2mut |
| GGGGSSPAP | 14,636 | FLV_P10273_3mut |
| EAAAKPAPGSS | 14,637 | FFV_O93209_2mut |
| GGGGSSPAP | 14,638 | SFV3L_P27401_2mut |
| GSSGSS | 14,639 | KORV_Q9TTC1_3mutA |
| GGGGSGGGGSGGGGSGGG | 14,640 | BLVJ_P03361_2mut |
| GSGGGGS | | |
| GGGGSSGGS | 14,641 | GALV_P21414_3mutA |
| EAAAKGGSGSS | 14,642 | FFV_O93209-Pro |
| EAAAKPAP | 14,643 | PERV_Q4VFZ2 |
| GSSGGGEAAAK | 14,644 | MLVBM_Q7SVK7_3mut |
| PAPGGSGGG | 14,645 | BAEVM_P10272 |
| EAAAKGGGPAP | 14,646 | MLVF5_P26810 |
| GSSGSSGSS | 14,647 | MLVBM_Q7SVK7_3mut |
| GSSGGS | 14,648 | AVIRE_P03360_3mutA |
| GGSEAAAKGGG | 14,649 | FOAMV_P14350_2mut |
| EAAAKGGS | 14,650 | MLVF5_P26810_3mutA |
| GGSGSSGGG | 14,651 | WMSV_P03359_3mut |
| EAAAK | 14,652 | SFV1_P23074_2mut |
| GSSGGSPAP | 14,653 | SFV3L_P27401-Pro_2mutA |
| GGGGSSGGS | 14,654 | KORV_Q9TTC1_3mut |
| PAPGGSGGG | 14,655 | FFV_O93209-Pro_2mut |
| GGGPAPGGS | 14,656 | SFV3L_P27401_2mutA |
| GSSPAPEAAAK | 14,657 | FLV_P10273_3mut |
| GGSGSSPAP | 14,658 | SFV3L_P27401_2mut |
| GSSEAAAKGGS | 14,659 | SFV3L_P27401_2mut |
| PAPGGG | 14,660 | SFV3L_P27401_2mutA |
| SGSETPGTSESATPES | 14,661 | KORV_Q9TTC1-Pro_3mut |
| GGGGS | 14,662 | SFV1_P23074-Pro_2mutA |
| GSSGGGEAAAK | 14,663 | WMSV_P03359 |
| EAAAKGGGGSEAAAK | 14,664 | MLVF5_P26810_3mutA |
| GSSEAAAKPAP | 14,665 | FFV_O93209 |
| GGGGGG | 14,666 | SFV1_P23074_2mutA |
| EAAAKEAAAKEAAAK | 14,667 | MMTVB_P03365-Pro |
| EAAAKPAPGSS | 14,668 | MLVBM_Q7SVK7_3mut |
| GGSGSSEAAAK | 14,669 | SFV3L_P27401_2mutA |
| GGSEAAAK | 14,670 | MLVMS_P03355_3mut |
| GGSPAPEAAAK | 14,671 | SFV3L_P27401_2mut |
| GGGPAPGSS | 14,672 | SFV1_P23074 |
| GGGGGSEAAAK | 14,673 | MLVBM_Q7SVK7_3mutA_WS |
| EAAAKPAPGSS | 14,674 | KORV_Q9TTC1-Pro |
| GSSGSSGSSGSS | 14,675 | SFV3L_P27401_2mut |
| EAAAKPAP | 14,676 | SFV3L_P27401_2mut |
| GGGEAAAK | 14,677 | PERV_Q4VFZ2_3mut |
| GGSGGS | 14,678 | SFV3L_P27401_2mutA |
| EAAAKGSSGGS | 14,679 | MMTVB_P03365 |
| SGSETPGTSESATPES | 14,680 | SFV3L_P27401 |
| EAAAKGSSGGG | 14,681 | PERV_Q4VFZ2 |
| EAAAKEAAAKEAAAKEAA | 14,682 | MMTVB_P03365 |
| AKEAAAKEAAAK | | |
| GGSGGGPAP | 14,683 | KORV_Q9TTC1_3mutA |
| PAPAPAPAP | 14,684 | SFV3L_P27401 |
| GGGEAAAKGGS | 14,685 | SFV1_P23074_2mut |
| GSSGGSGGG | 14,686 | PERV_Q4VFZ2_3mut |
| PAPEAAAKGGS | 14,687 | FOAMV_P14350_2mutA |
| GGGEAAAKGSS | 14,688 | SFV3L_P27401_2mut |
| GGGGGGGGSGGGGSGGGG | 14,689 | MLVBM_Q7SVK7 |
| S | | |
| PAPGSSGGG | 14,690 | FLV_P10273 |
| GGSGSSGGG | 14,691 | FFV_O93209 |
| EAAAKPAPGSS | 14,692 | MLVBM_Q7SVK7 |
| GSSEAAAKGGG | 14,693 | SFV3L_P27401_2mutA |
| GGSGGSGGSGGSGGS | 14,694 | MLVF5_P26810 |
| GGSEAAAKPAP | 14,695 | SFV3L_P27401-Pro_2mutA |
| EAAAKGGSPAP | 14,696 | SFV3L_P27401_2mutA |
| EAAAKGGGGGS | 14,697 | SFV3L_P27401_2mut |
| GSSPAPEAAAK | 14,698 | SFV3L_P27401_2mutA |
| PAPAP | 14,699 | MLVBM_Q7SVK7_3mut |
| PAPGGSEAAAK | 14,700 | KORV_Q9TTC1-Pro |
| GGSGSS | 14,701 | MLVF5_P26810_3mutA |
| GGSEAAAKPAP | 14,702 | FFV_O93209_2mut |
| GSS | | MLVMS_P03355 |
| SGGSSGGSSGSETPGTSE | 14,704 | SFV3L_P27401-Pro |
| SATPESSGGSSGGSS | | |
| PAPGGGEAAAK | 14,705 | SFV3L_P27401_2mut |
| PAPGGGGGS | 14,706 | SFV3L_P27401-Pro_2mut |
| PAPGGSGSS | 14,707 | BAEVM_P10272_3mut |
| GSSGGGEAAAK | 14,708 | FFV_O93209 |
| GGSEAAAKPAP | 14,709 | SFV1_P23074_2mut |
| GGGGG | 14,710 | FLV_P10273_3mut |
| GGGEAAAKGSS | 14,711 | SFV3L_P27401 |
| GSSGSSGSSGSSGSS | 14,712 | SFV1_P23074-Pro |
| SGSETPGTSESATPES | 14,713 | AVIRE_P03360 |
| PAPGSSGGG | 14,714 | MLVBM_Q7SVK7_3mut |
| GGGGSSPAP | 14,715 | HTL3P_Q4U0X6_2mut |
| GGGEAAAK | 14,716 | SFV1_P23074 |
| GGSGGG | 14,717 | AVIRE_P03360 |
| EAAAKGSSGGG | 14,718 | SFV3L_P27401_2mutA |
| GSSPAPEAAAK | 14,719 | FOAMV_P14350-Pro_2mutA |
| GGGPAPGSS | 14,720 | WMSV_P03359 |
| EAAAKGSSGGG | 14,721 | MLVMS_P03355 |
| GGGGGSEAAAK | 14,722 | MLVMS_P03355 |
| EAAAKPAPGGS | 14,723 | SFV3L_P27401 |
| EAAAKGSSPAP | 14,724 | SFV3L_P27401 |
| GGGGGGG | 14,725 | FOAMV_P14350_2mutA |
| EAAAKEAAAKEAAAK | 14,726 | SFV3L_P27401 |
| GSSPAPGGS | 14,727 | FFV_O93209_2mutA |
| GGGGSSEAAAK | 14,728 | SFV3L_P27401-Pro_2mutA |
| GGSEAAAKGSS | 14,729 | GALV_P21414_3mutA |
| GGSEAAAKGSS | 14,730 | BAEVM_P10272_3mutA |
| EAAAKPAPGGG | 14,731 | MLVCB_P08361 |
| GSSGSSGSSGSSGSSGSS | 14,732 | SFV1_P23074-Pro |
| GGGGSEAAAKGGGGS | 14,733 | FOAMV_P14350_2mut |
| GSSPAPGGS | 14,734 | MLVMS_P03355_PLV919 |
| GGGGSGGGGS | 14,735 | FFV_O93209-Pro |
| GSSGGSPAP | 14,736 | KORV_Q9TTC1_3mutA |
| GGSGGS | 14,737 | GALV_P21414_3mutA |
| PAPGSSEAAAK | 14,738 | WMSV_P03359 |
| PAPGGGGSS | 14,739 | MMTVB_P03365-Pro |
| GGGGSSGGS | 14,740 | PERV_Q4VFZ2_3mutA_WS |
| GGGGSGGGGS | 14,741 | FFV_O93209_2mut |
| GGGGSGGGGSGGGGSGGG | 14,742 | XMRV6_A1Z651 |
| GS | | |
| GGSGSSEAAAK | 14,743 | SFV1_P23074_2mut |
| GGSGGGGSS | 14,744 | GALV_P21414_3mutA |
| GGSEAAAKPAP | 14,745 | MLVBM_Q7SVK7 |
| EAAAKGGSPAP | 14,746 | SFV1_P23074_2mutA |
| PAPAPAPAP | 14,747 | FFV_O93209 |
| GSSGGSPAP | 14,748 | MMTVB_P03365-Pro |
| GGGGGSPAP | 14,749 | KORV_Q9TTC1_3mutA |
| EAAAKGGGPAP | 14,750 | PERV_Q4VFZ2 |
| GSSGGSPAP | 14,751 | BAEVM_P10272 |
| GGGGG | 14,752 | FFV_O93209 |
| GGGGGS | 14,753 | FLV_P10273_3mutA |
| EAAAKEAAAKEAAAK | 14,754 | FOAMV_P14350 |
| PAPGGG | 14,755 | MLVCB_P08361_3mut |
| GSSGGSEAAAK | 14,756 | FOAMV_P14350_2mutA |
| GGSPAPGGG | 14,757 | FLV_P10273_3mut |
| GSSGSSGSSGSSGSSGSS | 14,758 | SFV1_P23074-Pro_2mutA |
| GGSPAPEAAAK | 14,759 | SFV3L_P27401 |
| PAPGGGGSS | 14,760 | HTL3P_Q4U0X6_2mutB |
| GGGGSSEAAAK | 14,761 | MMTVB_P03365_2mut_WS |
| PAPGGS | 14,762 | MLVRD_P11227_3mut |
| GGSGGSGGSGGSGGS | 14,763 | MMTVB_P03365 |
| GSAGSAAGSGEF | 14,764 | AVIRE_P03360 |
| GSSGGS | 14,765 | BAEVM_P10272_3mutA |
| GGSGGGGSS | 14,766 | MMTVB_P03365 |
| GGSGGGGSS | 14,767 | WMSV_P03359 |
| PAPEAAAKGSS | 14,768 | SFV1_P23074 |
| GSSGSSGSSGSS | 14,769 | SFV1_P23074-Pro_2mutA |
| PAPAPAPAPAPAP | 14,770 | SFV3L_P27401 |
| PAPGSSGGG | 14,771 | FLV_P10273_3mut |
| GGSGSSPAP | 14,772 | MLVMS_P03355 |
| GGSGGGPAP | 14,773 | FOAMV_P14350 |
| PAPGGGGGS | 14,774 | KORV_Q9TTC1_3mutA |
| EAAAKGSSPAP | 14,775 | GALV_P21414_3mutA |
| GGSGSSPAP | 14,776 | MLVBM_Q7SVK7_3mut |
| EAAAKGSS | 14,777 | SFV3L_P27401_2mut |
| GGGGGSEAAAK | 14,778 | WMSV_P03359 |
| GGGGGGGG | 14,779 | SFV1_P23074-Pro |
| EAAAKEAAAK | 14,780 | MLVBM_Q7SVK7 |
| GGGEAAAKGGS | 14,781 | MLVBM_Q7SVK7 |
| EAAAKGGSPAP | 14,782 | SFV3L_P27401_2mut |
| GSSEAAAK | 14,783 | XMRV6_A1Z651 |
| PAPGGGEAAAK | 14,784 | MMTVB_P03365_WS |
| GGSPAP | 14,785 | GALV_P21414_3mutA |
| GSSPAPGGG | 14,786 | MLVBM_Q7SVK7_3mutA_WS |
| GGSGSSPAP | 14,787 | SFV1_P23074_2mutA |
| GGS | | HTL32_Q0R5R2_2mut |
| GGSGGGGSS | 14,789 | MMTVB_P03365-Pro |
| GGGGSGGGGSGGGGSGGG | 14,790 | SFVCP_Q87040_2mutA |
| GS | | |
| EAAAKGGGPAP | 14,791 | FOAMV_P14350_2mut |
| GSSGGGEAAAK | 14,792 | MMTVB_P03365 |
| SGGSSGGSSGSETPGTSE | 14,793 | MLVBM_Q7SVK7_3mutA_WS |
| SATPESSGGSSGGSS | | |
| AEAAAKEAAAKEAAAKEA | 14,794 | MMTVB_P03365_WS |
| AAKALEAEAAAKEAAAKE | | |
| AAAKEAAAKA | | |
| EAAAKEAAAK | 14,795 | FOAMV_P14350-Pro_2mut |
| GSSPAPEAAAK | 14,796 | FOAMV_P14350_2mutA |
| EAAAKPAPGGS | 14,797 | GALV_P21414_3mutA |
| GSSGGSPAP | 14,798 | KORV_Q9TTC1-Pro_3mut |
| GGGPAPEAAAK | 14,799 | MLVAV_P03356 |
| GGGEAAAKPAP | 14,800 | SFV1_P23074-Pro_2mut |
| GGGGGSEAAAK | 14,801 | SFV3L_P27401_2mut |
| GGGPAPGSS | 14,802 | SFV3L_P27401_2mut |
| GGSEAAAKPAP | 14,803 | AVIRE_P03360 |
| GSSGSSGSSGSSGSSGSS | 14,804 | SFV1_P23074-Pro_2mut |
| EAAAKGSSGGS | 14,805 | FOAMV_P14350_2mutA |
| GGGGGG | 14,806 | MLVBM_Q7SVK7_3mut |
| GSSPAPGGS | 14,807 | PERV_Q4VFZ2 |
| GGSGSSPAP | 14,808 | GALV_P21414_3mutA |
| GGGPAPEAAAK | 14,809 | SFV3L_P27401 |
| GGSGGGEAAAK | 14,810 | WMSV_P03359 |
| GSAGSAAGSGEF | 14,811 | SFV1_P23074_2mut |
| GSSGGGEAAAK | 14,812 | MLVMS_P03355 |
| GGG | | MMTVB_P03365-Pro |
| PAPGSSGGS | 14,814 | FOAMV_P14350_2mut |
| GGGGSSPAP | 14,815 | FFV_O93209_2mut |
| SGGSSGGSSGSETPGTSE | 14,816 | MMTVB_P03365_WS |
| SATPESSGGSSGGSS | | |
| GGGGGGG | 14,817 | XMRV6_A1Z651 |
| PAPAPAPAPAP | 14,818 | FOAMV_P14350 |
| GGGGSGGGGSGGGGSGGG | 14,819 | MMTVB_P03365_2mut_WS |
| GS | | |
| GGSGGGPAP | 14,820 | SFV3L_P27401_2mut |
| GGGGGG | 14,821 | SFV1_P23074-Pro |
| EAAAKPAPGSS | 14,822 | SFV3L_P27401_2mut |
| GGGGSSGGS | 14,823 | HTL3P_Q4U0X6_2mut |
| PAPGSSEAAAK | 14,824 | MMTVB_P03365-Pro |
| GGGGSSPAP | 14,825 | FOAMV_P14350-Pro_2mut |
| PAPGSSGGS | 14,826 | MMTVB_P03365 |
| AEAAAKEAAAKEAAAKEA | 14,827 | SRV2_P51517 |
| AAKALEAEAAAKEAAAKE | | |
| AAAKEAAAKA | | |
| PAPAPAP | 14,828 | MMTVB_P03365_2mut_WS |
| PAPGGGGGS | 14,829 | MMTVB_P03365_2mutB |
| GGGGSS | 14,830 | SFV1_P23074-Pro_2mutA |
| EAAAKEAAAKEAAAKEAA | 14,831 | SFV3L_P27401-Pro |
| AK | | |
| GGSGGSGGSGGSGGS | 14,832 | MMTVB_P03365-Pro |
| GGGGGGG | 14,833 | SFV3L_P27401_2mut |
| PAPGGGEAAAK | 14,834 | SFV3L_P27401 |
| PAPGSS | 14,835 | FOAMV_P14350_2mutA |
| GGGGSGGGGS | 14,836 | SFVCP_Q87040_2mutA |
| GSSGGSGGG | 14,837 | XMRV6_A1Z651 |
| GGGGSGGGGSGGGGSGGG | 14,838 | MLVBM_Q7SVK7 |
| GSGGGGSGGGGS | | |
| GSSEAAAKGGG | 14,839 | FFV_O93209-Pro_2mut |
| GGSEAAAKPAP | 14,840 | SFV3L_P27401-Pro |
| GSSGGSGGG | 14,841 | SFV1_P23074_2mut |
| EAAAKGGGGSS | 14,842 | FOAMV_P14350_2mutA |
| GGGGGG | 14,843 | SFV3L_P27401_2mut |
| GGGGG | 14,844 | MLVBM_Q7SVK7_3mut |
| PAPEAAAKGGG | 14,845 | SFV3L_P27401 |
| EAAAKGGSPAP | 14,846 | KORV_Q9TTC1_3mutA |
| GGGEAAAKPAP | 14,847 | SFV1_P23074_2mut |
| GSSGSSGSSGSSGSSGSS | 14,848 | KORV_Q9TTC1-Pro |
| EAAAKEAAAKEAAAKEAA | 14,849 | SFVCP_Q87040 |
| AK | | |
| PAPGSSEAAAK | 14,850 | MLVBM_Q7SVK7 |
| GSSGSSGSS | 14,851 | FFV_O93209-Pro_2mut |
| GSSGGGPAP | 14,852 | SFV3L_P27401-Pro_2mut |
| GGGPAPEAAAK | 14,853 | WMSV_P03359_3mut |
| GGGEAAAK | 14,854 | MMTVB_P03365-Pro |
| GSSGSSGSSGSS | 14,855 | SFV3L_P27401-Pro_2mutA |
| PAPAPAPAPAP | 14,856 | FFV_O93209-Pro |
| GGSPAPEAAAK | 14,857 | FFV_O93209-Pro_2mut |
| GSSGSSGSSGSSGSSGSS | 14,858 | GALV_P21414 |
| EAAAKEAAAKEAAAKEAA | 14,859 | FOAMV_P14350 |
| AKEAAAK | | |
| GGGPAPEAAAK | 14,860 | MMTVB_P03365-Pro |
| PAPGGSGGG | 14,861 | MLVF5_P26810_3mutA |
| PAPGGSGGG | 14,862 | FLV_P10273_3mut |
| GGGEAAAKGGS | 14,863 | SFV3L_P27401 |
| GSAGSAAGSGEF | 14,864 | MLVBM_Q7SVK7_3mut |
| GSSPAPGGG | 14,865 | MPMV_P07572_2mutB |
| GSSGSSGSSGSSGSSGSS | 14,866 | FOAMV_P14350 |
| GGSGGGGSS | 14,867 | BLVJ_P03361_2mut |
| PAPEAAAKGSS | 14,868 | SFV1_P23074-Pro |
| GGG | | FFV_O93209 |
| EAAAKGGGGSS | 14,870 | SFV1_P23074_2mut |
| EAAAKEAAAKEAAAKEAA | 14,871 | SRV2_P51517 |
| AKEAAAKEAAAK | | |
| GGGGSGGGGSGGGGSGGG | 14,872 | MMTVB_P03365 |
| GSGGGGSGGGGS | | |
| GGGEAAAKGGS | 14,873 | MMTVB_P03365_WS |
| GSSGSS | 14,874 | SFV1_P23074 |
| GSSGGGGGS | 14,875 | SFV3L_P27401 |
| GGGGSSEAAAK | 14,876 | SFV1_P23074 |
| EAAAKGSSGGS | 14,877 | HTL1A_P03362_2mutB |
| GSSEAAAKGGS | 14,878 | GALV_P21414_3mutA |
| EAAAKGSSPAP | 14,879 | SFV1_P23074 |
| EAAAKPAPGSS | 14,880 | SFV3L_P27401_2mutA |
| PAPGSSGGG | 14,881 | SFV3L_P27401-Pro_2mut |
| GGGGSGGGGSGGGGSGGG | 14,882 | SFV3L_P27401-Pro |
| GSGGGGSGGGGS | | |
| EAAAKEAAAKEAAAKEAA | 14,883 | MMTVB_P03365_WS |
| AKEAAAK | | |
| GGGGSSEAAAK | 14,884 | MLVF5_P26810_3mutA |
| EAAAKGGSPAP | 14,885 | GALV_P21414 |
| PAPEAAAKGSS | 14,886 | MMTVB_P03365_WS |
| GSSGGGGGS | 14,887 | SFVCP_Q87040_2mut |
| GGGGSSPAP | 14,888 | SFV1_P23074 |
| EAAAKGGGGSS | 14,889 | XMRV6_A1Z651 |
| PAPAPAPAP | 14,890 | MMTVB_P03365 |
| GGSEAAAKGSS | 14,891 | SFV3L_P27401_2mutA |
| GSSPAPGGG | 14,892 | MMTVB_P03365_WS |
| GGGGGG | 14,893 | SFV3L_P27401-Pro |
| GGSGGSGGS | 14,894 | FOAMV_P14350-Pro_2mut |
| PAPAPAPAPAPAP | 14,895 | WMSV_P03359 |
| GSSPAP | 14,896 | MLVBM_Q7SVK7 |
| GGGGGSGSS | 14,897 | MMTVB_P03365_2mut_WS |
| EAAAKGSSGGS | 14,898 | MMTVB_P03365_2mutB_WS |
| EAAAK | 14,899 | FFV_O93209_2mutA |
| PAPEAAAK | 14,900 | SFV1_P23074-Pro |
| EAAAKGGSGSS | 14,901 | SFV3L_P27401 |
| GGSGGSGGS | 14,902 | FFV_O93209-Pro |
| GSSGGGEAAAK | 14,903 | MMTVB_P03365 |
| SGGSSGGSSGSETPGTSE | 14,904 | MLVFF_P26809_3mutA |
| SATPESSGGSSGGSS | | |
| GGSGGSGGSGGSGGSGGS | 14,905 | HTL1L_P0C211_2mutB |
| GGGEAAAK | 14,906 | SFV3L_P27401-Pro_2mutA |
| GGGGGSGSS | 14,907 | MMTVB_P03365 |
| GSSPAPGGS | 14,908 | FOAMV_P14350_2mutA |
| EAAAKGSS | 14,909 | MLVMS_P03355 |
| GSSGGSGGG | 14,910 | FFV_O93209-Pro |
| GGSGGGGSS | 14,911 | MMTVB_P03365-Pro_2mut |
| GGSPAPGSS | 14,912 | FOAMV_P14350_2mut |
| GGSGGSGGSGGSGGSGGS | 14,913 | SFVCP_Q87040-Pro_2mut |
| GSSEAAAKGGG | 14,914 | FOAMV_P14350_2mutA |
| GGSGGSGGS | 14,915 | MMTVB_P03365-Pro |
| GSSGSSGSSGSSGSSGSS | 14,916 | MMTVB_P03365_2mut_WS |
| GSSGSSGSSGSSGSS | 14,917 | MMTVB_P03365-Pro |
| PAPEAAAK | 14,918 | WDSV_O92815 |
| GSSGSSGSSGSSGSS | 14,919 | FFV_O93209-Pro_2mut |
| EAAAKGGGGSEAAAK | 14,920 | MMTVB_P03365-Pro |
| GGSPAPEAAAK | 14,921 | FOAMV_P14350 |
| GSSGSS | 14,922 | PERV_Q4VFZ2 |
| GGG | | MMTVB_P03365-Pro |
| GGGGSGGGGSGGGGS | 14,924 | FFV_O93209_2mut |
| EAAAKEAAAKEAAAKEAA | 14,925 | MMTVB_P03365-Pro |
| AKEAAAKEAAAK | | |
| GGSGSSPAP | 14,926 | WMSV_P03359 |
| GGGGGGGG | 14,927 | SFV3L_P27401_2mut |
| PAPGSSEAAAK | 14,928 | FOAMV_P14350-Pro_2mutA |
| GGGGSSPAP | 14,929 | FOAMV_P14350_2mut |
| GSSGGSPAP | 14,930 | MLVBM_Q7SVK7_3mut |
| GSSGGGGGS | 14,931 | GALV_P21414_3mutA |
| EAAAKEAAAKEAAAKEAA | 14,932 | MMTVB_P03365 |
| AKEAAAK | | |
| GSSGGGGGS | 14,933 | SFV1_P23074_2mut |
| GGGGSEAAAKGGGGS | 14,934 | SFV1_P23074 |
| GGGEAAAKPAP | 14,935 | FFV_O93209 |
| PAPGGGEAAAK | 14,936 | SFV1_P23074 |
| GGSGGGEAAAK | 14,937 | PERV_Q4VFZ2_3mutA_WS |
| GSSGGG | 14,938 | MMTVB_P03365-Pro |
| EAAAKGSSGGS | 14,939 | FFV_O93209_2mut |
| GGGGG | 14,940 | SFV1_P23074_2mut |
| GGGPAP | 14,941 | SFV3L_P27401 |
| GSSGGSEAAAK | 14,942 | FFV_O93209 |
| SGGSSGGSSGSETPGTSE | 14,943 | MMTVB_P03365-Pro |
| SATPESSGGSSGGSS | | |
| GSSGGGEAAAK | 14,944 | SFV1_P23074_2mutA |
| GSSGSSGSSGSSGSS | 14,945 | SFV3L_P27401_2mut |
| GGSEAAAKPAP | 14,946 | FLV_P10273 |
| GGGGSGGGGS | 14,947 | FOAMV_P14350-Pro_2mutA |
| GSSEAAAKPAP | 14,948 | SFV3L_P27401 |
| GGGGSEAAAKGGGGS | 14,949 | MMTVB_P03365-Pro |
| PAPGSSEAAAK | 14,950 | MLVF5_P26810_3mut |
| EAAAKGGSGGG | 14,951 | SFV3L_P27401 |
| GGGPAPGGS | 14,952 | SFV3L_P27401 |
| GSSEAAAKGGS | 14,953 | FOAMV_P14350_2mutA |
| EAAAKGGSGGG | 14,954 | HTL1L_P0C211 |
| GSSGGSPAP | 14,955 | SFV3L_P27401_2mutA |
| PAPAP | 14,956 | FFV_O93209 |
| PAPGGSGSS | 14,957 | MMTVB_P03365_WS |
| EAAAKGGGGGS | 14,958 | FOAMV_P14350_2mut |
| PAPEAAAKGGS | 14,959 | SFV3L_P27401_2mut |
| GSSEAAAKPAP | 14,960 | MMTVB_P03365-Pro |
| GGSGGS | 14,961 | PERV_Q4VFZ2_3mut |
| GSSEAAAKGGG | 14,962 | FFV_O93209-Pro_2mutA |
| EAAAK | 14,963 | HTL1L_P0C211 |
| GSSPAP | 14,964 | MLVMS_P03355 |
| EAAAKPAPGGG | 14,965 | FFV_O93209-Pro_2mut |
| GGGGSEAAAKGGGGS | 14,966 | SFV1_P23074-Pro_2mut |
| EAAAKGSSGGS | 14,967 | SFV3L_P27401 |
| GSAGSAAGSGEF | 14,968 | FFV_O93209_2mutA |
| PAPEAAAKGGS | 14,969 | MMTVB_P03365_2mutB_WS |
| EAAAKEAAAKEAAAKEAA | 14,970 | MMTVB_P03365 |
| AKEAAAKEAAAK | | |
| GGS | | MMTVB_P03365 |
| GGSEAAAKPAP | 14,972 | SFV1_P23074 |
| EAAAKGSSGGG | 14,973 | HTLV2_P03363_2mut |
| GGSEAAAKGGG | 14,974 | MMTVB_P03365_WS |
| GGSGGS | 14,975 | FFV_O93209-Pro |
| GSSEAAAKGGS | 14,976 | MMTVB_P03365-Pro |
| PAPAPAPAPAP | 14,977 | SFV1_P23074_2mutA |
| GGSEAAAKGGG | 14,978 | MMTVB_P03365_2mutB_WS |
| PAPAPAPAP | 14,979 | MMTVB_P03365_WS |
| GGGGSGGGGSGGGGSGGG | 14,980 | HTL3P_Q4U0X6_2mut |
| GSGGGGS | | |
| PAPGGSEAAAK | 14,981 | SFV1_P23074-Pro_2mut |
| GGSGGGPAP | 14,982 | MMTVB_P03365 |
| GSSGSSGSSGSSGSSGSS | 14,983 | MMTVB_P03365-Pro |
| GGSEAAAKPAP | 14,984 | SFV1_P23074-Pro |
| GGGEAAAKGSS | 14,985 | SFV3L_P27401_2mutA |
| GGGPAPGGS | 14,986 | AVIRE_P03360 |
| PAPGGG | 14,987 | MLVRD_P11227 |
| GGSEAAAKGSS | 14,988 | SFV3L_P27401_2mut |
| GGGEAAAKGSS | 14,989 | FOAMV_P14350_2mut |
| GGGEAAAKGSS | 14,990 | SFV1_P23074-Pro |
| EAAAKEAAAKEAAAKEAA | 14,991 | MLVAV_P03356 |
| AK | | |
| EAAAKGGGPAP | 14,992 | JSRV_P31623_2mutB |
| EAAAKGGGGSS | 14,993 | FOAMV_P14350_2mut |
| EAAAKEAAAKEAAAKEAA | 14,994 | SRV2_P51517 |
| AKEAAAK | | |
| GSSGGGGGS | 14,995 | FFV_O93209 |
| PAPAPAP | 14,996 | FOAMV_P14350_2mutA |
| GGSGGSGGSGGS | 14,997 | FOAMV_P14350 |
| GGGEAAAK | 14,998 | MMTVB_P03365_WS |
| GGGGGS | 14,999 | SFV1_P23074_2mutA |
| GGSGGS | 15,000 | WMSV_P03359_3mut |
| EAAAKGGS | 15,001 | MMTVB_P03365-Pro |
| GGGGSS | 15,002 | BLVJ_P03361_2mut |
| PAPAP | 15,003 | MMTVB_P03365-Pro_2mut |
| PAPGGG | 15,004 | SMRVH_P03364 |
| EAAAKGGGGSS | 15,005 | SFV3L_P27401 |
| PAPAPAPAPAP | 15,006 | MMTVB_P03365 |
| GGGPAP | 15,007 | MMTVB_P03365-Pro |
| GSSGGSGGG | 15,008 | MMTVB_P03365 |
| EAAAKGGGPAP | 15,009 | FOAMV_P14350_2mutA |
| GSSGSSGSSGSS | 15,010 | SFV1_P23074 |
| GGGGSGGGGS | 15,011 | SFV3L_P27401 |
| GSSGGSGGG | 15,012 | MLVF5_P26810 |
| GGGEAAAKPAP | 15,013 | MMTVB_P03365-Pro |
| PAPEAAAK | 15,014 | HTLV2_P03363_2mut |
| GSSGSSGSSGSS | 15,015 | FOAMV_P14350_2mut |
| GSSEAAAKPAP | 15,016 | MMTVB_P03365-Pro |
| PAPEAAAKGGG | 15,017 | HTL3P_Q4U0X6_2mut |
| GGSEAAAKGSS | 15,018 | MMTVB_P03365-Pro |
| EAAAKPAPGGS | 15,019 | MMTVB_P03365_2mut_WS |
| GSSGGSEAAAK | 15,020 | MLVF5_P26810_3mutA |
| GGGGSGGGGSGGGGSGGG | 15,021 | MLVF5_P26810_3mut |
| GSGGGGSGGGGS | | |
| EAAAKGGGGSS | 15,022 | MMTVB_P03365-Pro |
| GGGGGSGSS | 15,023 | HTL1A_P03362_2mutB |
| PAPAP | 15,024 | FFV_O93209-Pro_2mut |
| GGGGGSPAP | 15,025 | HTL1C_P14078_2mut |
| GGGPAP | 15,026 | HTLV2_P03363_2mut |
| EAAAKGGGGSEAAAK | 15,027 | SFVCP_Q87040 |
| GGSEAAAKGGG | 15,028 | FFV_O93209-Pro_2mutA |
| GSSPAPGGS | 15,029 | FOAMV_P14350-Pro_2mut |
| GGGGGGG | 15,030 | MMTVB_P03365-Pro |
| EAAAKGSS | 15,031 | SFV3L_P27401_2mutA |
| EAAAKGGGGSEAAAK | 15,032 | MMTVB_P03365-Pro |
| GGGGSEAAAKGGGGS | 15,033 | SFV1_P23074-Pro_2mutA |
| EAAAKGGGGSS | 15,034 | MMTVB_P03365 |
| GGGEAAAKGGS | 15,035 | SFV1_P23074 |
| PAPEAAAKGGG | 15,036 | MLVF5_P26810 |
| GGGGSSGGS | 15,037 | MMTVB_P03365 |
| GGSGSS | 15,038 | MMTVB_P03365 |
| PAPAPAPAPAPAP | 15,039 | KORV_Q9TTC1 |
| EAAAKGGG | 15,040 | SFV1_P23074-Pro_2mut |
| PAPAPAPAPAPAP | 15,041 | SRV2_P51517 |
| GSSGSSGSSGSSGSS | 15,042 | FFV_O93209-Pro_2mutA |
| GGGGSS | 15,043 | FOAMV_P14350_2mut |
| PAPGGGEAAAK | 15,044 | MMTVB_P03365_WS |
| GGSGGGEAAAK | 15,045 | FFV_O93209-Pro_2mut |
| PAPAPAPAPAP | 15,046 | MMTVB_P03365_WS |
| GGGEAAAKGGS | 15,047 | MMTVB_P03365-Pro |
| GGGEAAAKGSS | 15,048 | MMTVB_P03365_2mutB |
| GSSPAPEAAAK | 15,049 | MMTVB_P03365_WS |
| EAAAKEAAAKEAAAKEAA | 15,050 | SFV1_P23074-Pro_2mutA |
| AKEAAAK | | |
| PAPGGG | 15,051 | SFV3L_P27401 |
| GSSEAAAKGGG | 15,052 | MMTVB_P03365_WS |
| GGGGSSEAAAK | 15,053 | FOAMV_P14350_2mut |
| PAPGSSGGS | 15,054 | SFV1_P23074-Pro_2mut |
| GSSGSSGSSGSSGSSGSS | 15,055 | SFV3L_P27401 |
| EAAAKGSSGGG | 15,056 | MMTVB_P03365 |
| PAPGGGGSS | 15,057 | WDSV_O92815_2mutA |
| GGSPAP | 15,058 | MMTVB_P03365-Pro |
| GGSGGSGGSGGSGGS | 15,059 | SFVCP_Q87040-Pro_2mut |
| PAPAPAPAP | 15,060 | MMTVB_P03365-Pro |
| GGGGG | 15,061 | HTL1A_P03362 |
| GGSGGSGGSGGS | 15,062 | SFV1_P23074_2mutA |
| GSSGSSGSSGSSGSS | 15,063 | FOAMV_P14350-Pro_2mut |
| PAPGGSEAAAK | 15,064 | MMTVB_P03365_2mutB_WS |
| PAPAPAPAP | 15,065 | SFV1_P23074_2mut |
| PAPGGGGSS | 15,066 | MMTVB_P03365 |
| GGSGSS | 15,067 | SFV3L_P27401_2mut |
| EAAAKEAAAKEAAAKEAA | 15,068 | MMTVB_P03365_2mut |
| AK | | |
| EAAAKGGSGGG | 15,069 | HTL3P_Q4U0X6_2mut |
| PAPGGGGSS | 15,070 | SFVCP_Q87040-Pro_2mutA |
| EAAAKGGGGGS | 15,071 | MLVAV_P03356 |
| GGGGGS | 15,072 | FOAMV_P14350_2mut |
| GGGEAAAKGGS | 15,073 | FFV_O93209-Pro_2mutA |
| EAAAKPAPGGG | 15,074 | MMTVB_P03365_2mutB |
| GGSGGGPAP | 15,075 | FFV_O93209_2mut |
| GSSEAAAKPAP | 15,076 | MMTVB_P03365 |
| PAPAPAPAPAPAP | 15,077 | SFV1_P23074_2mut |
| GGSPAPGGG | 15,078 | MMTVB_P03365-Pro |
| GGSGGGEAAAK | 15,079 | MMTVB_P03365 |
| PAPAP | 15,080 | SFVCP_Q87040 |
| GSSEAAAK | 15,081 | SFVCP_Q87040 |
| GGGGSGGGGSGGGGS | 15,082 | MMTVB_P03365-Pro |
| GSSGSSGSS | 15,083 | SFV3L_P27401 |
| EAAAKGGSGGG | 15,084 | MMTVB_P03365-Pro |
| GSSPAP | 15,085 | SFV1_P23074_2mut |
| GGGEAAAK | 15,086 | SFV1_P23074-Pro |
| AEAAAKEAAAKEAAAKEA | 15,087 | MMTVB_P03365-Pro |
| AAKALEAEAAAKEAAAKE | | |
| AAAKEAAAKA | | |
| PAPGGS | 15,088 | HTL1C_P14078_2mut |
| PAPGSSGGS | 15,089 | SFV1_P23074_2mut |
| PAPEAAAK | 15,090 | MMTVB_P03365_WS |
| PAPAP | 15,091 | MMTVB_P03365-Pro |
| EAAAKGGS | 15,092 | HTL1A_P03362_2mut |
| GGGGSEAAAKGGGGS | 15,093 | HTL1C_P14078 |
| EAAAKGSSGGS | 15,094 | FOAMV_P14350-Pro |
| PAPGGSGSS | 15,095 | MMTVB_P03365-Pro |
| PAPGGSEAAAK | 15,096 | SFV1_P23074_2mut |
| PAPGSSEAAAK | 15,097 | FFV_O93209-Pro_2mut |
| PAPGSSGGG | 15,098 | FOAMV_P14350- |
| | | Pro_2mutA |
| GSSGGGEAAAK | 15,099 | AVIRE_P03360 |
| GGGGGG | 15,100 | SMRVH_P03364_2mut |
| PAPEAAAKGGG | 15,101 | MMTVB_P03365-Pro |
| GGGEAAAKGGS | 15,102 | SFVCP_Q87040_2mutA |
| PAPAPAPAPAP | 15,103 | SRV2_P51517 |
| GSSGSSGSSGSSGSSGSS | 15,104 | MMTVB_P03365 |
| EAAAKGGGPAP | 15,105 | MLVAV_P03356 |
| PAPAPAPAPAP | 15,106 | FOAMV_P14350- |
| | | Pro_2mutA |
| PAPGGSEAAAK | 15,107 | FOAMV_P14350 |
| GSSGGGPAP | 15,108 | HTL32_Q0R5R2_2mutB |
| GGGGGSPAP | 15,109 | HTL3P_Q4U0X6_2mutB |
| GSSGGSGGG | 15,110 | MMTVB_P03365-Pro |
| PAPAP | 15,111 | SFVCP_Q87040-Pro |
| GSSGGGPAP | 15,112 | MMTVB_P03365-Pro |
| GGSGSS | 15,113 | MMTVB_P03365-Pro_2mut |
| GGSPAPEAAAK | 15,114 | SFV1_P23074-Pro_2mut |
| EAAAKGGSGGG | 15,115 | SFV3L_P27401_2mut |
| GGGGSSEAAAK | 15,116 | MMTVB_P03365_WS |
| GGGGGSGSS | 15,117 | MMTVB_P03365_2mut |
| GGGGSSGGS | 15,118 | SFV1_P23074-Pro_2mutA |
| EAAAKGGGGSEAAAK | 15,119 | MMTVB_P03365_WS |
| PAPGGGEAAAK | 15,120 | SFV1_P23074-Pro |
| PAPEAAAKGGG | 15,121 | MMTVB_P03365 |
| AEAAAKEAAAKEAAAKEA | 15,122 | MMTVB_P03365 |
| AAKALEAEAAAKEAAAKE | | |
| AAAKEAAAKA | | |
| GSSGGSEAAAK | 15,123 | FOAMV_P14350-Pro_2mut |
| GGSPAP | 15,124 | MLVBM_Q7SVK7_3mut |
| GSSEAAAK | 15,125 | FOAMV_P14350 |
| GSSEAAAK | 15,126 | MMTVB_P03365-Pro |
| EAAAKGSSGGS | 15,127 | HTL1A_P03362_2mut |
| GGGEAAAKPAP | 15,128 | FOAMV_P14350-Pro_2mut |
| EAAAKGGSPAP | 15,129 | FOAMV_P14350 |
| GSSEAAAKPAP | 15,130 | MMTVB_P03365_WS |
| GSSGSSGSS | 15,131 | FOAMV_P14350_2mut |
| EAAAKEAAAKEAAAKEAA | 15,132 | MMTVB_P03365_WS |
| AK | | |
| EAAAK | 15,133 | MMTVB_P03365 |
| PAPGSS | 15,134 | BAEVM_P10272 |
| PAPGGS | 15,135 | FFV_O93209-Pro_2mut |
| GGSGGS | 15,136 | SFV1_P23074-Pro_2mutA |
| SGGSSGGSSGSETPGTSE | 15,137 | HTLV2_P03363_2mut |
| SATPESSGGSSGGSS | | |
| GGSGGGEAAAK | 15,138 | MMTVB_P03365_WS |
| PAPGSSGGG | 15,139 | HTL1A_P03362 |
| GGSGGS | 15,140 | SFV3L_P27401-Pro |
| GSSGSS | 15,141 | SFV1_P23074-Pro |
| PAPGGSEAAAK | 15,142 | MMTVB_P03365 |
| GSAGSAAGSGEF | 15,143 | MMTVB_P03365-Pro |
| PAPGGG | 15,144 | FOAMV_P14350_2mut |
| EAAAKGGSGSS | 15,145 | MMTVB_P03365_WS |
| GSSGGGEAAAK | 15,146 | SFV3L_P27401-Pro |
| GGSGGGPAP | 15,147 | FOAMV_P14350-Pro_2mut |
| PAPAPAPAPAPAP | 15,148 | WDSV_O92815 |
| SGSETPGTSESATPES | 15,149 | SFVCP_Q87040-Pro_2mutA |
| GGSGGSGGS | 15,150 | SFV1_P23074 |
| GGGGSS | 15,151 | SFVCP_Q87040_2mut |
| GGGGGSEAAAK | 15,152 | MMTVB_P03365 |
| SGSETPGTSESATPES | 15,153 | MMTVB_P03365_WS |
| PAPAPAP | 15,154 | SFV3L_P27401 |
| PAPEAAAKGSS | 15,155 | MMTVB_P03365_2mutB_WS |
| GSSGSSGSSGSSGSS | 15,156 | SRV2_P51517 |
| GGGPAPGSS | 15,157 | HTL32_Q0R5R2_2mutB |
| GGSGGGGSS | 15,158 | MMTVB_P03365-Pro |
| SGSETPGTSESATPES | 15,159 | SRV2_P51517 |
| EAAAKGSSGGS | 15,160 | MMTVB_P03365-Pro |
| GSSPAPEAAAK | 15,161 | MMTVB_P03365-Pro |
| GSSPAPEAAAK | 15,162 | SRV2_P51517 |
| GGGGSSPAP | 15,163 | MMTVB_P03365-Pro |
| PAPGGGEAAAK | 15,164 | SFV1_P23074-Pro_2mutA |
| PAPEAAAKGGS | 15,165 | MMTVB_P03365 |
| GSSGSSGSSGSSGSSGSS | 15,166 | FOAMV_P14350-Pro |
| GGSPAPGSS | 15,167 | SFV3L_P27401 |
| GGGPAPGGS | 15,168 | SFV1_P23074-Pro_2mutA |
| GGGPAPGSS | 15,169 | MMTVB_P03365-Pro |
| EAAAKPAP | 15,170 | MLVBM_Q7SVK7 |
| EAAAKEAAAKEAAAK | 15,171 | HTL1C_P14078 |
| GSSGGSEAAAK | 15,172 | SRV2_P51517 |
| PAPGGGGGS | 15,173 | SRV2_P51517 |
| GGGEAAAK | 15,174 | FFV_O93209-Pro_2mut |
| EAAAKGGGPAP | 15,175 | HTL32_Q0R5R2 |
| GGSGSSGGG | 15,176 | MMTVB_P03365 |
| PAPEAAAKGSS | 15,177 | MMTVB_P03365-Pro |
| PAPGGGGGS | 15,178 | MMTVB_P03365-Pro |
| EAAAKGGGGGS | 15,179 | MMTVB_P03365_WS |
| GGGGGS | 15,180 | MMTVB_P03365-Pro |
| GGGGGGGGSGGGGSGGGG | 15,181 | HTL1C_P14078 |
| SGGGGS | | |
| EAAAKGGSPAP | 15,182 | MMTVB_P03365 |
| GGGGSSPAP | 15,183 | FFV_O93209-Pro_2mut |
| GGGGSSGGS | 15,184 | MMTVB_P03365-Pro |
| PAPGSSGGS | 15,185 | MMTVB_P03365-Pro |
| GGGGGS | 15,186 | SRV2_P51517 |
| GGSGSSGGG | 15,187 | MMTVB_P03365 |
| GSSGGSEAAAK | 15,188 | MMTVB_P03365-Pro |
| EAAAKEAAAKEAAAKEAA | 15,189 | GALV_P21414 |
| AK | | |
| GGSEAAAKGGG | 15,190 | MMTVB_P03365-Pro |
| SGGSSGGSSGSETPGTSE | 15,191 | MMTVB_P03365-Pro |
| SATPESSGGSSGGSS | | |
| GSSEAAAKGGS | 15,192 | MMTVB_P03365 |
| GGGGSGGGGSGGGGSGGG | 15,193 | HTL3P_Q4U0X6_2mutB |
| GSGGGGSGGGGS | | |
| GGGEAAAK | 15,194 | MMTVB_P03365-Pro |
| PAPAPAPAP | 15,195 | MMTVB_P03365-Pro |
| PAPGSSGGG | 15,196 | MMTVB_P03365 |
| GSSGSSGSSGSSGSS | 15,197 | GALV_P21414 |
| GGSPAP | 15,198 | MMTVB_P03365_WS |
| GGGGSGGGGSGGGGSGGG | 15,199 | MMTVB_P03365-Pro |
| GSGGGGSGGGGS | | |
| PAPEAAAK | 15,200 | MMTVB_P03365-Pro |
| PAPGSSGGG | 15,201 | SFV1_P23074-Pro_2mutA |
| GGGGGSEAAAK | 15,202 | MMTVB_P03365_2mutB_WS |
| PAPAPAPAPAP | 15,203 | MMTVB_P03365-Pro |
| EAAAKGGSGSS | 15,204 | MMTVB_P03365-Pro |
| EAAAKEAAAKEAAAKEAA | 15,205 | MLVRD_P11227_3mut |
| AK | | |
| PAPAPAPAP | 15,206 | FOAMV_P14350_2mutA |
| GGGPAPGSS | 15,207 | SFVCP_Q87040_2mut |
| PAPEAAAKGSS | 15,208 | SFVCP_Q87040_2mut |
| GGSPAPGGG | 15,209 | MMTVB_P03365-Pro |
| GGGGSGGGGSGGGGSGGG | 15,210 | MMTVB_P03365 |
| GS | | |
| EAAAKGGS | 15,211 | HTL3P_Q4U0X6_2mut |
| PAPGSSGGS | 15,212 | MMTVB_P03365_WS |
| GGGGSGGGGS | 15,213 | MMTVB_P03365 |
| GGSGGS | 15,214 | FOAMV_P14350 |
| EAAAKGGGGSEAAAK | 15,215 | SFVCP_Q87040-Pro_2mut |
| EAAAKEAAAKEAAAKEAA | 15,216 | MMTVB_P03365- |
| AK | | Pro_2mutB |
| PAPGGGEAAAK | 15,217 | SFVCP_Q87040-Pro |
| GSSGSS | 15,218 | JSRV_P31623_2mutB |
| EAAAKGGGGGS | 15,219 | MMTVB_P03365_2mut_WS |
| GSSPAPEAAAK | 15,220 | MMTVB_P03365-Pro |
| GGGEAAAK | 15,221 | HTL1C_P14078 |
| PAPEAAAKGSS | 15,222 | HTL32_Q0R5R2_2mutB |
| GGGGSSEAAAK | 15,223 | MMTVB_P03365-Pro |
| PAPGSSGGS | 15,224 | MMTVB_P03365-Pro |
| EAAAKGGGGGS | 15,225 | MMTVB_P03365 |
| GGGGSGGGGSGGGGSGGG | 15,226 | MMTVB_P03365 |
| GS | | |
| EAAAKGGGGSS | 15,227 | HTL3P_Q4U0X6_2mut |
| GGGEAAAKGGS | 15,228 | SFVCP_Q87040-Pro |
| GGGGGSPAP | 15,229 | MMTVB_P03365- |
| | | Pro_2mutB |
| GGSGGGEAAAK | 15,230 | SFV3L_P27401-Pro |
| PAPGGGGGS | 15,231 | SFV3L_P27401-Pro |
| EAAAKGGGGSEAAAK | 15,232 | MMTVB_P03365 |
| PAPEAAAKGSS | 15,233 | MMTVB_P03365-Pro |
| GGSEAAAKGGG | 15,234 | MMTVB_P03365-Pro |
| GGSGGSGGSGGSGGS | 15,235 | SMRVH_P03364_2mutB |
| GGSGGSGGSGGSGGS | 15,236 | HTL1L_P0C211_2mut |
| GGGGGG | 15,237 | WDSV_O92815 |
| GGGGGSGSS | 15,238 | MMTVB_P03365-Pro |
| GGSEAAAKPAP | 15,239 | SFV3L_P27401-Pro_2mut |
| GGGPAPGSS | 15,240 | MMTVB_P03365_2mut_WS |
| GGGGGS | 15,241 | MMTVB_P03365_WS |
| GGSPAPEAAAK | 15,242 | MMTVB_P03365 |
| PAPEAAAKGGS | 15,243 | HTL1A_P03362 |
| EAAAKGGSGSS | 15,244 | MMTVB_P03365_2mut_WS |
| GGGPAPEAAAK | 15,245 | SFV3L_P27401-Pro_2mut |
| PAPGGGGSS | 15,246 | HTL32_Q0R5R2_2mut |
| GSSPAPGGG | 15,247 | HTL3P_Q4U0X6_2mut |
| GGGGSSGGS | 15,248 | BLVAU_P25059_2mut |
| EAAAKGGGGGS | 15,249 | HTL1L_P0C211 |
| GGSEAAAKGSS | 15,250 | JSRV_P31623_2mutB |
| GSSGGG | 15,251 | JSRV_P31623 |
| GGSGGSGGSGGS | 15,252 | MMTVB_P03365-Pro |
| EAAAKPAP | 15,253 | SFV1_P23074-Pro_2mutA |
| GGGGSSGGS | 15,254 | MMTVB_P03365_WS |
| GGSGGS | 15,255 | MMTVB_P03365_WS |
| EAAAKGGGGGS | 15,256 | MMTVB_P03365-Pro |
| GGGGSGGGGSGGGGSGGG | 15,257 | MMTVB_P03365 |
| GSGGGGSGGGGS | | |
| GGSGGSGGS | 15,258 | MMTVB_P03365 |
| GGGGGSEAAAK | 15,259 | MLVBM_Q7SVK7 |
| GGSGSSPAP | 15,260 | MMTVB_P03365_WS |
| EAAAKEAAAKEAAAK | 15,261 | JSRV_P31623 |
| PAPEAAAKGGS | 15,262 | MMTVB_P03365-Pro |
| GGSGSSEAAAK | 15,263 | FOAMV_P14350 |
| GGGGGSGSS | 15,264 | MMTVB_P03365-Pro_2mut |
| GGGPAPGGS | 15,265 | MMTVB_P03365 |
| SGSETPGTSESATPES | 15,266 | SFVCP_Q87040_2mut |
| GSSPAPGGS | 15,267 | SFV1_P23074-Pro_2mutA |
| GSSGSSGSSGSSGSS | 15,268 | MMTVB_P03365 |
| EAAAKGGGPAP | 15,269 | MMTVB_P03365 |
| GSSGGG | 15,270 | MMTVB_P03365_2mut_WS |
| GGGEAAAKPAP | 15,271 | MMTVB_P03365 |
| PAPGGSGGG | 15,272 | MMTVB_P03365-Pro |
| GSSGGSGGG | 15,273 | WDSV_O92815_2mut |
| GGSGGG | 15,274 | HTL32_Q0R5R2_2mut |
| EAAAKGGSPAP | 15,275 | HTLV2_P03363_2mut |
| GGSPAPEAAAK | 15,276 | MMTVB_P03365-Pro |
| GSSGGSEAAAK | 15,277 | MMTVB_P03365_2mut |
| GSAGSAAGSGEF | 15,278 | MMTVB_P03365_WS |
| PAPGGSGSS | 15,279 | FFV_O93209 |
| GGSEAAAKGGG | 15,280 | MMTVB_P03365 |
| GGSPAPGSS | 15,281 | MMTVB_P03365-Pro |
| GSSGGSGGG | 15,282 | SFV3L_P27401 |
| PAPEAAAKGGG | 15,283 | HTL1A_P03362_2mutB |
| GGGEAAAKPAP | 15,284 | MMTVB_P03365-Pro |
| GGSEAAAK | 15,285 | HTL32_Q0R5R2_2mutB |
| GGGEAAAKGSS | 15,286 | MPMV_P07572 |
| GGGGGSEAAAK | 15,287 | MMTVB_P03365-Pro |
| PAPAPAPAPAP | 15,288 | SFVCP_Q87040-Pro_2mutA |
| PAPAPAPAPAP | 15,289 | HTL1L_P0C211_2mut |
| GGGGSSGGS | 15,290 | HTL3P_Q4U0X6 |
| PAPGGSEAAAK | 15,291 | MMTVB_P03365_2mut_WS |
| PAPAPAPAPAP | 15,292 | HTL1A_P03362 |
| EAAAKPAPGGG | 15,293 | MMTVB_P03365_2mut_WS |
| GGSEAAAK | 15,294 | MMTVB_P03365_2mut_WS |
| GGGEAAAKGSS | 15,295 | SFV1_P23074-Pro_2mutA |
| GGSPAPGSS | 15,296 | MMTVB_P03365-Pro |
| GGSEAAAKPAP | 15,297 | MLVBM_Q7SVK7 |
| PAPEAAAKGGG | 15,298 | MMTVB_P03365_2mut_WS |
| GSSEAAAKPAP | 15,299 | MMTVB_P03365-Pro_2mutB |
| GGGGSEAAAKGGGGS | 15,300 | MMTVB_P03365-Pro_2mut |
| GSSEAAAKGGS | 15,301 | MMTVB_P03365-Pro_2mutB |
| GSSGSSGSSGSSGSS | 15,302 | SRV2_P51517_2mutB |
| GGGGGSPAP | 15,303 | HTL1L_P0C211_2mut |
| GGSEAAAK | 15,304 | MMTVB_P03365 |
| GSSPAPEAAAK | 15,305 | SMRVH_P03364_2mutB |
| GGGPAPGGS | 15,306 | HTL1C_P14078_2mut |
| GGSPAPEAAAK | 15,307 | MMTVB_P03365_WS |
| GGSEAAAKPAP | 15,308 | HTL1A_P03362_2mut |
| PAPAPAPAP | 15,309 | HTLV2_P03363_2mut |
| GSSPAPGGG | 15,310 | MMTVB_P03365 |
| GSSGSSGSSGSS | 15,311 | MMTVB_P03365-Pro |
| GGSEAAAKGSS | 15,312 | MMTVB_P03365_WS |
| GGSGSSGGG | 15,313 | MMTVB_P03365_2mutB |
| GSSGSSGSSGSSGSSGSS | 15,314 | JSRV_P31623_2mutB |
| GGSEAAAKPAP | 15,315 | MMTVB_P03365-Pro |
| GSSGGSGGG | 15,316 | HTLV2_P03363_2mut |
| AEAAAKEAAAKEAAAKEA | 15,317 | WDSV_O92815_2mut |
| AAKALEAEAAAKEAAAKE | | |
| AAAKEAAAKA | | |
| GGSPAPEAAAK | 15,318 | MMTVB_P03365 |
| GGGGSSEAAAK | 15,319 | MMTVB_P03365 |
| GGSGGGEAAAK | 15,320 | SFV1_P23074-Pro_2mutA |
| GGGGSEAAAKGGGGS | 15,321 | WDSV_O92815_2mut |
| GGSGSSEAAAK | 15,322 | MMTVB_P03365_2mutB_WS |
| GGSEAAAKPAP | 15,323 | MMTVB_P03365_WS |
| GSSGGGEAAAK | 15,324 | SFVCP_Q87040-Pro |
| GSSGGS | 15,325 | SFVCP_Q87040-Pro_2mut |
| GGSEAAAKPAP | 15,326 | SFVCP_Q87040_2mut |
| GSSGGSEAAAK | 15,327 | SFVCP_Q87040_2mut |
| GSSPAPEAAAK | 15,328 | SRV2_P51517_2mutB |
| GGSGGSGGSGGSGGSGGS | 15,329 | BLVAU_P25059 |
| GSSGSSGSSGSSGSS | 15,330 | HTL1C_P14078_2mut |
| EAAAKGGGGSS | 15,331 | MMTVB_P03365_2mutB |
| GGGEAAAKGSS | 15,332 | SFVCP_Q87040-Pro |

### Example 3: Optimization of Lipid Nanoparticle Compositions for Delivery of Gene Modifying Systems to Correct the Pathogenic E342K Mutation Associated with Alpha-1 Antitrypsin Deficiency

[0832] In this example, lipid nanoparticle (LNP) components are formulated as described in Example 44 of WO2021/178720. Specifically, the lipid nanoparticle (LNP) components (ionizable lipid, helper lipid, sterol, PEG) are dissolved in 100% ethanol with the lipid component molar ratios of 50:10:38.5:1.5, respectively. An mRNA encoding a gene modifying polypeptide as described herein is produced by in vitro transcription and purified mRNA is dissolved in 25 mM sodium citrate, pH 4, to a final concentration of RNA cargo of 0.1 mg/mL. Similarly, a Template RNA designed to correct the E342K mutation in SERPINA1 and optionally optimized for use with the specific gene modifying polypeptide (as described herein) is dissolved in 25 mM sodium citrate, pH 4. Optionally, a second-nick gRNA as described herein is dissolved in 25 mM sodium citrate, pH 4.

[0833] Each RNA is separately formulated into distinct LNPs with a lipid amine to RNA phosphate (N:P) molar ratio of 6. The LNPs are formed by microfluidic mixing of the lipid and RNA solutions using a Precision Nanosystems NanoAssemblr™ Benchtop Instrument, using the manufacturer's recommended settings. A 3:1 ratio of aqueous to organic solvent is maintained during mixing using differential flow rates. After mixing, the LNPs are collected and dialyzed in 15 mM Tris, 5% sucrose buffer at 4° C. overnight. Formulations are concentrated by centrifugation with Amicon 10 kDa centrifugal filters (Millipore). The resulting mixture is then filtered using a 0.2 μm sterile filter. The final LNP composition is stored at −80° C. until further use.

[0834] Additional LNP formulations are generated to optimize the formulation composition and process for delivery and function of a gene modifying system. The lipid nanoparticle components are varied according to the following parameters: 30-60% ionizable lipid, e.g., an ionizable lipid in Table 19 or described elsewhere in this application, 5-15% helper phospholipid Di stearoylphosphatidylcholine (DSPC), 30-50% cholesterol, and 0.5-5% Polyethylene glycol (PEG). Beyond the lipid composition, additional formulations comprising combinations of gene modifying components are generated, e.g., an mRNA encoding the gene modifying polypeptide is co-formulated with a Template RNA for correcting the disease-causing mutation, and optionally a second-nick gRNA is either co-formulated with the mRNA and Template RNA, or formulated separately. In some embodiments, the mRNA and Template RNA, and optionally a second-nick gRNA, are co-formulated with the lipid nanoparticle components to make the total RNA cargo at a concentration approximately 0.1 mg/mL. The RNA composition for co-formulation is a mix of the mRNA and Template RNA at a 1-4:1-10 ratio by weight, respectively, or is a mix of mRNA, Template RNA, and second-nick gRNA at a ratio of 1-4:1-10:1-10, respectively.

[0835] Alternate formulations described in this example include RNAs of the system, e.g., mRNA encoding a gene modifying polypeptide, Template RNA, and optional second-nick gRNA, being separately formulated using identical or different ionizable lipids, or identical ionizable lipids formulated with different lipid component ratios as described herein. An exemplary formulation has a gene modifying polypeptide mRNA formulated using the ionizable lipid LIPIDV004, where the formulation is a ratio of 50:10:38.5:1.5 of ionizable lipid, helper lipid, sterol, and PEG, respectively. The RNA is mixed with the lipid at a lipid amine to RNA phosphate (N:P) ratio of 6. An exemplary Template RNA for use with the exemplary mRNA is formulated using the ionizable lipid LIPIDV004, where the formulation is a ratio of 50:10:38.5:1.5 of ionizable lipid, helper lipid, sterol, and PEG, respectively. The Template RNA is mixed with the lipid at an N:P ratio of 4. An exemplary optional second-nick RNA for further use in this system is formulated using the ionizable lipid LIPIDV004, where the formulation is a ratio of 50:10:38.5:1.5 of ionizable lipid, helper lipid, sterol, and PEG, respectively, with the optional second-nick gRNA being mixed with lipid at an N:P ratio of 4.

[0836] As described herein, a single-nucleotide polymorphism in the SERPINA1 gene causes the pathogenic E342K mutation that leads alpha-1 anti-trypsin deficiency (AATD). This particular amino acid change, known as the Pi*Z allele in humans, has been modeled in the transgenic mouse line B6.Cg-Tg (SERPINA1*E342K) Z11.03Slcw/ChmuJ (stock #035411, The Jackson Laboratory), which expresses the Pi*Z allele of human SERPINA1 in the liver and kidney at levels similar to human patients with AATD. To correct the amino acid substitution and ameliorate the effects caused by the non-functional AAT protein an optimized gene modifying system described herein, e.g., a gene modifying system composition described in Table 4, or a composition from Table 4 further modified to utilize an RT template region introducing a PAM disruption at the target site as in Table 5, is delivered to a transgenic mouse model of AATD by an LNP formulation described in Example 46 of WO2021/178720 or Example 4, below. To determine any efficacy-modifying effects of a second-nick gRNA, formulations including or lacking the second-nick gRNA are prepared along with the gene modifying polypeptide mRNA and disease-modifying Template RNA, and additionally prepared as separate LNPs or co-formulations. LNPs of this example are prepared as described in an example of this application and delivered intravenously to disease model mice at a total RNA amount of 1 mg/kg. Mice are monitored for correction in the liver and kidneys through various immunological, physiological, and molecular assays, including detection of wild-type human AAT, e.g., hAAT-specific ELISA, histology for detection of changes in liver and/or kidney fibrosis, immunohistochemistry to stain for intracellular hAAT, and amplicon sequencing for the genomic edit. As described herein, amplicon sequencing comprises using locus-specific primers to amplify across the target site containing the mutation, next-generation sequencing of purified amplicons, e.g., Illumina MiSeq, and computational analysis of amplicon sequencing data, e.g., analysis of editing outcome using the CRISPResso2 pipeline (Clement et al Nat Biotechnol 37(3):224-226 (2019)).

### Example 4: Correction of SERPINA1 Gene Using Gene Modifying System to Treat Alpha-1 Anti-Trypsin Disease

[0837] This example describes the use of specific compositions of gene modifying systems to correct the E342K mutation in SERPINA1 that leads to alpha-1 antitrypsin deficiency in a mouse model of disease, as described in Example 3. A system for correction of the mutation in this model that employs a dual AAV delivery approach has been previously described and validated (Liu et al. bioRxiv (2020), doi.org/10.1101/2020.12.15.422970, the methods and compositions of which as related to editing the SERPINA1 gene, e.g., the methods and compositions of FIGS. 1a, 3a-d, and 5a-e, are incorporated herein by reference). Here, optimized all RNA gene modifying systems are employed to demonstrate a non-viral therapeutic approach to mutation correction. More specifically, a gene modifying system is employed that comprises (1) an mRNA that encodes a fusion protein that contains nuclear localization signals at the N- and C-terminus of the fusion of Streptococcus pyogenes Cas9 bearing a catalytic mutation, H840A, fused to the M-MLV reverse transcriptase, where the proteins are connected to one another using a 32 amino acid linker (SGGSSGGSSGSETPGTSESATPESSGGSSGGSS (SEQ ID NO: 5006)); along with (2) two guide RNAs, one functioning as a gene modifying Template RNA for targeting the genomic site in SERPINA1 for correction (UCCCCUCCAGGCCGUGCAUAGUUUUAGAGCUAGAAAUAGCAAGUUAAAAUAAGG CUAGUCCGUUAUCAACUUGAAAAAGUGGCACCGAGUCGGUCCUCUCGUCGAUGGU CAGCACAGCUUUAUGCACGGCCUGGAG (SEQ ID NO: 19529)) and another optional guide for second nicking the genome nearby to enhance correction (GGUUUGUUGAACUUGACCUGUUUUAGAGCUAGAAAUAGCAAGUUAAAAUAAGGC UAGUCCGUUAUCAACUUGAAAAAGUGGCACCGAGUCGGUGCUUUUU (SEQ ID NO: 19530)). Here, the RNA compositions are formulated and delivered to mice using LNPs.

[0838] The mRNA and guide RNAs are formulated into LNPs using well-established mixing and purification, and concentration procedures, e.g., as described in Example 3. Briefly, the lipid nanoparticle (LNP) components (ionizable lipid (LIPIDV005 from Table 19), helper lipid (DSPC), sterol (Cholesterol), PEG (DMG-PEG-2000 (GM-20))) are dissolved in 100% ethanol with the lipid component molar ratios of 50:10:38.5:1.5, respectively. The mRNA encoding the gene modifying polypeptide (Cas-RT), Template RNA, and optionally second-nick guide RNA are dissolved in 25 mM sodium citrate, pH 4. Each RNA is separately formulated into LNPs with a lipid amine to RNA phosphate (N:P) molar ratio of 6. The LNPs are formed by microfluidic mixing of the lipid and RNA solutions using a Precision Nanosystems NanoAssemblr TM Benchtop Instrument, using the manufacturer's recommended settings. A 3:1 ratio of aqueous to organic solvent is maintained during mixing using differential flow rates. After mixing, the LNPs are collected and then dialyzed in 15 mM Tris, 5% sucrose buffer at 4° C. overnight. Formulations are concentrated by centrifugation with Amicon 10 kDa centrifugal filters (Millipore). The resulting mixture is filtered using a 0.2 μm sterile filter. The final LNPs are analyzed for particle size, polydispersity, and RNA integrity, e.g., as according to Example 44 of WO2021/178720, after aliquoting and stored at −80° C.

[0839] The LNPs are diluted from a concentrated stock to create a mixture where the molar ratio of each guide RNA (Template RNA and optionally second-nick guide RNA) is 20 times that of the mRNA. Evaluation in a mouse model is performed, as described in Example 3. The mRNA-LNP and guide RNAs-LNP mixture is injected intravenously to PiZ mice (e.g., B6.Cg-Tg(SERPINA1*E342K)Z11.03Slcw/ChmuJ, Stock No: 035411, The Jackson Laboratory) at a total RNA amount of 1 mg/kg. The mice are monitored for correction in the liver and kidneys though amplicon next-generation sequencing, production of the wild-type human alpha anti-trypsin protein, and histologic reduction in liver and kidney fibrosis.

[0840] In some embodiments, the compositions of the gene modifying system used to correct the E342K mutation in the PiZ model, as described above, are modified as follows to optimize efficiency and precision of editing.

[0841] Gene modifting polypeptide-encoding mRNA. In some embodiments, the gene modifying polypeptide comprises the bipartite SV40 NLS sequences (doi: 10.1074/jbc.M601718200) at its N-terminus and C-terminus. In some embodiments, The gene modifying system construct contains modified c-myc NLS and bipartite SV40 NLS at its N-terminus and at the C-terminus a modified bipartite SV40 NLS followed by a SV40 NLS is linked to the reverse transcriptase through a SGGS (SEQ ID NO: 25694) linker. In some embodiments, the linker between each NLS and the NLS and the fusion protein is a SGGS (SEQ ID NO: 25694) linker. In some embodiments, the 32 amino acid linker of the fusion protein encoded by the mRNA is:

(SEQ ID NO: 19531)
SGGSSGGSSGSETPGTSESATPESSGGSSGGSS

[0842] In some embodiments, the catalytic mutation of the Cas9 domain to generate the Cas9 nickase activity is H840A or N863A. In some embodiments, the mRNA has a cap, 5′ UTR containing a Kozak sequence, 3′ UTR, and a polyA tail containing at least 60 As (SEQ ID NO: 25695). In some embodiments, the mRNA has a reduced uridine content through codon selection/optimization. In some embodiments, the uridines in the mRNA are 100% substituted with 5-methoxy uridine. In some embodiments, the uridines in the mRNA are 100% substituted with N1-methyl-pseudouridine. In some embodiments, the cytosines in the mRNA are 100% substituted with 5-methylcytosine. In some embodiments, the mRNA contains a combination of 100% substitution of cytosine with 5-methylcytosine and 100% substitution of uridine with 5-methoxy uridine. In some embodiments, the mRNA contains a combination of 100% substitution of cytosine with 5-methylcytosine and 100% substitution of uridine with N1-methyl-pseudouridine. In some embodiments, combinations of modifications described above include 0-100% substitution of unmodified nucleotides, e.g., 0-10%, 10-20%, 20-30%, 30-40%, 40-50%, 50-60%, 60-70%, 70-80%, 80-90%, or less than 90-100% substitution. In some embodiments, the gene modifying polypeptide encoded by the mRNA of the system comprises the sequence:

c-Myc NLS-BPSV40 NLS-SpCas9H840A-linker-M-
MLV_reverse_transcriptase-SGGS linker-BPSV40 NLS-SV40
(SEQ ID NO: 19532)

[chemical structure]

KFKVLGNTDRHSIKKNLIGALLFDSGETAEATRLKRTARRRYTRRKNRICYLQEIFSNEM
AKVDDSFFHRLEESFL VEEDKKHERHPIFGNIVDEVAYHEKYPTIYHLRKKL VDSTDKA
DLRLIYLALAHMIKFRGHFLIEGDLNPDNSDVDKLFIQLVQTYNQLFEENPINASGVDAK
AILSARLSKSRRLENLIAQLPGEKKNGLFGNLIALSLGLTPNFKSNFDLAEDAKLQLSKDT
YDDDLDNLLAQIGDQYADLFLAAKNLSDAILLSDILRVNTEITKAPLSASMIKRYDEHHQ
DLTLLKALVRQQLPEKYKEIFFDQSKNGYAGYIDGGASQEEFYKFIKPILEKMDGTEELL
VKLNREDLLRKQRTFDNGSIPHQIHLGELHAILRRQEDFYPFLKDNREKIEKILTFRIPYY
VGPLARGNSRFAWMTRKSEETITPWNFEEVVDKGASAQSFIERMTNFDKNLPNEKVLPK
HSLLYEYFTVYNELTKVKYVTEGMRKPAFLSGEQKKAIVDLLFKTNRKVTVKQLKEDY
FKKIECFDSVEISGVEDRFNASLGTYHDLLKIIKDKDFLDNEENEDILEDIVLTLTLFEDRE
MIEERLKTYAHLFDDKVMKQLKRRRYTGWGRLSRKLINGIRDKQSGKTILDFLKSDGFA
NRNFMQLIHDDSLTFKEDIQKAQVSGQGDSLHEHIANLAGSPAIKKGILQTVKVVDELV
KVMGRHKPENIVIEMARENQTTQKGQKNSRERMKRIEEGIKELGSQILKEHPVENTQLQ
NEKLYLYYLQNGRDMYVDQELDINRLSDYDVDAIVPQSFLKDDSIDNKVLTRSDKNRG
KSDNVPSEEVVKKMKNYWRQLLNAKLITQRKFDNLTKAERGGLSELDKAGFIKRQLVE
TRQITKHVAQILDSRMNTKYDENDKLIREVKVITLKSKLVSDFRKDFQFYK VREINNYH
HAHDAYLNAVVGTALIKKYPKLESEFVYGDYKVYDVRKMIAKSEQEIGKATAKYFFYS
NIMNFFKTEITLANGEIRKRPLIETNGETGEIVWDKGRDFATVRKVLSMPQVNIVKKTEV
QTGGFSKESILPKRNSDKLIARKKDWDPKKYGGFDSPTVAYSVLVVAKVEKGKSKKLK
SVKELLGITIMERSSFEKNPIDFLEAKGYKEVKKDLIIKLPKYSLFELENGRKRMLASAGE
LQKGNELALPSKYVNFLYLASHYEKLKGSPEDNEQKQLFVEQHKHYLDEIIEQISEFSKR
VILADANLDKVLSAYNKHRDKPIREQAENIIHLFTLTNLGAPAAFKYFDTTIDRKRYTST

[chemical structure]

[chemical structure]

[chemical structure]

[chemical structure]

[chemical structure]

[chemical structure]

[chemical structure]

[chemical structure]

[chemical structure]

[chemical structure]

[chemical structure]

[chemical structure]

[chemical structure]

VEFEPKKKRKV

[0843] Template RNA and optional second-nick guide RNA. In some embodiments, the gene modifying system employs only a Template RNA in addition to the mRNA encoding the gene modifying polypeptide. In some embodiments, the gene modifying system additionally employs a second-nick guide RNA that targets the Cas9 nickase of the system to the non-edited strand of the target DNA. In some embodiments, the gene modifying Template RNA for targeting SERPINA1 is: UCCCCUCCAGGCCGUGCAUAGUUUUAGAGCUAGAAAUAGCAAGUUAAAAUAAGG CUAGUCCGUUAUCAACUUGAAAAAGUGGCACCGAGUCGGUCCUCUCGUCGAUGGU CAGCACAGCUUUAUGCACGGCCUGGAG (SEQ ID NO:19533). In some embodiments, the optional guide RNA for second nicking is: GGUUUGUUGAACUUGACCUGUUUUAGAGCUAGAAAUAGCAAGUUAAAAUAAGGC UAGUCCGUUAUCAACUUGAAAAAGUGGCACCGAGUCGGUGCUUUUU (SEQ ID NO: 19534). In some embodiments, the Template RNA and optional second-nick guide RNA are synthesized by T7 RNA polymerase. In some embodiments, the Template RNA and optional second-nick guide RNA are chemically synthesized and contain a combination of one or multiple modifications of the following: 2′-O-methyl, 2′-Fluoro, and/or Phosphorothioate. In some embodiments, the 3 most terminal nucleotides contain 2′-O-methyl modifications with 3 phosphorothioate linkages between the nucleotides. In some embodiments, the Template RNA and optional second-nick guide RNA contain 2′-O-methyl modified nucleotides, where there are cytosines and uridines, except at nucleotides found in the seed sequence of the gRNA spacers, e.g., the seed sequences in the 3′ end of the spacer regions, where cytosines and uridines contain 2′-fluoro modifications and/or combination of 2′-fluoro and 2′ hydroxyl. In some embodiments, combinations of modifications described above include 0-100% substitution of unmodified nucleotides, e.g., 0-10%, 10-20%, 20-30%, 30-40%, 40-50%, 50-60%, 60-70%, 70-80%, 80-90%, or less than 90-100% substitution.

[0844] Formulations. In some embodiments, the gene modifying polypeptide mRNA and Template RNA (and optional second-nick guide RNA) are separately formulated as described above, combined prior to injection at a 1:20 RNA molar ratio, mRNA:Template RNA (and optionally mRNA:second-nick guide RNA), respectively. In some embodiments, the gene modifying polypeptide mRNA and Template RNA (and optional second-nick guide RNA) are separately formulated as described above, combined prior to injection at a 1:50 RNA molar ratio, mRNA:guide RNAs (and optionally mRNA:second-nick guide RNA), respectively. In some embodiments, the gene modifying polypeptide mRNA and Template RNA (and optional second-nick guide RNA) are separately formulated, combined prior to injection at ratio ranges from 1:10-1:250, mRNA:Template RNA (and optionally mRNA:second-nick guide RNA), respectively. In some embodiments, the mRNA and Template RNA (and optional second-nick guide NRA) are mixed together at a 1:10-1:250, mRNA:Template RNA (and optionally mRNA:second-nick guide RNA), and then formulated as described above, where the RNA concentration going into formulation is 0.1 mg/mL. In some embodiments, the mRNA and Template RNA (and optional second-nick guide RNA) are formulated separately and are injected 30-180 minutes apart, where the mRNA LNPs are delivered first followed by the Template RNA (and optional second-nick guide RNA) LNPs. In some embodiments, the ionizable lipid is LIPIDV005 from Table 19.

[0845] Dosing. In some embodiments, the gene modifying polypeptide mRNA and/or Template RNA (and optional second-nick guide RNA) are dosed at 0.01-6 mg/kg, either separately or together as a total amount of RNA-LNP. In some embodiments, the RNA-LNPs is injected as an IV bolus. In some embodiments, the RNA-LNPs is infused over a period of 30-360 minutes.

### Example 5: Quantifying Activity of a Gene Editing Polypeptide and Template for Rewriting the Endogenous FAH Locus Achieved in Primary Mouse Hepatocytes

[0846] This example demonstrates the use of a gene modifying system containing a gene modifying polypeptide and a template RNA, to convert an A nucleotide to a G nucleotide in the endogenous Fah locus in mouse primary hepatocytes derived from a Fah5981SB mouse. The Fah5981SB mouse model harbors a G to A point mutation in the last nucleotide of exon 8 of the Fah gene, leading to aberrant mRNA splicing and subsequent mRNA degradation, without the production of Fah protein and, and thus serves as a mouse model of hereditary tyrosinemia type I.

[0847] In this example, the template RNA contained:
[0848] (1) a gRNA spacer;
[0849] (2) a gRNA scaffold;
[0850] (3) a heterologous object sequence; and
[0851] (4) a primer binding site (PBS) sequence.

[0852] More specifically, the template RNA (including chemical modification pattern) comprised the following sequences:

FAH1_R14_P12_Heavy RNACS048
(SEQ ID NO: 19535)
mG*mG*mA*rUrGrGrUrCrCrUrCrArUrGrArArCrGrArCrGrUrU
rUrUrArGrAmGmCmUmAmGmAmAmAmUmAmGmCrArArGrUrUrArAr
ArArUrArArGrGrCrUrArGrUrCrCrGrUrUrArUrCrAmAmCmUmU
mGmAmAmAmAmAmGmUmGmGmCmAmCmCmGmAmGmUmCmGmGmUmGmCr
UrUrArCrCrGrCrUrCrCrArGrUrCrGrUrUrCrArUrGrArG*mG*
mA*mC
FAH1_R15_P10_Heavy RNACS049
(SEQ ID NO: 19536)
mG*mG*mA*rUrGrGrUrCrCrUrCrArUrGrArArCrGrArCrGrUrU
rUrUrArGrAmGmCmUmAmGmAmAmAmUmAmGmCrArArGrUrUrArAr
ArArUrArArGrGrCrUrArGrUrCrCrGrUrUrArUrCrAmAmCmUmU
mGmAmAmAmAmAmGmUmGmGmCmAmCmCmGmAmGmUmCmGmGmUmGmCr
ArUrUrArCrCrGrCrUrCrCrArGrUrCrGrUrUrCrArUrG*mA*mG
*mG
FAH2_R19_P11_MUT_Heavy RNACS052
(SEQ ID NO: 19537)
mU*mC*mA*rGrArGrGrArArGrCrUrGrGrGrCrCrArCrCrGrUrU
rUrUrArGrAmGmCmUmAmGmAmAmAmUmAmGmCrArArGrUrUrArAr
ArArUrArArGrGrCrUrArGrUrCrCrGrUrUrArUrCrAmAmCmUmU
mGmAmAmAmAmAmGmUmGmGmCmAmCmCmGmAmGmUmCmGmGmUmGmCr
UrGrGrArGrCrGrGrUrArArUrGrGrCrUrGrGrUrGrGrCrCrCrA
rGrC*mU*mU*mC
FAH2_R19_P13_MUT_Heavy RNACS053
(SEQ ID NO: 19538)
mU*mC*mA*rGrArGrGrArArGrCrUrGrGrGrCrCrArCrCrGrUrU
rUrUrArGrAmGmCmUmAmGmAmAmAmUmAmGmCrArArGrUrUrArAr
ArArUrArArGrGrCrUrArGrUrCrCrGrUrUrArUrCrAmAmCmUmU
mGmAmAmAmAmAmGmUmGmGmCmAmCmCmGmAmGmUmCmGmGmUmGmCr
UrGrGrArGrCrGrGrUrArArUrGrGrCrUrGrGrUrGrGrCrCrCrA
rGrCrUrU*mC*mC*mU

[0853] Additional exemplary template RNAs that could be utilized in this experiment include the following:

FAH1 RNACS050
(SEQ ID NO: 19539)
mG*mG*mA*rUrGrGrUrCrCrUrCrArUrGrArArCrGrArCrGrUrU
rUrUrArGrAmGmCmUmAmGmAmAmAmUmAmGmCrArArGrUrUrArAr
ArArUrArArGrGrCrUrArGrUrCrCrGrUrUrArUrCrAmAmCmUmU
mGmAmAmAmAmAmGmUmGmGmCmAmCmCmGmAmGmUmCmGmGmUmGmCr
ArGrGrCrArUrUrArCrCrGrCrUrCrCrArGrUrCrGrUrUrCrArU
rGrArG*mG*mA*mC
FAH1 RNACS051
(SEQ ID NO: 19540)
mG*mG*mA*rUrGrGrUrCrCrUrCrArUrGrArArCrGrArCrGrUrU
rUrUrArGrAmGmCmUmAmGmAmAmAmUmAmGmCrArArGrUrUrArAr
ArArUrArArGrGrCrUrArGrUrCrCrGrUrUrArUrCrAmAmCmUmU
mGmAmAmAmAmAmGmUmGmGmCmAmCmCmGmAmGmUmCmGmGmUmGmCr
ArGrGrCrArUrUrArCrCrGrCrUrCrCrArGrUrCrGrUrUrCrArU
rG*mA*mG*mG

[0854] In the sequences above m=2′-O-methyl ribonucleotide, r=ribose and *=phosphorothioate bond.

[0855] The gene modifying polypeptides tested comprised sequence of: RNAV209 (nCas9-RT) and RNAV214 (wtCas9-RT). Specifically, the nCas9-RT and the wtCas9-RT had the following amino acid sequences:

nCas9-RT (RNAV209):
(SEQ ID NO: 19541)
MPAAKRVKLDGGDKKYSIGLDIGTNSVGWAVITDEYKVPSKKFKVLGNTDRHSIKKNLI
GALLFDSGETAEATRLKRTARRRYTRRKNRICYLQEIFSNEMAKVDDSFFHRLEESFLVE
EDKKHERHPIFGNIVDEVAYHEKYPTIYHLRKKLVDSTDKADLRLIYLALAHMIKFRGHF
LIEGDLNPDNSDVDKLFIQLVQTYNQLFEENPINASGVDAKAILSARLSKSRRLENLIAQL
PGEKKNGLFGNLIALSLGLTPNFKSNFDLAEDAKLQLSKDTYDDDLDNLLAQIGDQYAD
LFLAAKNLSDAILLSDILRVNTEITKAPLSASMIKRYDEHHQDLTLLKALVRQQLPEKYK
EIFFDQSKNGYAGYIDGGASQEEFYKFIKPILEKMDGTEELLVKLNREDLLRKQRTFDNG
SIPHQIHLGELHAILRRQEDFYPFLKDNREKIEKILTFRIPYYVGPLARGNSRFAWMTRKS
EETITPWNFEEVVDKGASAQSFIERMTNFDKNLPNEKVLPKHSLLYEYFTVYNELTKVK
YVTEGMRKPAFLSGEQKKAIVDLLFKTNRKVTVKQLKEDYFKKIECFDSVEISGVEDRF
NASLGTYHDLLKIIKDKDFLDNEENEDILEDIVLTLTLFEDREMIEERLKTYAHLFDDKV
MKQLKRRRYTGWGRLSRKLINGIRDKQSGKTILDFLKSDGFANRNFMQLIHDDSLTFKE
DIQKAQVSGQGDSLHEHIANLAGSPAIKKGILQTVKVVDELVKVMGRHKPENIVIEMAR
ENQTTQKGQKNSRERMKRIEEGIKELGSQILKEHPVENTQLQNEKLYLYYLQNGRDMY
VDQELDINRLSDYDVDHIVPQSFLKDDSIDNKVLTRSDKARGKSDNVPSEEVVKKMKN
YWRQLLNAKLITQRKFDNLTKAERGGLSELDKAGFIKRQLVETRQITKHVAQILDSRMN
TKYDENDKLIREVKVITLKSKLVSDFRKDFQFYKVREINNYHHAHDAYLNAVVGTALIK
KYPKLESEFVYGDYKVYDVRKMIAKSEQEIGKATAKYFFYSNIMNFFKTEITLANGEIRK
RPLIETNGETGEIVWDKGRDFATVRKVLSMPQVNIVKKTEVQTGGFSKESILPKRNSDKL
IARKKDWDPKKYGGFDSPTVAYSVLVVAKVEKGKSKKLKSVKELLGITIMERSSFEKNP
IDFLEAKGYKEVKKDLIIKLPKYSLFELENGRKRMLASAGELQKGNELALPSKYVNFLYL
ASHYEKLKGSPEDNEQKQLFVEQHKHYLDEIIEQISEFSKRVILADANLDKVLSAYNKHR
DKPIREQAENIIHLFTLTNLGAPAAFKYFDTTIDRKRYTSTKEVLDATLIHQSITGLYETRI
DLSQLGGDSGGSSGGSSGSETPGTSESATPESSGGSSGGSSTLNIEDEYRLHETSKEPDVS
LGSTWLSDFPQAWAETGGMGLAVRQAPLIIPLKATSTPVSIKQYPMSQEARLGIKPHIQR
LLDQGILVPCQSPWNTPLLPVKKPGTNDYRPVQDLREVNKRVEDIHPTVPNPYNLLSGL
PPSHQWYTVLDLKDAFFCLRLHPTSQPLFAFEWRDPEMGISGQLTWTRLPQGFKNSPTL
FNEALHRDLADFRIQHPDLILLQYVDDLLLAATSELDCQQGTRALLQTLGNLGYRASAK
KAQICQKQVKYLGYLLKEGQRWLTEARKETVMGQPTPKTPRQLREFLGKAGFCRLFIPG
FAEMAAPLYPLTKPGTLFNWGPDQQKAYQEIKQALLTAPALGLPDLTKPFELFVDEKQG
YAKGVLTQKLGPWRRPVAYLSKKLDPVAAGWPPCLRMVAAIAVLTKDAGKLTMGQPL
VILAPHAVEALVKQPPDRWLSNARMTHYQALLLDTDRVQFGPVVALNPATLLPLPEEG
LQHNCLDILAEAHGTRPDLTDQPLPDADHTWYTDGSSLLQEGQRKAGAAVTTETEVIW
AKALPAGTSAQRAELIALTQALKMAEGKKLNVYTDSRYAFATAHIHGEIYRRRGWLTS
EGKEIKNKDEILALLKALFLPKRLSIIHCPGHQKGHSAEARGNRMADQAARKAAITETPD
TSTLLIENSSPSGGSKRTADGSEFEKRTADGSEFESPKKKAKVE
wtCas9-RT (RNAV214);
(SEQ ID NO: 19542)
MPAAKRVKLDGGDKKYSIGLDIGTNSVGWAVITDEYKVPSKKFKVLGNTDRHSIKKNLI
GALLFDSGETAEATRLKRTARRRYTRRKNRICYLQEIFSNEMAKVDDSFFHRLEESFLVE
EDKKHERHPIFGNIVDEVAYHEKYPTIYHLRKKLVDSTDKADLRLIYLALAHMIKFRGHF
LIEGDLNPDNSDVDKLFIQLVQTYNQLFEENPINASGVDAKAILSARLSKSRRLENLIAQL
PGEKKNGLFGNLIALSLGLTPNFKSNFDLAEDAKLQLSKDTYDDDLDNLLAQIGDQYAD
LFLAAKNLSDAILLSDILRVNTEITKAPLSASMIKRYDEHHQDLTLLKALVRQQLPEKYK
EIFFDQSKNGYAGYIDGGASQEEFYKFIKPILEKMDGTEELLVKLNREDLLRKQRTFDNG
SIPHQIHLGELHAILRRQEDFYPFLKDNREKIEKILTFRIPYYVGPLARGNSRFAWMTRKS
EETITPWNFEEVVDKGASAQSFIERMTNFDKNLPNEKVLPKHSLLYEYFTVYNELTKVK
YVTEGMRKPAFLSGEQKKAIVDLLFKTNRKVTVKQLKEDYFKKIECFDSVEISGVEDRF
NASLGTYHDLLKIIKDKDFLDNEENEDILEDIVLTLTLFEDREMIEERLKTYAHLFDDKV
MKQLKRRRYTGWGRLSRKLINGIRDKQSGKTILDFLKSDGFANRNFMQLIHDDSLTFKE
DIQKAQVSGQGDSLHEHIANLAGSPAIKKGILQTVKVVDELVKVMGRHKPENIVIEMAR
ENQTTQKGQKNSRERMKRIEEGIKELGSQILKEHPVENTQLQNEKLYLYYLQNGRDMY
VDQELDINRLSDYDVDHIVPQSFLKDDSIDNKVLTRSDKNRGKSDNVPSEEVVKKMKN
YWRQLLNAKLITQRKFDNLTKAERGGLSELDKAGFIKRQLVETRQITKHVAQILDSRMN
TKYDENDKLIREVKVITLKSKLVSDFRKDFQFYKVREINNYHHAHDAYLNAVVGTALIK
KYPKLESEFVYGDYKVYDVRKMIAKSEQEIGKATAKYFFYSNIMNFFKTEITLANGEIRK
RPLIETNGETGEIVWDKGRDFATVRKVLSMPQVNIVKKTEVQTGGFSKESILPKRNSDKL
IARKKDWDPKKYGGFDSPTVAYSVLVVAKVEKGKSKKLKSVKELLGITIMERSSFEKNP
IDFLEAKGYKEVKKDLIIKLPKYSLFELENGRKRMLASAGELQKGNELALPSKYVNFLYL
ASHYEKLKGSPEDNEQKQLFVEQHKHYLDEIIEQISEFSKRVILADANLDKVLSAYNKHR
DKPIREQAENIIHLFTLTNLGAPAAFKYFDTTIDRKRYTSTKEVLDATLIHQSITGLYETRI
DLSQLGGDSGGSSGGSSGSETPGTSESATPESSGGSSGGSSTLNIEDEYRLHETSKEPDVS
LGSTWLSDFPQAWAETGGMGLAVRQAPLIIPLKATSTPVSIKQYPMSQEARLGIKPHIQR
LLDQGILVPCQSPWNTPLLPVKKPGTNDYRPVQDLREVNKRVEDIHPTVPNPYNLLSGL
PPSHQWYTVLDLKDAFFCLRLHPTSQPLFAFEWRDPEMGISGQLTWTRLPQGFKNSPTL
FNEALHRDLADFRIQHPDLILLQYVDDLLLAATSELDCQQGTRALLQTLGNLGYRASAK
KAQICQKQVKYLGYLLKEGQRWLTEARKETVMGQPTPKTPRQLREFLGKAGFCRLFIPG
FAEMAAPLYPLTKPGTLFNWGPDQQKAYQEIKQALLTAPALGLPDLTKPFELFVDEKQG
YAKGVLTQKLGPWRRPVAYLSKKLDPVAAGWPPCLRMVAAIAVLTKDAGKLTMGQPL
VILAPHAVEALVKQPPDRWLSNARMTHYQALLLDTDRVQFGPVVALNPATLLPLPEEG
LQHNCLDILAEAHGTRPDLTDQPLPDADHTWYTDGSSLLQEGQRKAGAAVTTETEVIW
AKALPAGTSAQRAELIALTQALKMAEGKKLNVYTDSRYAFATAHIHGEIYRRRGWLTS
EGKEIKNKDEILALLKALFLPKRLSIIHCPGHQKGHSAEARGNRMADQAARKAAITETPD
TSTLLIENSSPSGGSKRTADGSEFEKRTADGSEFESPKKKAKVE

Underlining indicates the residue that differs between the nickase and wild-type sequences.

[0856] The gene modifying system comprising the gene modifying polypeptides listed above and the template RNA described above were transfected into primary mouse hepatocytes. The gene modifying polypeptide and the template RNA were delivered by nucleofection in the RNA format. Specifically, 4 μg of gene modifying polypeptide mRNA were combined with 10 μg of chemically synthesized template RNA in 5 μL of water. The transfection mix was added to 100,000 mouse primary hepatocytes in Buffer P3 [Lonza], and cells were nucleofected using program DG-138. After nucleofection, cells were grown at 37° C., 5% CO₂ for 3 days prior to cell lysis and genomic DNA extraction. To analyze gene editing activity, primers flanking the target insertion site locus were used to amplify across the locus. Amplicons were analyzed via short read sequencing using an Illumina MiSeq. Conversion of terminal A to G sequence in exon 8 of fah gene indicates successful editing.

[0857] As shown in FIG. 2, for FAH2 templates, perfect rewrite levels (conversion of A to G with no unwanted mutations detected) of 4-8% were detected with RNAV209-013 but not with RNAV214-040. Indel levels of 4.4 to 6.6% were observed with RNAV209-013. Furthermore, the amount of WT Fah mRNA was measured using quantitative RT-PCR using primers that bind to exons 7 and 8. As shown in FIG. 3, FAH2 templates result in an increase in the abundance of Fah mRNA relative to WT by up to 12% when FAH2 template is tested with RNAV209-013 mRNA. These results demonstrate the use of a gene modifying system to reverse a mutation in the Fah gene, resulting in partial restoration of the expression of wild-type Fah mRNA.

### Example 6: Quantifying Activity of a Gene Editing Polypeptide and Template In Vivo for Rewriting the Endogenous FAH Locus Achieved in Mouse Liver

[0858] This example demonstrates the use of a gene modifying system containing a gene modifying polypeptide and a template RNA, to convert an A nucleotide to a G nucleotide in the Fah5981SB mouse model into the endogenous Fah locus in mouse liver. The Fah5981SB mouse model harbors a G to A point mutation in the last nucleotide of exon 8 of the Fah gene, leading to aberrant mRNA splicing and subsequent mRNA degradation, without the production of Fah protein and serves as a mouse model of hereditary tyrosinemia type I.

[0859] In this example, the template RNA contained:
[0860] (1) a gRNA spacer;
[0861] (2) a gRNA scaffold;
[0862] (3) a heterologous object sequence; and
[0863] (4) a primer binding site (PBS) sequence.

[0864] More specifically, the template RNA comprised the following sequences:

FAH1_R14_P12_Heavy RNACS048-001
(SEQ ID NO: 19543)
mG*mG*mA*rUrGrGrUrCrCrUrCrArUrGrArArCrGrArCrGrUrU
rUrUrArGrAmGmCmUmAmGmAmAmAmUmAmGmCrArArGrUrUrArAr
ArArUrArArGrGrCrUrArGrUrCrCrGrUrUrArUrCrAmAmCmUmU
mGmAmAmAmAmAmGmUmGmGmCmAmCmCmGmAmGmUmCmGmGmUmGmCr
UrUrArCrCrGrCrUrCrCrArGrUrCrGrUrUrCrArUrGrArG*mG*
mA*mC
FAH1_R15_P10_Heavy RNACS049-001
(SEQ ID NO: 19544)
mG*mG*mA*rUrGrGrUrCrCrUrCrArUrGrArArCrGrArCrGrUrU
rUrUrArGrAmGmCmUmAmGmAmAmAmUmAmGmCrArArGrUrUrArAr
ArArUrArArGrGrCrUrArGrUrCrCrGrUrUrArUrCrAmAmCmUmU
mGmAmAmAmAmAmGmUmGmGmCmAmCmCmGmAmGmUmCmGmGmUmGmCr
ArUrUrArCrCrGrCrUrCrCrArGrUrCrGrUrUrCrArUrG*mA*mG
*mG
FAH2_R19_P11_MUT_Heavy RNACS052-001
(SEQ ID NO: 19545)
mU*mC*mA*rGrArGrGrArArGrCrUrGrGrGrCrCrArCrCrGrUrU
rUrUrArGrAmGmCmUmAmGmAmAmAmUmAmGmCrArArGrUrUrArAr
ArArUrArArGrGrCrUrArGrUrCrCrGrUrUrArUrCrAmAmCmUmU
mGmAmAmAmAmAmGmUmGmGmCmAmCmCmGmAmGmUmCmGmGmUmGmCr
UrGrGrArGrCrGrGrUrArArUrGrGrCrUrGrGrUrGrGrCrCrCrA
rGrC*mU*mU*mC
FAH2_R19_P13_MUT_Heavy RNACS053-001
(SEQ ID NO: 19546)
mU*mC*mA*rGrArGrGrArArGrCrUrGrGrGrCrCrArCrCrGrUrU
rUrUrArGrAmGmCmUmAmGmAmAmAmUmAmGmCrArArGrUrUrArAr
ArArUrArArGrGrCrUrArGrUrCrCrGrUrUrArUrCrAmAmCmUmU
mGmAmAmAmAmAmGmUmGmGmCmAmCmCmGmAmGmUmCmGmGmUmGmCr
UrGrGrArGrCrGrGrUrArArUrGrGrCrUrGrGrUrGrGrCrCrCrA
rGrCrUrU*mC*mC*mU

[0865] The gene modifying polypeptides tested comprised a sequence of: RNAV209 and RNAV214, the sequences of which are each provided in Example 3.

[0866] The gene modifying system comprising the gene modifying polypeptides and the template RNA described above was formulated in LNP and delivered to mice. Specifically, 2 mg/kg of total RNA equivalent formulated in LNPs, combined at 1:1 (w/w) of template RNA and mRNA, were dosed intravenously in 7 to 9-week-old, mixed gender Fah5981SB mice. Six hours or 6 days post-dosing, animals were sacrificed, and their liver collected for analyses. To determine the expression distribution of the gene modifying polypeptide in the liver, 6-hr liver samples were subjected to immunohistochemistry using an anti-Cas9 antibody. Upon staining, quantification of Cas9-positive hepatocytes was determined by QuPath Markup. As shown in FIG. 4, the expression of the gene modifying polypeptide was observed in 82-91% of hepatocytes.

[0867] To analyze gene editing activity, primers flanking the target insertion site locus were used to amplify across the locus in the genomic DNA of liver samples collected 6 days post-dosing. Amplicons were analyzed via short read sequencing using an Illumina MiSeq. Conversion of an A nucleotide to a G nucleotide indicates successful editing. As shown in FIG. 5, perfect rewrite levels (conversion of A to G with no unwanted mutations detected) of 0.1%-1.9% were detected across the different groups. Indel levels were in the range of 0.2%-0.4%.

[0868] To determine the phenotypic correction caused by the gene editing activity, the restoration of wild-type FAH mRNA was determined by real-time qRT-PCR, and the restoration of Fah protein expression determined by immunohistochemistry using an anti-Fah antibody. As shown in

[0869] FIG. 6, wild-type mRNA restoration of 0.1%-6%, relative to littermate heterozygous mice, was detected across the different groups. As shown in FIG. 7, Fah protein was detected in 0.1%-7% of liver cross-sectional area across the different groups. These results demonstrate the use of a gene modifying system to reverse a mutation in the Fah gene in an in vivo mouse model for hereditary tyrosinemia type I, resulting in partial restoration of expression of wild-type Fah mRNA and Fah protein.

### Example 7. Gene Editing at the TTR Locus in an In Vivo Mouse Model

[0870] This Example demonstrates successful delivery of an mRNA and guide using Cas9-mediated gene editing using the protospacer sequence ACACAAAUACCAGUCCAGCG (SEQ ID NO: 25696) that targets the TTR locus using a gene modifying polypeptide and RNA in a C57Blk/6 mouse.

[0871] RNAs were prepared as follows. An mRNA encoding a gene modifying polypeptide having the sequence shown in Table 7A below was produced by in vitro transcription and the purified mRNA was dissolved in 1 mM sodium citrate, pH 6, to a final concentration of RNA of 1-2 mg/mL. Similarly, a guide RNA having a sequence shown in Table 7A below was produced by chemical synthesis and dissolved in water or aqueous buffer, to a final concentration of RNA of 1-2 mg/mL.

TABLE 7A
Sequences of Example 7

| | | SEQ |
|---|---|---|
| Name | Nucleic acid sequence | ID NO |
| Cas9-RT | AUGCCUGCGGCUAAGCGGGUAAAAUUGGAUG | 19547 |
| gene | GUGGGGACAAGAAGUACAGCAUCGGCCUGGA | |
| modifying | CAUCGGCACCAACUCUGUGGGCUGGGCCGUG | |
| polypeptide | AUCACCGACGAGUACAAGGUGCCCAGCAAGA | |
| | AAUUCAAGGUGCUGGGCAACACCGACCGGCA | |
| | CAGCAUCAAGAAGAACCUGAUCGGAGCCCUG | |
| | CUGUUCGACAGCGGCGAAACAGCCGAGGCCA | |
| | CCCGGCUGAAGAGAACCGCCAGAAGAAGAUA | |
| | CACCAGACGGAAGAACCGGAUCUGCUAUCUG | |
| | CAAGAGAUCUUCAGCAACGAGAUGGCCAAGG | |
| | UGGACGACAGCUUCUUCCACAGACUGGAAGA | |
| | GUCCUUCCUGGUGGAAGAGGAUAAGAAGCAC | |
| | GAGCGGCACCCCAUCUUCGGCAACAUCGUGG | |
| | ACGAGGUGGCCUACCACGAGAAGUACCCCAC | |
| | CAUCUACCACCUGAGAAAGAAACUGGUGGAC | |
| | AGCACCGACAAGGCCGACCUGCGGCUGAUCU | |
| | AUCUGGCCCUGGCCCACAUGAUCAAGUUCCG | |
| | GGGCCACUUCCUGAUCGAGGGCGACCUGAAC | |
| | CCCGACAACAGCGACGUGGACAAGCUGUUCA | |
| | UCCAGCUGGUGCAGACCUACAACCAGCUGUU | |
| | CGAGGAAAACCCCAUCAACGCCAGCGGCGUG | |
| | GACGCCAAGGCCAUCCUGUCUGCCAGACUGA | |
| | GCAAGAGCAGACGGCUGGAAAAUCUGAUCGC | |
| | CCAGCUGCCCGGCGAGAAGAAGAAUGGCCUG | |
| | UUCGGAAACCUGAUUGCCCUGAGCCUGGGCC | |
| | UGACCCCCAACUUCAAGAGCAACUUCGACCU | |
| | GGCCGAGGAUGCCAAACUGCAGCUGAGCAAG | |
| | GACACCUACGACGACGACCUGGACAACCUGC | |
| | UGGCCCAGAUCGGCGACCAGUACGCCGACCU | |
| | GUUUCUGGCCGCCAAGAACCUGUCCGACGCC | |
| | AUCCUGCUGAGCGACAUCCUGAGAGUGAACA | |
| | CCGAGAUCACCAAGGCCCCCCUGAGCGCCUCU | |
| | AUGAUCAAGAGAUACGACGAGCACCACCAGG | |
| | ACCUGACCCUGCUGAAAGCUCUCGUGCGGCA | |
| | GCAGCUGCCUGAGAAGUACAAAGAGAUUUUC | |
| | UUCGACCAGAGCAAGAACGGCUACGCCGGCU | |
| | ACAUUGACGGCGGAGCCAGCCAGGAAGAGUU | |
| | CUACAAGUUCAUCAAGCCCAUCCUGGAAAAG | |
| | AUGGACGGCACCGAGGAACUGCUCGUGAAGC | |
| | UGAACAGAGAGGACCUGCUGCGGAAGCAGCG | |
| | GACCUUCGACAACGGCAGCAUCCCCCACCAGA | |
| | UCCACCUGGGAGAGCUGCACGCCAUUCUGCG | |
| | GCGGCAGGAAGAUUUUUACCCAUUCCUGAAG | |
| | GACAACCGGGAAAAGAUCGAGAAGAUCCUGA | |
| | CCUUCCGCAUCCCCUACUACGUGGGCCCUCUG | |
| | GCCAGGGGAAACAGCAGAUUCGCCUGGAUGA | |
| | CCAGAAAGAGCGAGGAAACCAUCACCCCCUG | |
| | GAACUUCGAGGAAGUGGUGGACAAGGGCGCU | |
| | UCCGCCCAGAGCUUCAUCGAGCGGAUGACCA | |
| | ACUUCGAUAAGAACCUGCCCAACGAGAAGGU | |
| | GCUGCCCAAGCACAGCCUGCUGUACGAGUAC | |
| | UUCACCGUGUAUAACGAGCUGACCAAAGUGA | |
| | AAUACGUGACCGAGGGAAUGAGAAAGCCCGC | |
| | CUUCCUGAGCGGCGAGCAGAAAAAGGCCAUC | |
| | GUGGACCUGCUGUUCAAGACCAACCGGAAAG | |
| | UGACCGUGAAGCAGCUGAAAGAGGACUACUU | |
| | CAAGAAAAUCGAGUGCUUCGACUCCGUGGAA | |
| | AUCUCCGGCGUGGAAGAUCGGUUCAACGCCU | |
| | CCCUGGGCACAUACCACGAUCUGCUGAAAAU | |
| | UAUCAAGGACAAGGACUUCCUGGACAAUGAG | |
| | GAAAACGAGGACAUUCUGGAAGAUAUCGUGC | |
| | UGACCCUGACACUGUUUGAGGACAGAGAGAU | |
| | GAUCGAGGAACGGCUGAAAACCUAUGCCCAC | |
| | CUGUUCGACGACAAAGUGAUGAAGCAGCUGA | |
| | AGCGGCGGAGAUACACCGGCUGGGGCAGGCU | |
| | GAGCCGGAAGCUGAUCAACGGCAUCCGGGAC | |
| | AAGCAGUCCGGCAAGACAAUCCUGGAUUUCC | |
| | UGAAGUCCGACGGCUUCGCCAACAGAAACUU | |
| | CAUGCAGCUGAUCCACGACGACAGCCUGACC | |
| | UUUAAAGAGGACAUCCAGAAAGCCCAGGUGU | |
| | CCGGCCAGGGCGAUAGCCUGCACGAGCACAU | |
| | UGCCAAUCUGGCCGGCAGCCCCGCCAUUAAG | |
| | AAGGGCAUCCUGCAGACAGUGAAGGUGGUGG | |
| | ACGAGCUCGUGAAAGUGAUGGGCCGGCACAA | |
| | GCCCGAGAACAUCGUGAUCGAAAUGGCCAGA | |
| | GAGAACCAGACCACCCAGAAGGGACAGAAGA | |
| | ACAGCCGCGAGAGAAUGAAGCGGAUCGAAGA | |
| | GGGCAUCAAAGAGCUGGGCAGCCAGAUCCUG | |
| | AAAGAACACCCCGUGGAAAACACCCAGCUGC | |
| | AGAACGAGAAGCUGUACCUGUACUACCUGCA | |
| | GAAUGGGCGGGAUAUGUACGUGGACCAGGAA | |
| | CUGGACAUCAACCGGCUGUCCGACUACGAUG | |
| | UGGACCAUAUCGUGCCUCAGAGCUUUCUGAA | |
| | GGACGACUCCAUCGACAACAAGGUGCUGACC | |
| | AGAAGCGACAAGAAUCGGGGCAAGAGCGACA | |
| | ACGUGCCCUCCGAAGAGGUCGUGAAGAAGAU | |
| | GAAGAACUACUGGCGGCAGCUGCUGAACGCC | |
| | AAGCUGAUUACCCAGAGAAAGUUCGACAAUC | |
| | UGACCAAGGCCGAGAGAGGCGGCCUGAGCGA | |
| | ACUGGAUAAGGCCGGCUUCAUCAAGAGACAG | |
| | CUGGUGGAAACCCGGCAGAUCACAAAGCACG | |
| | UGGCACAGAUCCUGGACUCCCGGAUGAACAC | |
| | UAAGUACGACGAGAAUGACAAGCUGAUCCGG | |
| | GAAGUGAAAGUGAUCACCCUGAAGUCCAAGC | |
| | UGGUGUCCGAUUUCCGGAAGGAUUUCCAGUU | |
| | UUACAAAGUGCGCGAGAUCAACAACUACCAC | |
| | CACGCCCACGACGCCUACCUGAACGCCGUCGU | |
| | GGGAACCGCCCUGAUCAAAAAGUACCCUAAG | |
| | CUGGAAAGCGAGUUCGUGUACGGCGACUACA | |
| | AGGUGUACGACGUGCGGAAGAUGAUCGCCAA | |
| | GAGCGAGCAGGAAAUCGGCAAGGCUACCGCC | |
| | AAGUACUUCUUCUACAGCAACAUCAUGAACU | |
| | UUUUCAAGACCGAGAUUACCCUGGCCAACGG | |
| | CGAGAUCCGGAAGCGGCCUCUGAUCGAGACA | |
| | AACGGCGAAACCGGGGAGAUCGUGUGGGAUA | |
| | AGGGCCGGGAUUUUGCCACCGUGCGGAAAGU | |
| | GCUGAGCAUGCCCCAAGUGAAUAUCGUGAAA | |
| | AAGACCGAGGUGCAGACAGGCGGCUUCAGCA | |
| | AAGAGUCUAUCCUGCCCAAGAGGAACAGCGA | |
| | UAAGCUGAUCGCCAGAAAGAAGGACUGGGAC | |
| | CCUAAGAAGUACGGCGGCUUCGACAGCCCCA | |
| | CCGUGGCCUAUUCUGUGCUGGUGGUGGCCAA | |
| | AGUGGAAAAGGGCAAGUCCAAGAAACUGAAG | |
| | AGUGUGAAAGAGCUGCUGGGGAUCACCAUCA | |
| | UGGAAAGAAGCAGCUUCGAGAAGAAUCCCAU | |
| | CGACUUUCUGGAAGCCAAGGGCUACAAAGAA | |
| | GUGAAAAAGGACCUGAUCAUCAAGCUGCCUA | |
| | AGUACUCCCUGUUCGAGCUGGAAAACGGCCG | |
| | GAAGAGAAUGCUGGCCUCUGCCGGCGAACUG | |
| | CAGAAGGGAAACGAACUGGCCCUGCCCUCCA | |
| | AAUAUGUGAACUUCCUGUACCUGGCCAGCCA | |
| | CUAUGAGAAGCUGAAGGGCUCCCCCGAGGAU | |
| | AAUGAGCAGAAACAGCUGUUUGUGGAACAGC | |
| | ACAAGCACUACCUGGACGAGAUCAUCGAGCA | |
| | GAUCAGCGAGUUCUCCAAGAGAGUGAUCCUG | |
| | GCCGACGCUAAUCUGGACAAAGUGCUGUCCG | |
| | CCUACAACAAGCACCGGGAUAAGCCCAUCAG | |
| | AGAGCAGGCCGAGAAUAUCAUCCACCUGUUU | |
| | ACCCUGACCAAUCUGGGAGCCCCUGCCGCCUU | |
| | CAAGUACUUUGACACCACCAUCGACCGGAAG | |
| | AGGUACACCAGCACCAAAGAGGUGCUGGACG | |
| | CCACCCUGAUCCACCAGAGCAUCACCGGCCUG | |
| | UACGAGACACGGAUCGACCUGUCUCAGCUGG | |
| | GAGGUGACUCUGGAGGAUCUAGCGGAGGAUC | |
| | CUCUGGCAGCGAGACACCAGGAACAAGCGAG | |
| | UCAGCAACACCAGAGAGCAGUGGCGGCAGCA | |
| | GCGGCGGCAGCAGCACCCUAAAUAUAGAAGA | |
| | UGAGUAUCGGCUACAUGAGACCUCAAAAGAG | |
| | CCAGAUGUUUCUCUAGGGUCCACAUGGCUGU | |
| | CUGAUUUUCCUCAGGCCUGGGCGGAAACCGG | |
| | GGGCAUGGGACUGGCAGUUCGCCAAGCUCCU | |
| | CUGAUCAUACCUCUGAAAGCAACCUCUACCC | |
| | CCGUGUCCAUAAAACAAUACCCCAUGUCACA | |
| | AGAAGCCAGACUGGGGAUCAAGCCCCACAUA | |
| | CAGAGACUGUUGGACCAGGGAAUACUGGUAC | |
| | CCUGCCAGUCCCCCUGGAACACGCCCCUGCUA | |
| | CCCGUUAAGAAACCAGGGACUAAUGAUUAUA | |
| | GGCCUGUCCAGGAUCUGAGAGAAGUCAACAA | |
| | GCGGGUGGAGGACAUCCACCCCACCGUGCCC | |
| | AACCCUUACAACCUCUUGAGCGGGCUCCCACC | |
| | GUCCCACCAGUGGUACACUGUGCUUGAUUUA | |
| | AAGGAUGCCUUUUUCUGCCUGAGACUCCACC | |
| | CCACCAGUCAGCCUCUCUUCGCCUUUGAGUG | |
| | GAGAGAUCCAGAGAUGGGAAUCUCAGGACAA | |
| | UUGACCUGGACCAGACUCCCACAGGGUUUCA | |
| | AAAACAGUCCCACCCUGUUUAAUGAGGCACU | |
| | GCACAGAGACCUAGCAGACUUCCGGAUCCAG | |
| | CACCCAGACUUGAUCCUGCUACAGUACGUGG | |
| | AUGACUUACUGCUGGCCGCCACUUCUGAGCU | |
| | AGACUGCCAACAAGGUACUCGGGCCCUGUUA | |
| | CAAACCCUAGGGAACCUCGGGUAUCGGGCCU | |
| | CGGCCAAGAAAGCCCAAAUUUGCCAGAAACA | |
| | GGUCAAGUAUCUGGGGUAUCUUCUAAAAGAG | |
| | GGUCAGAGAUGGCUGACUGAGGCCAGAAAAG | |
| | AGACUGUGAUGGGGCAGCCUACUCCGAAGAC | |
| | CCCUCGACAACUAAGGGAGUUCCUAGGGAAG | |
| | GCAGGCUUCUGUCGCCUCUUCAUCCCUGGGU | |
| | UUGCAGAAAUGGCAGCCCCCCUGUACCCUCU | |
| | CACCAAACCGGGGACUCUGUUUAAUUGGGGC | |
| | CCAGACCAACAAAAGGCCUAUCAAGAAAUCA | |
| | AGCAAGCCCUUCUAACUGCCCCAGCCCUGGG | |
| | GUUGCCAGAUUUGACUAAGCCCUUUGAACUC | |
| | UUUGUCGACGAGAAGCAGGGCUACGCCAAAG | |
| | GUGUCCUAACGCAAAAACUGGGACCUUGGCG | |
| | UCGGCCGGUGGCCUACCUGUCCAAAAAGCUA | |
| | GACCCAGUAGCAGCUGGGUGGCCCCCUUGCC | |
| | UACGGAUGGUAGCAGCCAUUGCCGUACUGAC | |
| | AAAGGAUGCAGGCAAGCUAACCAUGGGACAG | |
| | CCACUAGUCAUUCUGGCCCCCCAUGCAGUAG | |
| | AGGCACUAGUCAAACAACCCCCCGACCGCUG | |
| | GCUUUCCAACGCCCGGAUGACUCACUAUCAG | |
| | GCCUUGCUUUUGGACACGGACCGGGUCCAGU | |
| | UCGGACCGGUGGUAGCCCUGAACCCGGCUAC | |
| | GCUGCUCCCACUGCCUGAGGAAGGGCUGCAA | |
| | CACAACUGCCUUGAUAUCCUGGCCGAAGCCC | |
| | ACGGAACCCGACCCGACCUAACGGACCAGCCG | |
| | CUCCCAGACGCCGACCACACCUGGUACACGGA | |
| | UGGAAGCAGUCUCUUACAAGAGGGACAGCGU | |
| | AAGGCGGGAGCUGCGGUGACCACCGAGACCG | |
| | AGGUAAUCUGGGCUAAAGCCCUGCCAGCCGG | |
| | GACAUCCGCUCAGCGGGCUGAACUGAUAGCA | |
| | CUCACCCAGGCCCUAAAGAUGGCAGAAGGUA | |
| | AGAAGCUAAAUGUUUAUACUGAUAGCCGUUA | |
| | UGCUUUUGCUACUGCCCAUAUCCAUGGAGAA | |
| | AUAUACAGAAGGCGUGGGUGGCUCACAUCAG | |
| | AAGGCAAAGAGAUCAAAAAUAAAGACGAGAU | |
| | CUUGGCCCUACUAAAAGCCCUCUUUCUGCCC | |
| | AAAAGACUUAGCAUAAUCCAUUGUCCAGGAC | |
| | AUCAAAAGGGACACAGCGCCGAGGCUAGAGG | |
| | CAACCGGAUGGCUGACCAAGCGGCCCGAAAG | |
| | GCAGCCAUCACAGAGACUCCAGACACCUCUA | |
| | CCCUCCUCAUAGAAAAUUCAUCACCCUCUGG | |
| | CGGCUCAAAAAGAACCGCCGACGGCAGCGAA | |
| | UUCGAGAAAAGGACGGCGGAUGGUAGCGAAU | |
| | UCGAGAGCCCUAAAAAGAAGGCCAAGGUAGA | |
| | GUAA | |
| guide RNA | mA*mC*mA*CAAAUACCAGUCCAGCGGUUUUA | 19548 |
| | GAmGmCmUmAmGmAmAmAmUmAmGmCAAGU | |
| | UAAAAUAAGGCUAGUCCGUUAUCAmAmCmUm | |
| | UmGmAmAmAmAmAmGmUmGmGmCmAmCmCm | |
| | GmAmGmUmCmGmGmUmGmCmU*mU*mU*mU | |
| | m = 2'OMethyl, * = phosphorothioate linkage | |

[0872] Lipid nanoparticle (LNP) components (ionizable lipid, helper lipid, sterol, PEG) were dissolved in 100% ethanol with the lipid component molar ratios of 47:8:43.5:1.5, respectively. RNA (guide and mRNA) was combined in a 1:1 weight ratio and diluted to a concentration of 0.05-0.2 mg/mL in sodium acetate buffer, pH 5. RNA was formulated into distinct LNPs with a lipid amine to total RNA phosphate (N:P) molar ratio of 4.0. The LNPs were formed by microfluidic or turbulent mixing of the lipid and RNA solutions. A 3:1 ratio of aqueous to organic solvent was maintained during mixing using differential flow rates. After mixing, the LNPs were diluted, collected and buffer exchanged into 50 mM Tris, 9% sucrose buffer using tangential flow filtration. Formulations were concentrated to 1.0 mg/mL or higher then filtered through 0.2 μm sterile filter. The final LNP were stored at −80° C. until further use.

[0873] The LNP formulations were delivered intravenously by bolus tail vein injection to C57Blk/6 mice that were approximately 8 weeks old at concentrations ranging from 1-0.1 mg/kg. The expression of the Cas9-RT was measured by 6 hours after injection by euthanizing animals and collecting livers during necropsy. Animals were euthanized at 5 days after injection where liver was collected upon necropsy to which the activity of gene editing of the TTR locus was assessed. Expression of the Cas9-RT gene editing polypeptide in liver was measured by Western blot where Cas9 was detected by a mouse monoclonal antibody (7A9-3A3, Cell Signaling Technology) and GAPDH (Cell Signaling Technology) was used as a loading control. (FIG. 8). Editing of the TTR locus was quantified by Sanger sequencing followed by TIDE analysis of an amplicon of the TTR locus near the binding site of the protospacer. Editing of the TTR locus was observed, as shown in FIG. 9. TTR protein levels in serum were quantified by an ELISA using a standard curve (Aviva Biosciences). TTR protein levels in serum declined in treated animals, as shown in FIG. 10. These experiments demonstrate that the Cas9-RT polypeptide can be expressed in vivo, and can edit the TTR locus, resulting in a decrease in TTR protein levels in serum.

### Example 8. Gene Editing at the TTR Locus in an In Vivo Cynomolgus Macaque Model

[0874] This Example demonstrates successful delivery of an mRNA and guide using Cas9-mediated gene editing using the protospacer sequence ACACAAAUACCAGUCCAGCG (SEQ ID NO: 25696) that targets the TTR locus using a gene modifying polypeptide and RNA in a cynomolgus model.

[0875] RNAs were prepared as follows. An mRNA encoding a gene modifying polypeptide having the sequence shown in Table 8A below was produced by in vitro transcription and the purified mRNA was dissolved in 1 mM sodium citrate, pH 6, to a final concentration of RNA of 1-2 mg/mL. Similarly, a guide RNA having a sequence shown in Table 8A below was produced by chemical synthesis and dissolved in water or aqueous buffer, to a final concentration of RNA of 1-2 mg/mL.

TABLE 8A
Sequences of Example 8

| | | SEQ ID |
|---|---|---|
| Name | Nucleic acid sequence | NO |
| Cas9-RT gene | AUGCCUGCGGCUAAGCGGGUAAAAUUGGAUGGUGGGGACA | 19549 |
| modifying | AGAAGUACAGCAUCGGCCUGGACAUCGGCACCAACUCUGUG | |
| polypeptide | GGCUGGGCCGUGAUCACCGACGAGUACAAGGUGCCCAGCAA | |
| | GAAAUUCAAGGUGCUGGGCAACACCGACCGGCACAGCAUCA | |
| | AGAAGAACCUGAUCGGAGCCCUGCUGUUCGACAGCGGCGAA | |
| | ACAGCCGAGGCCACCCGGCUGAAGAGAACCGCCAGAAGAAG | |
| | AUACACCAGACGGAAGAACCGGAUCUGCUAUCUGCAAGAGA | |
| | UCUUCAGCAACGAGAUGGCCAAGGUGGACGACAGCUUCUUC | |
| | CACAGACUGGAAGAGUCCUUCCUGGUGGAAGAGGAUAAGA | |
| | AGCACGAGCGGCACCCCAUCUUCGGCAACAUCGUGGACGAG | |
| | GUGGCCUACCACGAGAAGUACCCCACCAUCUACCACCUGAG | |
| | AAAGAAACUGGUGGACAGCACCGACAAGGCCGACCUGCGGC | |
| | UGAUCUAUCUGGCCCUGGCCCACAUGAUCAAGUUCCGGGGC | |
| | CACUUCCUGAUCGAGGGCGACCUGAACCCCGACAACAGCGA | |
| | CGUGGACAAGCUGUUCAUCCAGCUGGUGCAGACCUACAACC | |
| | AGCUGUUCGAGGAAAACCCCAUCAACGCCAGCGGCGUGGAC | |
| | GCCAAGGCCAUCCUGUCUGCCAGACUGAGCAAGAGCAGACG | |
| | GCUGGAAAAUCUGAUCGCCCAGCUGCCCGGCGAGAAGAAGA | |
| | AUGGCCUGUUCGGAAACCUGAUUGCCCUGAGCCUGGGCCUG | |
| | ACCCCCAACUUCAAGAGCAACUUCGACCUGGCCGAGGAUGC | |
| | CAAACUGCAGCUGAGCAAGGACACCUACGACGACGACCUGG | |
| | ACAACCUGCUGGCCCAGAUCGGCGACCAGUACGCCGACCUG | |
| | UUUCUGGCCGCCAAGAACCUGUCCGACGCCAUCCUGCUGAG | |
| | CGACAUCCUGAGAGUGAACACCGAGAUCACCAAGGCCCCCC | |
| | UGAGCGCCUCUAUGAUCAAGAGAUACGACGAGCACCACCAG | |
| | GACCUGACCCUGCUGAAAGCUCUCGUGCGGCAGCAGCUGCC | |
| | UGAGAAGUACAAAGAGAUUUUCUUCGACCAGAGCAAGAAC | |
| | GGCUACGCCGGCUACAUUGACGGCGGAGCCAGCCAGGAAGA | |
| | GUUCUACAAGUUCAUCAAGCCCAUCCUGGAAAAGAUGGACG | |
| | GCACCGAGGAACUGCUCGUGAAGCUGAACAGAGAGGACCUG | |
| | CUGCGGAAGCAGCGGACCUUCGACAACGGCAGCAUCCCCCA | |
| | CCAGAUCCACCUGGGAGAGCUGCACGCCAUUCUGCGGCGGC | |
| | AGGAAGAUUUUUACCCAUUCCUGAAGGACAACCGGGAAAA | |
| | GAUCGAGAAGAUCCUGACCUUCCGCAUCCCCUACUACGUGG | |
| | GCCCUCUGGCCAGGGGAAACAGCAGAUUCGCCUGGAUGACC | |
| | AGAAAGAGCGAGGAAACCAUCACCCCCUGGAACUUCGAGGA | |
| | AGUGGUGGACAAGGGCGCUUCCGCCCAGAGCUUCAUCGAGC | |
| | GGAUGACCAACUUCGAUAAGAACCUGCCCAACGAGAAGGUG | |
| | CUGCCCAAGCACAGCCUGCUGUACGAGUACUUCACCGUGUA | |
| | UAACGAGCUGACCAAAGUGAAAUACGUGACCGAGGGAAUG | |
| | AGAAAGCCCGCCUUCCUGAGCGGCGAGCAGAAAAAGGCCAU | |
| | CGUGGACCUGCUGUUCAAGACCAACCGGAAAGUGACCGUGA | |
| | AGCAGCUGAAAGAGGACUACUUCAAGAAAAUCGAGUGCUU | |
| | CGACUCCGUGGAAAUCUCCGGCGUGGAAGAUCGGUUCAACG | |
| | CCUCCCUGGGCACAUACCACGAUCUGCUGAAAAUUAUCAAG | |
| | GACAAGGACUUCCUGGACAAUGAGGAAAACGAGGACAUUC | |
| | UGGAAGAUAUCGUGCUGACCCUGACACUGUUUGAGGACAG | |
| | AGAGAUGAUCGAGGAACGGCUGAAAACCUAUGCCCACCUGU | |
| | UCGACGACAAAGUGAUGAAGCAGCUGAAGCGGCGGAGAUA | |
| | CACCGGCUGGGGCAGGCUGAGCCGGAAGCUGAUCAACGGCA | |
| | UCCGGGACAAGCAGUCCGGCAAGACAAUCCUGGAUUUCCUG | |
| | AAGUCCGACGGCUUCGCCAACAGAAACUUCAUGCAGCUGAU | |
| | CCACGACGACAGCCUGACCUUUAAAGAGGACAUCCAGAAAG | |
| | CCCAGGUGUCCGGCCAGGGCGAUAGCCUGCACGAGCACAUU | |
| | GCCAAUCUGGCCGGCAGCCCCGCCAUUAAGAAGGGCAUCCU | |
| | GCAGACAGUGAAGGUGGUGGACGAGCUCGUGAAAGUGAUG | |
| | GGCCGGCACAAGCCCGAGAACAUCGUGAUCGAAAUGGCCAG | |
| | AGAGAACCAGACCACCCAGAAGGGACAGAAGAACAGCCGCG | |
| | AGAGAAUGAAGCGGAUCGAAGAGGGCAUCAAAGAGCUGGG | |
| | CAGCCAGAUCCUGAAAGAACACCCCGUGGAAAACACCCAGC | |
| | UGCAGAACGAGAAGCUGUACCUGUACUACCUGCAGAAUGG | |
| | GCGGGAUAUGUACGUGGACCAGGAACUGGACAUCAACCGGC | |
| | UGUCCGACUACGAUGUGGACCAUAUCGUGCCUCAGAGCUUU | |
| | CUGAAGGACGACUCCAUCGACAACAAGGUGCUGACCAGAAG | |
| | CGACAAGAAUCGGGGCAAGAGCGACAACGUGCCCUCCGAAG | |
| | AGGUCGUGAAGAAGAUGAAGAACUACUGGCGGCAGCUGCU | |
| | GAACGCCAAGCUGAUUACCCAGAGAAAGUUCGACAAUCUGA | |
| | CCAAGGCCGAGAGAGGCGGCCUGAGCGAACUGGAUAAGGCC | |
| | GGCUUCAUCAAGAGACAGCUGGUGGAAACCCGGCAGAUCAC | |
| | AAAGCACGUGGCACAGAUCCUGGACUCCCGGAUGAACACUA | |
| | AGUACGACGAGAAUGACAAGCUGAUCCGGGAAGUGAAAGU | |
| | GAUCACCCUGAAGUCCAAGCUGGUGUCCGAUUUCCGGAAGG | |
| | AUUUCCAGUUUUACAAAGUGCGCGAGAUCAACAACUACCAC | |
| | CACGCCCACGACGCCUACCUGAACGCCGUCGUGGGAACCGC | |
| | CCUGAUCAAAAAGUACCCUAAGCUGGAAAGCGAGUUCGUG | |
| | UACGGCGACUACAAGGUGUACGACGUGCGGAAGAUGAUCG | |
| | CCAAGAGCGAGCAGGAAAUCGGCAAGGCUACCGCCAAGUAC | |
| | UUCUUCUACAGCAACAUCAUGAACUUUUUCAAGACCGAGAU | |
| | UACCCUGGCCAACGGCGAGAUCCGGAAGCGGCCUCUGAUCG | |
| | AGACAAACGGCGAAACCGGGGAGAUCGUGUGGGAUAAGGG | |
| | CCGGGAUUUUGCCACCGUGCGGAAAGUGCUGAGCAUGCCCC | |
| | AAGUGAAUAUCGUGAAAAAGACCGAGGUGCAGACAGGCGG | |
| | CUUCAGCAAAGAGUCUAUCCUGCCCAAGAGGAACAGCGAUA | |
| | AGCUGAUCGCCAGAAAGAAGGACUGGGACCCUAAGAAGUA | |
| | CGGCGGCUUCGACAGCCCCACCGUGGCCUAUUCUGUGCUGG | |
| | UGGUGGCCAAAGUGGAAAAGGGCAAGUCCAAGAAACUGAA | |
| | GAGUGUGAAAGAGCUGCUGGGGAUCACCAUCAUGGAAAGA | |
| | AGCAGCUUCGAGAAGAAUCCCAUCGACUUUCUGGAAGCCAA | |
| | GGGCUACAAAGAAGUGAAAAAGGACCUGAUCAUCAAGCUG | |
| | CCUAAGUACUCCCUGUUCGAGCUGGAAAACGGCCGGAAGAG | |
| | AAUGCUGGCCUCUGCCGGCGAACUGCAGAAGGGAAACGAAC | |
| | UGGCCCUGCCCUCCAAAUAUGUGAACUUCCUGUACCUGGCC | |
| | AGCCACUAUGAGAAGCUGAAGGGCUCCCCCGAGGAUAAUGA | |
| | GCAGAAACAGCUGUUUGUGGAACAGCACAAGCACUACCUGG | |
| | ACGAGAUCAUCGAGCAGAUCAGCGAGUUCUCCAAGAGAGU | |
| | GAUCCUGGCCGACGCUAAUCUGGACAAAGUGCUGUCCGCCU | |
| | ACAACAAGCACCGGGAUAAGCCCAUCAGAGAGCAGGCCGAG | |
| | AAUAUCAUCCACCUGUUUACCCUGACCAAUCUGGGAGCCCC | |
| | UGCCGCCUUCAAGUACUUUGACACCACCAUCGACCGGAAGA | |
| | GGUACACCAGCACCAAAGAGGUGCUGGACGCCACCCUGAUC | |
| | CACCAGAGCAUCACCGGCCUGUACGAGACACGGAUCGACCU | |
| | GUCUCAGCUGGGAGGUGACUCUGGAGGAUCUAGCGGAGGA | |
| | UCCUCUGGCAGCGAGACACCAGGAACAAGCGAGUCAGCAAC | |
| | ACCAGAGAGCAGUGGCGGCAGCAGCGGCGGCAGCAGCACCC | |
| | UAAAUAUAGAAGAUGAGUAUCGGCUACAUGAGACCUCAAA | |
| | AGAGCCAGAUGUUUCUCUAGGGUCCACAUGGCUGUCUGAU | |
| | UUUCCUCAGGCCUGGGCGGAAACCGGGGGCAUGGGACUGGC | |
| | AGUUCGCCAAGCUCCUCUGAUCAUACCUCUGAAAGCAACCU | |
| | CUACCCCCGUGUCCAUAAAACAAUACCCCAUGUCACAAGAA | |
| | GCCAGACUGGGGAUCAAGCCCCACAUACAGAGACUGUUGGA | |
| | CCAGGGAAUACUGGUACCCUGCCAGUCCCCCUGGAACACGC | |
| | CCCUGCUACCCGUUAAGAAACCAGGGACUAAUGAUUAUAGG | |
| | CCUGUCCAGGAUCUGAGAGAAGUCAACAAGCGGGUGGAGG | |
| | ACAUCCACCCCACCGUGCCCAACCCUUACAACCUCUUGAGC | |
| | GGGCUCCCACCGUCCCACCAGUGGUACACUGUGCUUGAUUU | |
| | AAAGGAUGCCUUUUUCUGCCUGAGACUCCACCCCACCAGUC | |
| | AGCCUCUCUUCGCCUUUGAGUGGAGAGAUCCAGAGAUGGG | |
| | AAUCUCAGGACAAUUGACCUGGACCAGACUCCCACAGGGUU | |
| | UCAAAAACAGUCCCACCCUGUUUAAUGAGGCACUGCACAGA | |
| | GACCUAGCAGACUUCCGGAUCCAGCACCCAGACUUGAUCCU | |
| | GCUACAGUACGUGGAUGACUUACUGCUGGCCGCCACUUCUG | |
| | AGCUAGACUGCCAACAAGGUACUCGGGCCCUGUUACAAACC | |
| | CUAGGGAACCUCGGGUAUCGGGCCUCGGCCAAGAAAGCCCA | |
| | AAUUUGCCAGAAACAGGUCAAGUAUCUGGGGUAUCUUCUA | |
| | AAAGAGGGUCAGAGAUGGCUGACUGAGGCCAGAAAAGAGA | |
| | CUGUGAUGGGGCAGCCUACUCCGAAGACCCCUCGACAACUA | |
| | AGGGAGUUCCUAGGGAAGGCAGGCUUCUGUCGCCUCUUCAU | |
| | CCCUGGGUUUGCAGAAAUGGCAGCCCCCCUGUACCCUCUCA | |
| | CCAAACCGGGGACUCUGUUUAAUUGGGGCCCAGACCAACAA | |
| | AAGGCCUAUCAAGAAAUCAAGCAAGCCCUUCUAACUGCCCC | |
| | AGCCCUGGGGUUGCCAGAUUUGACUAAGCCCUUUGAACUCU | |
| | UUGUCGACGAGAAGCAGGGCUACGCCAAAGGUGUCCUAACG | |
| | CAAAAACUGGGACCUUGGCGUCGGCCGGUGGCCUACCUGUC | |
| | CAAAAAGCUAGACCCAGUAGCAGCUGGGUGGCCCCCUUGCC | |
| | UACGGAUGGUAGCAGCCAUUGCCGUACUGACAAAGGAUGC | |
| | AGGCAAGCUAACCAUGGGACAGCCACUAGUCAUUCUGGCCC | |
| | CCCAUGCAGUAGAGGCACUAGUCAAACAACCCCCCGACCGC | |
| | UGGCUUUCCAACGCCCGGAUGACUCACUAUCAGGCCUUGCU | |
| | UUUGGACACGGACCGGGUCCAGUUCGGACCGGUGGUAGCCC | |
| | UGAACCCGGCUACGCUGCUCCCACUGCCUGAGGAAGGGCUG | |
| | CAACACAACUGCCUUGAUAUCCUGGCCGAAGCCCACGGAAC | |
| | CCGACCCGACCUAACGGACCAGCCGCUCCCAGACGCCGACC | |
| | ACACCUGGUACACGGAUGGAAGCAGUCUCUUACAAGAGGG | |
| | ACAGCGUAAGGCGGGAGCUGCGGUGACCACCGAGACCGAGG | |
| | UAAUCUGGGCUAAAGCCCUGCCAGCCGGGACAUCCGCUCAG | |
| | CGGGCUGAACUGAUAGCACUCACCCAGGCCCUAAAGAUGGC | |
| | AGAAGGUAAGAAGCUAAAUGUUUAUACUGAUAGCCGUUAU | |
| | GCUUUUGCUACUGCCCAUAUCCAUGGAGAAAUAUACAGAA | |
| | GGCGUGGGUGGCUCACAUCAGAAGGCAAAGAGAUCAAAAA | |
| | UAAAGACGAGAUCUUGGCCCUACUAAAAGCCCUCUUUCUGC | |
| | CCAAAAGACUUAGCAUAAUCCAUUGUCCAGGACAUCAAAAG | |
| | GGACACAGCGCCGAGGCUAGAGGCAACCGGAUGGCUGACCA | |
| | AGCGGCCCGAAAGGCAGCCAUCACAGAGACUCCAGACACCU | |
| | CUACCCUCCUCAUAGAAAAUUCAUCACCCUCUGGCGGCUCA | |
| | AAAAGAACCGCCGACGGCAGCGAAUUCGAGAAAAGGACGGC | |
| | GGAUGGUAGCGAAUUCGAGAGCCCUAAAAAGAAGGCCAAG | |
| | GUAGAGUAA | |
| guide RNA | mA*mC*mA*CAAAUACCAGUCCAGCGGUUUUAGAmGmCmUm | 19550 |
| | AmGmAmAmAmUmAmGmCAAGUUAAAAUAAGGCUAGUCCG | |
| | UUAUCAmAmCmUmUmGmAmAmAmAmAmGmUmGmGmCmAm | |
| | CmCmGmAmGmUmCmGmGmUmGmCmU*mU*mU*mU | |
| | m = 2'OMethyl, * = phosphorothioate linkage | |

[0876] Lipid nanoparticle (LNP) components (ionizable lipid, helper lipid, sterol, PEG) were dissolved in 100% ethanol with the lipid component molar ratios of 47:8:43.5:1.5, respectively. RNA (guide and mRNA) was combined in a 1:1 weight ratio and diluted to a concentration of 0.05-0.2 mg/mL in sodium acetate buffer, pH 5. RNA was formulated into distinct LNPs with a lipid amine to total RNA phosphate (N:P) molar ratio of 4.0. The LNPs were formed by microfluidic or turbulent mixing of the lipid and RNA solutions. A 3:1 ratio of aqueous to organic solvent was maintained during mixing using differential flow rates. After mixing, the LNPs were diluted, collected and buffer exchanged into 50 mM Tris, 9% sucrose buffer using tangential flow filtration. Formulations were concentrated to 1.0 mg/mL or higher then filtered through 0.2 μm sterile filter. The final LNP were stored at −80° C. until further use. The LNP formulations were delivered intravenously by infusion over the course of 1 hour at 2 mg/kg where the volume of the infusion was 5 ml/kg. Cynomolgus macaques from mainland Asia were given dexamethasone 2 mg/kg bolus via intramuscular injection 1.5-2 h prior to intravenous infusion using a syringe pump. Animals were monitored after infusion and the expression of the Cas9-RT was measured by laparoscopic biopsies taken from the liver 8-12 h, 24 h, and 48 h after infusion. Animals were euthanized 14 days after infusion and liver was harvested by dividing the organ up into 8 different segments to which the activity of gene editing of the TTR locus was assessed. Expression of the Cas9-RT gene editing polypeptide in liver was quantified by capillary electrophoresis western blot using the ProteinSimple Jess system (bio-techne) where Cas9 was detected by a mouse monoclonal antibody (7A9-3A3, Cell Signaling Technology). Relative expression of the Cas9-RT gene editing polypeptide was measured by an area under curve analysis, as shown in FIG. 11. Editing of the TTR locus was quantified by amplicon-sequencing of the TTR locus near the binding site of the protospacer. Editing of the TTR locus was observed, as shown in FIG. 12. These experiments demonstrate that the Cas9-RT polypeptide can be expressed in vivo in a non-human primate model and can edit the TTR locus.

### Example 9. Screening of Cas9 Variant and Spacer Combinations for High indel Activity

[0877] This Example characterizes screening experiments conducted to identify Cas9 variants and spacer combinations capable of producing high indel activity. In this example, an sgRNA contains:
[0878] (1) A gRNA spacer
[0879] (2) A gRNA scaffold

[0880] An initial screen was performed in HEK293T cells using wild type SpCas9 polypeptide variants in combination with template RNAs comprising several spacer sequences, selected for close proximity to the mutation to be corrected. This initial screen evaluated indel activity as an indicator of a spacer's utility for editing the target PiZ mutation. Following this analysis, variant Cas9 domains were used to generate exemplary gene modifying polypeptides comprising the selected Cas9 domains, a linker, and an exemplary RT domain, and the exemplary gene modifying polypeptides were used to screen compatible template RNAs using indel activity.

[0881] A gene modifying system comprising either:
[0882] a) a compatible gene modifying polypeptide described herein (e.g., having: an NLS, a linker, an RT sequence, and a second NLS as recited below in this Example), and a wild type Cas9 having a sequence of Table X1, or
[0883] (i-b) a compatible wild type Cas9 polypeptide;
[0884] and (ii) a single guide RNA (sgRNA) (e.g., A1AT-Sp-sgRNA-1)
[0885] was transfected into the HEK293T landing pad cell line (described in Example 1). The gene modifying polypeptide and the sgRNA or wild type Cas9 polypeptide and the sgRNA were delivered by transfection in DNA format. Specifically, 50 ng of gene modifying polypeptide/Cas9 polypeptide plasmid was combined with 50 of sgRNA. This combination of plasmids was mixed with 0.5 uL of TransIT 293, in 10 uL of OptiMeM solution, and added to 20,000 cells. After transfection, cells were grown at 37° C., 5% CO₂ for 3 days prior to cell lysis and genomic DNA extraction. To analyze gene editing activity, primers flanking the A1 AT PiZ mutation site were used to amplify across the locus. Amplicons were analyzed via short read sequencing using an Illumina MiSeq.

SpCas9 spacer sequences used in FIG. 13:
A1AT-Sp-sgRNA-1:
(SEQ ID NO: 23786)
gggtatggcctctaaaaaca (PLV3676) [cut site is 30 bp
from PiZ mutation]
A1AT-Sp-sgRNA-2:
(SEQ ID NO: 23787)
tcccctccaggccgtgcata (PLV3712) [cut site is 23 bp
from PiZ mutation]
A1AT-Sp-sgRNA-3:
(SEQ ID NO: 23788)
tctctgcttctctcccctcc (PLV3735) [cut site is 35 bp
from PiZ mutation]
A1AT-Sp-sgRNA-4:
(SEQ ID NO: 23789)
gtcccctccaggccgtgcata (PLV3690) [cut site is 23
bp from PiZ mutation]
A1AT-Sp-sgRNA-5:
(SEQ ID NO: 23790)
gtctctgcttctctcccctcc (PLV3668) [cut site is 35
bp from PiZ mutation]

Bar 6 in FIG. 13 was a no sgRNA control.
Exemplary gene modifying polypeptides comprising Cas9 variants comprised:
an N-terminal NLS having an amino acid sequence of:

(SEQ ID NO: 23791)
MPAAKRVKLDGGKRTADGSEFESPKKKRKV;

a C-terminal NLS having an amino acid sequence of

(SEQ ID NO: 23792)
KRTADSQHSTPPKTKRKVEFEPKKKRKV;

an RT domain having an amino acid sequence of

(SEQ ID NO: 23793)
TLNIEDEYRLHETSKEPDVSLGSTWLSDFPQAWAETGGMGLAVRQAPLI
IPLKATSTPVSIKQYPMSQEARLGIKPHIQRLLDQGILVPCQSPWNTPL
LPVKKPGTNDYRPVQDLREVNKRVEDIHPTVPNPYNLLSGLPPSHQWYT
VLDLKDAFFCLRLHPTSQPLFAFEWRDPEMGISGQLTWTRLPQGFKNSP
TLFNEALHRDLADFRIQHPDLILLQYVDDLLLAATSELDCQQGTRALLQ
TLGNLGYRASAKKAQICQKQVKYLGYLLKEGQRWLTEARKETVMGQPTP
KTPRQLREFLGKAGFCRLFIPGFAEMAAPLYPLTKPGTLFNWGPDQQKA
YQEIKQALLTAPALGLPDLTKPFELFVDEKQGYAKGVLTQKLGPWRRPV
AYLSKKLDPVAAGWPPCLRMVAAIAVLTKDAGKLTMGQPLVILAPHAVE
ALVKQPPDRWLSNARMTHYQALLLDTDRVQFGPVVALNPATLLPLPEEG
LQHNCLDILAEAHGTRPDLTDQPLPDADHTWYTDGSSLLQEGQRKAGAA
VTTETEVIWAKALPAGTSAQRAELIALTQALKMAEGKKLNVYTDSRYAF
ATAHIHGEIYRRRGWLTSEGKEIKNKDEILALLKALFLPKRLSIIHCPG
HQKGHSAEARGNRMADQAARKAAITETPDTSTLLIENSSPSGGSKRTAD
GSEF;

and a linker between the RT domain and Cas domain having an amino acid sequence of

(SEQ ID NO: 25689)
SGGSSGGSSGSETPGTSE
(SEQ ID NO: 23794)
SATPESSGGSSGGSS

TABLE X1
Exemplary Gene Modifying Polypeptide Cas9 Variant Sequences and Identifiers

| | | | | SEQ |
|---|---|---|---|---|
| Plasmid | Cas9 | Mu- | | ID |
| Number | Variant | tation | Cas9 domain | NO |
| PLV5191 | SpyCas9 | WT | DKKYSIGLDIGTNSVGWAVITDEYKVPSKKFKVLGNTDRHSIKKNLIGALLFDSGETAEATR | 23795 |
| | | | LKRTARRRYTRRKNRICYLQEIFSNEMAKVDDSFFHRLEESFLVEEDKKHERHPIFGNIVDEV | |
| | | | AYHEKYPTIYHLRKKLVDSTDKADLRLIYLALAHMIKFRGHFLIEGDLNPDNSDVDKLFIQL | |
| | | | VQTYNQLFEENPINASGVDAKAILSARLSKSRRLENLIAQLPGEKKNGLFGNLIALSLGLTPN | |
| | | | FKSNFDLAEDAKLQLSKDTYDDDLDNLLAQIGDQYADLFLAAKNLSDAILLSDILRVNTEIT | |
| | | | KAPLSASMIKRYDEHHQDLTLLKALVRQQLPEKYKEIFFDQSKNGYAGYIDGGASQEEFYKF | |
| | | | IKPILEKMDGTEELLVKLNREDLLRKQRTFDNGSIPHQIHLGELHAILRRQEDFYPFLKDNRE | |
| | | | KIEKILTFRIPYYVGPLARGNSRFAWMTRKSEETITPWNFEEVVDKGASAQSFIERMTNFDKN | |
| | | | LPNEKVLPKHSLLYEYFTVYNELTKVKYVTEGMRKPAFLSGEQKKAIVDLLFKTNRKVTVK | |
| | | | QLKEDYFKKIECFDSVEISGVEDRFNASLGTYHDLLKIIKDKDFLDNEENEDILEDIVLTLTLF | |
| | | | EDREMIEERLKTYAHLFDDKVMKQLKRRRYTGWGRLSRKLINGIRDKQSGKTILDFLKSDG | |
| | | | FANRNFMQLIHDDSLTFKEDIQKAQVSGQGDSLHEHIANLAGSPAIKKGILQTVKVVDELVK | |
| | | | VMGRHKPENIVIEMARENQTTQKGQKNSRERMKRIEEGIKELGSQILKEHPVENTQLQNEKL | |
| | | | YLYYLQNGRDMYVDQELDINRLSDYDVDHIVPQSFLKDDSIDNKVLTRSDKNRGKSDNVPS | |
| | | | EEVVKKMKNYWRQLLNAKLITQRKFDNLTKAERGGLSELDKAGFIKRQLVETRQITKHVAQ | |
| | | | ILDSRMNTKYDENDKLIREVKVITLKSKLVSDFRKDFQFYKVREINNYHHAHDAYLNAVVG | |
| | | | TALIKKYPKLESEFVYGDYKVYDVRKMIAKSEQEIGKATAKYFFYSNIMNFFKTEITLANGEI | |
| | | | RKRPLIETNGETGEIVWDKGRDFATVRKVLSMPQVNIVKKTEVQTGGFSKESILPKRNSDKLI | |
| | | | ARKKDWDPKKYGGFDSPTVAYSVLVVAKVEKGKSKKLKSVKELLGITIMERSSFEKNPIDFL | |
| | | | EAKGYKEVKKDLIIKLPKYSLFELENGRKRMLASAGELQKGNELALPSKYVNFLYLASHYE | |
| | | | KLKGSPEDNEQKQLFVEQHKHYLDEIIEQISEFSKRVILADANLDKVLSAYNKHRDKPIREQA | |
| | | | ENIIHLFTLTNLGAPAAFKYFDTTIDRKRYTSTKEVLDATLIHQSITGLYETRIDLSQLGGD | |
| PLV919 | | N863A | DKKYSIGLDIGTNSVGWAVITDEYKVPSKKFKVLGNTDRHSIKKNLIGALLFDSGETAEATR | 23796 |
| | | | LKRTARRRYTRRKNRICYLQEIFSNEMAKVDDSFFHRLEESFLVEEDKKHERHPIFGNIVDEV | |
| | | | AYHEKYPTIYHLRKKLVDSTDKADLRLIYLALAHMIKFRGHFLIEGDLNPDNSDVDKLFIQL | |
| | | | VQTYNQLFEENPINASGVDAKAILSARLSKSRRLENLIAQLPGEKKNGLFGNLIALSLGLTPN | |
| | | | FKSNFDLAEDAKLQLSKDTYDDDLDNLLAQIGDQYADLFLAAKNLSDAILLSDILRVNTEIT | |
| | | | KAPLSASMIKRYDEHHQDLTLLKALVRQQLPEKYKEIFFDQSKNGYAGYIDGGASQEEFYKF | |
| | | | IKPILEKMDGTEELLVKLNREDLLRKQRTFDNGSIPHQIHLGELHAILRRQEDFYPFLKDNRE | |
| | | | KIEKILTFRIPYYVGPLARGNSRFAWMTRKSEETITPWNFEEVVDKGASAQSFIERMTNFDKN | |
| | | | LPNEKVLPKHSLLYEYFTVYNELTKVKYVTEGMRKPAFLSGEQKKAIVDLLFKTNRKVTVK | |
| | | | QLKEDYFKKIECFDSVEISGVEDRFNASLGTYHDLLKIIKDKDFLDNEENEDILEDIVLTLTLF | |
| | | | EDREMIEERLKTYAHLFDDKVMKQLKRRRYTGWGRLSRKLINGIRDKQSGKTILDFLKSDG | |
| | | | FANRNFMQLIHDDSLTFKEDIQKAQVSGQGDSLHEHIANLAGSPAIKKGILQTVKVVDELVK | |
| | | | VMGRHKPENIVIEMARENQTTQKGQKNSRERMKRIEEGIKELGSQILKEHPVENTQLQNEKL | |
| | | | YLYYLQNGRDMYVDQELDINRLSDYDVDHIVPQSFLKDDSIDNKVLTRSDKARGKSDNVPS | |
| | | | EEVVKKMKNYWRQLLNAKLITQRKFDNLTKAERGGLSELDKAGFIKRQLVETRQITKHVAQ | |
| | | | ILDSRMNTKYDENDKLIREVKVITLKSKLVSDFRKDFQFYKVREINNYHHAHDAYLNAVVG | |
| | | | TALIKKYPKLESEFVYGDYKVYDVRKMIAKSEQEIGKATAKYFFYSNIMNFFKTEITLANGEI | |
| | | | RKRPLIETNGETGEIVWDKGRDFATVRKVLSMPQVNIVKKTEVQTGGFSKESILPKRNSDKLI | |
| | | | ARKKDWDPKKYGGFDSPTVAYSVLVVAKVEKGKSKKLKSVKELLGITIMERSSFEKNPIDFL | |
| | | | EAKGYKEVKKDLIIKLPKYSLFELENGRKRMLASAGELQKGNELALPSKYVNFLYLASHYE | |
| | | | KLKGSPEDNEQKQLFVEQHKHYLDEIIEQISEFSKRVILADANLDKVLSAYNKHRDKPIREQA | |
| | | | ENIIHLFTLTNLGAPAAFKYFDTTIDRKRYTSTKEVLDATLIHQSITGLYETRIDLSQLGGD | |
| PLV7476 | BlatCas9 | WT | AYTMGIDVGIASCGWAIVDLERQRIIDIGVRTFEKAENPKNGEALAVPRREARSSRRRLRRK | 23797 |
| | | | KHRIERLKHMFVRNGLAVDIQHLEQTLRSQNEIDVWQLRVDGLDRMLTQKEWLRVLIHLA | |
| | | | QRRGFQSNRKTDGSSEDGQVLVNVTENDRLMEEKDYRTVAEMMVKDEKFSDHKRNKNGN | |
| | | | YHGVVSRSSLLVEIHTLFETQRQHHNSLASKDFELEYVNIWSAQRPVATKDQIEKMIGTCTFL | |
| | | | PKEKRAPKASWHFQYFMLLQTINHIRITNVQGTRSLNKEEIEQVVNMALTKSKVSYHDTRKI | |
| | | | LDLSEEYQFVGLDYGKEDEKKKVESKETIIKLDDYHKLNKIFNEVELAKGETWEADDYDTV | |
| | | | AYALTFFKDDEDIRDYLQNKYKDSKNRLVKNLANKEYTNELIGKVSTLSFRKVGHLSLKAL | |
| | | | RKIIPFLEQGMTYDKACQAAGFDFQGISKKKRSVVLPVIDQISNPVVNRALTQTRKVINALIK | |
| | | | KYGSPETIHIETARELSKTFDERKNITKDYKENRDKNEHAKKHLSELGIINPTGLDIVKYKLW | |
| | | | CEQQGRCMYSNQPISFERLKESGYTEVDHIIPYSRSMNDSYNNRVLVMTRENREKGNQTPFE | |
| | | | YMGNDTQRWYEFEQRVTTNPQIKKEKRQNLLLKGFTNRRELEMLERNLNDTRYITKYLSHF | |
| | | | ISTNLEFSPSDKKKKVVNTSGRITSHLRSRWGLEKNRGQNDLHHAMDAIVIAVTSDSFIQQVT | |
| | | | NYYKRKERRELNGDDKFPLPWKFFREEVIARLSPNPKEQIEALPNHFYSEDELADLQPIFVSR | |
| | | | MPKRSITGEAHQAQFRRVVGKTKEGKNITAKKTALVDISYDKNGDFNMYGRETDPATYEAI | |
| | | | KERYLEFGGNVKKAFSTDLHKPKKDGTKGPLIKSVRIMENKTLVHPVNKGKGVVYNSSIVR | |
| | | | TDVFQRKEKYYLLPVYVTDVTKGKLPNKVIVAKKGYHDWIEVDDSFTFLFSLYPNDLIFIRQ | |
| | | | NPKKKISLKKRIESHSISDSKEVQEIHAYYKGVDSSTAAIEFIIHDGSYYAKGVGVQNLDCFEK | |
| | | | YQVDILGNYFKVKGEKRLELETSDSNHKGKDVNSIKSTSR | |
| PLV7475 | | N607A | AYTMGIDVGIASCGWAIVDLERQRIIDIGVRTFEKAENPKNGEALAVPRREARSSRRRLRRK | 23798 |
| | | | KHRIERLKHMFVRNGLAVDIQHLEQTLRSQNEIDVWQLRVDGLDRMLTQKEWLRVLIHLA | |
| | | | QRRGFQSNRKTDGSSEDGQVLVNVTENDRLMEEKDYRTVAEMMVKDEKFSDHKRNKNGN | |
| | | | YHGVVSRSSLLVEIHTLFETQRQHHNSLASKDFELEYVNIWSAQRPVATKDQIEKMIGTCTFL | |
| | | | PKEKRAPKASWHFQYFMLLQTINHIRITNVQGTRSLNKEEIEQVVNMALTKSKVSYHDTRKI | |
| | | | LDLSEEYQFVGLDYGKEDEKKKVESKETIIKLDDYHKLNKIFNEVELAKGETWEADDYDTV | |
| | | | AYALTFFKDDEDIRDYLQNKYKDSKNRLVKNLANKEYTNELIGKVSTLSFRKVGHLSLKAL | |
| | | | RKIIPFLEQGMTYDKACQAAGFDFQGISKKKRSVVLPVIDQISNPVVNRALTQTRKVINALIK | |
| | | | KYGSPETIHIETARELSKTFDERKNITKDYKENRDKNEHAKKHLSELGIINPTGLDIVKYKLW | |
| | | | CEQQGRCMYSNQPISFERLKESGYTEVDHIIPYSRSMNDSYNNRVLVMTREAREKGNQTPFE | |
| | | | YMGNDTQRWYEFEQRVTTNPQIKKEKRQNLLLKGFTNRRELEMLERNLNDTRYITKYLSHF | |
| | | | ISTNLEFSPSDKKKKVVNTSGRITSHLRSRWGLEKNRGQNDLHHAMDAIVIAVTSDSFIQQVT | |
| | | | NYYKRKERRELNGDDKFPLPWKFFREEVIARLSPNPKEQIEALPNHFYSEDELADLQPIFVSR | |
| | | | MPKRSITGEAHQAQFRRVVGKTKEGKNITAKKTALVDISYDKNGDFNMYGRETDPATYEAI | |
| | | | KERYLEFGGNVKKAFSTDLHKPKKDGTKGPLIKSVRIMENKTLVHPVNKGKGVVYNSSIVR | |
| | | | TDVFQRKEKYYLLPVYVTDVTKGKLPNKVIVAKKGYHDWIEVDDSFTFLFSLYPNDLIFIRQ | |
| | | | NPKKKISLKKRIESHSISDSKEVQEIHAYYKGVDSSTAAIEFIIHDGSYYAKGVGVQNLDCFEK | |
| | | | YQVDILGNYFKVKGEKRLELETSDSNHKGKDVNSIKSTSR | |
| PLV4929 | Nme2Cas9 | WT | AAFKPNPINYILGLDIGIASVGWAMVEIDEEENPIRLIDLGVRVFERAEVPKTGDSLAMARRL | 23799 |
| | | | ARSVRRLTRRRAHRLLRARRLLKREGVLQAADFDENGLIKSLPNTPWQLRAAALDRKLTPL | |
| | | | EWSAVLLHLIKHRGYLSQRKNEGETADKELGALLKGVANNAHALQTGDFRTPAELALNKF | |
| | | | EKESGHIRNQRGDYSHTFSRKDLQAELILLFEKQKEFGNPHVSGGLKEGIETLLMTQRPALSG | |
| | | | DAVQKMLGHCTFEPAEPKAAKNTYTAERFIWLTKLNNLRILEQGSERPLTDTERATLMDEP | |
| | | | YRKSKLTYAQARKLLGLEDTAFFKGLRYGKDNAEASTLMEMKAYHAISRALEKEGLKDKK | |
| | | | SPLNLSSELQDEIGTAFSLFKTDEDITGRLKDRVQPEILEALLKHISFDKFVQISLKALRRIVPL | |
| | | | MEQGKRYDEACAEIYGDHYGKKNTEEKIYLPPIPADEIRNPVVLRALSQARKVINGVVRRYG | |
| | | | SPARIHIETAREVGKSFKDRKEIEKRQEENRKDREKAAAKFREYFPNFVGEPKSKDILKLRLY | |
| | | | EQQHGKCLYSGKEINLVRLNEKGYVEIDHALPFSRTWDDSFNNKVLVLGSENQNKGNQTPY | |
| | | | EYFNGKDNSREWQEFKARVETSRFPRSKKQRILLQKFDEDGFKECNLNDTRYVNRFLCQFV | |
| | | | ADHILLTGKGKRRVFASNGQITNLLRGFWGLRKVRAENDRHHALDAVVVACSTVAMQQKI | |
| | | | TRFVRYKEMNAFDGKTIDKETGKVLHQKTHFPQPWEFFAQEVMIRVFGKPDGKPEFEEADT | |
| | | | PEKLRTLLAEKLSSRPEAVHEYVTPLFVSRAPNRKMSGAHKDTLRSAKRFVKHNEKISVKRV | |
| | | | WLTEIKLADLENMVNYKNGREIELYEALKARLEAYGGNAKQAFDPKDNPFYKKGGQLVKA | |
| | | | VRVEKTQESGVLLNKKNAYTIADNGDMVRVDVFCKVDKKGKNQYFIVPIYAWQVAENILP | |
| | | | DIDCKGYRIDDSYTFCFSLHKYDLIAFQKDEKSKVEFAYYINCDSSNGRFYLAWHDKGSKEQ | |
| | | | QFRISTQNLVLIQKYQVNELGKEIRPCRLKKRPPVR | |
| PLV4947 | | N611A | AAFKPNPINYILGLDIGIASVGWAMVEIDEEENPIRLIDLGVRVFERAEVPKTGDSLAMARRL | 23800 |
| | | | ARSVRRLTRRRAHRLLRARRLLKREGVLQAADFDENGLIKSLPNTPWQLRAAALDRKLTPL | |
| | | | EWSAVLLHLIKHRGYLSQRKNEGETADKELGALLKGVANNAHALQTGDFRTPAELALNKF | |
| | | | EKESGHIRNQRGDYSHTFSRKDLQAELILLFEKQKEFGNPHVSGGLKEGIETLLMTQRPALSG | |
| | | | DAVQKMLGHCTFEPAEPKAAKNTYTAERFIWLTKLNNLRILEQGSERPLTDTERATLMDEP | |
| | | | YRKSKLTYAQARKLLGLEDTAFFKGLRYGKDNAEASTLMEMKAYHAISRALEKEGLKDKK | |
| | | | SPLNLSSELQDEIGTAFSLFKTDEDITGRLKDRVQPEILEALLKHISFDKFVQISLKALRRIVPL | |
| | | | MEQGKRYDEACAEIYGDHYGKKNTEEKIYLPPIPADEIRNPVVLRALSQARKVINGVVRRYG | |
| | | | SPARIHIETAREVGKSFKDRKEIEKRQEENRKDREKAAAKFREYFPNFVGEPKSKDILKLRLY | |
| | | | EQQHGKCLYSGKEINLVRLNEKGYVEIDHALPFSRTWDDSFNNKVLVLGSEAQNKGNQTPY | |
| | | | EYFNGKDNSREWQEFKARVETSRFPRSKKQRILLQKFDEDGFKECNLNDTRYVNRFLCQFV | |
| | | | ADHILLTGKGKRRVFASNGQITNLLRGFWGLRKVRAENDRHHALDAVVVACSTVAMQQKI | |
| | | | TRFVRYKEMNAFDGKTIDKETGKVLHQKTHFPQPWEFFAQEVMIRVFGKPDGKPEFEEADT | |
| | | | PEKLRTLLAEKLSSRPEAVHEYVTPLFVSRAPNRKMSGAHKDTLRSAKRFVKHNEKISVKRV | |
| | | | WLTEIKLADLENMVNYKNGREIELYEALKARLEAYGGNAKQAFDPKDNPFYKKGGQLVKA | |
| | | | VRVEKTQESGVLLNKKNAYTIADNGDMVRVDVFCKVDKKGKNQYFIVPIYAWQVAENILP | |
| | | | DIDCKGYRIDDSYTFCFSLHKYDLIAFQKDEKSKVEFAYYINCDSSNGRFYLAWHDKGSKEQ | |
| | | | QFRISTQNLVLIQKYQVNELGKEIRPCRLKKRPPVR | |
| PLV4928 | PpnCas9 | WT | QNNPLNYILGLDLGIASIGWAVVEIDEESSPIRLIDVGVRTFERAEVAKTGESLALSRRLARSS | 23801 |
| | | | RRLIKRRAERLKKAKRLLKAEKILHSIDEKLPINVWQLRVKGLKEKLERQEWAAVLLHLSKH | |
| | | | RGYLSQRKNEGKSDNKELGALLSGIASNHQMLQSSEYRTPAEIAVKKFQVEEGHIRNQRGSY | |
| | | | THTFSRLDLLAEMELLFQRQAELGNSYTSTTLLENLTALLMWQKPALAGDAILKMLGKCTF | |
| | | | EPSEYKAAKNSYSAERFVWLTKLNNLRILENGTERALNDNERFALLEQPYEKSKLTYAQVR | |
| | | | AMLALSDNAIFKGVRYLGEDKKTVESKTTLIEMKFYHQIRKTLGSAELKKEWNELKGNSDL | |
| | | | LDEIGTAFSLYKTDDDICRYLEGKLPERVLNALLENLNFDKFIQLSLKALHQILPLMLQGQRY | |
| | | | DEAVSAIYGDHYGKKSTETTRLLPTIPADEIRNPVVLRTLTQARKVINAVVRLYGSPARIHIET | |
| | | | AREVGKSYQDRKKLEKQQEDNRKQRESAVKKFKEMFPHFVGEPKGKDILKMRLYELQQAK | |
| | | | CLYSGKSLELHRLLEKGYVEVDHALPFSRTWDDSFNNKVLVLANENQNKGNLTPYEWLDG | |
| | | | KNNSERWQHFVVRVQTSGFSYAKKQRILNHKLDEKGFIERNLNDTRYVARFLCNFIADNML | |
| | | | LVGKGKRNVFASNGQITALLRHRWGLQKVREQNDRHHALDAVVVACSTVAMQQKITRFV | |
| | | | RYNEGNVFSGERIDRETGEIIPLHFPSPWAFFKENVEIRIFSENPKLELENRLPDYPQYNHEWV | |
| | | | QPLFVSRMPTRKMTGQGHMETVKSAKRLNEGLSVLKVPLTQLKLSDLERMVNRDREIALYE | |
| | | | SLKARLEQFGNDPAKAFAEPFYKKGGALVKAVRLEQTQKSGVLVRDGNGVADNASMVRV | |
| | | | DVFTKGGKYFLVPIYTWQVAKGILPNRAATQGKDENDWDIMDEMATFQFSLCQNDLIKLVT | |
| | | | KKKTIFGYFNGLNRATSNINIKEHDLDKSKGKLGIYLEVGVKLAISLEKYQVDELGKNIRPCR | |
| | | | PTKRQHVR | |
| PLV4946 | | N605A | QNNPLNYILGLDLGIASIGWAVVEIDEESSPIRLIDVGVRTFERAEVAKTGESLALSRRLARSS | 23802 |
| | | | RRLIKRRAERLKKAKRLLKAEKILHSIDEKLPINVWQLRVKGLKEKLERQEWAAVLLHLSKH | |
| | | | RGYLSQRKNEGKSDNKELGALLSGIASNHQMLQSSEYRTPAEIAVKKFQVEEGHIRNQRGSY | |
| | | | THTFSRLDLLAEMELLFQRQAELGNSYTSTTLLENLTALLMWQKPALAGDAILKMLGKCTF | |
| | | | EPSEYKAAKNSYSAERFVWLTKLNNLRILENGTERALNDNERFALLEQPYEKSKLTYAQVR | |
| | | | AMLALSDNAIFKGVRYLGEDKKTVESKTTLIEMKFYHQIRKTLGSAELKKEWNELKGNSDL | |
| | | | LDEIGTAFSLYKTDDDICRYLEGKLPERVLNALLENLNFDKFIQLSLKALHQILPLMLQGQRY | |
| | | | DEAVSAIYGDHYGKKSTETTRLLPTIPADEIRNPVVLRTLTQARKVINAVVRLYGSPARIHIET | |
| | | | AREVGKSYQDRKKLEKQQEDNRKQRESAVKKFKEMFPHFVGEPKGKDILKMRLYELQQAK | |
| | | | CLYSGKSLELHRLLEKGYVEVDHALPFSRTWDDSFNNKVLVLANEAQNKGNLTPYEWLDG | |
| | | | KNNSERWQHFVVRVQTSGFSYAKKQRILNHKLDEKGFIERNLNDTRYVARFLCNFIADNML | |
| | | | LVGKGKRNVFASNGQITALLRHRWGLQKVREQNDRHHALDAVVVACSTVAMQQKITRFV | |
| | | | RYNEGNVFSGERIDRETGEIIPLHFPSPWAFFKENVEIRIFSENPKLELENRLPDYPQYNHEWV | |
| | | | QPLFVSRMPTRKMTGQGHMETVKSAKRLNEGLSVLKVPLTQLKLSDLERMVNRDREIALYE | |
| | | | SLKARLEQFGNDPAKAFAEPFYKKGGALVKAVRLEQTQKSGVLVRDGNGVADNASMVRV | |
| | | | DVFTKGGKYFLVPIYTWQVAKGILPNRAATQGKDENDWDIMDEMATFQFSLCQNDLIKLVT | |
| | | | KKKTIFGYFNGLNRATSNINIKEHDLDKSKGKLGIYLEVGVKLAISLEKYQVDELGKNIRPCR | |
| | | | PTKRQHVR | |
| PLV4924 | SauCas9 | WT | KRNYILGLDIGITSVGYGIIDYETRDVIDAGVRLFKEANVENNEGRRSKRGARRLKRRRRHRI | 23803 |
| | | | QRVKKLLFDYNLLTDHSELSGINPYEARVKGLSQKLSEEEFSAALLHLAKRRGVHNVNEVEE | |
| | | | DTGNELSTKEQISRNSKALEEKYVAELQLERLKKDGEVRGSINRFKTSDYVKEAKQLLKVQ | |
| | | | KAYHQLDQSFIDTYIDLLETRRTYYEGPGEGSPFGWKDIKEWYEMLMGHCTYFPEELRSVK | |
| | | | YAYNADLYNALNDLNNLVITRDENEKLEYYEKFQIIENVFKQKKKPTLKQIAKEILVNEEDIK | |
| | | | GYRVTSTGKPEFTNLKVYHDIKDITARKEIIENAELLDQIAKILTIYQSSEDIQEELTNLNSELT | |
| | | | QEEIEQISNLKGYTGTHNLSLKAINLILDELWHTNDNQIAIFNRLKLVPKKVDLSQQKEIPTTL | |
| | | | VDDFILSPVVKRSFIQSIKVINAIIKKYGLPNDIIIELAREKNSKDAQKMINEMQKRNRQTNERI | |
| | | | EEIIRTTGKENAKYLIEKIKLHDMQEGKCLYSLEAIPLEDLLNNPFNYEVDHIIPRSVSFDNSFN | |
| | | | NKVLVKQEENSKKGNRTPFQYLSSSDSKISYETFKKHILNLAKGKGRISKTKKEYLLEERDIN | |
| | | | RFSVQKDFINRNLVDTRYATRGLMNLLRSYFRVNNLDVKVKSINGGFTSFLRRKWKFKKER | |
| | | | NKGYKHHAEDALIIANADFIFKEWKKLDKAKKVMENQMFEEKQAESMPEIETEQEYKEIFIT | |
| | | | PHQIKHIKDFKDYKYSHRVDKKPNRELINDTLYSTRKDDKGNTLIVNNLNGLYDKDNDKLK | |
| | | | KLINKSPEKLLMYHHDPQTYQKLKLIMEQYGDEKNPLYKYYEETGNYLTKYSKKDNGPVIK | |
| | | | KIKYYGNKLNAHLDITDDYPNSRNKVVKLSLKPYRFDVYLDNGVYKFVTVKNLDVIKKEN | |
| | | | YYEVNSKCYEEAKKLKKISNQAEFIASFYNNDLIKINGELYRVIGVNNDLLNRIEVNMIDITY | |
| | | | REYLENMNDKRPPRIIKTIASKTQSIKKYSTDILGNLYEVKSKKHPQIIKKG | |
| PLV4949 | | N580A | KRNYILGLDIGITSVGYGIIDYETRDVIDAGVRLFKEANVENNEGRRSKRGARRLKRRRRHRI | 23804 |
| | | | QRVKKLLFDYNLLTDHSELSGINPYEARVKGLSQKLSEEEFSAALLHLAKRRGVHNVNEVEE | |
| | | | DTGNELSTKEQISRNSKALEEKYVAELQLERLKKDGEVRGSINRFKTSDYVKEAKQLLKVQ | |
| | | | KAYHQLDQSFIDTYIDLLETRRTYYEGPGEGSPFGWKDIKEWYEMLMGHCTYFPEELRSVK | |
| | | | YAYNADLYNALNDLNNLVITRDENEKLEYYEKFQIIENVFKQKKKPTLKQIAKEILVNEEDIK | |
| | | | GYRVTSTGKPEFTNLKVYHDIKDITARKEIIENAELLDQIAKILTIYQSSEDIQEELTNLNSELT | |
| | | | QEEIEQISNLKGYTGTHNLSLKAINLILDELWHTNDNQIAIFNRLKLVPKKVDLSQQKEIPTTL | |
| | | | VDDFILSPVVKRSFIQSIKVINAIIKKYGLPNDIIIELAREKNSKDAQKMINEMQKRNRQTNERI | |
| | | | EEIIRTTGKENAKYLIEKIKLHDMQEGKCLYSLEAIPLEDLLNNPFNYEVDHIIPRSVSFDNSFN | |
| | | | NKVLVKQEEASKKGNRTPFQYLSSSDSKISYETFKKHILNLAKGKGRISKTKKEYLLEERDIN | |
| | | | RFSVQKDFINRNLVDTRYATRGLMNLLRSYFRVNNLDVKVKSINGGFTSFLRRKWKFKKER | |
| | | | NKGYKHHAEDALIIANADFIFKEWKKLDKAKKVMENQMFEEKQAESMPEIETEQEYKEIFIT | |
| | | | PHQIKHIKDFKDYKYSHRVDKKPNRELINDTLYSTRKDDKGNTLIVNNLNGLYDKDNDKLK | |
| | | | KLINKSPEKLLMYHHDPQTYQKLKLIMEQYGDEKNPLYKYYEETGNYLTKYSKKDNGPVIK | |
| | | | KIKYYGNKLNAHLDITDDYPNSRNKVVKLSLKPYRFDVYLDNGVYKFVTVKNLDVIKKEN | |
| | | | YYEVNSKCYEEAKKLKKISNQAEFIASFYNNDLIKINGELYRVIGVNNDLLNRIEVNMIDITY | |
| | | | REYLENMNDKRPPRIIKTIASKTQSIKKYSTDILGNLYEVKSKKHPQIIKKG | |
| PLV4932 | SauCas9- | WT | KRNYILGLDIGITSVGYGIIDYETRDVIDAGVRLFKEANVENNEGRRSKRGARRLKRRRRHRI | 23805 |
| | KKH | | QRVKKLLFDYNLLTDHSELSGINPYEARVKGLSQKLSEEEFSAALLHLAKRRGVHNVNEVEE | |
| | | | DTGNELSTKEQISRNSKALEEKYVAELQLERLKKDGEVRGSINRFKTSDYVKEAKQLLKVQ | |
| | | | KAYHQLDQSFIDTYIDLLETRRTYYEGPGEGSPFGWKDIKEWYEMLMGHCTYFPEELRSVK | |
| | | | YAYNADLYNALNDLNNLVITRDENEKLEYYEKFQIIENVFKQKKKPTLKQIAKEILVNEEDIK | |
| | | | GYRVTSTGKPEFTNLKVYHDIKDITARKEIIENAELLDQIAKILTIYQSSEDIQEELTNLNSELT | |
| | | | QEEIEQISNLKGYTGTHNLSLKAINLILDELWHTNDNQIAIFNRLKLVPKKVDLSQQKEIPTTL | |
| | | | VDDFILSPVVKRSFIQSIKVINAIIKKYGLPNDIIIELAREKNSKDAQKMINEMQKRNRQTNERI | |
| | | | EEIIRTTGKENAKYLIEKIKLHDMQEGKCLYSLEAIPLEDLLNNPFNYEVDHIIPRSVSFDNSFN | |
| | | | NKVLVKQEENSKKGNRTPFQYLSSSDSKISYETFKKHILNLAKGKGRISKTKKEYLLEERDIN | |
| | | | RFSVQKDFINRNLVDTRYATRGLMNLLRSYFRVNNLDVKVKSINGGFTSFLRRKWKFKKER | |
| | | | NKGYKHHAEDALIIANADFIFKEWKKLDKAKKVMENQMFEEKQAESMPEIETEQEYKEIFIT | |
| | | | PHQIKHIKDFKDYKYSHRVDKKPNRKLINDTLYSTRKDDKGNTLIVNNLNGLYDKDNDKLK | |
| | | | KLINKSPEKLLMYHHDPQTYQKLKLIMEQYGDEKNPLYKYYEETGNYLTKYSKKDNGPVIK | |
| | | | KIKYYGNKLNAHLDITDDYPNSRNKVVKLSLKPYRFDVYLDNGVYKFVTVKNLDVIKKEN | |
| | | | YYEVNSKCYEEAKKLKKISNQAEFIASFYKNDLIKINGELYRVIGVNNDLLNRIEVNMIDITY | |
| | | | REYLENMNDKRPPHIIKTIASKTQSIKKYSTDILGNLYEVKSKKHPQIIKKG | |
| PLV4945 | | N580A | KRNYILGLDIGITSVGYGIIDYETRDVIDAGVRLFKEANVENNEGRRSKRGARRLKRRRRHRI | 23806 |
| | | | QRVKKLLFDYNLLTDHSELSGINPYEARVKGLSQKLSEEEFSAALLHLAKRRGVHNVNEVEE | |
| | | | DTGNELSTKEQISRNSKALEEKYVAELQLERLKKDGEVRGSINRFKTSDYVKEAKQLLKVQ | |
| | | | KAYHQLDQSFIDTYIDLLETRRTYYEGPGEGSPFGWKDIKEWYEMLMGHCTYFPEELRSVK | |
| | | | YAYNADLYNALNDLNNLVITRDENEKLEYYEKFQIIENVFKQKKKPTLKQIAKEILVNEEDIK | |
| | | | GYRVTSTGKPEFTNLKVYHDIKDITARKEIIENAELLDQIAKILTIYQSSEDIQEELTNLNSELT | |
| | | | QEEIEQISNLKGYTGTHNLSLKAINLILDELWHTNDNQIAIFNRLKLVPKKVDLSQQKEIPTTL | |
| | | | VDDFILSPVVKRSFIQSIKVINAIIKKYGLPNDIIIELAREKNSKDAQKMINEMQKRNRQTNERI | |
| | | | EEIIRTTGKENAKYLIEKIKLHDMQEGKCLYSLEAIPLEDLLNNPFNYEVDHIIPRSVSFDNSFN | |
| | | | NKVLVKQEEASKKGNRTPFQYLSSSDSKISYETFKKHILNLAKGKGRISKTKKEYLLEERDIN | |
| | | | RFSVQKDFINRNLVDTRYATRGLMNLLRSYFRVNNLDVKVKSINGGFTSFLRRKWKFKKER | |
| | | | NKGYKHHAEDALIIANADFIFKEWKKLDKAKKVMENQMFEEKQAESMPEIETEQEYKEIFIT | |
| | | | PHQIKHIKDFKDYKYSHRVDKKPNRKLINDTLYSTRKDDKGNTLIVNNLNGLYDKDNDKLK | |
| | | | KLINKSPEKLLMYHHDPQTYQKLKLIMEQYGDEKNPLYKYYEETGNYLTKYSKKDNGPVIK | |
| | | | KIKYYGNKLNAHLDITDDYPNSRNKVVKLSLKPYRFDVYLDNGVYKFVTVKNLDVIKKEN | |
| | | | YYEVNSKCYEEAKKLKKISNQAEFIASFYKNDLIKINGELYRVIGVNNDLLNRIEVNMIDITY | |
| | | | REYLENMNDKRPPHIIKTIASKTQSIKKYSTDILGNLYEVKSKKHPQIIKKG | |
| PLV4930 | Sauri- | WT | QENQQKQNYILGLDIGITSVGYGLIDSKTREVIDAGVRLFPEADSENNSNRRSKRGARRLKRR | 23807 |
| | Cas9 | | RIHRLNRVKDLLADYQMIDLNNVPKSTDPYTIRVKGLREPLTKEEFAIALLHIAKRRGLHNIS | |
| | | | VSMGDEEQDNELSTKQQLQKNAQQLQDKYVCELQLERLTNINKVRGEKNRFKTEDFVKEV | |
| | | | KQLCETQRQYHNIDDQFIQQYIDLVSTRREYFEGPGNGSPYGWDGDLLKWYEKLMGRCTYF | |
| | | | PEELRSVKYAYSADLFNALNDLNNLVVTRDDNPKLEYYEKYHIIENVFKQKKNPTLKQIAKE | |
| | | | IGVQDYDIRGYRITKSGKPQFTSFKLYHDLKNIFEQAKYLEDVEMLDEIAKILTIYQDEISIKK | |
| | | | ALDQLPELLTESEKSQIAQLTGYTGTHRLSLKCIHIVIDELWESPENQMEIFTRLNLKPKKVE | |
| | | | MSEIDSIPTTLVDEFILSPVVKRAFIQSIKVINAVINRFGLPEDIIIELAREKNSKDRRKFINK | |
| | | | LQKQNEATRKKIEQLLAKYGNTNAKYMIEKIKLHDMQEGKCLYSLEAIPLEDLLSNPTHYEVDH | |
| | | | IIPRSVSFDNSLNNKVLVKQSENSKKGNRTPYQYLSSNESKISYNQFKQHILNLSKAKDRISKK | |
| | | | KRDMLLEERDINKFEVQKEFINRNLVDTRYATRELSNLLKTYFSTHDYAVKVKTINGGFTNH | |
| | | | LRKVWDFKKHRNHGYKHHAEDALVIANADFLFKTHKALRRTDKILEQPGLEVNDTTVKVD | |
| | | | TEEKYQELFETPKQVKNIKQFRDFKYSHRVDKKPNRQLINDTLYSTREIDGETYVVQTLKDL | |
| | | | YAKDNEKVKKLFTERPQKILMYQHDPKTFEKLMTILNQYAEAKNPLAAYYEDKGEYVTKY | |
| | | | AKKGNGPAIHKIKYIDKKLGSYLDVSNKYPETQNKLVKLSLKSFRFDIYKCEQGYKMVSIGY | |
| | | | LDVLKKDNYYYIPKDKYEAEKQKKKIKESDLFVGSFYYNDLIMYEDELFRVIGVNSDINNLV | |
| | | | ELNMVDITYKDFCEVNNVTGEKRIKKTIGKRVVLIEKYTTDILGNLYKTPLPKKPQLIFKRGE | |
| | | | L | |
| PLV4950 | | N588A | QENQQKQNYILGLDIGITSVGYGLIDSKTREVIDAGVRLFPEADSENNSNRRSKRGARRLKRR | 23808 |
| | | | RIHRLNRVKDLLADYQMIDLNNVPKSTDPYTIRVKGLREPLTKEEFAIALLHIAKRRGLHNIS | |
| | | | VSMGDEEQDNELSTKQQLQKNAQQLQDKYVCELQLERLTNINKVRGEKNRFKTEDFVKEV | |
| | | | KQLCETQRQYHNIDDQFIQQYIDLVSTRREYFEGPGNGSPYGWDGDLLKWYEKLMGRCTYF | |
| | | | PEELRSVKYAYSADLFNALNDLNNLVVTRDDNPKLEYYEKYHIIENVFKQKKNPTLKQIAKE | |
| | | | IGVQDYDIRGYRITKSGKPQFTSFKLYHDLKNIFEQAKYLEDVEMLDEIAKILTIYQDEISIKK | |
| | | | ALDQLPELLTESEKSQIAQLTGYTGTHRLSLKCIHIVIDELWESPENQMEIFTRLNLKPKKVE | |
| | | | MSEIDSIPTTLVDEFILSPVVKRAFIQSIKVINAVINRFGLPEDIIIELAREKNSKDRRKFINK | |
| | | | LQKQNEATRKKIEQLLAKYGNTNAKYMIEKIKLHDMQEGKCLYSLEAIPLEDLLSNPTHYEVDH | |
| | | | IIPRSVSFDNSLNNKVLVKQSEASKKGNRTPYQYLSSNESKISYNQFKQHILNLSKAKDRISKK | |
| | | | KRDMLLEERDINKFEVQKEFINRNLVDTRYATRELSNLLKTYFSTHDYAVKVKTINGGFTNH | |
| | | | LRKVWDFKKHRNHGYKHHAEDALVIANADFLFKTHKALRRTDKILEQPGLEVNDTTVKVD | |
| | | | TEEKYQELFETPKQVKNIKQFRDFKYSHRVDKKPNRQLINDTLYSTREIDGETYVVQTLKDL | |
| | | | YAKDNEKVKKLFTERPQKILMYQHDPKTFEKLMTILNQYAEAKNPLAAYYEDKGEYVTKY | |
| | | | AKKGNGPAIHKIKYIDKKLGSYLDVSNKYPETQNKLVKLSLKSFRFDIYKCEQGYKMVSIGY | |
| | | | LDVLKKDNYYYIPKDKYEAEKQKKKIKESDLFVGSFYYNDLIMYEDELFRVIGVNSDINNLV | |
| | | | ELNMVDITYKDFCEVNNVTGEKRIKKTIGKRVVLIEKYTTDILGNLYKTPLPKKPQLIFKRGE | |
| | | | L | |
| PLV4926 | Sauri | WT | QENQQKQNYILGLDIGITSVGYGLIDSKTREVIDAGVRLFPEADSENNSNRRSKRGARRLKRR | 23809 |
| | Cas9- | | RIHRLNRVKDLLADYQMIDLNNVPKSTDPYTIRVKGLREPLTKEEFAIALLHIAKRRGLHNIS | |
| | KKH | | VSMGDEEQDNELSTKQQLQKNAQQLQDKYVCELQLERLTNINKVRGEKNRFKTEDFVKEV | |
| | | | KQLCETQRQYHNIDDQFIQQYIDLVSTRREYFEGPGNGSPYGWDGDLLKWYEKLMGRCTYF | |
| | | | PEELRSVKYAYSADLFNALNDLNNLVVTRDDNPKLEYYEKYHIIENVFKQKKNPTLKQIAKE | |
| | | | IGVQDYDIRGYRITKSGKPQFTSFKLYHDLKNIFEQAKYLEDVEMLDEIAKILTIYQDEISIKK | |
| | | | ALDQLPELLTESEKSQIAQLTGYTGTHRLSLKCIHIVIDELWESPENQMEIFTRLNLKPKKVE | |
| | | | MSEIDSIPTTLVDEFILSPVVKRAFIQSIKVINAVINRFGLPEDIIIELAREKNSKDRRKFINK | |
| | | | LQKQNEATRKKIEQLLAKYGNTNAKYMIEKIKLHDMQEGKCLYSLEAIPLEDLLSNPTHYEVDH | |
| | | | IIPRSVSFDNSLNNKVLVKQSENSKKGNRTPYQYLSSNESKISYNQFKQHILNLSKAKDRISKK | |
| | | | KRDMLLEERDINKFEVQKEFINRNLVDTRYATRELSNLLKTYFSTHDYAVKVKTINGGFTNH | |
| | | | LRKVWDFKKHRNHGYKHHAEDALVIANADFLFKTHKALRRTDKILEQPGLEVNDTTVKVD | |
| | | | TEEKYQELFETPKQVKNIKQFRDFKYSHRVDKKPNRKLINDTLYSTREIDGETYVVQTLKDL | |
| | | | YAKDNEKVKKLFTERPQKILMYQHDPKTFEKLMTILNQYAEAKNPLAAYYEDKGEYVTKY | |
| | | | AKKGNGPAIHKIKYIDKKLGSYLDVSNKYPETQNKLVKLSLKSFRFDIYKCEQGYKMVSIGY | |
| | | | LDVLKKDNYYYIPKDKYEAEKQKKKIKESDLFVGSFYKNDLIMYEDELFRVIGVNSDINNLV | |
| | | | ELNMVDITYKDFCEVNNVTGEKHIKKTIGKRVVLIEKYTTDILGNLYKTPLPKKPQLIFKRGE | |
| | | | L | |
| PLV4952 | | N588A | QENQQKQNYILGLDIGITSVGYGLIDSKTREVIDAGVRLFPEADSENNSNRRSKRGARRLKRR | 23810 |
| | | | RIHRLNRVKDLLADYQMIDLNNVPKSTDPYTIRVKGLREPLTKEEFAIALLHIAKRRGLHNIS | |
| | | | VSMGDEEQDNELSTKQQLQKNAQQLQDKYVCELQLERLTNINKVRGEKNRFKTEDFVKEV | |
| | | | KQLCETQRQYHNIDDQFIQQYIDLVSTRREYFEGPGNGSPYGWDGDLLKWYEKLMGRCTYF | |
| | | | PEELRSVKYAYSADLFNALNDLNNLVVTRDDNPKLEYYEKYHIIENVFKQKKNPTLKQIAKE | |
| | | | IGVQDYDIRGYRITKSGKPQFTSFKLYHDLKNIFEQAKYLEDVEMLDEIAKILTIYQDEISIKK | |
| | | | ALDQLPELLTESEKSQIAQLTGYTGTHRLSLKCIHIVIDELWESPENQMEIFTRLNLKPKKVE | |
| | | | MSEIDSIPTTLVDEFILSPVVKRAFIQSIKVINAVINRFGLPEDIIIELAREKNSKDRRKFINK | |
| | | | LQKQNEATRKKIEQLLAKYGNTNAKYMIEKIKLHDMQEGKCLYSLEAIPLEDLLSNPTHYEVDH | |
| | | | IIPRSVSFDNSLNNKVLVKQSEASKKGNRTPYQYLSSNESKISYNQFKQHILNLSKAKDRISKK | |
| | | | KRDMLLEERDINKFEVQKEFINRNLVDTRYATRELSNLLKTYFSTHDYAVKVKTINGGFTNH | |
| | | | LRKVWDFKKHRNHGYKHHAEDALVIANADFLFKTHKALRRTDKILEQPGLEVNDTTVKVD | |
| | | | TEEKYQELFETPKQVKNIKQFRDFKYSHRVDKKPNRKLINDTLYSTREIDGETYVVQTLKDL | |
| | | | YAKDNEKVKKLFTERPQKILMYQHDPKTFEKLMTILNQYAEAKNPLAAYYEDKGEYVTKY | |
| | | | AKKGNGPAIHKIKYIDKKLGSYLDVSNKYPETQNKLVKLSLKSFRFDIYKCEQGYKMVSIGY | |
| | | | LDVLKKDNYYYIPKDKYEAEKQKKKIKESDLFVGSFYKNDLIMYEDELFRVIGVNSDINNLV | |
| | | | ELNMVDITYKDFCEVNNVTGEKHIKKTIGKRVVLIEKYTTDILGNLYKTPLPKKPQLIFKRGE | |
| | | | L | |
| PLV4925 | Sca- | WT | EKKYSIGLDIGTNSVGWAVITDDYKVPSKKFKVLGNTNRKSIKKNLMGALLFDSGETAEATR | 23811 |
| | Cas9++ | | LKRTARRRYTRRKNRIRYLQEIFANEMAKLDDSFFQRLEESFLVEEDKKNERHPIFGNLADE | |
| | | | VAYHRNYPTIYHLRKKLADSPEKADLRLIYLALAHIIKFRGHFLIEGKLNAENSDVAKLFYQL | |
| | | | IQTYNQLFEESPLDEIEVDAKGILSARLSKSKRLEKLIAVFPNEKKNGLFGNIIALALGLTPNFK | |
| | | | SNFDLTEDAKLQLSKDTYDDDLDELLGQIGDQYADLFSAAKNLSDAILLSDILRSNSEVTKAP | |
| | | | LSASMVKRYDEHHQDLALLKTLVRQQFPEKYAEIFKDDTKNGYAGYVGADKKLRKRSGKL | |
| | | | ATEEEFYKFIKPILEKMDGAEELLAKLNRDDLLRKQRTFDNGSIPHQIHLKELHAILRRQEEF | |
| | | | YPFLKENREKIEKILTFRIPYYVGPLARGNSRFAWLTRKSEEAITPWNFEEVVDKGASAQSFIE | |
| | | | RMTNFDEQLPNKKVLPKHSLLYEYFTVYNELTKVKYVTERMRKPEFLSGEQKKAIVDLLFK | |
| | | | TNRKVTVKQLKEDYFKKIECFDSVEIIGVEDRFNASLGTYHDLLKIIKDKDFLDNEENEDILE | |
| | | | DIVLTLTLFEDREMIEERLKTYAHLFDDKVMKQLKRRHYTGWGRLSRKMINGIRDKQSGKTI | |
| | | | LDFLKSDGFSNRNFMQLIHDDSLTFKEEIEKAQVSGQGDSLHEQIADLAGSPAIKKGILQTVKI | |
| | | | VDELVKVMGHKPENIVIEMARENQTTTKGLQQSRERKKRIEEGIKELESQILKENPVENTQL | |
| | | | QNEKLYLYYLQNGRDMYVDQELDINRLSDYDVDHIVPQSFIKDDSIDNKVLTRSVENRGKS | |
| | | | DNVPSEEVVKKMKNYWRQLLNAKLITQRKFDNLTKAERGGLSEADKAGFIKRQLVETRQIT | |
| | | | KHVARILDSRMNTKRDKNDKPIREVKVITLKSKLVSDFRKDFQLYKVRDINNYHHAHDAYL | |
| | | | NAVVGTALIKKYPKLESEFVYGDYKVYDVRKMIAKSEQEIGKATAKRFFYSNIMNFFKTEV | |
| | | | KLANGEIRKRPLIETNGETGEVVWNKEKDFATVRKVLAMPQVNIVKKTEVQTGGFSKESILS | |
| | | | KRESAKLIPRKKGWDTRKYGGFGSPTVAYSILVVAKVEKGKAKKLKSVKVLVGITIMEKGS | |
| | | | YEKDPIGFLEAKGYKDIKKELIFKLPKYSLFELENGRRRMLASAKELQKANELVLPQHLVRL | |
| | | | LYYTQNISATTGSNNLGYIEQHREEFKEIFEKIIDFSEKYILKNKVNSNLKSSFDEQFAVSDSI | |
| | | | LLSNSFVSLLKYTSFGASGGFTFLDLDVKQGRLRYQTVTEVLDATLIYQSITGLYETRTDLSQL | |
| | | | GGD | |
| PLV4951 | | N872A | EKKYSIGLDIGTNSVGWAVITDDYKVPSKKFKVLGNTNRKSIKKNLMGALLFDSGETAEATR | 23812 |
| | | | LKRTARRRYTRRKNRIRYLQEIFANEMAKLDDSFFQRLEESFLVEEDKKNERHPIFGNLADE | |
| | | | VAYHRNYPTIYHLRKKLADSPEKADLRLIYLALAHIIKFRGHFLIEGKLNAENSDVAKLFYQL | |
| | | | IQTYNQLFEESPLDEIEVDAKGILSARLSKSKRLEKLIAVFPNEKKNGLFGNIIALALGLTPNFK | |
| | | | SNFDLTEDAKLQLSKDTYDDDLDELLGQIGDQYADLFSAAKNLSDAILLSDILRSNSEVTKAP | |
| | | | LSASMVKRYDEHHQDLALLKTLVRQQFPEKYAEIFKDDTKNGYAGYVGADKKLRKRSGKL | |
| | | | ATEEEFYKFIKPILEKMDGAEELLAKLNRDDLLRKQRTFDNGSIPHQIHLKELHAILRRQEEF | |
| | | | YPFLKENREKIEKILTFRIPYYVGPLARGNSRFAWLTRKSEEAITPWNFEEVVDKGASAQSFIE | |
| | | | RMTNFDEQLPNKKVLPKHSLLYEYFTVYNELTKVKYVTERMRKPEFLSGEQKKAIVDLLFK | |
| | | | TNRKVTVKQLKEDYFKKIECFDSVEIIGVEDRFNASLGTYHDLLKIIKDKDFLDNEENEDILE | |
| | | | DIVLTLTLFEDREMIEERLKTYAHLFDDKVMKQLKRRHYTGWGRLSRKMINGIRDKQSGKTI | |
| | | | LDFLKSDGFSNRNFMQLIHDDSLTFKEEIEKAQVSGQGDSLHEQIADLAGSPAIKKGILQTVKI | |
| | | | VDELVKVMGHKPENIVIEMARENQTTTKGLQQSRERKKRIEEGIKELESQILKENPVENTQL | |
| | | | QNEKLYLYYLQNGRDMYVDQELDINRLSDYDVDHIVPQSFIKDDSIDNKVLTRSVEARGKS | |
| | | | DNVPSEEVVKKMKNYWRQLLNAKLITQRKFDNLTKAERGGLSEADKAGFIKRQLVETRQIT | |
| | | | KHVARILDSRMNTKRDKNDKPIREVKVITLKSKLVSDFRKDFQLYKVRDINNYHHAHDAYL | |
| | | | NAVVGTALIKKYPKLESEFVYGDYKVYDVRKMIAKSEQEIGKATAKRFFYSNIMNFFKTEV | |
| | | | KLANGEIRKRPLIETNGETGEVVWNKEKDFATVRKVLAMPQVNIVKKTEVQTGGFSKESILS | |
| | | | KRESAKLIPRKKGWDTRKYGGFGSPTVAYSILVVAKVEKGKAKKLKSVKVLVGITIMEKGS | |
| | | | YEKDPIGFLEAKGYKDIKKELIFKLPKYSLFELENGRRRMLASAKELQKANELVLPQHLVRL | |
| | | | LYYTQNISATTGSNNLGYIEQHREEFKEIFEKIIDFSEKYILKNKVNSNLKSSFDEQFAVSDSI | |
| | | | LLSNSFVSLLKYTSFGASGGFTFLDLDVKQGRLRYQTVTEVLDATLIYQSITGLYETRTDLSQL | |
| | | | GGD | |
| PLV4931 | SpyCas9- | WT | DKKYSIGLDIGTNSVGWAVITDEYKVPSKKFKVLGNTDRHSIKKNLIGALLFDSGETAERTRL | 23813 |
| | SpRY | | KRTARRRYTRRKNRICYLQEIFSNEMAKVDDSFFHRLEESFLVEEDKKHERHPIFGNIVDEVA | |
| | | | YHEKYPTIYHLRKKLVDSTDKADLRLIYLALAHMIKFRGHFLIEGDLNPDNSDVDKLFIQLV | |
| | | | QTYNQLFEENPINASGVDAKAILSARLSKSRRLENLIAQLPGEKKNGLFGNLIALSLGLTPNF | |
| | | | KSNFDLAEDAKLQLSKDTYDDDLDNLLAQIGDQYADLFLAAKNLSDAILLSDILRVNTEITK | |
| | | | APLSASMIKRYDEHHQDLTLLKALVRQQLPEKYKEIFFDQSKNGYAGYIDGGASQEEFYKFI | |
| | | | KPILEKMDGTEELLVKLNREDLLRKQRTFDNGSIPHQIHLGELHAILRRQEDFYPFLKDNREK | |
| | | | IEKILTFRIPYYVGPLARGNSRFAWMTRKSEETITPWNFEEVVDKGASAQSFIERMTNFDKNL | |
| | | | PNEKVLPKHSLLYEYFTVYNELTKVKYVTEGMRKPAFLSGEQKKAIVDLLFKTNRKVTVKQ | |
| | | | LKEDYFKKIECFDSVEISGVEDRFNASLGTYHDLLKIIKDKDFLDNEENEDILEDIVLTLTLFE | |
| | | | DREMIEERLKTYAHLFDDKVMKQLKRRRYTGWGRLSRKLINGIRDKQSGKTILDFLKSDGF | |
| | | | ANRNFMQLIHDDSLTFKEDIQKAQVSGQGDSLHEHIANLAGSPAIKKGILQTVKVVDELVKV | |
| | | | MGRHKPENIVIEMARENQTTQKGQKNSRERMKRIEEGIKELGSQILKEHPVENTQLQNEKLY | |
| | | | LYYLQNGRDMYVDQELDINRLSDYDVDHIVPQSFLKDDSIDNKVLTRSDKNRGKSDNVPSE | |
| | | | EVVKKMKNYWRQLLNAKLITQRKFDNLTKAERGGLSELDKAGFIKRQLVETRQITKHVAQI | |
| | | | LDSRMNTKYDENDKLIREVKVITLKSKLVSDFRKDFQFYKVREINNYHHAHDAYLNAVVGT | |
| | | | ALIKKYPKLESEFVYGDYKVYDVRKMIAKSEQEIGKATAKYFFYSNIMNFFKTEITLANGEIR | |
| | | | KRPLIETNGETGEIVWDKGRDFATVRKVLSMPQVNIVKKTEVQTGGFSKESIRPKRNSDKLIA | |
| | | | RKKDWDPKKYGGFLWPTVAYSVLVVAKVEKGKSKKLKSVKELLGITIMERSSFEKNPIDFL | |
| | | | EAKGYKEVKKDLIIKLPKYSLFELENGRKRMLASAKQLQKGNELALPSKYVNFLYLASHYE | |
| | | | KLKGSPEDNEQKQLFVEQHKHYLDEIIEQISEFSKRVILADANLDKVLSAYNKHRDKPIREQA | |
| | | | ENIIHLFTLTRLGAPRAFKYFDTTIDPKQYRSTKEVLDATLIHQSITGLYETRIDLSQLGGD | |
| PLV4948 | | N863A | DKKYSIGLDIGTNSVGWAVITDEYKVPSKKFKVLGNTDRHSIKKNLIGALLFDSGETAERTRL | 23814 |
| | | | KRTARRRYTRRKNRICYLQEIFSNEMAKVDDSFFHRLEESFLVEEDKKHERHPIFGNIVDEVA | |
| | | | YHEKYPTIYHLRKKLVDSTDKADLRLIYLALAHMIKFRGHFLIEGDLNPDNSDVDKLFIQLV | |
| | | | QTYNQLFEENPINASGVDAKAILSARLSKSRRLENLIAQLPGEKKNGLFGNLIALSLGLTPNF | |
| | | | KSNFDLAEDAKLQLSKDTYDDDLDNLLAQIGDQYADLFLAAKNLSDAILLSDILRVNTEITK | |
| | | | APLSASMIKRYDEHHQDLTLLKALVRQQLPEKYKEIFFDQSKNGYAGYIDGGASQEEFYKFI | |
| | | | KPILEKMDGTEELLVKLNREDLLRKQRTFDNGSIPHQIHLGELHAILRRQEDFYPFLKDNREK | |
| | | | IEKILTFRIPYYVGPLARGNSRFAWMTRKSEETITPWNFEEVVDKGASAQSFIERMTNFDKNL | |
| | | | PNEKVLPKHSLLYEYFTVYNELTKVKYVTEGMRKPAFLSGEQKKAIVDLLFKTNRKVTVKQ | |
| | | | LKEDYFKKIECFDSVEISGVEDRFNASLGTYHDLLKIIKDKDFLDNEENEDILEDIVLTLTLFE | |
| | | | DREMIEERLKTYAHLFDDKVMKQLKRRRYTGWGRLSRKLINGIRDKQSGKTILDFLKSDGF | |
| | | | ANRNFMQLIHDDSLTFKEDIQKAQVSGQGDSLHEHIANLAGSPAIKKGILQTVKVVDELVKV | |
| | | | MGRHKPENIVIEMARENQTTQKGQKNSRERMKRIEEGIKELGSQILKEHPVENTQLQNEKLY | |
| | | | LYYLQNGRDMYVDQELDINRLSDYDVDHIVPQSFLKDDSIDNKVLTRSDKARGKSDNVPSE | |
| | | | EVVKKMKNYWRQLLNAKLITQRKFDNLTKAERGGLSELDKAGFIKRQLVETRQITKHVAQI | |
| | | | LDSRMNTKYDENDKLIREVKVITLKSKLVSDFRKDFQFYKVREINNYHHAHDAYLNAVVGT | |
| | | | ALIKKYPKLESEFVYGDYKVYDVRKMIAKSEQEIGKATAKYFFYSNIMNFFKTEITLANGEIR | |
| | | | KRPLIETNGETGEIVWDKGRDFATVRKVLSMPQVNIVKKTEVQTGGFSKESIRPKRNSDKLIA | |
| | | | RKKDWDPKKYGGFLWPTVAYSVLVVAKVEKGKSKKLKSVKELLGITIMERSSFEKNPIDFL | |
| | | | EAKGYKEVKKDLIIKLPKYSLFELENGRKRMLASAKQLQKGNELALPSKYVNFLYLASHYE | |
| | | | KLKGSPEDNEQKQLFVEQHKHYLDEIIEQISEFSKRVILADANLDKVLSAYNKHRDKPIREQA | |
| | | | ENIIHLFTLTRLGAPRAFKYFDTTIDPKQYRSTKEVLDATLIHQSITGLYETRIDLSQLGGD | |
| PLV4927 | SpyCas9- | WT | DKKYSIGLDIGTNSVGWAVITDEYKVPSKKFKVLGNTDRHSIKKNLIGALLFDSGETAEATR | 23815 |
| | NG | | LKRTARRRYTRRKNRICYLQEIFSNEMAKVDDSFFHRLEESFLVEEDKKHERHPIFGNIVDEV | |
| | | | AYHEKYPTIYHLRKKLVDSTDKADLRLIYLALAHMIKFRGHFLIEGDLNPDNSDVDKLFIQL | |
| | | | VQTYNQLFEENPINASGVDAKAILSARLSKSRRLENLIAQLPGEKKNGLFGNLIALSLGLTPN | |
| | | | FKSNFDLAEDAKLQLSKDTYDDDLDNLLAQIGDQYADLFLAAKNLSDAILLSDILRVNTEIT | |
| | | | KAPLSASMIKRYDEHHQDLTLLKALVRQQLPEKYKEIFFDQSKNGYAGYIDGGASQEEFYKF | |
| | | | IKPILEKMDGTEELLVKLNREDLLRKQRTFDNGSIPHQIHLGELHAILRRQEDFYPFLKDNRE | |
| | | | KIEKILTFRIPYYVGPLARGNSRFAWMTRKSEETITPWNFEEVVDKGASAQSFIERMTNFDKN | |
| | | | LPNEKVLPKHSLLYEYFTVYNELTKVKYVTEGMRKPAFLSGEQKKAIVDLLFKTNRKVTVK | |
| | | | QLKEDYFKKIECFDSVEISGVEDRFNASLGTYHDLLKIIKDKDFLDNEENEDILEDIVLTLTLF | |
| | | | EDREMIEERLKTYAHLFDDKVMKQLKRRRYTGWGRLSRKLINGIRDKQSGKTILDFLKSDG | |
| | | | FANRNFMQLIHDDSLTFKEDIQKAQVSGQGDSLHEHIANLAGSPAIKKGILQTVKVVDELVK | |
| | | | VMGRHKPENIVIEMARENQTTQKGQKNSRERMKRIEEGIKELGSQILKEHPVENTQLQNEKL | |
| | | | YLYYLQNGRDMYVDQELDINRLSDYDVDHIVPQSFLKDDSIDNKVLTRSDKNRGKSDNVPS | |
| | | | EEVVKKMKNYWRQLLNAKLITQRKFDNLTKAERGGLSELDKAGFIKRQLVETRQITKHVAQ | |
| | | | ILDSRMNTKYDENDKLIREVKVITLKSKLVSDFRKDFQFYKVREINNYHHAHDAYLNAVVG | |
| | | | TALIKKYPKLESEFVYGDYKVYDVRKMIAKSEQEIGKATAKYFFYSNIMNFFKTEITLANGEI | |
| | | | RKRPLIETNGETGEIVWDKGRDFATVRKVLSMPQVNIVKKTEVQTGGFSKESIRPKRNSDKLI | |
| | | | ARKKDWDPKKYGGFVSPTVAYSVLVVAKVEKGKSKKLKSVKELLGITIMERSSFEKNPIDFL | |
| | | | EAKGYKEVKKDLIIKLPKYSLFELENGRKRMLASARFLQKGNELALPSKYVNFLYLASHYEK | |
| | | | LKGSPEDNEQKQLFVEQHKHYLDEIIEQISEFSKRVILADANLDKVLSAYNKHRDKPIREQAE | |
| | | | NIIHLFTLTNLGAPRAFKYFDTTIDRKVYRSTKEVLDATLIHQSITGLYETRIDLSQLGGD | |
| PLV4943 | | N863A | DKKYSIGLDIGTNSVGWAVITDEYKVPSKKFKVLGNTDRHSIKKNLIGALLFDSGETAEATR | 23816 |
| | | | LKRTARRRYTRRKNRICYLQEIFSNEMAKVDDSFFHRLEESFLVEEDKKHERHPIFGNIVDEV | |
| | | | AYHEKYPTIYHLRKKLVDSTDKADLRLIYLALAHMIKFRGHFLIEGDLNPDNSDVDKLFIQL | |
| | | | VQTYNQLFEENPINASGVDAKAILSARLSKSRRLENLIAQLPGEKKNGLFGNLIALSLGLTPN | |
| | | | FKSNFDLAEDAKLQLSKDTYDDDLDNLLAQIGDQYADLFLAAKNLSDAILLSDILRVNTEIT | |
| | | | KAPLSASMIKRYDEHHQDLTLLKALVRQQLPEKYKEIFFDQSKNGYAGYIDGGASQEEFYKF | |
| | | | IKPILEKMDGTEELLVKLNREDLLRKQRTFDNGSIPHQIHLGELHAILRRQEDFYPFLKDNRE | |
| | | | KIEKILTFRIPYYVGPLARGNSRFAWMTRKSEETITPWNFEEVVDKGASAQSFIERMTNFDKN | |
| | | | LPNEKVLPKHSLLYEYFTVYNELTKVKYVTEGMRKPAFLSGEQKKAIVDLLFKTNRKVTVK | |
| | | | QLKEDYFKKIECFDSVEISGVEDRFNASLGTYHDLLKIIKDKDFLDNEENEDILEDIVLTLTLF | |
| | | | EDREMIEERLKTYAHLFDDKVMKQLKRRRYTGWGRLSRKLINGIRDKQSGKTILDFLKSDG | |
| | | | FANRNFMQLIHDDSLTFKEDIQKAQVSGQGDSLHEHIANLAGSPAIKKGILQTVKVVDELVK | |
| | | | VMGRHKPENIVIEMARENQTTQKGQKNSRERMKRIEEGIKELGSQILKEHPVENTQLQNEKL | |
| | | | YLYYLQNGRDMYVDQELDINRLSDYDVDHIVPQSFLKDDSIDNKVLTRSDKARGKSDNVPS | |
| | | | EEVVKKMKNYWRQLLNAKLITQRKFDNLTKAERGGLSELDKAGFIKRQLVETRQITKHVAQ | |
| | | | ILDSRMNTKYDENDKLIREVKVITLKSKLVSDFRKDFQFYKVREINNYHHAHDAYLNAVVG | |
| | | | TALIKKYPKLESEFVYGDYKVYDVRKMIAKSEQEIGKATAKYFFYSNIMNFFKTEITLANGEI | |
| | | | RKRPLIETNGETGEIVWDKGRDFATVRKVLSMPQVNIVKKTEVQTGGFSKESIRPKRNSDKLI | |
| | | | ARKKDWDPKKYGGFVSPTVAYSVLVVAKVEKGKSKKLKSVKELLGITIMERSSFEKNPIDFL | |
| | | | EAKGYKEVKKDLIIKLPKYSLFELENGRKRMLASARFLQKGNELALPSKYVNFLYLASHYEK | |
| | | | LKGSPEDNEQKQLFVEQHKHYLDEIIEQISEFSKRVILADANLDKVLSAYNKHRDKPIREQAE | |
| | | | NIIHLFTLTNLGAPRAFKYFDTTIDRKVYRSTKEVLDATLIHQSITGLYETRIDLSQLGGD | |
| PLV4933 | St1Cas9 | WT | SDLVLGLDIGIGSVGVGILNKVTGEIIHKNSRIFPAAQAENNLVRRTNRQGRRLARRKKHRRV | 23817 |
| | | | RLNRLFEESGLITDFTKISINLNPYQLRVKGLTDELSNEELFIALKNMVKHRGISYLDDASDDG | |
| | | | NSSVGDYAQIVKENSKQLETKTPGQIQLERYQTYGQLRGDFTVEKDGKKHRLINVFPTSAYR | |
| | | | SEALRILQTQQEFNPQITDEFINRYLEILTGKRKYYHGPGNEKSRTDYGRYRTSGETLDNIFGI | |
| | | | LIGKCTFYPDEFRAAKASYTAQEFNLLNDLNNLTVPTETKKLSKEQKNQIINYVKNEKAMGP | |
| | | | AKLFKYIAKLLSCDVADIKGYRIDKSGKAEIHTFEAYRKMKTLETLDIEQMDRETLDKLAYV | |
| | | | LTLNTEREGIQEALEHEFADGSFSQKQVDELVQFRKANSSIFGKGWHNFSVKLMMELIPELY | |
| | | | ETSEEQMTILTRLGKQKTTSSSNKTKYIDEKLLTEEIYNPVVAKSVRQAIKIVNAAIKEYGDF | |
| | | | DNIVIEMARETNEDDEKKAIQKIQKANKDEKDAAMLKAANQYNGKAELPHSVFHGHKQLA | |
| | | | TKIRLWHQQGERCLYTGKTISIHDLINNSNQFEVDHILPLSITFDDSLANKVLVYATANQEKG | |
| | | | QRTPYQALDSMDDAWSFRELKAFVRESKTLSNKKKEYLLTEEDISKFDVRKKFIERNLVDTR | |
| | | | YASRVVLNALQEHFRAHKIDTKVSVVRGQFTSQLRRHWGIEKTRDTYHHHAVDALIIAASS | |
| | | | QLNLWKKQKNTLVSYSEDQLLDIETGELISDDEYKESVFKAPYQHFVDTLKSKEFEDSILFSY | |
| | | | QVDSKFNRKISDATIYATRQAKVGKDKADETYVLGKIKDIYTQDGYDAFMKIYKKDKSKFL | |
| | | | MYRHDPQTFEKVIEPILENYPNKQINEKGKEVPCNPFLKYKEEHGYIRKYSKKGNGPEIKSLK | |
| | | | YYDSKLGNHIDITPKDSNNKVVLQSVSPWRADVYFNKTTGKYEILGLKYADLQFEKGTGTY | |
| | | | KISQEKYNDIKKKEGVDSDSEFKFTLYKNDLLLVKDTETKEQQLFRFLSRTMPKQKHYVELK | |
| | | | PYDKQKFEGGEALIKVLGNVANSGQCKKGLGKSNISIYKVRTDVLGNQHIIKNEGDKPKLDF | |
| PLV4944 | | N622A | SDLVLGLDIGIGSVGVGILNKVTGEIIHKNSRIFPAAQAENNLVRRTNRQGRRLARRKKHRRV | 23818 |
| | | | RLNRLFEESGLITDFTKISINLNPYQLRVKGLTDELSNEELFIALKNMVKHRGISYLDDASDDG | |
| | | | NSSVGDYAQIVKENSKQLETKTPGQIQLERYQTYGQLRGDFTVEKDGKKHRLINVFPTSAYR | |
| | | | SEALRILQTQQEFNPQITDEFINRYLEILTGKRKYYHGPGNEKSRTDYGRYRTSGETLDNIFGI | |
| | | | LIGKCTFYPDEFRAAKASYTAQEFNLLNDLNNLTVPTETKKLSKEQKNQIINYVKNEKAMGP | |
| | | | AKLFKYIAKLLSCDVADIKGYRIDKSGKAEIHTFEAYRKMKTLETLDIEQMDRETLDKLAYV | |
| | | | LTLNTEREGIQEALEHEFADGSFSQKQVDELVQFRKANSSIFGKGWHNFSVKLMMELIPELY | |
| | | | ETSEEQMTILTRLGKQKTTSSSNKTKYIDEKLLTEEIYNPVVAKSVRQAIKIVNAAIKEYGDF | |
| | | | DNIVIEMARETNEDDEKKAIQKIQKANKDEKDAAMLKAANQYNGKAELPHSVFHGHKQLA | |
| | | | TKIRLWHQQGERCLYTGKTISIHDLINNSNQFEVDHILPLSITFDDSLANKVLVYATAAQEKG | |
| | | | QRTPYQALDSMDDAWSFRELKAFVRESKTLSNKKKEYLLTEEDISKFDVRKKFIERNLVDTR | |
| | | | YASRVVLNALQEHFRAHKIDTKVSVVRGQFTSQLRRHWGIEKTRDTYHHHAVDALIIAASS | |
| | | | QLNLWKKQKNTLVSYSEDQLLDIETGELISDDEYKESVFKAPYQHFVDTLKSKEFEDSILFSY | |
| | | | QVDSKFNRKISDATIYATRQAKVGKDKADETYVLGKIKDIYTQDGYDAFMKIYKKDKSKFL | |
| | | | MYRHDPQTFEKVIEPILENYPNKQINEKGKEVPCNPFLKYKEEHGYIRKYSKKGNGPEIKSLK | |
| | | | YYDSKLGNHIDITPKDSNNKVVLQSVSPWRADVYFNKTTGKYEILGLKYADLQFEKGTGTY | |
| | | | KISQEKYNDIKKKEGVDSDSEFKFTLYKNDLLLVKDTETKEQQLFRFLSRTMPKQKHYVELK | |
| | | | PYDKQKFEGGEALIKVLGNVANSGQCKKGLGKSNISIYKVRTDVLGNQHIIKNEGDKPKLDF | |

[0886] First the indel activity of gene modifying systems comprising template RNAs comprising 5 SpCas9 spacers, in combination with wildtype SpCas9 polypeptide was evaluated in HEK293T cells.

[0887] As shown in FIG. 13, out of the 5 spacers tested, spacers 1, 3, and 4 showed indel activity of >15%. Template RNAs were designed using these 3 spacers and tested for rewrite activity using exemplary gene modifying polypeptides comprising SpCas9. However, these combinations did not result in rewrite activity above a target threshold (data not shown). Without wishing to be bound by theory, SpCas9 spacers did not yield rewrite activity above the target threshold likely due to the distance from the PiZ mutation. Based on this result, Cas9 variants and compatible spacers were evaluated.

[0888] Twelve different Cas9 variants (Table X1) with several different spacers for each variant were screened. Exemplary gene modifying polypeptides comprising the different Cas9 domains were generated (Table X1) and tested with compatible template RNAs (Table X2). FIG. 14 shows the indel % at the PiZ mutation site in HEK293T landing pad cells after treatment with the gene modifying systems. The results showed that many combinations of Cas9 variant domains and compatible template RNAs showed promising indel activity. Of the combinations examined, five Cas9 variants were identified that showed similar or higher indel activity relative to SpCas9 (FIG. 14). The active spacers were ranked by indel activity and distance from the PiZ mutation, and selected spacer:Cas9 combinations that showed high indel activity and were located within 20 bp of the PiZ mutation were selected for further screening (FIG. 15 and Table XX).

TABLE X2
sgRNAs used for spacer screen

| | | | SEQ | | SEQ |
|---|---|---|---|---|---|
| Plasmid | | Spacer | ID | | ID |
| Number | Name | sequence | NO | Scaffold Sequence | NO |
| PLV5610 | pU6- | CTGTG | 23819 | GTTTTAGAGCTAGAAATAGCAAGTTAAAATAAGGCTAGTCCGTTATCAACTTGAA | 23938 |
| | Spy- | CTGAC | | AAAGTGGCACCGAGTCGGTGC | |
| | A1AT- | CATCG | | | |
| | sgRNA- | ACAAG | | | |
| | 1 | | | | |
| PLV5611 | pU6- | GCTGT | 23820 | GTTTTAGAGCTAGAAATAGCAAGTTAAAATAAGGCTAGTCCGTTATCAACTTGAA | 23939 |
| | Spy- | GCTGA | | AAAGTGGCACCGAGTCGGTGC | |
| | A1AT- | CCATC | | | |
| | sgRNA- | GACAA | | | |
| | 1G | G | | | |
| PLV5612 | pU6- | CAGCT | 23821 | GTTTTAGAGCTAGAAATAGCAAGTTAAAATAAGGCTAGTCCGTTATCAACTTGAA | 23940 |
| | Spy- | TCAGT | | AAAGTGGCACCGAGTCGGTGC | |
| | A1AT- | CCCTTT | | | |
| | sgRNA- | CTTG | | | |
| | 2 | | | | |
| PLV5613 | pU6- | GCAGC | 23822 | GTTTTAGAGCTAGAAATAGCAAGTTAAAATAAGGCTAGTCCGTTATCAACTTGAA | 23941 |
| | Spy- | TTCAG | | AAAGTGGCACCGAGTCGGTGC | |
| | A1AT- | TCCCTT | | | |
| | sgRNA- | TCTTG | | | |
| | 2G | | | | |
| PLV5614 | pU6- | GGCTG | 23823 | GTTTTAGAGCTAGAAATAGCAAGTTAAAATAAGGCTAGTCCGTTATCAACTTGAA | 23942 |
| | Spy- | TGCTG | | AAAGTGGCACCGAGTCGGTGC | |
| | A1AT- | ACCAT | | | |
| | sgRNA- | CGACA | | | |
| | 3 | | | | |
| PLV5615 | pU6- | AGGCT | 23824 | GTTTTAGAGCTAGAAATAGCAAGTTAAAATAAGGCTAGTCCGTTATCAACTTGAA | 23943 |
| | Spy- | GTGCT | | AAAGTGGCACCGAGTCGGTGC | |
| | A1AT- | GACCA | | | |
| | sgRNA- | TCGAC | | | |
| | 4 | | | | |
| PLV5616 | pU6- | GAGGC | 23825 | GTTTTAGAGCTAGAAATAGCAAGTTAAAATAAGGCTAGTCCGTTATCAACTTGAA | 23944 |
| | Spy- | TGTGC | | AAAGTGGCACCGAGTCGGTGC | |
| | A1AT- | TGACC | | | |
| | sgRNA- | ATCGA | | | |
| | 4G | C | | | |
| PLV5617 | pU6- | AGCAG | 23826 | GTTTTAGAGCTAGAAATAGCAAGTTAAAATAAGGCTAGTCCGTTATCAACTTGAA | 23945 |
| | Spy- | CTTCA | | AAAGTGGCACCGAGTCGGTGC | |
| | A1AT- | GTCCC | | | |
| | sgRNA- | TTTCT | | | |
| | 5 | | | | |
| PLV5618 | pU6- | GAGCA | 23827 | GTTTTAGAGCTAGAAATAGCAAGTTAAAATAAGGCTAGTCCGTTATCAACTTGAA | 23946 |
| | Spy- | GCTTC | | AAAGTGGCACCGAGTCGGTGC | |
| | A1AT- | AGTCC | | | |
| | sgRNA- | CTTTCT | | | |
| | 5G | | | | |
| PLV5619 | pU6- | GGCCG | 23828 | GTTTTAGAGCTAGAAATAGCAAGTTAAAATAAGGCTAGTCCGTTATCAACTTGAA | 23947 |
| | Spy- | TGCAT | | AAAGTGGCACCGAGTCGGTGC | |
| | A1AT- | AAGGC | | | |
| | sgRNA- | TGTGC | | | |
| | 6 | | | | |
| PLV5620 | pU6- | CCAGG | 23829 | GTTTTAGAGCTAGAAATAGCAAGTTAAAATAAGGCTAGTCCGTTATCAACTTGAA | 23948 |
| | Spy- | CCGTG | | AAAGTGGCACCGAGTCGGTGC | |
| | A1AT- | CATAA | | | |
| | sgRNA- | GGCTG | | | |
| | 7 | | | | |
| PLV5621 | pU6- | GCCAG | 23830 | GTTTTAGAGCTAGAAATAGCAAGTTAAAATAAGGCTAGTCCGTTATCAACTTGAA | 23949 |
| | Spy- | GCCGT | | AAAGTGGCACCGAGTCGGTGC | |
| | A1AT- | GCATA | | | |
| | sgRNA- | AGGCT | | | |
| | 7G | G | | | |
| PLV5622 | pU6- | CAGCA | 23831 | GTTTTAGAGCTAGAAATAGCAAGTTAAAATAAGGCTAGTCCGTTATCAACTTGAA | 23950 |
| | Spy- | GCTTC | | AAAGTGGCACCGAGTCGGTGC | |
| | A1AT- | AGTCC | | | |
| | sgRNA- | CTTTC | | | |
| | 8 | | | | |
| PLV5623 | pU6- | GCAGC | 23832 | GTTTTAGAGCTAGAAATAGCAAGTTAAAATAAGGCTAGTCCGTTATCAACTTGAA | 23951 |
| | Spy- | AGCTT | | AAAGTGGCACCGAGTCGGTGC | |
| | A1AT- | CAGTC | | | |
| | sgRNA- | CCTTTC | | | |
| | 8G | | | | |
| PLV5624 | pU6- | AGGCC | 23833 | GTTTTAGAGCTAGAAATAGCAAGTTAAAATAAGGCTAGTCCGTTATCAACTTGAA | 23952 |
| | Spy- | GTGCA | | AAAGTGGCACCGAGTCGGTGC | |
| | A1AT- | TAAGG | | | |
| | sgRNA- | CTGTG | | | |
| | 9 | | | | |
| PLV5625 | pU6- | GAGGC | 23834 | GTTTTAGAGCTAGAAATAGCAAGTTAAAATAAGGCTAGTCCGTTATCAACTTGAA | 23953 |
| | Spy- | CGTGC | | AAAGTGGCACCGAGTCGGTGC | |
| | A1AT- | ATAAG | | | |
| | sgRNA- | GCTGT | | | |
| | 9G | G | | | |
| PLV5626 | pU6- | TCCAG | 23835 | GTTTTAGAGCTAGAAATAGCAAGTTAAAATAAGGCTAGTCCGTTATCAACTTGAA | 23954 |
| | Spy- | GCCGT | | AAAGTGGCACCGAGTCGGTGC | |
| | A1AT- | GCATA | | | |
| | sgRNA- | AGGCT | | | |
| | 10 | | | | |
| PLV5627 | pU6- | GTCCA | 23836 | GTTTTAGAGCTAGAAATAGCAAGTTAAAATAAGGCTAGTCCGTTATCAACTTGAA | 23955 |
| | Spy- | GGCCG | | AAAGTGGCACCGAGTCGGTGC | |
| | A1AT- | TGCAT | | | |
| | sgRNA- | AAGGC | | | |
| | 10G | T | | | |
| PLV5628 | pU6- | ACCTC | 23837 | GTTTTAGAGCTAGAAATAGCAAGTTAAAATAAGGCTAGTCCGTTATCAACTTGAA | 23956 |
| | Spy- | GGGGG | | AAAGTGGCACCGAGTCGGTGC | |
| | A1AT- | GGATA | | | |
| | sgRNA- | GACAT | | | |
| | 11 | | | | |
| PLV5629 | pU6- | GACCT | 23838 | GTTTTAGAGCTAGAAATAGCAAGTTAAAATAAGGCTAGTCCGTTATCAACTTGAA | 23957 |
| | Spy- | CGGGG | | AAAGTGGCACCGAGTCGGTGC | |
| | A1AT- | GGGAT | | | |
| | sgRNA- | AGACA | | | |
| | 11G | T | | | |
| PLV5630 | pU6- | TGTTG | 23839 | GTTTTAGAGCTAGAAATAGCAAGTTAAAATAAGGCTAGTCCGTTATCAACTTGAA | 23958 |
| | Spy- | AACTT | | AAAGTGGCACCGAGTCGGTGC | |
| | A1AT- | GACCT | | | |
| | sgRNA- | CGGGG | | | |
| | 12 | | | | |
| PLV5631 | pU6- | GTGTT | 23840 | GTTTTAGAGCTAGAAATAGCAAGTTAAAATAAGGCTAGTCCGTTATCAACTTGAA | 23959 |
| | Spy- | GAACT | | AAAGTGGCACCGAGTCGGTGC | |
| | A1AT- | TGACC | | | |
| | sgRNA- | TCGGG | | | |
| | 12G | G | | | |
| PLV5564 | pU6- | AAGGC | 23841 | GTTTTAGTACTCTGGAAACAGAATCTACTAAAACAAGGCAAAATGCCGTGTTTAT | 23960 |
| | Sau- | TGTGC | | CTCGTCAACTTGTTGGCGAGA | |
| | A1AT- | TGACC | | | |
| | sgRNA- | ATCGA | | | |
| | 1 | C | | | |
| PLV5565 | pU6- | GAAGG | 23842 | GTTTTAGTACTCTGGAAACAGAATCTACTAAAACAAGGCAAAATGCCGTGTTTAT | 23961 |
| | Sau- | CTGTG | | CTCGTCAACTTGTTGGCGAGA | |
| | A1AT- | CTGAC | | | |
| | sgRNA- | CATCG | | | |
| | 1G | AC | | | |
| PLV5566 | pU6- | AGCAG | 23843 | GTTTTAGTACTCTGGAAACAGAATCTACTAAAACAAGGCAAAATGCCGTGTTTAT | 23962 |
| | Sau- | CTTCA | | CTCGTCAACTTGTTGGCGAGA | |
| | A1AT- | GTCCC | | | |
| | sgRNA- | TTTCTT | | | |
| | 2 | | | | |
| PLV5567 | pU6- | GAGCA | 23844 | GTTTTAGTACTCTGGAAACAGAATCTACTAAAACAAGGCAAAATGCCGTGTTTAT | 23963 |
| | Sau- | GCTTC | | CTCGTCAACTTGTTGGCGAGA | |
| | A1AT- | AGTCC | | | |
| | sgRNA- | CTTTCT | | | |
| | 2G | T | | | |
| PLV5568 | pU6- | CCAGG | 23845 | GTTTTAGTACTCTGGAAACAGAATCTACTAAAACAAGGCAAAATGCCGTGTTTAT | 23964 |
| | Sau- | CCGTG | | CTCGTCAACTTGTTGGCGAGA | |
| | A1AT- | CATAA | | | |
| | sgRNA- | GGCTG | | | |
| | 3 | T | | | |
| PLV5569 | pU6- | GCCAG | 23846 | GTTTTAGTACTCTGGAAACAGAATCTACTAAAACAAGGCAAAATGCCGTGTTTAT | 23965 |
| | Sau- | GCCGT | | CTCGTCAACTTGTTGGCGAGA | |
| | A1AT- | GCATA | | | |
| | sgRNA- | AGGCT | | | |
| | 3G | GT | | | |
| PLV5570 | pU6- | TAAAA | 23847 | GTTTTAGTACTCTGGAAACAGAATCTACTAAAACAAGGCAAAATGCCGTGTTTAT | 23966 |
| | Sau- | ACATG | | CTCGTCAACTTGTTGGCGAGA | |
| | A1AT- | GCCCC | | | |
| | sgRNA- | AGCAG | | | |
| | 4 | C | | | |
| PLV5571 | pU6- | GTAAA | 23848 | GTTTTAGTACTCTGGAAACAGAATCTACTAAAACAAGGCAAAATGCCGTGTTTAT | 23967 |
| | Sau- | AACAT | | CTCGTCAACTTGTTGGCGAGA | |
| | A1AT- | GGCCC | | | |
| | sgRNA- | CAGCA | | | |
| | 4G | GC | | | |
| PLV5572 | pU6- | GGCCT | 23849 | GTTTTAGTACTCTGGAAACAGAATCTACTAAAACAAGGCAAAATGCCGTGTTTAT | 23968 |
| | Sau- | CTAAA | | CTCGTCAACTTGTTGGCGAGA | |
| | A1AT- | AACAT | | | |
| | sgRNA- | GGCCC | | | |
| | 5 | C | | | |
| PLV5573 | pU6- | TATGG | 23850 | GTTTTAGTACTCTGGAAACAGAATCTACTAAAACAAGGCAAAATGCCGTGTTTAT | 23969 |
| | Sau- | CCTCT | | CTCGTCAACTTGTTGGCGAGA | |
| | A1AT- | AAAAA | | | |
| | sgRNA- | CATGG | | | |
| | 6 | C | | | |
| PLV5574 | pU6- | GTATG | 23851 | GTTTTAGTACTCTGGAAACAGAATCTACTAAAACAAGGCAAAATGCCGTGTTTAT | 23970 |
| | Sau- | GCCTC | | CTCGTCAACTTGTTGGCGAGA | |
| | A1AT- | TAAAA | | | |
| | sgRNA- | ACATG | | | |
| | G | GC | | | |
| PLV5575 | pU6- | TTGAC | 23852 | GTTTTAGTACTCTGGAAACAGAATCTACTAAAACAAGGCAAAATGCCGTGTTTAT | 23971 |
| | Sau- | CTCGG | | CTCGTCAACTTGTTGGCGAGA | |
| | A1AT- | GGGGG | | | |
| | sgRNA- | ATAGA | | | |
| | 7 | C | | | |
| PLV5576 | pU6- | GTTGA | 23853 | GTTTTAGTACTCTGGAAACAGAATCTACTAAAACAAGGCAAAATGCCGTGTTTAT | 23972 |
| | Sau- | CCTCG | | CTCGTCAACTTGTTGGCGAGA | |
| | A1AT- | GGGGG | | | |
| | sgRNA- | GATAG | | | |
| | 7G | AC | | | |
| PLV5577 | pU6- | TTTGTT | 23854 | GTTTTAGTACTCTGGAAACAGAATCTACTAAAACAAGGCAAAATGCCGTGTTTAT | 23973 |
| | Sau- | GAACT | | CTCGTCAACTTGTTGGCGAGA | |
| | A1AT- | TGACC | | | |
| | sgRNA- | TCGGG | | | |
| | 8 | | | | |
| PLV5578 | pU6- | GTTTG | 23855 | GTTTTAGTACTCTGGAAACAGAATCTACTAAAACAAGGCAAAATGCCGTGTTTAT | 23974 |
| | Sau- | TTGAA | | CTCGTCAACTTGTTGGCGAGA | |
| | A1AT- | CTTGA | | | |
| | sgRNA- | CCTCG | | | |
| | 8G | GG | | | |
| PLV5579 | pU6- | ACGTG | 23856 | GTTTTAGTACTCTGGAAACAGAATCTACTAAAACAAGGCAAAATGCCGTGTTTAT | 23975 |
| | Sau- | AGCCT | | CTCGTCAACTTGTTGGCGAGA | |
| | A1AT- | TGCTC | | | |
| | sgRNA- | GAGGC | | | |
| | 9 | C | | | |
| PLV5580 | pU6- | GACGT | 23857 | GTTTTAGTACTCTGGAAACAGAATCTACTAAAACAAGGCAAAATGCCGTGTTTAT | 23976 |
| | Sau- | GAGCC | | CTCGTCAACTTGTTGGCGAGA | |
| | A1AT- | TTGCT | | | |
| | sgRNA- | CGAGG | | | |
| | 9G | CC | | | |
| PLV5581 | pU6- | ATTAA | 23858 | GTTTTAGTACTCTGGAAACAGAATCTACTAAAACAAGGCAAAATGCCGTGTTTAT | 23977 |
| | Sau- | GAAGA | | CTCGTCAACTTGTTGGCGAGA | |
| | A1AT- | CAAAG | | | |
| | sgRNA- | GGTTT | | | |
| | 10 | G | | | |
| PLV5582 | pU6- | GATTA | 23859 | GTTTTAGTACTCTGGAAACAGAATCTACTAAAACAAGGCAAAATGCCGTGTTTAT | 23978 |
| | Sau- | AGAAG | | CTCGTCAACTTGTTGGCGAGA | |
| | A1AT- | ACAAA | | | |
| | sgRNA- | GGGTT | | | |
| | 10G | TG | | | |
| PLV5583 | pU6- | AGGTG | 23860 | GTTTTAGTACTCTGGAAACAGAATCTACTAAAACAAGGCAAAATGCCGTGTTTAT | 23979 |
| | Sau- | TCCAC | | CTCGTCAACTTGTTGGCGAGA | |
| | A1AT- | GTGAG | | | |
| | sgRNA- | CCTTG | | | |
| | 11 | C | | | |
| PLV5584 | pU6- | GAGGT | 23861 | GTTTTAGTACTCTGGAAACAGAATCTACTAAAACAAGGCAAAATGCCGTGTTTAT | 23980 |
| | Sau- | GTCCA | | CTCGTCAACTTGTTGGCGAGA | |
| | A1AT- | CGTGA | | | |
| | sgRNA- | GCCTT | | | |
| | 11G | GC | | | |
| PLV5585 | pU6- | TGTTC | 23862 | GTTTTAGTACTCTGGAAACAGAATCTACTAAAACAAGGCAAAATGCCGTGTTTAT | 23981 |
| | Sau- | AATCA | | CTCGTCAACTTGTTGGCGAGA | |
| | A1AT- | TTAAG | | | |
| | sgRNA- | AAGAC | | | |
| | 12 | A | | | |
| PLV5586 | pU6- | GTGTT | 23863 | GTTTTAGTACTCTGGAAACAGAATCTACTAAAACAAGGCAAAATGCCGTGTTTAT | 23982 |
| | Sau- | CAATC | | CTCGTCAACTTGTTGGCGAGA | |
| | A1AT- | ATTAA | | | |
| | sgRNA- | GAAGA | | | |
| | 12G | CA | | | |
| PLV5587 | pU6- | CGCTT | 23864 | GTTTTAGTACTCTGGAAACAGAATCTACTAAAACAAGGCAAAATGCCGTGTTTAT | 23983 |
| | Sau- | CCTGG | | CTCGTCAACTTGTTGGCGAGA | |
| | A1AT- | GAGGT | | | |
| | sgRNA- | GTCCA | | | |
| | 13 | C | | | |
| PLV5588 | pU6- | GCGCT | 23865 | GTTTTAGTACTCTGGAAACAGAATCTACTAAAACAAGGCAAAATGCCGTGTTTAT | 23984 |
| | Sau- | TCCTG | | CTCGTCAACTTGTTGGCGAGA | |
| | A1AT- | GGAGG | | | |
| | sgRNA- | TGTCC | | | |
| | 13G | AC | | | |
| PLV5589 | pU6- | TCTCC | 23866 | GTTTTAGTACTCTGGAAACAGAATCTACTAAAACAAGGCAAAATGCCGTGTTTAT | 23985 |
| | Sauri- | CCTCC | | CTCGTCAACTTGTTGGCGAGA | |
| | A1AT- | AGGCC | | | |
| | sgRNA- | GTGCA | | | |
| | 1 | T | | | |
| PLV5590 | pU6- | GTCTC | 23867 | GTTTTAGTACTCTGGAAACAGAATCTACTAAAACAAGGCAAAATGCCGTGTTTAT | 23986 |
| | Sauri- | CCCTC | | CTCGTCAACTTGTTGGCGAGA | |
| | A1AT- | CAGGC | | | |
| | sgRNA- | CGTGC | | | |
| | 1G | AT | | | |
| PLV5591 | pU6- | ATGGG | 23868 | GTTTTAGTACTCTGGAAACAGAATCTACTAAAACAAGGCAAAATGCCGTGTTTAT | 23987 |
| | Sauri- | TATGG | | CTCGTCAACTTGTTGGCGAGA | |
| | A1AT- | CCTCT | | | |
| | sgRNA- | AAAAA | | | |
| | 2 | C | | | |
| PLV5592 | pU6- | GATGG | 23869 | GTTTTAGTACTCTGGAAACAGAATCTACTAAAACAAGGCAAAATGCCGTGTTTAT | 23988 |
| | Sauri- | GTATG | | CTCGTCAACTTGTTGGCGAGA | |
| | A1AT- | GCCTC | | | |
| | sgRNA- | TAAAA | | | |
| | 2G | AC | | | |
| PLV5593 | pU6- | TAAGG | 23870 | GTTTTAGTACTCTGGAAACAGAATCTACTAAAACAAGGCAAAATGCCGTGTTTAT | 23989 |
| | Sauri- | CTGTG | | CTCGTCAACTTGTTGGCGAGA | |
| | A1AT- | CTGAC | | | |
| | sgRNA- | CATCG | | | |
| | 3 | A | | | |
| PLV5594 | pU6- | GTAAG | 23871 | GTTTTAGTACTCTGGAAACAGAATCTACTAAAACAAGGCAAAATGCCGTGTTTAT | 23990 |
| | Sauri- | GCTGT | | CTCGTCAACTTGTTGGCGAGA | |
| | A1AT- | GCTGA | | | |
| | sgRNA- | CCATC | | | |
| | 3G | GA | | | |
| PLV5595 | pU6- | AAAAA | 23872 | GTTTTAGTACTCTGGAAACAGAATCTACTAAAACAAGGCAAAATGCCGTGTTTAT | 23991 |
| | Sauri- | CATGG | | CTCGTCAACTTGTTGGCGAGA | |
| | A1AT- | CCCCA | | | |
| | sgRNA- | GCAGC | | | |
| | 4 | T | | | |
| PLV5596 | pU6- | GAAAA | 23873 | GTTTTAGTACTCTGGAAACAGAATCTACTAAAACAAGGCAAAATGCCGTGTTTAT | 23992 |
| | Sauri- | ACATG | | CTCGTCAACTTGTTGGCGAGA | |
| | A1AT- | GCCCC | | | |
| | sgRNA- | AGCAG | | | |
| | 4G | CT | | | |
| PLV5597 | pU6- | GCCTC | 23874 | GTTTTAGTACTCTGGAAACAGAATCTACTAAAACAAGGCAAAATGCCGTGTTTAT | 23993 |
| | Sauri- | TAAAA | | CTCGTCAACTTGTTGGCGAGA | |
| | A1AT- | ACATG | | | |
| | sgRNA- | GCCCC | | | |
| | 5 | A | | | |
| PLV5598 | pU6- | ATGGC | 23875 | GTTTTAGTACTCTGGAAACAGAATCTACTAAAACAAGGCAAAATGCCGTGTTTAT | 23994 |
| | Sauri- | CTCTA | | CTCGTCAACTTGTTGGCGAGA | |
| | A1AT- | AAAAC | | | |
| | sgRNA- | ATGGC | | | |
| | 6 | C | | | |
| PLV5599 | pU6- | GATGG | 23876 | GTTTTAGTACTCTGGAAACAGAATCTACTAAAACAAGGCAAAATGCCGTGTTTAT | 23995 |
| | Sauri- | CCTCT | | CTCGTCAACTTGTTGGCGAGA | |
| | A1AT- | AAAAA | | | |
| | sgRNA- | CATGG | | | |
| | 6G | CC | | | |
| PLV5600 | pU6- | CTCTC | 23877 | GTTTTAGTACTCTGGAAACAGAATCTACTAAAACAAGGCAAAATGCCGTGTTTAT | 23996 |
| | Sauri- | CCCTC | | CTCGTCAACTTGTTGGCGAGA | |
| | A1AT- | CAGGC | | | |
| | sgRNA- | CGTGC | | | |
| | 7 | A | | | |
| PLV5601 | pU6- | GCTCT | 23878 | GTTTTAGTACTCTGGAAACAGAATCTACTAAAACAAGGCAAAATGCCGTGTTTAT | 23997 |
| | Sauri- | CCCCT | | CTCGTCAACTTGTTGGCGAGA | |
| | A1AT- | CCAGG | | | |
| | sgRNA- | CCGTG | | | |
| | 7G | CA | | | |
| PLV5602 | pU6- | TGTCT | 23879 | GTTTTAGTACTCTGGAAACAGAATCTACTAAAACAAGGCAAAATGCCGTGTTTAT | 23998 |
| | Sauri- | CTGCT | | CTCGTCAACTTGTTGGCGAGA | |
| | A1AT- | TCTCTC | | | |
| | sgRNA- | CCCTC | | | |
| | 8 | | | | |
| PLV5603 | pU6- | GTGTC | 23880 | GTTTTAGTACTCTGGAAACAGAATCTACTAAAACAAGGCAAAATGCCGTGTTTAT | 23999 |
| | Sauri- | TCTGC | | CTCGTCAACTTGTTGGCGAGA | |
| | A1AT- | TTCTCT | | | |
| | sgRNA- | CCCCT | | | |
| | 8G | C | | | |
| PLV5604 | pU6- | TGACC | 23881 | GTTTTAGTACTCTGGAAACAGAATCTACTAAAACAAGGCAAAATGCCGTGTTTAT | 24000 |
| | Sauri- | TCGGG | | CTCGTCAACTTGTTGGCGAGA | |
| | A1AT- | GGGGA | | | |
| | sgRNA- | TAGAC | | | |
| | 9 | A | | | |
| PLV5605 | pU6- | GTGAC | 23882 | GTTTTAGTACTCTGGAAACAGAATCTACTAAAACAAGGCAAAATGCCGTGTTTAT | 24001 |
| | Sauri- | CTCGG | | CTCGTCAACTTGTTGGCGAGA | |
| | A1AT- | GGGGG | | | |
| | sgRNA- | ATAGA | | | |
| | 9G | CA | | | |
| PLV5606 | pU6- | AAGGG | 23883 | GTTTTAGTACTCTGGAAACAGAATCTACTAAAACAAGGCAAAATGCCGTGTTTAT | 24002 |
| | Sauri- | TTTGTT | | CTCGTCAACTTGTTGGCGAGA | |
| | A1AT- | GAACT | | | |
| | sgRNA- | TGACC | | | |
| | 10 | | | | |
| PLV5607 | pU6- | GAAGG | 23884 | GTTTTAGTACTCTGGAAACAGAATCTACTAAAACAAGGCAAAATGCCGTGTTTAT | 24003 |
| | Sauri- | GTTTG | | CTCGTCAACTTGTTGGCGAGA | |
| | A1AT- | TTGAA | | | |
| | sgRNA- | CTTGA | | | |
| | 10G | CC | | | |
| PLV5608 | pU6- | GTGTC | 23885 | GTTTTAGTACTCTGGAAACAGAATCTACTAAAACAAGGCAAAATGCCGTGTTTAT | 24004 |
| | Sauri- | CACGT | | CTCGTCAACTTGTTGGCGAGA | |
| | A1AT- | GAGCC | | | |
| | sgRNA- | TTGCT | | | |
| | 11 | C | | | |
| PLV5609 | pU6- | GTTCA | 23886 | GTTTTAGTACTCTGGAAACAGAATCTACTAAAACAAGGCAAAATGCCGTGTTTAT | 24005 |
| | Sauri- | ATCAT | | CTCGTCAACTTGTTGGCGAGA | |
| | A1AT- | TAAGA | | | |
| | sgRNA- | AGACA | | | |
| | 12 | A | | | |
| PLV5537 | pU6- | GTAAA | 23887 | GTTGTAGCTCCCTTTCTCATTTCGGAAACGAAATGAGAACCGTTGCTACAATAAG | 24006 |
| | Nme2- | AACAT | | GCCGTCTGAAAAGATGTGCCGCAACGCTCTGCCCCTTAAAGCTTCTGCTTTAAGG | |
| | A1AT- | GGCCC | | GGCATCGTTTA | |
| | sgRNA- | CAGCA | | | |
| | 1 | GCTT | | | |
| PLV5538 | pU6- | GTCCA | 23888 | GTTGTAGCTCCCTTTCTCATTTCGGAAACGAAATGAGAACCGTTGCTACAATAAG | 24007 |
| | Nme2- | GGCCG | | GCCGTCTGAAAAGATGTGCCGCAACGCTCTGCCCCTTAAAGCTTCTGCTTTAAGG | |
| | A1AT- | TGCAT | | GGCATCGTTTA | |
| | sgRNA- | AAGGC | | | |
| | 2 | TGTG | | | |
| PLV5539 | pU6- | GCATG | 23889 | GTTGTAGCTCCCTTTCTCATTTCGGAAACGAAATGAGAACCGTTGCTACAATAAG | 24008 |
| | Nme2- | GGTAT | | GCCGTCTGAAAAGATGTGCCGCAACGCTCTGCCCCTTAAAGCTTCTGCTTTAAGG | |
| | A1AT- | GGCCT | | GGCATCGTTTA | |
| | sgRNA- | CTAAA | | | |
| | 3 | AACA | | | |
| PLV5540 | pU6- | GACAT | 23890 | GTTGTAGCTCCCTTTCTCATTTCGGAAACGAAATGAGAACCGTTGCTACAATAAG | 24009 |
| | Nme2- | GGGTA | | GCCGTCTGAAAAGATGTGCCGCAACGCTCTGCCCCTTAAAGCTTCTGCTTTAAGG | |
| | A1AT- | TGGCC | | GGCATCGTTTA | |
| | sgRNA- | TCTAA | | | |
| | 4 | AAAC | | | |
| PLV5541 | pU6- | GCGTG | 23891 | GTTGTAGCTCCCTTTCTCATTTCGGAAACGAAATGAGAACCGTTGCTACAATAAG | 24010 |
| | Nme2- | TCTCT | | GCCGTCTGAAAAGATGTGCCGCAACGCTCTGCCCCTTAAAGCTTCTGCTTTAAGG | |
| | A1AT- | GCTTC | | GGCATCGTTTA | |
| | sgRNA- | TCTCC | | | |
| | 5 | CCTC | | | |
| PLV5542 | pU6- | GCCTT | 23892 | GTTGTAGCTCCCTTTCTCATTTCGGAAACGAAATGAGAACCGTTGCTACAATAAG | 24011 |
| | Nme2- | ACAAC | | GCCGTCTGAAAAGATGTGCCGCAACGCTCTGCCCCTTAAAGCTTCTGCTTTAAGG | |
| | A1AT- | GTGTC | | GGCATCGTTTA | |
| | sgRNA- | TCTGC | | | |
| | 6 | TTCT | | | |
| PLV5543 | pU6- | GCCTC | 23893 | GTTGTAGCTCCCTTTCTCATTTCGGAAACGAAATGAGAACCGTTGCTACAATAAG | 24012 |
| | Nme2- | GGGGG | | GCCGTCTGAAAAGATGTGCCGCAACGCTCTGCCCCTTAAAGCTTCTGCTTTAAGG | |
| | A1AT- | GGATA | | GGCATCGTTTA | |
| | sgRNA- | GACAT | | | |
| | 7 | GGGT | | | |
| PLV5544 | pU6- | GTGAG | 23894 | GTTGTAGCTCCCTTTCTCATTTCGGAAACGAAATGAGAACCGTTGCTACAATAAG | 24013 |
| | Nme2- | CCTTG | | GCCGTCTGAAAAGATGTGCCGCAACGCTCTGCCCCTTAAAGCTTCTGCTTTAAGG | |
| | A1AT- | CTCGA | | GGCATCGTTTA | |
| | sgRNA- | GGCCT | | | |
| | 8 | GGGA | | | |
| PLV5545 | pU6- | GAGAA | 23895 | GTTGTAGCTCCCTTTCTCATTTCGGAAACGAAATGAGAACCGTTGCTACAATAAG | 24014 |
| | Nme2- | GACAA | | GCCGTCTGAAAAGATGTGCCGCAACGCTCTGCCCCTTAAAGCTTCTGCTTTAAGG | |
| | A1AT- | AGGGT | | GGCATCGTTTA | |
| | sgRNA- | TTGTT | | | |
| | 9 | GAAC | | | |
| PLV5546 | pU6- | GAGGT | 23896 | GTTGTAGCTCCCTTTCTCATTTCGGAAACGAAATGAGAACCGTTGCTACAATAAG | 24015 |
| | Nme2- | GTCCA | | GCCGTCTGAAAAGATGTGCCGCAACGCTCTGCCCCTTAAAGCTTCTGCTTTAAGG | |
| | A1AT- | CGTGA | | GGCATCGTTTA | |
| | sgRNA- | GCCTT | | | |
| | 10 | GCTC | | | |
| PLV5519 | pU6- | TGCAT | 23897 | GCTATAGTTCCTTACTGAAAGGTAAGTTGCTATAGTAAGGGCAACAGACCCGAGG | 24016 |
| | Blat- | AAGGC | | CGTTGGGGATCGCCTAGCCCGTGTTTACGGGCTCTCCCCATATTCAAAATAATGA | |
| | A1AT- | TGTGC | | CAGACGAGCACCTTGGAGCATTTATCTCCGAGGTGCT | |
| | sgRNA- | TGACC | | | |
| | 1 | A | | | |
| PLV5520 | pU6- | GTGCA | 23898 | GCTATAGTTCCTTACTGAAAGGTAAGTTGCTATAGTAAGGGCAACAGACCCGAGG | 24017 |
| | Blat- | TAAGG | | CGTTGGGGATCGCCTAGCCCGTGTTTACGGGCTCTCCCCATATTCAAAATAATGA | |
| | A1AT- | CTGTG | | CAGACGAGCACCTTGGAGCATTTATCTCCGAGGTGCT | |
| | sgRNA- | CTGAC | | | |
| | 1G | CA | | | |
| PLV5521 | pU6- | TGGCC | 23899 | GCTATAGTTCCTTACTGAAAGGTAAGTTGCTATAGTAAGGGCAACAGACCCGAGG | 24018 |
| | Blat- | CCAGC | | CGTTGGGGATCGCCTAGCCCGTGTTTACGGGCTCTCCCCATATTCAAAATAATGA | |
| | A1AT- | AGCTT | | CAGACGAGCACCTTGGAGCATTTATCTCCGAGGTGCT | |
| | sgRNA- | CAGTC | | | |
| | 2 | C | | | |
| PLV5522 | pU6- | GTGGC | 23900 | GCTATAGTTCCTTACTGAAAGGTAAGTTGCTATAGTAAGGGCAACAGACCCGAGG | 24019 |
| | Blat- | CCCAG | | CGTTGGGGATCGCCTAGCCCGTGTTTACGGGCTCTCCCCATATTCAAAATAATGA | |
| | AIAT- | CAGCT | | CAGACGAGCACCTTGGAGCATTTATCTCCGAGGTGCT | |
| | sgRNA- | TCAGT | | | |
| | 2G | CC | | | |
| PLV5523 | pU6- | CCGTG | 23901 | GCTATAGTTCCTTACTGAAAGGTAAGTTGCTATAGTAAGGGCAACAGACCCGAGG | 24020 |
| | Blat- | CATAA | | CGTTGGGGATCGCCTAGCCCGTGTTTACGGGCTCTCCCCATATTCAAAATAATGA | |
| | A1AT- | GGCTG | | CAGACGAGCACCTTGGAGCATTTATCTCCGAGGTGCT | |
| | sgRNA- | TGCTG | | | |
| | 3 | A | | | |
| PLV5524 | pU6- | GCCGT | 23902 | GCTATAGTTCCTTACTGAAAGGTAAGTTGCTATAGTAAGGGCAACAGACCCGAGG | 24021 |
| | Blat- | GCATA | | CGTTGGGGATCGCCTAGCCCGTGTTTACGGGCTCTCCCCATATTCAAAATAATGA | |
| | A1AT- | AGGCT | | CAGACGAGCACCTTGGAGCATTTATCTCCGAGGTGCT | |
| | sgRNA- | GTGCT | | | |
| | 3G | GA | | | |
| PLV5525 | pU6- | AGGCC | 23903 | GCTATAGTTCCTTACTGAAAGGTAAGTTGCTATAGTAAGGGCAACAGACCCGAGG | 24022 |
| | Blat- | GTGCA | | CGTTGGGGATCGCCTAGCCCGTGTTTACGGGCTCTCCCCATATTCAAAATAATGA | |
| | A1AT- | TAAGG | | CAGACGAGCACCTTGGAGCATTTATCTCCGAGGTGCT | |
| | sgRNA- | CTGTG | | | |
| | 4 | C | | | |
| PLV5526 | pU6- | GAGGC | 23904 | GCTATAGTTCCTTACTGAAAGGTAAGTTGCTATAGTAAGGGCAACAGACCCGAGG | 24023 |
| | Blat- | CGTGC | | CGTTGGGGATCGCCTAGCCCGTGTTTACGGGCTCTCCCCATATTCAAAATAATGA | |
| | A1AT- | ATAAG | | CAGACGAGCACCTTGGAGCATTTATCTCCGAGGTGCT | |
| | sgRNA- | GCTGT | | | |
| | 4G | GC | | | |
| PLV5527 | pU6- | AAAAC | 23905 | GCTATAGTTCCTTACTGAAAGGTAAGTTGCTATAGTAAGGGCAACAGACCCGAGG | 24024 |
| | Blat- | ATGGC | | CGTTGGGGATCGCCTAGCCCGTGTTTACGGGCTCTCCCCATATTCAAAATAATGA | |
| | A1AT- | CCCAG | | CAGACGAGCACCTTGGAGCATTTATCTCCGAGGTGCT | |
| | sgRNA- | CAGCT | | | |
| | 5 | T | | | |
| PLV5528 | pU6- | GAAAA | 23906 | GCTATAGTTCCTTACTGAAAGGTAAGTTGCTATAGTAAGGGCAACAGACCCGAGG | 24025 |
| | Blat- | CATGG | | CGTTGGGGATCGCCTAGCCCGTGTTTACGGGCTCTCCCCATATTCAAAATAATGA | |
| | A1AT- | CCCCA | | CAGACGAGCACCTTGGAGCATTTATCTCCGAGGTGCT | |
| | sgRNA- | GCAGC | | | |
| | 5G | TT | | | |
| PLV5529 | pU6- | GGGGG | 23907 | GCTATAGTTCCTTACTGAAAGGTAAGTTGCTATAGTAAGGGCAACAGACCCGAGG | 24026 |
| | Blat- | GATAG | | CGTTGGGGATCGCCTAGCCCGTGTTTACGGGCTCTCCCCATATTCAAAATAATGA | |
| | A1AT- | ACATG | | CAGACGAGCACCTTGGAGCATTTATCTCCGAGGTGCT | |
| | sgRNA- | GGTAT | | | |
| | 6 | G | | | |
| PLV5530 | pU6- | TGAAC | 23908 | GCTATAGTTCCTTACTGAAAGGTAAGTTGCTATAGTAAGGGCAACAGACCCGAGG | 24027 |
| | Blat- | TTGAC | | CGTTGGGGATCGCCTAGCCCGTGTTTACGGGCTCTCCCCATATTCAAAATAATGA | |
| | A1AT- | CTCGG | | CAGACGAGCACCTTGGAGCATTTATCTCCGAGGTGCT | |
| | sgRNA- | GGGGG | | | |
| | 7 | A | | | |
| PLV5531 | pU6- | GTGAA | 23909 | GCTATAGTTCCTTACTGAAAGGTAAGTTGCTATAGTAAGGGCAACAGACCCGAGG | 24028 |
| | Blat- | CTTGA | | CGTTGGGGATCGCCTAGCCCGTGTTTACGGGCTCTCCCCATATTCAAAATAATGA | |
| | A1AT- | CCTCG | | CAGACGAGCACCTTGGAGCATTTATCTCCGAGGTGCT | |
| | sgRNA- | GGGGG | | | |
| | 7G | GA | | | |
| PLV5532 | pU6- | TCGAG | 23910 | GCTATAGTTCCTTACTGAAAGGTAAGTTGCTATAGTAAGGGCAACAGACCCGAGG | 24029 |
| | Blat- | GCCTG | | CGTTGGGGATCGCCTAGCCCGTGTTTACGGGCTCTCCCCATATTCAAAATAATGA | |
| | A1AT- | GGATC | | CAGACGAGCACCTTGGAGCATTTATCTCCGAGGTGCT | |
| | sgRNA- | AGCCT | | | |
| | 8 | T | | | |
| PLV5533 | pU6- | GTCGA | 23911 | GCTATAGTTCCTTACTGAAAGGTAAGTTGCTATAGTAAGGGCAACAGACCCGAGG | 24030 |
| | Blat- | GGCCT | | CGTTGGGGATCGCCTAGCCCGTGTTTACGGGCTCTCCCCATATTCAAAATAATGA | |
| | A1AT- | GGGAT | | CAGACGAGCACCTTGGAGCATTTATCTCCGAGGTGCT | |
| | sgRNA- | CAGCC | | | |
| | 8G | TT | | | |
| PLV5534 | pU6- | ACAAA | 23912 | GCTATAGTTCCTTACTGAAAGGTAAGTTGCTATAGTAAGGGCAACAGACCCGAGG | 24031 |
| | Blat- | GGGTT | | CGTTGGGGATCGCCTAGCCCGTGTTTACGGGCTCTCCCCATATTCAAAATAATGA | |
| | A1AT- | TGTTG | | CAGACGAGCACCTTGGAGCATTTATCTCCGAGGTGCT | |
| | sgRNA- | AACTT | | | |
| | 9 | G | | | |
| PLV5535 | pU6- | GACAA | 23913 | GCTATAGTTCCTTACTGAAAGGTAAGTTGCTATAGTAAGGGCAACAGACCCGAGG | 24032 |
| | Blat- | AGGGT | | CGTTGGGGATCGCCTAGCCCGTGTTTACGGGCTCTCCCCATATTCAAAATAATGA | |
| | A1AT- | TTGTT | | CAGACGAGCACCTTGGAGCATTTATCTCCGAGGTGCT | |
| | sgRNA- | GAACT | | | |
| | 9G | TG | | | |
| PLV5536 | pU6- | GCCTT | 23914 | GCTATAGTTCCTTACTGAAAGGTAAGTTGCTATAGTAAGGGCAACAGACCCGAGG | 24033 |
| | Blat- | GCTCG | | CGTTGGGGATCGCCTAGCCCGTGTTTACGGGCTCTCCCCATATTCAAAATAATGA | |
| | A1AT- | AGGCC | | CAGACGAGCACCTTGGAGCATTTATCTCCGAGGTGCT | |
| | sgRNA- | TGGGA | | | |
| | 10 | T | | | |
| PLV5547 | pU6- | AAAGG | 23915 | GTTGTAGCTCCCTTTTTCATTTCGCGAAAGCGAAATGAAAAACGTTGTTACAATA | 24034 |
| | Ppn- | GACTG | | AGAGATGAATTTCTCGCAAAGCTCTGCCTCTTGAAATTTCGGTTTCAAGAGGCAT | |
| | A1AT- | AAGCT | | C | |
| | sgRNA- | GCTGG | | | |
| | 1 | GG | | | |
| PLV5548 | pU6- | GAAAG | 23916 | GTTGTAGCTCCCTTTTTCATTTCGCGAAAGCGAAATGAAAAACGTTGTTACAATA | 24035 |
| | Ppn- | GGACT | | AGAGATGAATTTCTCGCAAAGCTCTGCCTCTTGAAATTTCGGTTTCAAGAGGCAT | |
| | A1AT- | GAAGC | | C | |
| | sgRNA- | TGCTG | | | |
| | 1G | GGG | | | |
| PLV5549 | pU6- | CCTGG | 23917 | GTTGTAGCTCCCTTTTTCATTTCGCGAAAGCGAAATGAAAAACGTTGTTACAATA | 24036 |
| | Ppn- | AGGGG | | AGAGATGAATTTCTCGCAAAGCTCTGCCTCTTGAAATTTCGGTTTCAAGAGGCAT | |
| | A1AT- | AGAGA | | C | |
| | sgRNA- | AGCAG | | | |
| | 2 | AG | | | |
| PLV5550 | pU6- | GCCTG | 23918 | GTTGTAGCTCCCTTTTTCATTTCGCGAAAGCGAAATGAAAAACGTTGTTACAATA | 24037 |
| | Ppn- | GAGGG | | AGAGATGAATTTCTCGCAAAGCTCTGCCTCTTGAAATTTCGGTTTCAAGAGGCAT | |
| | A1AT- | GAGAG | | C | |
| | sgRNA- | AAGCA | | | |
| | 2G | GAG | | | |
| PLV5551 | pU6- | CCCAT | 23919 | GTTGTAGCTCCCTTTTTCATTTCGCGAAAGCGAAATGAAAAACGTTGTTACAATA | 24038 |
| | Ppn- | GTCTA | | AGAGATGAATTTCTCGCAAAGCTCTGCCTCTTGAAATTTCGGTTTCAAGAGGCAT | |
| | A1AT- | TCCCC | | C | |
| | sgRNA- | CCCGA | | | |
| | 3 | GG | | | |
| PLV5552 | pU6- | GCCCA | 23920 | GTTGTAGCTCCCTTTTTCATTTCGCGAAAGCGAAATGAAAAACGTTGTTACAATA | 24039 |
| | Ppn- | TGTCT | | AGAGATGAATTTCTCGCAAAGCTCTGCCTCTTGAAATTTCGGTTTCAAGAGGCAT | |
| | A1AT- | ATCCC | | C | |
| | sgRNA- | CCCCG | | | |
| | 3G | AGG | | | |
| PLV5553 | pU6- | TCAAT | 23921 | GTTGTAGCTCCCTTTTTCATTTCGCGAAAGCGAAATGAAAAACGTTGTTACAATA | 24040 |
| | Ppn- | CATTA | | AGAGATGAATTTCTCGCAAAGCTCTGCCTCTTGAAATTTCGGTTTCAAGAGGCAT | |
| | A1AT- | AGAAG | | C | |
| | sgRNA- | ACAAA | | | |
| | 4 | GG | | | |
| PLV5554 | pU6- | GTCAA | 23922 | GTTGTAGCTCCCTTTTTCATTTCGCGAAAGCGAAATGAAAAACGTTGTTACAATA | 24041 |
| | Ppn- | TCATT | | AGAGATGAATTTCTCGCAAAGCTCTGCCTCTTGAAATTTCGGTTTCAAGAGGCAT | |
| | A1AT- | AAGAA | | C | |
| | sgRNA- | GACAA | | | |
| | 4G | AGG | | | |
| PLV5555 | pU6- | TTGTTC | 23923 | GTTGTAGCTCCCTTTTTCATTTCGCGAAAGCGAAATGAAAAACGTTGTTACAATA | 24042 |
| | Ppn- | AATCA | | AGAGATGAATTTCTCGCAAAGCTCTGCCTCTTGAAATTTCGGTTTCAAGAGGCAT | |
| | A1AT- | TTAAG | | C | |
| | sgRNA- | AAGAC | | | |
| | 5 | A | | | |
| PLV5556 | pU6- | GTTGT | 23924 | GTTGTAGCTCCCTTTTTCATTTCGCGAAAGCGAAATGAAAAACGTTGTTACAATA | 24043 |
| | Ppn- | TCAAT | | AGAGATGAATTTCTCGCAAAGCTCTGCCTCTTGAAATTTCGGTTTCAAGAGGCAT | |
| | A1AT- | CATTA | | C | |
| | sgRNA- | AGAAG | | | |
| | 5G | ACA | | | |
| PLV5557 | pU6- | TCAAC | 23925 | GTTGTAGCTCCCTTTTTCATTTCGCGAAAGCGAAATGAAAAACGTTGTTACAATA | 24044 |
| | Ppn- | AAACC | | AGAGATGAATTTCTCGCAAAGCTCTGCCTCTTGAAATTTCGGTTTCAAGAGGCAT | |
| | A1AT- | CTTTGT | | C | |
| | sgRNA- | CTTCTT | | | |
| | 6 | | | | |
| PLV5558 | pU6- | GTCAA | 23926 | GTTGTAGCTCCCTTTTTCATTTCGCGAAAGCGAAATGAAAAACGTTGTTACAATA | 24045 |
| | Ppn- | CAAAC | | AGAGATGAATTTCTCGCAAAGCTCTGCCTCTTGAAATTTCGGTTTCAAGAGGCAT | |
| | A1AT- | CCTTT | | C | |
| | sgRNA- | GTCTT | | | |
| | 6G | CTT | | | |
| PLV5559 | pU6- | GGGGA | 23927 | GTTGTAGCTCCCTTTTTCATTTCGCGAAAGCGAAATGAAAAACGTTGTTACAATA | 24046 |
| | Ppn- | GACTT | | AGAGATGAATTTCTCGCAAAGCTCTGCCTCTTGAAATTTCGGTTTCAAGAGGCAT | |
| | A1AT- | GGTAT | | C | |
| | sgRNA- | TTTGTT | | | |
| | 7 | C | | | |
| PLV5560 | pU6- | CATGA | 23928 | GTTGTAGCTCCCTTTTTCATTTCGCGAAAGCGAAATGAAAAACGTTGTTACAATA | 24047 |
| | Ppn- | AGAGG | | AGAGATGAATTTCTCGCAAAGCTCTGCCTCTTGAAATTTCGGTTTCAAGAGGCAT | |
| | A1AT- | GGAGA | | C | |
| | sgRNA- | CTTGG | | | |
| | 8 | TA | | | |
| PLV5561 | pU6- | GCATG | 23929 | GTTGTAGCTCCCTTTTTCATTTCGCGAAAGCGAAATGAAAAACGTTGTTACAATA | 24048 |
| | Ppn- | AAGAG | | AGAGATGAATTTCTCGCAAAGCTCTGCCTCTTGAAATTTCGGTTTCAAGAGGCAT | |
| | A1AT- | GGGAG | | C | |
| | sgRNA- | ACTTG | | | |
| | 8G | GTA | | | |
| PLV5562 | pU6- | TTTCCC | 23930 | GTTGTAGCTCCCTTTTTCATTTCGCGAAAGCGAAATGAAAAACGTTGTTACAATA | 24049 |
| | Ppn- | ATGAA | | AGAGATGAATTTCTCGCAAAGCTCTGCCTCTTGAAATTTCGGTTTCAAGAGGCAT | |
| | A1AT- | GAGGG | | C | |
| | sgRNA- | GAGAC | | | |
| | 9 | T | | | |
| PLV5563 | pU6- | GTTTC | 23931 | GTTGTAGCTCCCTTTTTCATTTCGCGAAAGCGAAATGAAAAACGTTGTTACAATA | 24050 |
| | Ppn- | CCATG | | AGAGATGAATTTCTCGCAAAGCTCTGCCTCTTGAAATTTCGGTTTCAAGAGGCAT | |
| | A1AT- | AAGAG | | C | |
| | sgRNA- | GGGAG | | | |
| | 9G | ACT | | | |
| PLV5632 | pU6- | AAGGC | 23932 | GTCTTTGTACTCTGGTACCAGAAGCTACAAAGATAAGGCTTCATGCCGAAATCAA | 24051 |
| | St1- | TGTGC | | CACCCTGTCATTTTATGGCAGGGTGTTTT | |
| | A1AT- | TGACC | | | |
| | sgRNA- | ATCGA | | | |
| | 1 | | | | |
| PLV5633 | pU6- | GAAGG | 23933 | GTCTTTGTACTCTGGTACCAGAAGCTACAAAGATAAGGCTTCATGCCGAAATCAA | 24052 |
| | St1- | CTGTG | | CACCCTGTCATTTTATGGCAGGGTGTTTT | |
| | A1AT- | CTGAC | | | |
| | sgRNA- | CATCG | | | |
| | 1G | A | | | |
| PLV5634 | pU6- | AAGGC | 23934 | GTCTTTGTACTCTGGTACCAGAAGCTACAAAGATAAGGCTTCATGCCGAAATCAA | 24053 |
| | St1- | TCACG | | CACCCTGTCATTTTATGGCAGGGTGTTTT | |
| | A1AT- | TGGAC | | | |
| | sgRNA- | ACCTC | | | |
| | 2 | | | | |
| PLV5635 | pU6- | GAAGG | 23935 | GTCTTTGTACTCTGGTACCAGAAGCTACAAAGATAAGGCTTCATGCCGAAATCAA | 24054 |
| | St1- | CTCAC | | CACCCTGTCATTTTATGGCAGGGTGTTTT | |
| | A1AT- | GTGGA | | | |
| | sgRNA- | CACCT | | | |
| | 2G | C | | | |
| PLV5636 | pU6- | TACCA | 23936 | GTCTTTGTACTCTGGTACCAGAAGCTACAAAGATAAGGCTTCATGCCGAAATCAA | 24055 |
| | St1- | AGTCT | | CACCCTGTCATTTTATGGCAGGGTGTTTT | |
| | A1AT- | CCCCT | | | |
| | sgRNA- | CTTCA | | | |
| | 3 | | | | |
| PLV5637 | pU6- | GTACC | 23937 | GTCTTTGTACTCTGGTACCAGAAGCTACAAAGATAAGGCTTCATGCCGAAATCAA | 24056 |
| | St1- | AAGTC | | CACCCTGTCATTTTATGGCAGGGTGTTTT | |
| | A1AT- | TCCCC | | | |
| | sgRNA- | TCTTC | | | |
| | 3G | A | | | |

TABLE XX
Selected Cas Spacer Combination

| Cas | | SEQ ID |
|---|---|---|
| Variant | Spacer | NO |
| SpRY | CTGTGCTGACCATCGACAAG | 24057 |
| SpRY | GCTGTGCTGACCATCGACAAG | 24058 |
| SpRY | GGCTGTGCTGACCATCGACA | 24059 |
| SpRY | AGGCTGTGCTGACCATCGAC | 24060 |
| ScaCas9 | AGGCTGTGCTGACCATCGAC | 24061 |
| SpCas9 | CCAGGCCGTGCATAAGGCTG | 24062 |
| SpRY | AGGCCGTGCATAAGGCTGTG | 24063 |
| SpCas9 | AGGCCGTGCATAAGGCTGTG | 24064 |
| Nme2 | GTAAAAACATGGCCCCAGCAGCTT | 24065 |
| Nme2 | GTCCAGGCCGTGCATAAGGCTGTG | 24066 |
| St1 | AAGGCTGTGCTGACCATCGA | 24067 |
| St1 | GAAGGCTGTGCTGACCATCGA | 24068 |

### Example 10. Screening of Cas9 Variant and Spacer Combinations for High Rewrite Activity

[0889] This example describes the use of an exemplary gene modifying system containing a gene modifying polypeptide and exemplary template RNAs comprising varied lengths of heterologous object sequences and PBS sequences to quantify the activity of template RNAs for correction of the PiZ mutation. In this example, a template RNA contains:
[0890] (1) a gRNA spacer;
[0891] (2) a gRNA scaffold;
[0892] (3) a heterologous object sequence; and
[0893] (4) a primer binding site (PBS) sequence.

[0894] The exemplary gene modifying polypeptides used are described in Example 9 above. The 11 Cas9/spacer combinations that were identified in Example 9 to have high spacer activity (indels) were then used to screen for template RNAs having rewriting activity in combination with exemplary gene modifying polypeptides comprising matched Cas9 domains. The heterologous object sequences and PBS sequences were designed to correct the AATD PiZ mutation in a landing pad by replacing a “T” nucleotide with a “C” nucleotide at the mutation site via gene editing, to reverse a PiZ mutation in the corresponding protein. Sequences of the exemplary template RNAs tested are shown in Table X3.

[0895] A gene modifying system comprising a (i) compatible gene modifying polypeptide described comprising: an NLS as described in Example 9, a compatible nickase Cas9 having a sequence of Table X1 (e.g., SpyCas9-SpRY), a linker as described in Example 9, an RT sequence as described in Example 9 (e.g., PLV4931), and a second NLS as described in Example 9 and (ii) a template RNA from Table X3 was transfected into the HEK293T landing pad cell line. The gene modifying polypeptide and the sgRNAs were delivered by transfection in RNA format. Specifically, 75 ng of gene modifying polypeptide mRNA was combined with 1 pmol of template RNA. This combination of RNAs was then mixed with 0.5 uL of Lipofectamine MessengerMax, in 10 uL of OptiMEM solution, and added to 20,000 cells. After transfection, cells were grown at 37° C., 5% CO₂ for 3 days prior to cell lysis and genomic DNA extraction. To analyze gene editing activity, primers flanking the A1 AT PiZ mutation site were used to amplify across the locus. Amplicons were analyzed via short read sequencing using an Illumina MiSeq.

[0896] The gene modifying systems comprising combinations of gene modifying polypeptides and template RNAs, wherein the gene modifying polypeptides comprised Cas9 domains matched to the template RNA spacers from Example 9, were tested for rewriting activity. The various template RNAs tested comprised different PBS and RT template lengths (FIG. 16). The results showed that, of the combinations examined, 5 combinations of Cas9 variants and spacers, demonstrated rewriting activity above a target threshold of 2% (FIG. 16 and Table X5).

TABLE X5
Cas9 Variant and Spacer Pairs

| Cas9 variant | Spacer |
|---|---|
| pU6_A1AT_SpRY_ED0-_ (having a | CTGTGCTGACCATCGACAAG |
| Cas9 variant amino acid | (SEQ ID NO: 17087) |
| sequence according to SEQ ID | |
| NO: 23813) | |
| pU6_A1AT_SpRY_ED2- (having a | GGCTGTGCTGACCATCGACA |
| Cas9 variant amino acid | (SEQ ID NO: 17108) |
| sequence according to SEQ ID | |
| NO: 23813) | |
| pU6_A1AT_SpRY_ED3- (having a | AGGCTGTGCTGACCATCGAC |
| Cas9 variant amino acid | (SEQ ID NO: 17120) |
| sequence according to SEQ ID | |
| NO: 23813) | |
| pU6_A1AT_SpRY_ED15- (having | AGGCCGTGCATAAGGCTGTG |
| a Cas9 variant amino acid | (SEQ ID NO: 17220) |
| sequence according to SEQ ID | |
| NO: 23813) | |
| pU6_A1AT_St1_ED4- (having a | GAAGGCTGTGCTGACCATCG |
| Cas9 variant amino acid | A |
| sequence according to SEQ ID | (SEQ ID NO: 20065) |
| NO: 23817) | |

[0897] FIG. 17A-17B show heat maps graphing the % rewriting of gene modifying systems comprising various SpRY EDO template RNAs (varying PBS and RT lengths) and an exemplary SpRY Cas9-containing gene modifying polypeptide (FIG. 17A) and gene modifying systems comprising various St1_ED4 template RNAs (varying PBS and RT lengths) and an exemplary St1Cas9-containing gene modifying polypeptide (FIG. 17B). The results identify several optimal RT lengths (e.g., 6, 8, 10, 12, and 15 nucleotides) and PBS lengths (8 10, 11, and 12 nucleotides) and combinations thereof for SpRY EDO template RNAs. The results identified several optimal RT lengths (e.g., 8, 14, and 16 nucleotides) and PBS lengths (8, 9, 10, 11, and 12 nucleotides) and combinations thereof for St1_ED4 template RNAs. For SpRY Cas9 and SpRY EDO spacer, the best performing template RNA showed 10.3% perfect rewriting and comprised an RT length of 6 nucleotides and a PBS length of 8 nucleotides. For St1Cas9 and St1_ED4 spacer, the best performing RT length was 8 nucleotides and PBS length 9 nucleotides. The rewriting activities of the top-performing 17 combinations of template RNAs and gene modifying polypeptides comprising Cas9 variants (as ranked by rewriting activity) were graphed in FIG. 18. The results further demonstrate that the tested gene modifying systems show rewriting activity at the target PiZ mutation site, and that rewriting levels are generally higher than indel levels. Exemplary gene modifying systems comprising a SpRYCas9 gene modifying polypeptide with SpRY_ED0_PBS8_RT6 template RNA performed best with 10.3% rewriting and less than 4% indels.

TABLE X3
Exemplary Template RNAs for Correcting PiZ Mutation

| | tgRNA | | SEQ |
|---|---|---|---|
| ID | Name | tgRNA_seq_IDT_formatted | ID NO |
| 0 | A1AT_SpRY_ | mC*mU*mG*rUrGrCrUrGrArCrCrArUrCrGrArCrArArGrGrUrUrUrUrArGrArGrCrUrArGrArArArUrArGrCrArArGrUrUrA | 24069 |
| | ED0-_ | rArArArUrArArGrGrCrUrArGrUrCrCrGrUrUrArUrCrArArCrUrUrGrArArArArArGrUrGrGrCrArCrCrGrArGrUrCrGrGrUr | |
| | G_30FE_ | GrCrArCrArUrGrGrCrCrCrCrArGrCrArGrCrUrUrCrArGrUrCrCrCrUrUrUrCrUrCrGrUrCrGrArUrGrGrUrCrArGrCrA*mC* | |
| | PB17 | mA*mG | |
| 1 | A1AT_SpRY_ | mC*mU*mG*rUrGrCrUrGrArCrCrArUrCrGrArCrArArGrGrUrUrUrUrArGrArGrCrUrArGrArArArUrArGrCrArArGrUrUrA | 24070 |
| | ED0-_ | rArArArUrArArGrGrCrUrArGrUrCrCrGrUrUrArUrCrArArCrUrUrGrArArArArArGrUrGrGrCrArCrCrGrArGrUrCrGrGrUr | |
| | G_30FE_ | GrCrArCrArUrGrGrCrCrCrCrArGrCrArGrCrUrUrCrArGrUrCrCrCrUrUrUrCrUrCrGrUrCrGrArUrGrGrUrCrArGrC*mA* | |
| | PB16 | mC*mA | |
| 2 | A1AT_SpRY_ | mC*mU*mG*rUrGrCrUrGrArCrCrArUrCrGrArCrArArGrGrUrUrUrUrArGrArGrCrUrArGrArArArUrArGrCrArArGrUrUrA | 24071 |
| | ED0-_ | rArArArUrArArGrGrCrUrArGrUrCrCrGrUrUrArUrCrArArCrUrUrGrArArArArArGrUrGrGrCrArCrCrGrArGrUrCrGrGrUr | |
| | G_30FE_ | GrCrArCrArUrGrGrCrCrCrCrArGrCrArGrCrUrUrCrArGrUrCrCrCrUrUrUrCrUrCrGrUrCrGrArUrGrGrUrCrArG*mC*mA* | |
| | PB15 | mC | |
| 3 | A1AT_SpRY_ | mC*mU*mG*rUrGrCrUrGrArCrCrArUrCrGrArCrArArGrGrUrUrUrUrArGrArGrCrUrArGrArArArUrArGrCrArArGrUrUrA | 24072 |
| | ED0-_ | rArArArUrArArGrGrCrUrArGrUrCrCrGrUrUrArUrCrArArCrUrUrGrArArArArArGrUrGrGrCrArCrCrGrArGrUrCrGrGrUr | |
| | G_30FE_ | GrCrArCrArUrGrGrCrCrCrCrArGrCrArGrCrUrUrCrArGrUrCrCrCrUrUrUrCrUrCrGrUrCrGrArUrGrGrUrCrA*mG*mC* | |
| | PB14 | mA | |
| 4 | A1AT_SpRY_ | mC*mU*mG*rUrGrCrUrGrArCrCrArUrCrGrArCrArArGrGrUrUrUrUrArGrArGrCrUrArGrArArArUrArGrCrArArGrUrUrA | 24073 |
| | ED0-_ | rArArArUrArArGrGrCrUrArGrUrCrCrGrUrUrArUrCrArArCrUrUrGrArArArArArGrUrGrGrCrArCrCrGrArGrUrCrGrGrUr | |
| | G_30FE_ | GrCrArCrArUrGrGrCrCrCrCrArGrCrArGrCrUrUrCrArGrUrCrCrCrUrUrUrCrUrCrGrUrCrGrArUrGrGrUrC*mA*mG*mC | |
| | PB13 | | |
| 5 | A1AT_SpRY_ | mC*mU*mG*rUrGrCrUrGrArCrCrArUrCrGrArCrArArGrGrUrUrUrUrArGrArGrCrUrArGrArArArUrArGrCrArArGrUrUrA | 24074 |
| | ED0-_ | rArArArUrArArGrGrCrUrArGrUrCrCrGrUrUrArUrCrArArCrUrUrGrArArArArArGrUrGrGrCrArCrCrGrArGrUrCrGrGrUr | |
| | G_30FE_ | GrCrArCrArUrGrGrCrCrCrCrArGrCrArGrCrUrUrCrArGrUrCrCrCrUrUrUrCrUrCrGrUrCrGrArUrGrGrU*mC*mA*mG | |
| | PB12 | | |
| 6 | A1AT_SpRY_ | mC*mU*mG*rUrGrCrUrGrArCrCrArUrCrGrArCrArArGrGrUrUrUrUrArGrArGrCrUrArGrArArArUrArGrCrArArGrUrUrA | 24075 |
| | ED0-_ | rArArArUrArArGrGrCrUrArGrUrCrCrGrUrUrArUrCrArArCrUrUrGrArArArArArGrUrGrGrCrArCrCrGrArGrUrCrGrGrUr | |
| | G_30FE_ | GrCrArCrArUrGrGrCrCrCrCrArGrCrArGrCrUrUrCrArGrUrCrCrCrUrUrUrCrUrCrGrUrCrGrArUrGrG*mU*mC*mA | |
| | PB11 | | |
| 7 | A1AT_SpRY_ | mC*mU*mG*rUrGrCrUrGrArCrCrArUrCrGrArCrArArGrGrUrUrUrUrArGrArGrCrUrArGrArArArUrArGrCrArArGrUrUrA | 24076 |
| | ED0-_ | rArArArUrArArGrGrCrUrArGrUrCrCrGrUrUrArUrCrArArCrUrUrGrArArArArArGrUrGrGrCrArCrCrGrArGrUrCrGrGrUr | |
| | G_30FE_ | GrCrArCrArUrGrGrCrCrCrCrArGrCrArGrCrUrUrCrArGrUrCrCrCrUrUrUrCrUrCrGrUrCrGrArUrG*mG*mU*mC | |
| | PB10 | | |
| 8 | A1AT_SpRY_ | mC*mU*mG*rUrGrCrUrGrArCrCrArUrCrGrArCrArArGrGrUrUrUrUrArGrArGrCrUrArGrArArArUrArGrCrArArGrUrUrA | 24077 |
| | ED0-_ | rArArArUrArArGrGrCrUrArGrUrCrCrGrUrUrArUrCrArArCrUrUrGrArArArArArGrUrGrGrCrArCrCrGrArGrUrCrGrGrUr | |
| | G_30FE_ | GrCrArCrArUrGrGrCrCrCrCrArGrCrArGrCrUrUrCrArGrUrCrCrCrUrUrUrCrUrCrGrUrCrGrArU*mG*mG*mU | |
| | PB9 | | |
| 9 | A1AT_SpRY_ | mC*mU*mG*rUrGrCrUrGrArCrCrArUrCrGrArCrArArGrGrUrUrUrUrArGrArGrCrUrArGrArArArUrArGrCrArArGrUrUrA | 24078 |
| | ED0-_ | rArArArUrArArGrGrCrUrArGrUrCrCrGrUrUrArUrCrArArCrUrUrGrArArArArArGrUrGrGrCrArCrCrGrArGrUrCrGrGrUr | |
| | G_30FE_ | GrCrArCrArUrGrGrCrCrCrCrArGrCrArGrCrUrUrCrArGrUrCrCrCrUrUrUrCrUrCrGrUrCrGrA*mU*mG*mG | |
| | PB8 | | |
| 10 | A1AT_SpRY_ | mC*mU*mG*rUrGrCrUrGrArCrCrArUrCrGrArCrArArGrGrUrUrUrUrArGrArGrCrUrArGrArArArUrArGrCrArArGrUrUrA | 24079 |
| | ED0-_ | rArArArUrArArGrGrCrUrArGrUrCrCrGrUrUrArUrCrArArCrUrUrGrArArArArArGrUrGrGrCrArCrCrGrArGrUrCrGrGrUr | |
| | G_25FE_ | GrCrGrCrCrCrCrArGrCrArGrCrUrUrCrArGrUrCrCrCrUrUrUrCrUrCrGrUrCrGrArUrGrGrUrCrArGrCrA*mC*mA*mG | |
| | PB17 | | |
| 11 | A1AT_SpRY_ | mC*mU*mG*rUrGrCrUrGrArCrCrArUrCrGrArCrArArGrGrUrUrUrUrArGrArGrCrUrArGrArArArUrArGrCrArArGrUrUrA | 24080 |
| | ED0-_ | rArArArUrArArGrGrCrUrArGrUrCrCrGrUrUrArUrCrArArCrUrUrGrArArArArArGrUrGrGrCrArCrCrGrArGrUrCrGrGrUr | |
| | G_25FE_ | GrCrGrCrCrCrCrArGrCrArGrCrUrUrCrArGrUrCrCrCrUrUrUrCrUrCrGrUrCrGrArUrGrGrUrCrArGrC*mA*mC*mA | |
| | PB16 | | |
| 12 | A1AT_SpRY_ | mC*mU*mG*rUrGrCrUrGrArCrCrArUrCrGrArCrArArGrGrUrUrUrUrArGrArGrCrUrArGrArArArUrArGrCrArArGrUrUrA | 24081 |
| | ED0-_ | rArArArUrArArGrGrCrUrArGrUrCrCrGrUrUrArUrCrArArCrUrUrGrArArArArArGrUrGrGrCrArCrCrGrArGrUrCrGrGrUr | |
| | G_25FE_ | GrCrGrCrCrCrCrArGrCrArGrCrUrUrCrArGrUrCrCrCrUrUrUrCrUrCrGrUrCrGrArUrGrGrUrCrArG*mC*mA*mC | |
| | PB15 | | |
| 13 | A1AT_SpRY_ | mC*mU*mG*rUrGrCrUrGrArCrCrArUrCrGrArCrArArGrGrUrUrUrUrArGrArGrCrUrArGrArArArUrArGrCrArArGrUrUrA | 24082 |
| | ED0-_ | rArArArUrArArGrGrCrUrArGrUrCrCrGrUrUrArUrCrArArCrUrUrGrArArArArArGrUrGrGrCrArCrCrGrArGrUrCrGrGrUr | |
| | G_25FE_ | GrCrGrCrCrCrCrArGrCrArGrCrUrUrCrArGrUrCrCrCrUrUrUrCrUrCrGrUrCrGrArUrGrGrUrCrA*mG*mC*mA | |
| | PB14 | | |
| 14 | A1AT_SpRY_ | mC*mU*mG*rUrGrCrUrGrArCrCrArUrCrGrArCrArArGrGrUrUrUrUrArGrArGrCrUrArGrArArArUrArGrCrArArGrUrUrA | 24083 |
| | ED0-_ | rArArArUrArArGrGrCrUrArGrUrCrCrGrUrUrArUrCrArArCrUrUrGrArArArArArGrUrGrGrCrArCrCrGrArGrUrCrGrGrUr | |
| | G_25FE_ | GrCrGrCrCrCrCrArGrCrArGrCrUrUrCrArGrUrCrCrCrUrUrUrCrUrCrGrUrCrGrArUrGrGrUrC*mA*mG*mC | |
| | PB13 | | |
| 15 | A1AT_SpRY_ | mC*mU*mG*rUrGrCrUrGrArCrCrArUrCrGrArCrArArGrGrUrUrUrUrArGrArGrCrUrArGrArArArUrArGrCrArArGrUrUrA | 24084 |
| | ED0-_ | rArArArUrArArGrGrCrUrArGrUrCrCrGrUrUrArUrCrArArCrUrUrGrArArArArArGrUrGrGrCrArCrCrGrArGrUrCrGrGrUr | |
| | G_25FE_ | GrCrGrCrCrCrCrArGrCrArGrCrUrUrCrArGrUrCrCrCrUrUrUrCrUrCrGrUrCrGrArUrGrGrU*mC*mA*mG | |
| | PB12 | | |
| 16 | A1AT_SpRY_ | mC*mU*mG*rUrGrCrUrGrArCrCrArUrCrGrArCrArArGrGrUrUrUrUrArGrArGrCrUrArGrArArArUrArGrCrArArGrUrUrA | 24085 |
| | ED0-_ | rArArArUrArArGrGrCrUrArGrUrCrCrGrUrUrArUrCrArArCrUrUrGrArArArArArGrUrGrGrCrArCrCrGrArGrUrCrGrGrUr | |
| | G_25FE_ | GrCrGrCrCrCrCrArGrCrArGrCrUrUrCrArGrUrCrCrCrUrUrUrCrUrCrGrUrCrGrArUrGrG*mU*mC*mA | |
| | PB11 | | |
| 17 | A1AT_SpRY_ | mC*mU*mG*rUrGrCrUrGrArCrCrArUrCrGrArCrArArGrGrUrUrUrUrArGrArGrCrUrArGrArArArUrArGrCrArArGrUrUrA | 24086 |
| | ED0-_ | rArArArUrArArGrGrCrUrArGrUrCrCrGrUrUrArUrCrArArCrUrUrGrArArArArArGrUrGrGrCrArCrCrGrArGrUrCrGrGrUr | |
| | G_25FE_ | GrCrGrCrCrCrCrArGrCrArGrCrUrUrCrArGrUrCrCrCrUrUrUrCrUrCrGrUrCrGrArUrG*mG*mU*mC | |
| | PB10 | | |
| 18 | A1AT_SpRY_ | mC*mU*mG*rUrGrCrUrGrArCrCrArUrCrGrArCrArArGrGrUrUrUrUrArGrArGrCrUrArGrArArArUrArGrCrArArGrUrUrA | 24087 |
| | ED0-_ | rArArArUrArArGrGrCrUrArGrUrCrCrGrUrUrArUrCrArArCrUrUrGrArArArArArGrUrGrGrCrArCrCrGrArGrUrCrGrGrUr | |
| | G_25FE_ | GrCrGrCrCrCrCrArGrCrArGrCrUrUrCrArGrUrCrCrCrUrUrUrCrUrCrGrUrCrGrArU*mG*mG*mU | |
| | PB9 | | |
| 19 | A1AT_SpRY_ | mC*mU*mG*rUrGrCrUrGrArCrCrArUrCrGrArCrArArGrGrUrUrUrUrArGrArGrCrUrArGrArArArUrArGrCrArArGrUrUrA | 24088 |
| | ED0-_ | rArArArUrArArGrGrCrUrArGrUrCrCrGrUrUrArUrCrArArCrUrUrGrArArArArArGrUrGrGrCrArCrCrGrArGrUrCrGrGrUr | |
| | G_25FE_ | GrCrGrCrCrCrCrArGrCrArGrCrUrUrCrArGrUrCrCrCrUrUrUrCrUrCrGrUrCrGrA*mU*mG*mG | |
| | PB8 | | |
| 20 | A1AT_SpRY_ | mC*mU*mG*rUrGrCrUrGrArCrCrArUrCrGrArCrArArGrGrUrUrUrUrArGrArGrCrUrArGrArArArUrArGrCrArArGrUrUrA | 24089 |
| | ED0-_ | rArArArUrArArGrGrCrUrArGrUrCrCrGrUrUrArUrCrArArCrUrUrGrArArArArArGrUrGrGrCrArCrCrGrArGrUrCrGrGrUr | |
| | G_20FE_ | GrCrArGrCrArGrCrUrUrCrArGrUrCrCrCrUrUrUrCrUrCrGrUrCrGrArUrGrGrUrCrArGrCrA*mC*mA*mG | |
| | PB17 | | |
| 21 | A1AT_SpRY_ | mC*mU*mG*rUrGrCrUrGrArCrCrArUrCrGrArCrArArGrGrUrUrUrUrArGrArGrCrUrArGrArArArUrArGrCrArArGrUrUrA | 24090 |
| | ED0-_ | rArArArUrArArGrGrCrUrArGrUrCrCrGrUrUrArUrCrArArCrUrUrGrArArArArArGrUrGrGrCrArCrCrGrArGrUrCrGrGrUr | |
| | G_20FE_ | GrCrArGrCrArGrCrUrUrCrArGrUrCrCrCrUrUrUrCrUrCrGrUrCrGrArUrGrGrUrCrArGrC*mA*mC*mA | |
| | PB16 | | |
| 22 | A1AT_SpRY_ | mC*mU*mG*rUrGrCrUrGrArCrCrArUrCrGrArCrArArGrGrUrUrUrUrArGrArGrCrUrArGrArArArUrArGrCrArArGrUrUrA | 24091 |
| | ED0-_ | rArArArUrArArGrGrCrUrArGrUrCrCrGrUrUrArUrCrArArCrUrUrGrArArArArArGrUrGrGrCrArCrCrGrArGrUrCrGrGrUr | |
| | G_20FE_ | GrCrArGrCrArGrCrUrUrCrArGrUrCrCrCrUrUrUrCrUrCrGrUrCrGrArUrGrGrUrCrArG*mC*mA*mC | |
| | PB15 | | |
| 23 | A1AT_SpRY_ | mC*mU*mG*rUrGrCrUrGrArCrCrArUrCrGrArCrArArGrGrUrUrUrUrArGrArGrCrUrArGrArArArUrArGrCrArArGrUrUrA | 24092 |
| | ED0-_ | rArArArUrArArGrGrCrUrArGrUrCrCrGrUrUrArUrCrArArCrUrUrGrArArArArArGrUrGrGrCrArCrCrGrArGrUrCrGrGrUr | |
| | G_20FE_ | GrCrArGrCrArGrCrUrUrCrArGrUrCrCrCrUrUrUrCrUrCrGrUrCrGrArUrGrGrUrCrA*mG*mC*mA | |
| | PB14 | | |
| 24 | A1AT_SpRY_ | mC*mU*mG*rUrGrCrUrGrArCrCrArUrCrGrArCrArArGrGrUrUrUrUrArGrArGrCrUrArGrArArArUrArGrCrArArGrUrUrA | 24093 |
| | ED0-_ | rArArArUrArArGrGrCrUrArGrUrCrCrGrUrUrArUrCrArArCrUrUrGrArArArArArGrUrGrGrCrArCrCrGrArGrUrCrGrGrUr | |
| | G_20FE_ | GrCrArGrCrArGrCrUrUrCrArGrUrCrCrCrUrUrUrCrUrCrGrUrCrGrArUrGrGrUrC*mA*mG*mC | |
| | PB13 | | |
| 25 | A1AT_SpRY_ | mC*mU*mG*rUrGrCrUrGrArCrCrArUrCrGrArCrArArGrGrUrUrUrUrArGrArGrCrUrArGrArArArUrArGrCrArArGrUrUrA | 24094 |
| | ED0-_ | rArArArUrArArGrGrCrUrArGrUrCrCrGrUrUrArUrCrArArCrUrUrGrArArArArArGrUrGrGrCrArCrCrGrArGrUrCrGrGrUr | |
| | G_20FE_ | GrCrArGrCrArGrCrUrUrCrArGrUrCrCrCrUrUrUrCrUrCrGrUrCrGrArUrGrGrU*mC*mA*mG | |
| | PB12 | | |
| 26 | A1AT_SpRY_ | mC*mU*mG*rUrGrCrUrGrArCrCrArUrCrGrArCrArArGrGrUrUrUrUrArGrArGrCrUrArGrArArArUrArGrCrArArGrUrUrA | 24095 |
| | ED0-_ | rArArArUrArArGrGrCrUrArGrUrCrCrGrUrUrArUrCrArArCrUrUrGrArArArArArGrUrGrGrCrArCrCrGrArGrUrCrGrGrUr | |
| | G_20FE_ | GrCrArGrCrArGrCrUrUrCrArGrUrCrCrCrUrUrUrCrUrCrGrUrCrGrArUrGrG*mU*mC*mA | |
| | PB11 | | |
| 27 | A1AT_SpRY_ | mC*mU*mG*rUrGrCrUrGrArCrCrArUrCrGrArCrArArGrGrUrUrUrUrArGrArGrCrUrArGrArArArUrArGrCrArArGrUrUrA | 24096 |
| | ED0-_ | rArArArUrArArGrGrCrUrArGrUrCrCrGrUrUrArUrCrArArCrUrUrGrArArArArArGrUrGrGrCrArCrCrGrArGrUrCrGrGrUr | |
| | G_20FE_ | GrCrArGrCrArGrCrUrUrCrArGrUrCrCrCrUrUrUrCrUrCrGrUrCrGrArUrG*mG*mU*mC | |
| | PB10 | | |
| 28 | A1AT_SpRY_ | mC*mU*mG*rUrGrCrUrGrArCrCrArUrCrGrArCrArArGrGrUrUrUrUrArGrArGrCrUrArGrArArArUrArGrCrArArGrUrUrA | 24097 |
| | ED0-_ | rArArArUrArArGrGrCrUrArGrUrCrCrGrUrUrArUrCrArArCrUrUrGrArArArArArGrUrGrGrCrArCrCrGrArGrUrCrGrGrUr | |
| | G_20FE_ | GrCrArGrCrArGrCrUrUrCrArGrUrCrCrCrUrUrUrCrUrCrGrUrCrGrArU*mG*mG*mU | |
| | PB9 | | |
| 29 | A1AT_SpRY_ | mC*mU*mG*rUrGrCrUrGrArCrCrArUrCrGrArCrArArGrGrUrUrUrUrArGrArGrCrUrArGrArArArUrArGrCrArArGrUrUrA | 24098 |
| | ED0-_ | rArArArUrArArGrGrCrUrArGrUrCrCrGrUrUrArUrCrArArCrUrUrGrArArArArArGrUrGrGrCrArCrCrGrArGrUrCrGrGrUr | |
| | G_20FE_ | GrCrArGrCrArGrCrUrUrCrArGrUrCrCrCrUrUrUrCrUrCrGrUrCrGrA*mU*mG*mG | |
| | PB8 | | |
| 30 | A1AT_SpRY_ | mC*mU*mG*rUrGrCrUrGrArCrCrArUrCrGrArCrArArGrGrUrUrUrUrArGrArGrCrUrArGrArArArUrArGrCrArArGrUrUrA | 24099 |
| | ED0-_ | rArArArUrArArGrGrCrUrArGrUrCrCrGrUrUrArUrCrArArCrUrUrGrArArArArArGrUrGrGrCrArCrCrGrArGrUrCrGrGrUr | |
| | G_14FE_ | GrCrUrUrCrArGrUrCrCrCrUrUrUrCrUrCrGrUrCrGrArUrGrGrUrCrArGrCrA*mC*mA*mG | |
| | PB17 | | |
| 31 | A1AT_SpRY_ | mC*mU*mG*rUrGrCrUrGrArCrCrArUrCrGrArCrArArGrGrUrUrUrUrArGrArGrCrUrArGrArArArUrArGrCrArArGrUrUrA | 24100 |
| | ED0-_ | rArArArUrArArGrGrCrUrArGrUrCrCrGrUrUrArUrCrArArCrUrUrGrArArArArArGrUrGrGrCrArCrCrGrArGrUrCrGrGrUr | |
| | G_14FE_ | GrCrUrUrCrArGrUrCrCrCrUrUrUrCrUrCrGrUrCrGrArUrGrGrUrCrArGrC*mA*mC*mA | |
| | PB16 | | |
| 32 | A1AT_SpRY_ | mC*mU*mG*rUrGrCrUrGrArCrCrArUrCrGrArCrArArGrGrUrUrUrUrArGrArGrCrUrArGrArArArUrArGrCrArArGrUrUrA | 24101 |
| | ED0-_ | rArArArUrArArGrGrCrUrArGrUrCrCrGrUrUrArUrCrArArCrUrUrGrArArArArArGrUrGrGrCrArCrCrGrArGrUrCrGrGrUr | |
| | G_14FE_ | GrCrUrUrCrArGrUrCrCrCrUrUrUrCrUrCrGrUrCrGrArUrGrGrUrCrArG*mC*mA*mC | |
| | PB15 | | |
| 33 | A1AT_SpRY_ | mC*mU*mG*rUrGrCrUrGrArCrCrArUrCrGrArCrArArGrGrUrUrUrUrArGrArGrCrUrArGrArArArUrArGrCrArArGrUrUrA | 24102 |
| | ED0-_ | rArArArUrArArGrGrCrUrArGrUrCrCrGrUrUrArUrCrArArCrUrUrGrArArArArArGrUrGrGrCrArCrCrGrArGrUrCrGrGrUr | |
| | G_14FE_ | GrCrUrUrCrArGrUrCrCrCrUrUrUrCrUrCrGrUrCrGrArUrGrGrUrCrA*mG*mC*mA | |
| | PB14 | | |
| 34 | A1AT_SpRY_ | mC*mU*mG*rUrGrCrUrGrArCrCrArUrCrGrArCrArArGrGrUrUrUrUrArGrArGrCrUrArGrArArArUrArGrCrArArGrUrUrA | 24103 |
| | ED0-_ | rArArArUrArArGrGrCrUrArGrUrCrCrGrUrUrArUrCrArArCrUrUrGrArArArArArGrUrGrGrCrArCrCrGrArGrUrCrGrGrUr | |
| | G_14FE_ | GrCrUrUrCrArGrUrCrCrCrUrUrUrCrUrCrGrUrCrGrArUrGrGrUrC*mA*mG*mC | |
| | PB13 | | |
| 35 | A1AT_SpRY_ | mC*mU*mG*rUrGrCrUrGrArCrCrArUrCrGrArCrArArGrGrUrUrUrUrArGrArGrCrUrArGrArArArUrArGrCrArArGrUrUrA | 24104 |
| | ED0-_ | rArArArUrArArGrGrCrUrArGrUrCrCrGrUrUrArUrCrArArCrUrUrGrArArArArArGrUrGrGrCrArCrCrGrArGrUrCrGrGrUr | |
| | G_14FE_ | GrCrUrUrCrArGrUrCrCrCrUrUrUrCrUrCrGrUrCrGrArUrGrGrU*mC*mA*mG | |
| | PB12 | | |
| 36 | A1AT_SpRY_ | mC*mU*mG*rUrGrCrUrGrArCrCrArUrCrGrArCrArArGrGrUrUrUrUrArGrArGrCrUrArGrArArArUrArGrCrArArGrUrUrA | 24105 |
| | ED0-_ | rArArArUrArArGrGrCrUrArGrUrCrCrGrUrUrArUrCrArArCrUrUrGrArArArArArGrUrGrGrCrArCrCrGrArGrUrCrGrGrUr | |
| | G_14FE_ | GrCrUrUrCrArGrUrCrCrCrUrUrUrCrUrCrGrUrCrGrArUrGrG*mU*mC*mA | |
| | PB11 | | |
| 37 | A1AT_SpRY_ | mC*mU*mG*rUrGrCrUrGrArCrCrArUrCrGrArCrArArGrGrUrUrUrUrArGrArGrCrUrArGrArArArUrArGrCrArArGrUrUrA | 24106 |
| | ED0-_ | rArArArUrArArGrGrCrUrArGrUrCrCrGrUrUrArUrCrArArCrUrUrGrArArArArArGrUrGrGrCrArCrCrGrArGrUrCrGrGrUr | |
| | G_14FE_ | GrCrUrUrCrArGrUrCrCrCrUrUrUrCrUrCrGrUrCrGrArUrG*mG*mU*mC | |
| | PB10 | | |
| 38 | A1AT_SpRY_ | mC*mU*mG*rUrGrCrUrGrArCrCrArUrCrGrArCrArArGrGrUrUrUrUrArGrArGrCrUrArGrArArArUrArGrCrArArGrUrUrA | 24107 |
| | ED0-_ | rArArArUrArArGrGrCrUrArGrUrCrCrGrUrUrArUrCrArArCrUrUrGrArArArArArGrUrGrGrCrArCrCrGrArGrUrCrGrGrUr | |
| | G_14FE_ | GrCrUrUrCrArGrUrCrCrCrUrUrUrCrUrCrGrUrCrGrArU*mG*mG*mU | |
| | PB9 | | |
| 39 | A1AT_SpRY_ | mC*mU*mG*rUrGrCrUrGrArCrCrArUrCrGrArCrArArGrGrUrUrUrUrArGrArGrCrUrArGrArArArUrArGrCrArArGrUrUrA | 24108 |
| | ED0-_ | rArArArUrArArGrGrCrUrArGrUrCrCrGrUrUrArUrCrArArCrUrUrGrArArArArArGrUrGrGrCrArCrCrGrArGrUrCrGrGrUr | |
| | G_14FE_ | GrCrUrUrCrArGrUrCrCrCrUrUrUrCrUrCrGrUrCrGrA*mU*mG*mG | |
| | PB8 | | |
| 40 | A1AT_SpRY_ | mC*mU*mG*rUrGrCrUrGrArCrCrArUrCrGrArCrArArGrGrUrUrUrUrArGrArGrCrUrArGrArArArUrArGrCrArArGrUrUrA | 24109 |
| | ED0-_ | rArArArUrArArGrGrCrUrArGrUrCrCrGrUrUrArUrCrArArCrUrUrGrArArArArArGrUrGrGrCrArCrCrGrArGrUrCrGrGrUr | |
| | G_11FE_ | GrCrArGrUrCrCrCrUrUrUrCrUrCrGrUrCrGrArUrGrGrUrCrArGrCrA*mC*mA*mG | |
| | PB17 | | |
| 41 | A1AT_SpRY_ | mC*mU*mG*rUrGrCrUrGrArCrCrArUrCrGrArCrArArGrGrUrUrUrUrArGrArGrCrUrArGrArArArUrArGrCrArArGrUrUrA | 24110 |
| | ED0-_ | rArArArUrArArGrGrCrUrArGrUrCrCrGrUrUrArUrCrArArCrUrUrGrArArArArArGrUrGrGrCrArCrCrGrArGrUrCrGrGrUr | |
| | G_11FE_ | GrCrArGrUrCrCrCrUrUrUrCrUrCrGrUrCrGrArUrGrGrUrCrArGrC*mA*mC*mA | |
| | PB16 | | |
| 42 | A1AT_SpRY_ | mC*mU*mG*rUrGrCrUrGrArCrCrArUrCrGrArCrArArGrGrUrUrUrUrArGrArGrCrUrArGrArArArUrArGrCrArArGrUrUrA | 24111 |
| | ED0-_ | rArArArUrArArGrGrCrUrArGrUrCrCrGrUrUrArUrCrArArCrUrUrGrArArArArArGrUrGrGrCrArCrCrGrArGrUrCrGrGrUr | |
| | G_11FE_ | GrCrArGrUrCrCrCrUrUrUrCrUrCrGrUrCrGrArUrGrGrUrCrArG*mC*mA*mC | |
| | PB15 | | |
| 43 | A1AT_SpRY_ | mC*mU*mG*rUrGrCrUrGrArCrCrArUrCrGrArCrArArGrGrUrUrUrUrArGrArGrCrUrArGrArArArUrArGrCrArArGrUrUrA | 24112 |
| | ED0-_ | rArArArUrArArGrGrCrUrArGrUrCrCrGrUrUrArUrCrArArCrUrUrGrArArArArArGrUrGrGrCrArCrCrGrArGrUrCrGrGrUr | |
| | G_11FE_ | GrCrArGrUrCrCrCrUrUrUrCrUrCrGrUrCrGrArUrGrGrUrCrA*mG*mC*mA | |
| | PB14 | | |
| 44 | A1AT_SpRY_ | mC*mU*mG*rUrGrCrUrGrArCrCrArUrCrGrArCrArArGrGrUrUrUrUrArGrArGrCrUrArGrArArArUrArGrCrArArGrUrUrA | 24113 |
| | ED0-_ | rArArArUrArArGrGrCrUrArGrUrCrCrGrUrUrArUrCrArArCrUrUrGrArArArArArGrUrGrGrCrArCrCrGrArGrUrCrGrGrUr | |
| | G_11FE_ | GrCrArGrUrCrCrCrUrUrUrCrUrCrGrUrCrGrArUrGrGrUrC*mA*mG*mC | |
| | PB13 | | |
| 45 | A1AT_SpRY_ | mC*mU*mG*rUrGrCrUrGrArCrCrArUrCrGrArCrArArGrGrUrUrUrUrArGrArGrCrUrArGrArArArUrArGrCrArArGrUrUrA | 24114 |
| | ED0-_ | rArArArUrArArGrGrCrUrArGrUrCrCrGrUrUrArUrCrArArCrUrUrGrArArArArArGrUrGrGrCrArCrCrGrArGrUrCrGrGrUr | |
| | G_11FE_ | GrCrArGrUrCrCrCrUrUrUrCrUrCrGrUrCrGrArUrGrGrU*mC*mA*mG | |
| | PB12 | | |
| 46 | A1AT_SpRY_ | mC*mU*mG*rUrGrCrUrGrArCrCrArUrCrGrArCrArArGrGrUrUrUrUrArGrArGrCrUrArGrArArArUrArGrCrArArGrUrUrA | 24115 |
| | ED0-_ | rArArArUrArArGrGrCrUrArGrUrCrCrGrUrUrArUrCrArArCrUrUrGrArArArArArGrUrGrGrCrArCrCrGrArGrUrCrGrGrUr | |
| | G_11FE_ | GrCrArGrUrCrCrCrUrUrUrCrUrCrGrUrCrGrArUrGrG*mU*mC*mA | |
| | PB11 | | |
| 47 | A1AT_SpRY_ | mC*mU*mG*rUrGrCrUrGrArCrCrArUrCrGrArCrArArGrGrUrUrUrUrArGrArGrCrUrArGrArArArUrArGrCrArArGrUrUrA | 24116 |
| | ED0-_ | rArArArUrArArGrGrCrUrArGrUrCrCrGrUrUrArUrCrArArCrUrUrGrArArArArArGrUrGrGrCrArCrCrGrArGrUrCrGrGrUr | |
| | G_11FE_ | GrCrArGrUrCrCrCrUrUrUrCrUrCrGrUrCrGrArUrG*mG*mU*mC | |
| | PB10 | | |
| 48 | A1AT_SpRY_ | mC*mU*mG*rUrGrCrUrGrArCrCrArUrCrGrArCrArArGrGrUrUrUrUrArGrArGrCrUrArGrArArArUrArGrCrArArGrUrUrA | 24117 |
| | ED0-_ | rArArArUrArArGrGrCrUrArGrUrCrCrGrUrUrArUrCrArArCrUrUrGrArArArArArGrUrGrGrCrArCrCrGrArGrUrCrGrGrUr | |
| | G_11FE_ | GrCrArGrUrCrCrCrUrUrUrCrUrCrGrUrCrGrArU*mG*mG*mU | |
| | PB9 | | |
| 49 | A1AT_SpRY_ | mC*mU*mG*rUrGrCrUrGrArCrCrArUrCrGrArCrArArGrGrUrUrUrUrArGrArGrCrUrArGrArArArUrArGrCrArArGrUrUrA | 24118 |
| | ED0-_ | rArArArUrArArGrGrCrUrArGrUrCrCrGrUrUrArUrCrArArCrUrUrGrArArArArArGrUrGrGrCrArCrCrGrArGrUrCrGrGrUr | |
| | G_11FE_ | GrCrArGrUrCrCrCrUrUrUrCrUrCrGrUrCrGrA*mU*mG*mG | |
| | PB8 | | |
| 50 | A1AT_SpRY_ | mC*mU*mG*rUrGrCrUrGrArCrCrArUrCrGrArCrArArGrGrUrUrUrUrArGrArGrCrUrArGrArArArUrArGrCrArArGrUrUrA | 24119 |
| | ED0-_ | rArArArUrArArGrGrCrUrArGrUrCrCrGrUrUrArUrCrArArCrUrUrGrArArArArArGrUrGrGrCrArCrCrGrArGrUrCrGrGrUr | |
| | G_9FE_ | GrCrUrCrCrCrUrUrUrCrUrCrGrUrCrGrArUrGrGrUrCrArGrCrA*mC*mA*mG | |
| | PB17 | | |
| 51 | A1AT_SpRY_ | mC*mU*mG*rUrGrCrUrGrArCrCrArUrCrGrArCrArArGrGrUrUrUrUrArGrArGrCrUrArGrArArArUrArGrCrArArGrUrUrA | 24120 |
| | ED0-_ | rArArArUrArArGrGrCrUrArGrUrCrCrGrUrUrArUrCrArArCrUrUrGrArArArArArGrUrGrGrCrArCrCrGrArGrUrCrGrGrUr | |
| | G_9FE_ | GrCrUrCrCrCrUrUrUrCrUrCrGrUrCrGrArUrGrGrUrCrArGrC*mA*mC*mA | |
| | PB16 | | |
| 52 | A1AT_SpRY_ | mC*mU*mG*rUrGrCrUrGrArCrCrArUrCrGrArCrArArGrGrUrUrUrUrArGrArGrCrUrArGrArArArUrArGrCrArArGrUrUrA | 24121 |
| | ED0-_ | rArArArUrArArGrGrCrUrArGrUrCrCrGrUrUrArUrCrArArCrUrUrGrArArArArArGrUrGrGrCrArCrCrGrArGrUrCrGrGrUr | |
| | G_9FE_ | GrCrUrCrCrCrUrUrUrCrUrCrGrUrCrGrArUrGrGrUrCrArG*mC*mA*mC | |
| | PB15 | | |
| 53 | A1AT_SpRY_ | mC*mU*mG*rUrGrCrUrGrArCrCrArUrCrGrArCrArArGrGrUrUrUrUrArGrArGrCrUrArGrArArArUrArGrCrArArGrUrUrA | 24122 |
| | ED0-_ | rArArArUrArArGrGrCrUrArGrUrCrCrGrUrUrArUrCrArArCrUrUrGrArArArArArGrUrGrGrCrArCrCrGrArGrUrCrGrGrUr | |
| | G_9FE_ | GrCrUrCrCrCrUrUrUrCrUrCrGrUrCrGrArUrGrGrUrCrA*mG*mC*mA | |
| | PB14 | | |
| 54 | A1AT_SpRY_ | mC*mU*mG*rUrGrCrUrGrArCrCrArUrCrGrArCrArArGrGrUrUrUrUrArGrArGrCrUrArGrArArArUrArGrCrArArGrUrUrA | 24123 |
| | ED0-_ | rArArArUrArArGrGrCrUrArGrUrCrCrGrUrUrArUrCrArArCrUrUrGrArArArArArGrUrGrGrCrArCrCrGrArGrUrCrGrGrUr | |
| | G_9FE_ | GrCrUrCrCrCrUrUrUrCrUrCrGrUrCrGrArUrGrGrUrC*mA*mG*mC | |
| | PB13 | | |
| 55 | A1AT_SpRY_ | mC*mU*mG*rUrGrCrUrGrArCrCrArUrCrGrArCrArArGrGrUrUrUrUrArGrArGrCrUrArGrArArArUrArGrCrArArGrUrUrA | 24124 |
| | ED0-_ | rArArArUrArArGrGrCrUrArGrUrCrCrGrUrUrArUrCrArArCrUrUrGrArArArArArGrUrGrGrCrArCrCrGrArGrUrCrGrGrUr | |
| | G_9FE_ | GrCrUrCrCrCrUrUrUrCrUrCrGrUrCrGrArUrGrGrU*mC*mA*mG | |
| | PB12 | | |
| 56 | A1AT_SpRY_ | mC*mU*mG*rUrGrCrUrGrArCrCrArUrCrGrArCrArArGrGrUrUrUrUrArGrArGrCrUrArGrArArArUrArGrCrArArGrUrUrA | 24125 |
| | ED0-_ | rArArArUrArArGrGrCrUrArGrUrCrCrGrUrUrArUrCrArArCrUrUrGrArArArArArGrUrGrGrCrArCrCrGrArGrUrCrGrGrUr | |
| | G_9FE_ | GrCrUrCrCrCrUrUrUrCrUrCrGrUrCrGrArUrGrG*mU*mC*mA | |
| | PB11 | | |
| 57 | A1AT_SpRY_ | mC*mU*mG*rUrGrCrUrGrArCrCrArUrCrGrArCrArArGrGrUrUrUrUrArGrArGrCrUrArGrArArArUrArGrCrArArGrUrUrA | 24126 |
| | ED0-_ | rArArArUrArArGrGrCrUrArGrUrCrCrGrUrUrArUrCrArArCrUrUrGrArArArArArGrUrGrGrCrArCrCrGrArGrUrCrGrGrUr | |
| | G_9FE_ | GrCrUrCrCrCrUrUrUrCrUrCrGrUrCrGrArUrG*mG*mU*mC | |
| | PB10 | | |
| 58 | A1AT_SpRY_ | mC*mU*mG*rUrGrCrUrGrArCrCrArUrCrGrArCrArArGrGrUrUrUrUrArGrArGrCrUrArGrArArArUrArGrCrArArGrUrUrA | 24127 |
| | ED0-_ | rArArArUrArArGrGrCrUrArGrUrCrCrGrUrUrArUrCrArArCrUrUrGrArArArArArGrUrGrGrCrArCrCrGrArGrUrCrGrGrUr | |
| | G_9FE_ | GrCrUrCrCrCrUrUrUrCrUrCrGrUrCrGrArU*mG*mG*mU | |
| | PB9 | | |
| 59 | A1AT_SpRY_ | mC*mU*mG*rUrGrCrUrGrArCrCrArUrCrGrArCrArArGrGrUrUrUrUrArGrArGrCrUrArGrArArArUrArGrCrArArGrUrUrA | 24128 |
| | ED0-_ | rArArArUrArArGrGrCrUrArGrUrCrCrGrUrUrArUrCrArArCrUrUrGrArArArArArGrUrGrGrCrArCrCrGrArGrUrCrGrGrUr | |
| | G_9FE_ | GrCrUrCrCrCrUrUrUrCrUrCrGrUrCrGrA*mU*mG*mG | |
| | PB8 | | |
| 60 | A1AT_SpRY_ | mC*mU*mG*rUrGrCrUrGrArCrCrArUrCrGrArCrArArGrGrUrUrUrUrArGrArGrCrUrArGrArArArUrArGrCrArArGrUrUrA | 24129 |
| | ED0-_ | rArArArUrArArGrGrCrUrArGrUrCrCrGrUrUrArUrCrArArCrUrUrGrArArArArArGrUrGrGrCrArCrCrGrArGrUrCrGrGrUr | |
| | G_7FE_ | GrCrCrCrUrUrUrCrUrCrGrUrCrGrArUrGrGrUrCrArGrCrA*mC*mA*mG | |
| | PB17 | | |
| 61 | A1AT_SpRY_ | mC*mU*mG*rUrGrCrUrGrArCrCrArUrCrGrArCrArArGrGrUrUrUrUrArGrArGrCrUrArGrArArArUrArGrCrArArGrUrUrA | 24130 |
| | ED0-_ | rArArArUrArArGrGrCrUrArGrUrCrCrGrUrUrArUrCrArArCrUrUrGrArArArArArGrUrGrGrCrArCrCrGrArGrUrCrGrGrUr | |
| | G_7FE_ | GrCrCrCrUrUrUrCrUrCrGrUrCrGrArUrGrGrUrCrArGrC*mA*mC*mA | |
| | PB16 | | |
| 62 | A1AT_SpRY_ | mC*mU*mG*rUrGrCrUrGrArCrCrArUrCrGrArCrArArGrGrUrUrUrUrArGrArGrCrUrArGrArArArUrArGrCrArArGrUrUrA | 24131 |
| | ED0-_ | rArArArUrArArGrGrCrUrArGrUrCrCrGrUrUrArUrCrArArCrUrUrGrArArArArArGrUrGrGrCrArCrCrGrArGrUrCrGrGrUr | |
| | G_7FE_ | GrCrCrCrUrUrUrCrUrCrGrUrCrGrArUrGrGrUrCrArG*mC*mA*mC | |
| | PB15 | | |
| 63 | A1AT_SpRY_ | mC*mU*mG*rUrGrCrUrGrArCrCrArUrCrGrArCrArArGrGrUrUrUrUrArGrArGrCrUrArGrArArArUrArGrCrArArGrUrUrA | 24132 |
| | ED0-_ | rArArArUrArArGrGrCrUrArGrUrCrCrGrUrUrArUrCrArArCrUrUrGrArArArArArGrUrGrGrCrArCrCrGrArGrUrCrGrGrUr | |
| | G_7FE_ | GrCrCrCrUrUrUrCrUrCrGrUrCrGrArUrGrGrUrCrA*mG*mC*mA | |
| | PB14 | | |
| 64 | A1AT_SpRY_ | mC*mU*mG*rUrGrCrUrGrArCrCrArUrCrGrArCrArArGrGrUrUrUrUrArGrArGrCrUrArGrArArArUrArGrCrArArGrUrUrA | 24133 |
| | ED0-_ | rArArArUrArArGrGrCrUrArGrUrCrCrGrUrUrArUrCrArArCrUrUrGrArArArArArGrUrGrGrCrArCrCrGrArGrUrCrGrGrUr | |
| | G_7FE_ | GrCrCrCrUrUrUrCrUrCrGrUrCrGrArUrGrGrUrC*mA*mG*mC | |
| | PB13 | | |
| 65 | A1AT_SpRY_ | mC*mU*mG*rUrGrCrUrGrArCrCrArUrCrGrArCrArArGrGrUrUrUrUrArGrArGrCrUrArGrArArArUrArGrCrArArGrUrUrA | 24134 |
| | ED0-_ | rArArArUrArArGrGrCrUrArGrUrCrCrGrUrUrArUrCrArArCrUrUrGrArArArArArGrUrGrGrCrArCrCrGrArGrUrCrGrGrUr | |
| | G_7FE_ | GrCrCrCrUrUrUrCrUrCrGrUrCrGrArUrGrGrU*mC*mA*mG | |
| | PB12 | | |
| 66 | A1AT_SpRY_ | mC*mU*mG*rUrGrCrUrGrArCrCrArUrCrGrArCrArArGrGrUrUrUrUrArGrArGrCrUrArGrArArArUrArGrCrArArGrUrUrA | 24135 |
| | ED0-_ | rArArArUrArArGrGrCrUrArGrUrCrCrGrUrUrArUrCrArArCrUrUrGrArArArArArGrUrGrGrCrArCrCrGrArGrUrCrGrGrUr | |
| | G_7FE_ | GrCrCrCrUrUrUrCrUrCrGrUrCrGrArUrGrG*mU*mC*mA | |
| | PB11 | | |
| 67 | A1AT_SpRY_ | mC*mU*mG*rUrGrCrUrGrArCrCrArUrCrGrArCrArArGrGrUrUrUrUrArGrArGrCrUrArGrArArArUrArGrCrArArGrUrUrA | 24136 |
| | ED0-_ | rArArArUrArArGrGrCrUrArGrUrCrCrGrUrUrArUrCrArArCrUrUrGrArArArArArGrUrGrGrCrArCrCrGrArGrUrCrGrGrUr | |
| | G_7FE_ | GrCrCrCrUrUrUrCrUrCrGrUrCrGrArUrG*mG*mU*mC | |
| | PB10 | | |
| 68 | A1AT_SpRY_ | mC*mU*mG*rUrGrCrUrGrArCrCrArUrCrGrArCrArArGrGrUrUrUrUrArGrArGrCrUrArGrArArArUrArGrCrArArGrUrUrA | 24137 |
| | ED0-_ | rArArArUrArArGrGrCrUrArGrUrCrCrGrUrUrArUrCrArArCrUrUrGrArArArArArGrUrGrGrCrArCrCrGrArGrUrCrGrGrUr | |
| | G_7FE_ | GrCrCrCrUrUrUrCrUrCrGrUrCrGrArU*mG*mG*mU | |
| | PB9 | | |
| 69 | A1AT_SpRY_ | mC*mU*mG*rUrGrCrUrGrArCrCrArUrCrGrArCrArArGrGrUrUrUrUrArGrArGrCrUrArGrArArArUrArGrCrArArGrUrUrA | 24138 |
| | ED0-_ | rArArArUrArArGrGrCrUrArGrUrCrCrGrUrUrArUrCrArArCrUrUrGrArArArArArGrUrGrGrCrArCrCrGrArGrUrCrGrGrUr | |
| | G_7FE_ | GrCrCrCrUrUrUrCrUrCrGrUrCrGrA*mU*mG*mG | |
| | PB8 | | |
| 70 | A1AT_SpRY_ | mC*mU*mG*rUrGrCrUrGrArCrCrArUrCrGrArCrArArGrGrUrUrUrUrArGrArGrCrUrArGrArArArUrArGrCrArArGrUrUrA | 24139 |
| | ED0-_ | rArArArUrArArGrGrCrUrArGrUrCrCrGrUrUrArUrCrArArCrUrUrGrArArArArArGrUrGrGrCrArCrCrGrArGrUrCrGrGrUr | |
| | G_5FE_ | GrCrUrUrUrCrUrCrGrUrCrGrArUrGrGrUrCrArGrCrA*mC*mA*mG | |
| | PB17 | | |
| 71 | A1AT_SpRY_ | mC*mU*mG*rUrGrCrUrGrArCrCrArUrCrGrArCrArArGrGrUrUrUrUrArGrArGrCrUrArGrArArArUrArGrCrArArGrUrUrA | 24140 |
| | ED0-_ | rArArArUrArArGrGrCrUrArGrUrCrCrGrUrUrArUrCrArArCrUrUrGrArArArArArGrUrGrGrCrArCrCrGrArGrUrCrGrGrUr | |
| | G_5FE_ | GrCrUrUrUrCrUrCrGrUrCrGrArUrGrGrUrCrArGrC*mA*mC*mA | |
| | PB16 | | |
| 72 | A1AT_SpRY_ | mC*mU*mG*rUrGrCrUrGrArCrCrArUrCrGrArCrArArGrGrUrUrUrUrArGrArGrCrUrArGrArArArUrArGrCrArArGrUrUrA | 24141 |
| | ED0-_ | rArArArUrArArGrGrCrUrArGrUrCrCrGrUrUrArUrCrArArCrUrUrGrArArArArArGrUrGrGrCrArCrCrGrArGrUrCrGrGrUr | |
| | G_5FE_ | GrCrUrUrUrCrUrCrGrUrCrGrArUrGrGrUrCrArG*mC*mA*mC | |
| | PB15 | | |
| 73 | A1AT_SpRY_ | mC*mU*mG*rUrGrCrUrGrArCrCrArUrCrGrArCrArArGrGrUrUrUrUrArGrArGrCrUrArGrArArArUrArGrCrArArGrUrUrA | 24142 |
| | ED0-_ | rArArArUrArArGrGrCrUrArGrUrCrCrGrUrUrArUrCrArArCrUrUrGrArArArArArGrUrGrGrCrArCrCrGrArGrUrCrGrGrUr | |
| | G_5FE_ | GrCrUrUrUrCrUrCrGrUrCrGrArUrGrGrUrCrA*mG*mC*mA | |
| | PB14 | | |
| 74 | A1AT_SpRY_ | mC*mU*mG*rUrGrCrUrGrArCrCrArUrCrGrArCrArArGrGrUrUrUrUrArGrArGrCrUrArGrArArArUrArGrCrArArGrUrUrA | 24143 |
| | ED0-_ | rArArArUrArArGrGrCrUrArGrUrCrCrGrUrUrArUrCrArArCrUrUrGrArArArArArGrUrGrGrCrArCrCrGrArGrUrCrGrGrUr | |
| | G_5FE_ | GrCrUrUrUrCrUrCrGrUrCrGrArUrGrGrUrC*mA*mG*mC | |
| | PB13 | | |
| 75 | A1AT_SpRY_ | mC*mU*mG*rUrGrCrUrGrArCrCrArUrCrGrArCrArArGrGrUrUrUrUrArGrArGrCrUrArGrArArArUrArGrCrArArGrUrUrA | 24144 |
| | ED0-_ | rArArArUrArArGrGrCrUrArGrUrCrCrGrUrUrArUrCrArArCrUrUrGrArArArArArGrUrGrGrCrArCrCrGrArGrUrCrGrGrUr | |
| | G_5FE_ | GrCrUrUrUrCrUrCrGrUrCrGrArUrGrGrU*mC*mA*mG | |
| | PB12 | | |
| 76 | A1AT_SpRY_ | mC*mU*mG*rUrGrCrUrGrArCrCrArUrCrGrArCrArArGrGrUrUrUrUrArGrArGrCrUrArGrArArArUrArGrCrArArGrUrUrA | 24145 |
| | ED0-_ | rArArArUrArArGrGrCrUrArGrUrCrCrGrUrUrArUrCrArArCrUrUrGrArArArArArGrUrGrGrCrArCrCrGrArGrUrCrGrGrUr | |
| | G_5FE_ | GrCrUrUrUrCrUrCrGrUrCrGrArUrGrG*mU*mC*mA | |
| | PB11 | | |
| 77 | A1AT_SpRY_ | mC*mU*mG*rUrGrCrUrGrArCrCrArUrCrGrArCrArArGrGrUrUrUrUrArGrArGrCrUrArGrArArArUrArGrCrArArGrUrUrA | 24146 |
| | ED0-_ | rArArArUrArArGrGrCrUrArGrUrCrCrGrUrUrArUrCrArArCrUrUrGrArArArArArGrUrGrGrCrArCrCrGrArGrUrCrGrGrUr | |
| | G_5FE_ | GrCrUrUrUrCrUrCrGrUrCrGrArUrG*mG*mU*mC | |
| | PB10 | | |
| 78 | A1AT_SpRY_ | mC*mU*mG*rUrGrCrUrGrArCrCrArUrCrGrArCrArArGrGrUrUrUrUrArGrArGrCrUrArGrArArArUrArGrCrArArGrUrUrA | 24147 |
| | ED0-_ | rArArArUrArArGrGrCrUrArGrUrCrCrGrUrUrArUrCrArArCrUrUrGrArArArArArGrUrGrGrCrArCrCrGrArGrUrCrGrGrUr | |
| | G_5FE_ | GrCrUrUrUrCrUrCrGrUrCrGrArU*mG*mG*mU | |
| | PB9 | | |
| 79 | A1AT_SpRY_ | mC*mU*mG*rUrGrCrUrGrArCrCrArUrCrGrArCrArArGrGrUrUrUrUrArGrArGrCrUrArGrArArArUrArGrCrArArGrUrUrA | 24148 |
| | ED0-_ | rArArArUrArArGrGrCrUrArGrUrCrCrGrUrUrArUrCrArArCrUrUrGrArArArArArGrUrGrGrCrArCrCrGrArGrUrCrGrGrUr | |
| | G_5FE_ | GrCrUrUrUrCrUrCrGrUrCrGrA*mU*mG*mG | |
| | PB8 | | |
| 80 | A1AT_SpRY_ | mC*mU*mG*rUrGrCrUrGrArCrCrArUrCrGrArCrArArGrGrUrUrUrUrArGrArGrCrUrArGrArArArUrArGrCrArArGrUrUrA | 24149 |
| | ED0-_ | rArArArUrArArGrGrCrUrArGrUrCrCrGrUrUrArUrCrArArCrUrUrGrArArArArArGrUrGrGrCrArCrCrGrArGrUrCrGrGrUr | |
| | G_3FE_ | GrCrUrCrUrCrGrUrCrGrArUrGrGrUrCrArGrCrA*mC*mA*mG | |
| | PB17 | | |
| 81 | A1AT_SpRY_ | mC*mU*mG*rUrGrCrUrGrArCrCrArUrCrGrArCrArArGrGrUrUrUrUrArGrArGrCrUrArGrArArArUrArGrCrArArGrUrUrA | 24150 |
| | ED0-_ | rArArArUrArArGrGrCrUrArGrUrCrCrGrUrUrArUrCrArArCrUrUrGrArArArArArGrUrGrGrCrArCrCrGrArGrUrCrGrGrUr | |
| | G_3FE_ | GrCrUrCrUrCrGrUrCrGrArUrGrGrUrCrArGrC*mA*mC*mA | |
| | PB16 | | |
| 82 | A1AT_SpRY_ | mC*mU*mG*rUrGrCrUrGrArCrCrArUrCrGrArCrArArGrGrUrUrUrUrArGrArGrCrUrArGrArArArUrArGrCrArArGrUrUrA | 24151 |
| | ED0-_ | rArArArUrArArGrGrCrUrArGrUrCrCrGrUrUrArUrCrArArCrUrUrGrArArArArArGrUrGrGrCrArCrCrGrArGrUrCrGrGrUr | |
| | G_3FE_ | GrCrUrCrUrCrGrUrCrGrArUrGrGrUrCrArG*mC*mA*mC | |
| | PB15 | | |
| 83 | A1AT_SpRY_ | mC*mU*mG*rUrGrCrUrGrArCrCrArUrCrGrArCrArArGrGrUrUrUrUrArGrArGrCrUrArGrArArArUrArGrCrArArGrUrUrA | 24152 |
| | ED0-_ | rArArArUrArArGrGrCrUrArGrUrCrCrGrUrUrArUrCrArArCrUrUrGrArArArArArGrUrGrGrCrArCrCrGrArGrUrCrGrGrUr | |
| | G_3FE_ | GrCrUrCrUrCrGrUrCrGrArUrGrGrUrCrA*mG*mC*mA | |
| | PB14 | | |
| 84 | A1AT_SpRY_ | mC*mU*mG*rUrGrCrUrGrArCrCrArUrCrGrArCrArArGrGrUrUrUrUrArGrArGrCrUrArGrArArArUrArGrCrArArGrUrUrA | 24153 |
| | ED0-_ | rArArArUrArArGrGrCrUrArGrUrCrCrGrUrUrArUrCrArArCrUrUrGrArArArArArGrUrGrGrCrArCrCrGrArGrUrCrGrGrUr | |
| | G_3FE_ | GrCrUrCrUrCrGrUrCrGrArUrGrGrUrC*mA*mG*mC | |
| | PB13 | | |
| 85 | A1AT_SpRY_ | mC*mU*mG*rUrGrCrUrGrArCrCrArUrCrGrArCrArArGrGrUrUrUrUrArGrArGrCrUrArGrArArArUrArGrCrArArGrUrUrA | 24154 |
| | ED0-_ | rArArArUrArArGrGrCrUrArGrUrCrCrGrUrUrArUrCrArArCrUrUrGrArArArArArGrUrGrGrCrArCrCrGrArGrUrCrGrGrUr | |
| | G_3FE_ | GrCrUrCrUrCrGrUrCrGrArUrGrGrU*mC*mA*mG | |
| | PB12 | | |
| 86 | A1AT_SpRY_ | mC*mU*mG*rUrGrCrUrGrArCrCrArUrCrGrArCrArArGrGrUrUrUrUrArGrArGrCrUrArGrArArArUrArGrCrArArGrUrUrA | 24155 |
| | ED0-_ | ArArArUrArArGrGrCrUrArGrUrCrCrGrUrUrArUrCrArArCrUrUrGrArArArArArGrUrGrGrCrArCrCrGrArGrUrCrGrGrUr | |
| | G_3FE_ | GrCrUrCrUrCrGrUrCrGrArUrGrG*mU*mC*mA | |
| | PB11 | | |
| 87 | A1AT_SpRY_ | mC*mU*mG*rUrGrCrUrGrArCrCrArUrCrGrArCrArArGrGrUrUrUrUrArGrArGrCrUrArGrArArArUrArGrCrArArGrUrUrA | 24156 |
| | ED0-_ | rArArArUrArArGrGrCrUrArGrUrCrCrGrUrUrArUrCrArArCrUrUrGrArArArArArGrUrGrGrCrArCrCrGrArGrUrCrGrGrUr | |
| | G_3FE_ | GrCrUrCrUrCrGrUrCrGrArUrG*mG*mU*mC | |
| | PB10 | | |
| 88 | A1AT_SpRY_ | mC*mU*mG*rUrGrCrUrGrArCrCrArUrCrGrArCrArArGrGrUrUrUrUrArGrArGrCrUrArGrArArArUrArGrCrArArGrUrUrA | 24157 |
| | ED0-_ | rArArArUrArArGrGrCrUrArGrUrCrCrGrUrUrArUrCrArArCrUrUrGrArArArArArGrUrGrGrCrArCrCrGrArGrUrCrGrGrUr | |
| | G_3FE_ | GrCrUrCrUrCrGrUrCrGrArU*mG*mG*mU | |
| | PB9 | | |
| 89 | A1AT_SpRY_ | mC*mU*mG*rUrGrCrUrGrArCrCrArUrCrGrArCrArArGrGrUrUrUrUrArGrArGrCrUrArGrArArArUrArGrCrArArGrUrUrA | 24158 |
| | ED0-_ | rArArArUrArArGrGrCrUrArGrUrCrCrGrUrUrArUrCrArArCrUrUrGrArArArArArGrUrGrGrCrArCrCrGrArGrUrCrGrGrUr | |
| | G_3FE_ | GrCrUrCrUrCrGrUrCrGrA*mU*mG*mG | |
| | PB8 | | |
| 90 | A1AT_SpRY_ | mG*mG*mC*rUrGrUrGrCrUrGrArCrCrArUrCrGrArCrArGrUrUrUrUrArGrArGrCrUrArGrArArArUrArGrCrArArGrUrUrA | 24159 |
| | ED2-_ | rArArArUrArArGrGrCrUrArGrUrCrCrGrUrUrArUrCrArArCrUrUrGrArArArArArGrUrGrGrCrArCrCrGrArGrUrCrGrGrUr | |
| | 30FE_ | GrCrArCrArUrGrGrCrCrCrCrArGrCrArGrCrUrUrCrArGrUrCrCrCrUrUrUrCrUrCrGrUrCrGrArUrGrGrUrCrArGrCrArCrA* | |
| | PB17 | mG*mC*mC | |
| 91 | A1AT_SpRY_ | mG*mG*mC*rUrGrUrGrCrUrGrArCrCrArUrCrGrArCrArGrUrUrUrUrArGrArGrCrUrArGrArArArUrArGrCrArArGrUrUrA | 24160 |
| | ED2-_ | rArArArUrArArGrGrCrUrArGrUrCrCrGrUrUrArUrCrArArCrUrUrGrArArArArArGrUrGrGrCrArCrCrGrArGrUrCrGrGrUr | |
| | 30FE_ | GrCrArCrArUrGrGrCrCrCrCrArGrCrArGrCrUrUrCrArGrUrCrCrCrUrUrUrCrUrCrGrUrCrGrArUrGrGrUrCrArGrCrArC* | |
| | PB16 | mA*mG*mC | |
| 92 | A1AT_SpRY_ | mG*mG*mC*rUrGrUrGrCrUrGrArCrCrArUrCrGrArCrArGrUrUrUrUrArGrArGrCrUrArGrArArArUrArGrCrArArGrUrUrA | 24161 |
| | ED2-_ | rArArArUrArArGrGrCrUrArGrUrCrCrGrUrUrArUrCrArArCrUrUrGrArArArArArGrUrGrGrCrArCrCrGrArGrUrCrGrGrUr | |
| | 30FE_ | GrCrArCrArUrGrGrCrCrCrCrArGrCrArGrCrUrUrCrArGrUrCrCrCrUrUrUrCrUrCrGrUrCrGrArUrGrGrUrCrArGrCrA*mC* | |
| | PB15 | mA*mG | |
| 93 | A1AT_SpRY_ | mG*mG*mC*rUrGrUrGrCrUrGrArCrCrArUrCrGrArCrArGrUrUrUrUrArGrArGrCrUrArGrArArArUrArGrCrArArGrUrUrA | 24162 |
| | ED2-_ | rArArArUrArArGrGrCrUrArGrUrCrCrGrUrUrArUrCrArArCrUrUrGrArArArArArGrUrGrGrCrArCrCrGrArGrUrCrGrGrUr | |
| | 30FE_ | GrCrArCrArUrGrGrCrCrCrCrArGrCrArGrCrUrUrCrArGrUrCrCrCrUrUrUrCrUrCrGrUrCrGrArUrGrGrUrCrArGrC*mA* | |
| | PB14 | mC*mA | |
| 94 | A1AT_SpRY_ | mG*mG*mC*rUrGrUrGrCrUrGrArCrCrArUrCrGrArCrArGrUrUrUrUrArGrArGrCrUrArGrArArArUrArGrCrArArGrUrUrA | 24163 |
| | ED2-_ | rArArArUrArArGrGrCrUrArGrUrCrCrGrUrUrArUrCrArArCrUrUrGrArArArArArGrUrGrGrCrArCrCrGrArGrUrCrGrGrUr | |
| | 30FE_ | GrCrArCrArUrGrGrCrCrCrCrArGrCrArGrCrUrUrCrArGrUrCrCrCrUrUrUrCrUrCrGrUrCrGrArUrGrGrUrCrArG*mC*mA* | |
| | PB13 | mC | |
| 95 | A1AT_SpRY_ | mG*mG*mC*rUrGrUrGrCrUrGrArCrCrArUrCrGrArCrArGrUrUrUrUrArGrArGrCrUrArGrArArArUrArGrCrArArGrUrUrA | 24164 |
| | ED2-_ | rArArArUrArArGrGrCrUrArGrUrCrCrGrUrUrArUrCrArArCrUrUrGrArArArArArGrUrGrGrCrArCrCrGrArGrUrCrGrGrUr | |
| | 30FE_ | GrCrArCrArUrGrGrCrCrCrCrArGrCrArGrCrUrUrCrArGrUrCrCrCrUrUrUrCrUrCrGrUrCrGrArUrGrGrUrCrA*mG*mC* | |
| | PB12 | mA | |
| 96 | A1AT_SpRY_ | mG*mG*mC*rUrGrUrGrCrUrGrArCrCrArUrCrGrArCrArGrUrUrUrUrArGrArGrCrUrArGrArArArUrArGrCrArArGrUrUrA | 24165 |
| | ED2-_ | rArArArUrArArGrGrCrUrArGrUrCrCrGrUrUrArUrCrArArCrUrUrGrArArArArArGrUrGrGrCrArCrCrGrArGrUrCrGrGrUr | |
| | 30FE_ | GrCrArCrArUrGrGrCrCrCrCrArGrCrArGrCrUrUrCrArGrUrCrCrCrUrUrUrCrUrCrGrUrCrGrArUrGrGrUrC*mA*mG*mC | |
| | PB11 | | |
| 97 | A1AT_SpRY_ | mG*mG*mC*rUrGrUrGrCrUrGrArCrCrArUrCrGrArCrArGrUrUrUrUrArGrArGrCrUrArGrArArArUrArGrCrArArGrUrUrA | 24166 |
| | ED2-_ | rArArArUrArArGrGrCrUrArGrUrCrCrGrUrUrArUrCrArArCrUrUrGrArArArArArGrUrGrGrCrArCrCrGrArGrUrCrGrGrUr | |
| | 30FE_ | GrCrArCrArUrGrGrCrCrCrCrArGrCrArGrCrUrUrCrArGrUrCrCrCrUrUrUrCrUrCrGrUrCrGrArUrGrGrU*mC*mA*mG | |
| | PB10 | | |
| 98 | A1AT_SpRY_ | mG*mG*mC*rUrGrUrGrCrUrGrArCrCrArUrCrGrArCrArGrUrUrUrUrArGrArGrCrUrArGrArArArUrArGrCrArArGrUrUrA | 24167 |
| | ED2-_ | rArArArUrArArGrGrCrUrArGrUrCrCrGrUrUrArUrCrArArCrUrUrGrArArArArArGrUrGrGrCrArCrCrGrArGrUrCrGrGrUr | |
| | 30FE_PB9 | GrCrArCrArUrGrGrCrCrCrCrArGrCrArGrCrUrUrCrArGrUrCrCrCrUrUrUrCrUrCrGrUrCrGrArUrGrG*mU*mC*mA | |
| 99 | A1AT_SpRY_ | mG*mG*mC*rUrGrUrGrCrUrGrArCrCrArUrCrGrArCrArGrUrUrUrUrArGrArGrCrUrArGrArArArUrArGrCrArArGrUrUrA | 24168 |
| | ED2-_ | rArArArUrArArGrGrCrUrArGrUrCrCrGrUrUrArUrCrArArCrUrUrGrArArArArArGrUrGrGrCrArCrCrGrArGrUrCrGrGrUr | |
| | 30FE_PB8 | GrCrArCrArUrGrGrCrCrCrCrArGrCrArGrCrUrUrCrArGrUrCrCrCrUrUrUrCrUrCrGrUrCrGrArUrG*mG*mU*mC | |
| 100 | A1AT_SpRY_ | mG*mG*mC*rUrGrUrGrCrUrGrArCrCrArUrCrGrArCrArGrUrUrUrUrArGrArGrCrUrArGrArArArUrArGrCrArArGrUrUrA | 24169 |
| | ED2-_ | rArArArUrArArGrGrCrUrArGrUrCrCrGrUrUrArUrCrArArCrUrUrGrArArArArArGrUrGrGrCrArCrCrGrArGrUrCrGrGrUr | |
| | 25FE_ | GrCrGrCrCrCrCrArGrCrArGrCrUrUrCrArGrUrCrCrCrUrUrUrCrUrCrGrUrCrGrArUrGrGrUrCrArGrCrArCrA*mG*mC* | |
| | PB17 | mC | |
| 101 | A1AT_SpRY_ | mG*mG*mC*rUrGrUrGrCrUrGrArCrCrArUrCrGrArCrArGrUrUrUrUrArGrArGrCrUrArGrArArArUrArGrCrArArGrUrUrA | 24170 |
| | ED2-_ | rArArArUrArArGrGrCrUrArGrUrCrCrGrUrUrArUrCrArArCrUrUrGrArArArArArGrUrGrGrCrArCrCrGrArGrUrCrGrGrUr | |
| | 25FE_ | GrCrGrCrCrCrCrArGrCrArGrCrUrUrCrArGrUrCrCrCrUrUrUrCrUrCrGrUrCrGrArUrGrGrUrCrArGrCrArC*mA*mG*mC | |
| | PB16 | | |
| 102 | A1AT_SpRY_ | mG*mG*mC*rUrGrUrGrCrUrGrArCrCrArUrCrGrArCrArGrUrUrUrUrArGrArGrCrUrArGrArArArUrArGrCrArArGrUrUrA | 24171 |
| | ED2-_ | rArArArUrArArGrGrCrUrArGrUrCrCrGrUrUrArUrCrArArCrUrUrGrArArArArArGrUrGrGrCrArCrCrGrArGrUrCrGrGrUr | |
| | 25FE_ | GrCrGrCrCrCrCrArGrCrArGrCrUrUrCrArGrUrCrCrCrUrUrUrCrUrCrGrUrCrGrArUrGrGrUrCrArGrCrA*mC*mA*mG | |
| | PB15 | | |
| 103 | A1AT_SpRY_ | mG*mG*mC*rUrGrUrGrCrUrGrArCrCrArUrCrGrArCrArGrUrUrUrUrArGrArGrCrUrArGrArArArUrArGrCrArArGrUrUrA | 24172 |
| | ED2-_ | rArArArUrArArGrGrCrUrArGrUrCrCrGrUrUrArUrCrArArCrUrUrGrArArArArArGrUrGrGrCrArCrCrGrArGrUrCrGrGrUr | |
| | 25FE_ | GrCrGrCrCrCrCrArGrCrArGrCrUrUrCrArGrUrCrCrCrUrUrUrCrUrCrGrUrCrGrArUrGrGrUrCrArGrC*mA*mC*mA | |
| | PB14 | | |
| 104 | A1AT_SpRY_ | mG*mG*mC*rUrGrUrGrCrUrGrArCrCrArUrCrGrArCrArGrUrUrUrUrArGrArGrCrUrArGrArArArUrArGrCrArArGrUrUrA | 24173 |
| | ED2-_ | rArArArUrArArGrGrCrUrArGrUrCrCrGrUrUrArUrCrArArCrUrUrGrArArArArArGrUrGrGrCrArCrCrGrArGrUrCrGrGrUr | |
| | 25FE_ | GrCrGrCrCrCrCrArGrCrArGrCrUrUrCrArGrUrCrCrCrUrUrUrCrUrCrGrUrCrGrArUrGrGrUrCrArG*mC*mA*mC | |
| | PB13 | | |
| 105 | A1AT_SpRY_ | mG*mG*mC*rUrGrUrGrCrUrGrArCrCrArUrCrGrArCrArGrUrUrUrUrArGrArGrCrUrArGrArArArUrArGrCrArArGrUrUrA | 24174 |
| | ED2-_ | rArArArUrArArGrGrCrUrArGrUrCrCrGrUrUrArUrCrArArCrUrUrGrArArArArArGrUrGrGrCrArCrCrGrArGrUrCrGrGrUr | |
| | 25FE_ | GrCrGrCrCrCrCrArGrCrArGrCrUrUrCrArGrUrCrCrCrUrUrUrCrUrCrGrUrCrGrArUrGrGrUrCrA*mG*mC*mA | |
| | PB12 | | |
| 106 | A1AT_SpRY_ | mG*mG*mC*rUrGrUrGrCrUrGrArCrCrArUrCrGrArCrArGrUrUrUrUrArGrArGrCrUrArGrArArArUrArGrCrArArGrUrUrA | 24175 |
| | ED2-_ | rArArArUrArArGrGrCrUrArGrUrCrCrGrUrUrArUrCrArArCrUrUrGrArArArArArGrUrGrGrCrArCrCrGrArGrUrCrGrGrUr | |
| | 25FE_ | GrCrGrCrCrCrCrArGrCrArGrCrUrUrCrArGrUrCrCrCrUrUrUrCrUrCrGrUrCrGrArUrGrGrUrC*mA*mG*mC | |
| | PB11 | | |
| 107 | A1AT_SpRY_ | mG*mG*mC*rUrGrUrGrCrUrGrArCrCrArUrCrGrArCrArGrUrUrUrUrArGrArGrCrUrArGrArArArUrArGrCrArArGrUrUrA | 24176 |
| | ED2-_ | rArArArUrArArGrGrCrUrArGrUrCrCrGrUrUrArUrCrArArCrUrUrGrArArArArArGrUrGrGrCrArCrCrGrArGrUrCrGrGrUr | |
| | 25FE_ | GrCrGrCrCrCrCrArGrCrArGrCrUrUrCrArGrUrCrCrCrUrUrUrCrUrCrGrUrCrGrArUrGrGrU*mC*mA*mG | |
| | PB10 | | |
| 108 | A1AT_SpRY_ | mG*mG*mC*rUrGrUrGrCrUrGrArCrCrArUrCrGrArCrArGrUrUrUrUrArGrArGrCrUrArGrArArArUrArGrCrArArGrUrUrA | 24177 |
| | ED2-_ | rArArArUrArArGrGrCrUrArGrUrCrCrGrUrUrArUrCrArArCrUrUrGrArArArArArGrUrGrGrCrArCrCrGrArGrUrCrGrGrUr | |
| | 25FE_PB9 | GrCrGrCrCrCrCrArGrCrArGrCrUrUrCrArGrUrCrCrCrUrUrUrCrUrCrGrUrCrGrArUrGrG*mU*mC*mA | |
| 109 | A1AT_SpRY_ | mG*mG*mC*rUrGrUrGrCrUrGrArCrCrArUrCrGrArCrArGrUrUrUrUrArGrArGrCrUrArGrArArArUrArGrCrArArGrUrUrA | 24178 |
| | ED2-_ | rArArArUrArArGrGrCrUrArGrUrCrCrGrUrUrArUrCrArArCrUrUrGrArArArArArGrUrGrGrCrArCrCrGrArGrUrCrGrGrUr | |
| | 25FE_PB8 | GrCrGrCrCrCrCrArGrCrArGrCrUrUrCrArGrUrCrCrCrUrUrUrCrUrCrGrUrCrGrArUrG*mG*mU*mC | |
| 110 | A1AT_SpRY_ | mG*mG*mC*rUrGrUrGrCrUrGrArCrCrArUrCrGrArCrArGrUrUrUrUrArGrArGrCrUrArGrArArArUrArGrCrArArGrUrUrA | 24179 |
| | ED2-_ | rArArArUrArArGrGrCrUrArGrUrCrCrGrUrUrArUrCrArArCrUrUrGrArArArArArGrUrGrGrCrArCrCrGrArGrUrCrGrGrUr | |
| | 20FE_ | GrCrArGrCrArGrCrUrUrCrArGrUrCrCrCrUrUrUrCrUrCrGrUrCrGrArUrGrGrUrCrArGrCrArCrA*mG*mC*mC | |
| | PB17 | | |
| 111 | A1AT_SpRY_ | mG*mG*mC*rUrGrUrGrCrUrGrArCrCrArUrCrGrArCrArGrUrUrUrUrArGrArGrCrUrArGrArArArUrArGrCrArArGrUrUrA | 24180 |
| | ED2-_ | rArArArUrArArGrGrCrUrArGrUrCrCrGrUrUrArUrCrArArCrUrUrGrArArArArArGrUrGrGrCrArCrCrGrArGrUrCrGrGrUr | |
| | 20FE_ | GrCrArGrCrArGrCrUrUrCrArGrUrCrCrCrUrUrUrCrUrCrGrUrCrGrArUrGrGrUrCrArGrCrArC*mA*mG*mC | |
| | PB16 | | |
| 112 | A1AT_SpRY_ | mG*mG*mC*rUrGrUrGrCrUrGrArCrCrArUrCrGrArCrArGrUrUrUrUrArGrArGrCrUrArGrArArArUrArGrCrArArGrUrUrA | 24181 |
| | ED2-_ | rArArArUrArArGrGrCrUrArGrUrCrCrGrUrUrArUrCrArArCrUrUrGrArArArArArGrUrGrGrCrArCrCrGrArGrUrCrGrGrUr | |
| | 20FE_ | GrCrArGrCrArGrCrUrUrCrArGrUrCrCrCrUrUrUrCrUrCrGrUrCrGrArUrGrGrUrCrArGrCrA*mC*mA*mG | |
| | PB15 | | |
| 113 | A1AT_SpRY_ | mG*mG*mC*rUrGrUrGrCrUrGrArCrCrArUrCrGrArCrArGrUrUrUrUrArGrArGrCrUrArGrArArArUrArGrCrArArGrUrUrA | 24182 |
| | ED2-_ | rArArArUrArArGrGrCrUrArGrUrCrCrGrUrUrArUrCrArArCrUrUrGrArArArArArGrUrGrGrCrArCrCrGrArGrUrCrGrGrUr | |
| | 20FE_ | GrCrArGrCrArGrCrUrUrCrArGrUrCrCrCrUrUrUrCrUrCrGrUrCrGrArUrGrGrUrCrArGrC*mA*mC*mA | |
| | PB14 | | |
| 114 | A1AT_SpRY_ | mG*mG*mC*rUrGrUrGrCrUrGrArCrCrArUrCrGrArCrArGrUrUrUrUrArGrArGrCrUrArGrArArArUrArGrCrArArGrUrUrA | 24183 |
| | ED2-_ | rArArArUrArArGrGrCrUrArGrUrCrCrGrUrUrArUrCrArArCrUrUrGrArArArArArGrUrGrGrCrArCrCrGrArGrUrCrGrGrUr | |
| | 20FE_ | GrCrArGrCrArGrCrUrUrCrArGrUrCrCrCrUrUrUrCrUrCrGrUrCrGrArUrGrGrUrCrArG*mC*mA*mC | |
| | PB13 | | |
| 115 | A1AT_SpRY_ | mG*mG*mC*rUrGrUrGrCrUrGrArCrCrArUrCrGrArCrArGrUrUrUrUrArGrArGrCrUrArGrArArArUrArGrCrArArGrUrUrA | 24184 |
| | ED2-_ | rArArArUrArArGrGrCrUrArGrUrCrCrGrUrUrArUrCrArArCrUrUrGrArArArArArGrUrGrGrCrArCrCrGrArGrUrCrGrGrUr | |
| | 20FE_ | GrCrArGrCrArGrCrUrUrCrArGrUrCrCrCrUrUrUrCrUrCrGrUrCrGrArUrGrGrUrCrA*mG*mC*mA | |
| | PB12 | | |
| 116 | A1AT_SpRY_ | mG*mG*mC*rUrGrUrGrCrUrGrArCrCrArUrCrGrArCrArGrUrUrUrUrArGrArGrCrUrArGrArArArUrArGrCrArArGrUrUrA | 24185 |
| | ED2-_ | rArArArUrArArGrGrCrUrArGrUrCrCrGrUrUrArUrCrArArCrUrUrGrArArArArArGrUrGrGrCrArCrCrGrArGrUrCrGrGrUr | |
| | 20FE_ | GrCrArGrCrArGrCrUrUrCrArGrUrCrCrCrUrUrUrCrUrCrGrUrCrGrArUrGrGrUrC*mA*mG*mC | |
| | PB11 | | |
| 117 | A1AT_SpRY_ | mG*mG*mC*rUrGrUrGrCrUrGrArCrCrArUrCrGrArCrArGrUrUrUrUrArGrArGrCrUrArGrArArArUrArGrCrArArGrUrUrA | 24186 |
| | ED2-_ | rArArArUrArArGrGrCrUrArGrUrCrCrGrUrUrArUrCrArArCrUrUrGrArArArArArGrUrGrGrCrArCrCrGrArGrUrCrGrGrUr | |
| | 20FE_ | GrCrArGrCrArGrCrUrUrCrArGrUrCrCrCrUrUrUrCrUrCrGrUrCrGrArUrGrGrU*mC*mA*mG | |
| | PB10 | | |
| 118 | A1AT_SpRY_ | mG*mG*mC*rUrGrUrGrCrUrGrArCrCrArUrCrGrArCrArGrUrUrUrUrArGrArGrCrUrArGrArArArUrArGrCrArArGrUrUrA | 24187 |
| | ED2-_ | rArArArUrArArGrGrCrUrArGrUrCrCrGrUrUrArUrCrArArCrUrUrGrArArArArArGrUrGrGrCrArCrCrGrArGrUrCrGrGrUr | |
| | 20FE_PB9 | GrCrArGrCrArGrCrUrUrCrArGrUrCrCrCrUrUrUrCrUrCrGrUrCrGrArUrGrG*mU*mC*mA | |
| 119 | A1AT_SpRY_ | mG*mG*mC*rUrGrUrGrCrUrGrArCrCrArUrCrGrArCrArGrUrUrUrUrArGrArGrCrUrArGrArArArUrArGrCrArArGrUrUrA | 24188 |
| | ED2-_ | rArArArUrArArGrGrCrUrArGrUrCrCrGrUrUrArUrCrArArCrUrUrGrArArArArArGrUrGrGrCrArCrCrGrArGrUrCrGrGrUr | |
| | 20FE_PB8 | GrCrArGrCrArGrCrUrUrCrArGrUrCrCrCrUrUrUrCrUrCrGrUrCrGrArUrG*mG*mU*mC | |
| 120 | A1AT_SpRY_ | mG*mG*mC*rUrGrUrGrCrUrGrArCrCrArUrCrGrArCrArGrUrUrUrUrArGrArGrCrUrArGrArArArUrArGrCrArArGrUrUrA | 24189 |
| | ED2-_ | rArArArUrArArGrGrCrUrArGrUrCrCrGrUrUrArUrCrArArCrUrUrGrArArArArArGrUrGrGrCrArCrCrGrArGrUrCrGrGrUr | |
| | 14FE_ | GrCrUrUrCrArGrUrCrCrCrUrUrUrCrUrCrGrUrCrGrArUrGrGrUrCrArGrCrArCrA*mG*mC*mC | |
| | PB17 | | |
| 121 | A1AT_SpRY_ | mG*mG*mC*rUrGrUrGrCrUrGrArCrCrArUrCrGrArCrArGrUrUrUrUrArGrArGrCrUrArGrArArArUrArGrCrArArGrUrUrA | 24190 |
| | ED2-_ | rArArArUrArArGrGrCrUrArGrUrCrCrGrUrUrArUrCrArArCrUrUrGrArArArArArGrUrGrGrCrArCrCrGrArGrUrCrGrGrUr | |
| | 14FE_ | GrCrUrUrCrArGrUrCrCrCrUrUrUrCrUrCrGrUrCrGrArUrGrGrUrCrArGrCrArC*mA*mG*mC | |
| | PB16 | | |
| 122 | A1AT_SpRY_ | mG*mG*mC*rUrGrUrGrCrUrGrArCrCrArUrCrGrArCrArGrUrUrUrUrArGrArGrCrUrArGrArArArUrArGrCrArArGrUrUrA | 24191 |
| | ED2-_ | rArArArUrArArGrGrCrUrArGrUrCrCrGrUrUrArUrCrArArCrUrUrGrArArArArArGrUrGrGrCrArCrCrGrArGrUrCrGrGrUr | |
| | 14FE_ | GrCrUrUrCrArGrUrCrCrCrUrUrUrCrUrCrGrUrCrGrArUrGrGrUrCrArGrCrA*mC*mA*mG | |
| | PB15 | | |
| 123 | A1AT_SpRY_ | mG*mG*mC*rUrGrUrGrCrUrGrArCrCrArUrCrGrArCrArGrUrUrUrUrArGrArGrCrUrArGrArArArUrArGrCrArArGrUrUrA | 24192 |
| | ED2-_ | rArArArUrArArGrGrCrUrArGrUrCrCrGrUrUrArUrCrArArCrUrUrGrArArArArArGrUrGrGrCrArCrCrGrArGrUrCrGrGrUr | |
| | 14FE_ | GrCrUrUrCrArGrUrCrCrCrUrUrUrCrUrCrGrUrCrGrArUrGrGrUrCrArGrC*mA*mC*mA | |
| | PB14 | | |
| 124 | A1AT_SpRY_ | mG*mG*mC*rUrGrUrGrCrUrGrArCrCrArUrCrGrArCrArGrUrUrUrUrArGrArGrCrUrArGrArArArUrArGrCrArArGrUrUrA | 24193 |
| | ED2-_ | rArArArUrArArGrGrCrUrArGrUrCrCrGrUrUrArUrCrArArCrUrUrGrArArArArArGrUrGrGrCrArCrCrGrArGrUrCrGrGrUr | |
| | 14FE_ | GrCrUrUrCrArGrUrCrCrCrUrUrUrCrUrCrGrUrCrGrArUrGrGrUrCrArG*mC*mA*mC | |
| | PB13 | | |
| 125 | A1AT_SpRY_ | mG*mG*mC*rUrGrUrGrCrUrGrArCrCrArUrCrGrArCrArGrUrUrUrUrArGrArGrCrUrArGrArArArUrArGrCrArArGrUrUrA | 24194 |
| | ED2-_ | rArArArUrArArGrGrCrUrArGrUrCrCrGrUrUrArUrCrArArCrUrUrGrArArArArArGrUrGrGrCrArCrCrGrArGrUrCrGrGrUr | |
| | 14FE_ | GrCrUrUrCrArGrUrCrCrCrUrUrUrCrUrCrGrUrCrGrArUrGrGrUrCrA*mG*mC*mA | |
| | PB12 | | |
| 126 | A1AT_SpRY_ | mG*mG*mC*rUrGrUrGrCrUrGrArCrCrArUrCrGrArCrArGrUrUrUrUrArGrArGrCrUrArGrArArArUrArGrCrArArGrUrUrA | 24195 |
| | ED2-_ | rArArArUrArArGrGrCrUrArGrUrCrCrGrUrUrArUrCrArArCrUrUrGrArArArArArGrUrGrGrCrArCrCrGrArGrUrCrGrGrUr | |
| | 14FE_ | GrCrUrUrCrArGrUrCrCrCrUrUrUrCrUrCrGrUrCrGrArUrGrGrUrC*mA*mG*mC | |
| | PB11 | | |
| 127 | A1AT_SpRY_ | mG*mG*mC*rUrGrUrGrCrUrGrArCrCrArUrCrGrArCrArGrUrUrUrUrArGrArGrCrUrArGrArArArUrArGrCrArArGrUrUrA | 24196 |
| | ED2-_ | rArArArUrArArGrGrCrUrArGrUrCrCrGrUrUrArUrCrArArCrUrUrGrArArArArArGrUrGrGrCrArCrCrGrArGrUrCrGrGrUr | |
| | 14FE_ | GrCrUrUrCrArGrUrCrCrCrUrUrUrCrUrCrGrUrCrGrArUrGrGrU*mC*mA*mG | |
| | PB10 | | |
| 128 | A1AT_SpRY_ | mG*mG*mC*rUrGrUrGrCrUrGrArCrCrArUrCrGrArCrArGrUrUrUrUrArGrArGrCrUrArGrArArArUrArGrCrArArGrUrUrA | 24197 |
| | ED2-_ | rArArArUrArArGrGrCrUrArGrUrCrCrGrUrUrArUrCrArArCrUrUrGrArArArArArGrUrGrGrCrArCrCrGrArGrUrCrGrGrUr | |
| | 14FE_PB9 | GrCrUrUrCrArGrUrCrCrCrUrUrUrCrUrCrGrUrCrGrArUrGrG*mU*mC*mA | |
| 129 | A1AT_SpRY_ | mG*mG*mC*rUrGrUrGrCrUrGrArCrCrArUrCrGrArCrArGrUrUrUrUrArGrArGrCrUrArGrArArArUrArGrCrArArGrUrUrA | 24198 |
| | ED2-_ | rArArArUrArArGrGrCrUrArGrUrCrCrGrUrUrArUrCrArArCrUrUrGrArArArArArGrUrGrGrCrArCrCrGrArGrUrCrGrGrUr | |
| | 14FE_PB8 | GrCrUrUrCrArGrUrCrCrCrUrUrUrCrUrCrGrUrCrGrArUrG*mG*mU*mC | |
| 130 | A1AT_SpRY_ | mG*mG*mC*rUrGrUrGrCrUrGrArCrCrArUrCrGrArCrArGrUrUrUrUrArGrArGrCrUrArGrArArArUrArGrCrArArGrUrUrA | 24199 |
| | ED2-_ | rArArArUrArArGrGrCrUrArGrUrCrCrGrUrUrArUrCrArArCrUrUrGrArArArArArGrUrGrGrCrArCrCrGrArGrUrCrGrGrUr | |
| | 11FE_ | GrCrArGrUrCrCrCrUrUrUrCrUrCrGrUrCrGrArUrGrGrUrCrArGrCrArCrA*mG*mC*mC | |
| | PB17 | | |
| 131 | A1AT_SpRY_ | mG*mG*mC*rUrGrUrGrCrUrGrArCrCrArUrCrGrArCrArGrUrUrUrUrArGrArGrCrUrArGrArArArUrArGrCrArArGrUrUrA | 24200 |
| | ED2-_ | rArArArUrArArGrGrCrUrArGrUrCrCrGrUrUrArUrCrArArCrUrUrGrArArArArArGrUrGrGrCrArCrCrGrArGrUrCrGrGrUr | |
| | 11FE_ | GrCrArGrUrCrCrCrUrUrUrCrUrCrGrUrCrGrArUrGrGrUrCrArGrCrArC*mA*mG*mC | |
| | PB16 | | |
| 132 | A1AT_SpRY_ | mG*mG*mC*rUrGrUrGrCrUrGrArCrCrArUrCrGrArCrArGrUrUrUrUrArGrArGrCrUrArGrArArArUrArGrCrArArGrUrUrA | 24201 |
| | ED2-_ | rArArArUrArArGrGrCrUrArGrUrCrCrGrUrUrArUrCrArArCrUrUrGrArArArArArGrUrGrGrCrArCrCrGrArGrUrCrGrGrUr | |
| | 11FE_ | GrCrArGrUrCrCrCrUrUrUrCrUrCrGrUrCrGrArUrGrGrUrCrArGrCrA*mC*mA*mG | |
| | PB15 | | |
| 133 | A1AT_SpRY_ | mG*mG*mC*rUrGrUrGrCrUrGrArCrCrArUrCrGrArCrArGrUrUrUrUrArGrArGrCrUrArGrArArArUrArGrCrArArGrUrUrA | 24202 |
| | ED2-_ | rArArArUrArArGrGrCrUrArGrUrCrCrGrUrUrArUrCrArArCrUrUrGrArArArArArGrUrGrGrCrArCrCrGrArGrUrCrGrGrUr | |
| | 11FE_ | GrCrArGrUrCrCrCrUrUrUrCrUrCrGrUrCrGrArUrGrGrUrCrArGrC*mA*mC*mA | |
| | PB14 | | |
| 134 | A1AT_SpRY_ | mG*mG*mC*rUrGrUrGrCrUrGrArCrCrArUrCrGrArCrArGrUrUrUrUrArGrArGrCrUrArGrArArArUrArGrCrArArGrUrUrA | 24203 |
| | ED2-_ | rArArArUrArArGrGrCrUrArGrUrCrCrGrUrUrArUrCrArArCrUrUrGrArArArArArGrUrGrGrCrArCrCrGrArGrUrCrGrGrUr | |
| | 11FE_ | GrCrArGrUrCrCrCrUrUrUrCrUrCrGrUrCrGrArUrGrGrUrCrArG*mC*mA*mC | |
| | PB13 | | |
| 135 | A1AT_SpRY_ | mG*mG*mC*rUrGrUrGrCrUrGrArCrCrArUrCrGrArCrArGrUrUrUrUrArGrArGrCrUrArGrArArArUrArGrCrArArGrUrUrA | 24204 |
| | ED2-_ | rArArArUrArArGrGrCrUrArGrUrCrCrGrUrUrArUrCrArArCrUrUrGrArArArArArGrUrGrGrCrArCrCrGrArGrUrCrGrGrUr | |
| | 11FE_ | GrCrArGrUrCrCrCrUrUrUrCrUrCrGrUrCrGrArUrGrGrUrCrA*mG*mC*mA | |
| | PB12 | | |
| 136 | A1AT_SpRY_ | mG*mG*mC*rUrGrUrGrCrUrGrArCrCrArUrCrGrArCrArGrUrUrUrUrArGrArGrCrUrArGrArArArUrArGrCrArArGrUrUrA | 24205 |
| | ED2-_ | rArArArUrArArGrGrCrUrArGrUrCrCrGrUrUrArUrCrArArCrUrUrGrArArArArArGrUrGrGrCrArCrCrGrArGrUrCrGrGrUr | |
| | 11FE_ | GrCrArGrUrCrCrCrUrUrUrCrUrCrGrUrCrGrArUrGrGrUrC*mA*mG*mC | |
| | PB11 | | |
| 137 | A1AT_SpRY_ | mG*mG*mC*rUrGrUrGrCrUrGrArCrCrArUrCrGrArCrArGrUrUrUrUrArGrArGrCrUrArGrArArArUrArGrCrArArGrUrUrA | 24206 |
| | ED2-_ | rArArArUrArArGrGrCrUrArGrUrCrCrGrUrUrArUrCrArArCrUrUrGrArArArArArGrUrGrGrCrArCrCrGrArGrUrCrGrGrUr | |
| | 11FE_ | GrCrArGrUrCrCrCrUrUrUrCrUrCrGrUrCrGrArUrGrGrU*mC*mA*mG | |
| | PB10 | | |
| 138 | A1AT_SpRY_ | mG*mG*mC*rUrGrUrGrCrUrGrArCrCrArUrCrGrArCrArGrUrUrUrUrArGrArGrCrUrArGrArArArUrArGrCrArArGrUrUrA | 24207 |
| | ED2-_ | rArArArUrArArGrGrCrUrArGrUrCrCrGrUrUrArUrCrArArCrUrUrGrArArArArArGrUrGrGrCrArCrCrGrArGrUrCrGrGrUr | |
| | 11FE_PB9 | GrCrArGrUrCrCrCrUrUrUrCrUrCrGrUrCrGrArUrGrG*mU*mC*mA | |
| 139 | A1AT_SpRY_ | mG*mG*mC*rUrGrUrGrCrUrGrArCrCrArUrCrGrArCrArGrUrUrUrUrArGrArGrCrUrArGrArArArUrArGrCrArArGrUrUrA | 24208 |
| | ED2-_ | rArArArUrArArGrGrCrUrArGrUrCrCrGrUrUrArUrCrArArCrUrUrGrArArArArArGrUrGrGrCrArCrCrGrArGrUrCrGrGrUr | |
| | 11FE_PB8 | GrCrArGrUrCrCrCrUrUrUrCrUrCrGrUrCrGrArUrG*mG*mU*mC | |
| 140 | A1AT_SpRY_ | mG*mG*mC*rUrGrUrGrCrUrGrArCrCrArUrCrGrArCrArGrUrUrUrUrArGrArGrCrUrArGrArArArUrArGrCrArArGrUrUrA | 24209 |
| | ED2-_ | rArArArUrArArGrGrCrUrArGrUrCrCrGrUrUrArUrCrArArCrUrUrGrArArArArArGrUrGrGrCrArCrCrGrArGrUrCrGrGrUr | |
| | 9FE_PB17 | GrCrUrCrCrCrUrUrUrCrUrCrGrUrCrGrArUrGrGrUrCrArGrCrArCrA*mG*mC*mC | |
| 141 | A1AT_SpRY_ | mG*mG*mC*rUrGrUrGrCrUrGrArCrCrArUrCrGrArCrArGrUrUrUrUrArGrArGrCrUrArGrArArArUrArGrCrArArGrUrUrA | 24210 |
| | ED2-_ | rArArArUrArArGrGrCrUrArGrUrCrCrGrUrUrArUrCrArArCrUrUrGrArArArArArGrUrGrGrCrArCrCrGrArGrUrCrGrGrUr | |
| | 9FE_PB16 | GrCrUrCrCrCrUrUrUrCrUrCrGrUrCrGrArUrGrGrUrCrArGrCrArC*mA*mG*mC | |
| 142 | A1AT_SpRY_ | mG*mG*mC*rUrGrUrGrCrUrGrArCrCrArUrCrGrArCrArGrUrUrUrUrArGrArGrCrUrArGrArArArUrArGrCrArArGrUrUrA | 24211 |
| | ED2-_ | rArArArUrArArGrGrCrUrArGrUrCrCrGrUrUrArUrCrArArCrUrUrGrArArArArArGrUrGrGrCrArCrCrGrArGrUrCrGrGrUr | |
| | 9FE_PB15 | GrCrUrCrCrCrUrUrUrCrUrCrGrUrCrGrArUrGrGrUrCrArGrCrA*mC*mA*mG | |
| 143 | A1AT_SpRY_ | mG*mG*mC*rUrGrUrGrCrUrGrArCrCrArUrCrGrArCrArGrUrUrUrUrArGrArGrCrUrArGrArArArUrArGrCrArArGrUrUrA | 24212 |
| | ED2-_ | rArArArUrArArGrGrCrUrArGrUrCrCrGrUrUrArUrCrArArCrUrUrGrArArArArArGrUrGrGrCrArCrCrGrArGrUrCrGrGrUr | |
| | 9FE_PB14 | GrCrUrCrCrCrUrUrUrCrUrCrGrUrCrGrArUrGrGrUrCrArGrC*mA*mC*mA | |
| 144 | A1AT_SpRY_ | mG*mG*mC*rUrGrUrGrCrUrGrArCrCrArUrCrGrArCrArGrUrUrUrUrArGrArGrCrUrArGrArArArUrArGrCrArArGrUrUrA | 24213 |
| | ED2-_ | rArArArUrArArGrGrCrUrArGrUrCrCrGrUrUrArUrCrArArCrUrUrGrArArArArArGrUrGrGrCrArCrCrGrArGrUrCrGrGrUr | |
| | 9FE_PB13 | GrCrUrCrCrCrUrUrUrCrUrCrGrUrCrGrArUrGrGrUrCrArG*mC*mA*mC | |
| 145 | A1AT_SpRY_ | mG*mG*mC*rUrGrUrGrCrUrGrArCrCrArUrCrGrArCrArGrUrUrUrUrArGrArGrCrUrArGrArArArUrArGrCrArArGrUrUrA | 24214 |
| | ED2-_ | rArArArUrArArGrGrCrUrArGrUrCrCrGrUrUrArUrCrArArCrUrUrGrArArArArArGrUrGrGrCrArCrCrGrArGrUrCrGrGrUr | |
| | 9FE_PB12 | GrCrUrCrCrCrUrUrUrCrUrCrGrUrCrGrArUrGrGrUrCrA*mG*mC*mA | |
| 146 | A1AT_SpRY_ | mG*mG*mC*rUrGrUrGrCrUrGrArCrCrArUrCrGrArCrArGrUrUrUrUrArGrArGrCrUrArGrArArArUrArGrCrArArGrUrUrA | 24215 |
| | ED2-_ | rArArArUrArArGrGrCrUrArGrUrCrCrGrUrUrArUrCrArArCrUrUrGrArArArArArGrUrGrGrCrArCrCrGrArGrUrCrGrGrUr | |
| | 9FE_PB11 | GrCrUrCrCrCrUrUrUrCrUrCrGrUrCrGrArUrGrGrUrC*mA*mG*mC | |
| 147 | A1AT_SpRY_ | mG*mG*mC*rUrGrUrGrCrUrGrArCrCrArUrCrGrArCrArGrUrUrUrUrArGrArGrCrUrArGrArArArUrArGrCrArArGrUrUrA | 24216 |
| | ED2-_ | rArArArUrArArGrGrCrUrArGrUrCrCrGrUrUrArUrCrArArCrUrUrGrArArArArArGrUrGrGrCrArCrCrGrArGrUrCrGrGrUr | |
| | 9FE_PB10 | GrCrUrCrCrCrUrUrUrCrUrCrGrUrCrGrArUrGrGrU*mC*mA*mG | |
| 148 | A1AT_SpRY_ | mG*mG*mC*rUrGrUrGrCrUrGrArCrCrArUrCrGrArCrArGrUrUrUrUrArGrArGrCrUrArGrArArArUrArGrCrArArGrUrUrA | 24217 |
| | ED2-_ | rArArArUrArArGrGrCrUrArGrUrCrCrGrUrUrArUrCrArArCrUrUrGrArArArArArGrUrGrGrCrArCrCrGrArGrUrCrGrGrUr | |
| | 9FE_PB9 | GrCrUrCrCrCrUrUrUrCrUrCrGrUrCrGrArUrGrG*mU*mC*mA | |
| 149 | A1AT_SpRY_ | mG*mG*mC*rUrGrUrGrCrUrGrArCrCrArUrCrGrArCrArGrUrUrUrUrArGrArGrCrUrArGrArArArUrArGrCrArArGrUrUrA | 24218 |
| | ED2-_ | rArArArUrArArGrGrCrUrArGrUrCrCrGrUrUrArUrCrArArCrUrUrGrArArArArArGrUrGrGrCrArCrCrGrArGrUrCrGrGrUr | |
| | 9FE_PB8 | GrCrUrCrCrCrUrUrUrCrUrCrGrUrCrGrArUrG*mG*mU*mC | |
| 150 | A1AT_SpRY_ | mG*mG*mC*rUrGrUrGrCrUrGrArCrCrArUrCrGrArCrArGrUrUrUrUrArGrArGrCrUrArGrArArArUrArGrCrArArGrUrUrA | 24219 |
| | ED2-_ | rArArArUrArArGrGrCrUrArGrUrCrCrGrUrUrArUrCrArArCrUrUrGrArArArArArGrUrGrGrCrArCrCrGrArGrUrCrGrGrUr | |
| | 7FE_PB17 | GrCrCrCrUrUrUrCrUrCrGrUrCrGrArUrGrGrUrCrArGrCrArCrA*mG*mC*mC | |
| 151 | A1AT_SpRY_ | mG*mG*mC*rUrGrUrGrCrUrGrArCrCrArUrCrGrArCrArGrUrUrUrUrArGrArGrCrUrArGrArArArUrArGrCrArArGrUrUrA | 24220 |
| | ED2-_ | rArArArUrArArGrGrCrUrArGrUrCrCrGrUrUrArUrCrArArCrUrUrGrArArArArArGrUrGrGrCrArCrCrGrArGrUrCrGrGrUr | |
| | 7FE_PB16 | GrCrCrCrUrUrUrCrUrCrGrUrCrGrArUrGrGrUrCrArGrCrArC*mA*mG*mC | |
| 152 | A1AT_SpRY_ | mG*mG*mC*rUrGrUrGrCrUrGrArCrCrArUrCrGrArCrArGrUrUrUrUrArGrArGrCrUrArGrArArArUrArGrCrArArGrUrUrA | 24221 |
| | ED2-_ | rArArArUrArArGrGrCrUrArGrUrCrCrGrUrUrArUrCrArArCrUrUrGrArArArArArGrUrGrGrCrArCrCrGrArGrUrCrGrGrUr | |
| | 7FE_PB15 | GrCrCrCrUrUrUrCrUrCrGrUrCrGrArUrGrGrUrCrArGrCrA*mC*mA*mG | |
| 153 | A1AT_SpRY_ | mG*mG*mC*rUrGrUrGrCrUrGrArCrCrArUrCrGrArCrArGrUrUrUrUrArGrArGrCrUrArGrArArArUrArGrCrArArGrUrUrA | 24222 |
| | ED2-_ | rArArArUrArArGrGrCrUrArGrUrCrCrGrUrUrArUrCrArArCrUrUrGrArArArArArGrUrGrGrCrArCrCrGrArGrUrCrGrGrUr | |
| | 7FE_PB14 | GrCrCrCrUrUrUrCrUrCrGrUrCrGrArUrGrGrUrCrArGrC*mA*mC*mA | |
| 154 | A1AT_SpRY_ | mG*mG*mC*rUrGrUrGrCrUrGrArCrCrArUrCrGrArCrArGrUrUrUrUrArGrArGrCrUrArGrArArArUrArGrCrArArGrUrUrA | 24223 |
| | ED2-_ | rArArArUrArArGrGrCrUrArGrUrCrCrGrUrUrArUrCrArArCrUrUrGrArArArArArGrUrGrGrCrArCrCrGrArGrUrCrGrGrUr | |
| | 7FE_PB13 | GrCrCrCrUrUrUrCrUrCrGrUrCrGrArUrGrGrUrCrArG*mC*mA*mC | |
| 155 | A1AT_SpRY_ | mG*mG*mC*rUrGrUrGrCrUrGrArCrCrArUrCrGrArCrArGrUrUrUrUrArGrArGrCrUrArGrArArArUrArGrCrArArGrUrUrA | 24224 |
| | ED2-_ | rArArArUrArArGrGrCrUrArGrUrCrCrGrUrUrArUrCrArArCrUrUrGrArArArArArGrUrGrGrCrArCrCrGrArGrUrCrGrGrUr | |
| | 7FE_PB12 | GrCrCrCrUrUrUrCrUrCrGrUrCrGrArUrGrGrUrCrA*mG*mC*mA | |
| 156 | A1AT_SpRY_ | mG*mG*mC*rUrGrUrGrCrUrGrArCrCrArUrCrGrArCrArGrUrUrUrUrArGrArGrCrUrArGrArArArUrArGrCrArArGrUrUrA | 24225 |
| | ED2-_ | rArArArUrArArGrGrCrUrArGrUrCrCrGrUrUrArUrCrArArCrUrUrGrArArArArArGrUrGrGrCrArCrCrGrArGrUrCrGrGrUr | |
| | 7FE_PB11 | GrCrCrCrUrUrUrCrUrCrGrUrCrGrArUrGrGrUrC*mA*mG*mC | |
| 157 | A1AT_SpRY_ | mG*mG*mC*rUrGrUrGrCrUrGrArCrCrArUrCrGrArCrArGrUrUrUrUrArGrArGrCrUrArGrArArArUrArGrCrArArGrUrUrA | 24226 |
| | ED2-_ | rArArArUrArArGrGrCrUrArGrUrCrCrGrUrUrArUrCrArArCrUrUrGrArArArArArGrUrGrGrCrArCrCrGrArGrUrCrGrGrUr | |
| | 7FE_PB10 | GrCrCrCrUrUrUrCrUrCrGrUrCrGrArUrGrGrU*mC*mA*mG | |
| 158 | A1AT_SpRY_ | mG*mG*mC*rUrGrUrGrCrUrGrArCrCrArUrCrGrArCrArGrUrUrUrUrArGrArGrCrUrArGrArArArUrArGrCrArArGrUrUrA | 24227 |
| | ED2-_ | rArArArUrArArGrGrCrUrArGrUrCrCrGrUrUrArUrCrArArCrUrUrGrArArArArArGrUrGrGrCrArCrCrGrArGrUrCrGrGrUr | |
| | 7FE_PB9 | GrCrCrCrUrUrUrCrUrCrGrUrCrGrArUrGrG*mU*mC*mA | |
| 159 | A1AT_SpRY_ | mG*mG*mC*rUrGrUrGrCrUrGrArCrCrArUrCrGrArCrArGrUrUrUrUrArGrArGrCrUrArGrArArArUrArGrCrArArGrUrUrA | 24228 |
| | ED2-_ | rArArArUrArArGrGrCrUrArGrUrCrCrGrUrUrArUrCrArArCrUrUrGrArArArArArGrUrGrGrCrArCrCrGrArGrUrCrGrGrUr | |
| | 7FE_PB8 | GrCrCrCrUrUrUrCrUrCrGrUrCrGrArUrG*mG*mU*mC | |
| 160 | A1AT_SpRY_ | mG*mG*mC*rUrGrUrGrCrUrGrArCrCrArUrCrGrArCrArGrUrUrUrUrArGrArGrCrUrArGrArArArUrArGrCrArArGrUrUrA | 24229 |
| | ED2-_ | rArArArUrArArGrGrCrUrArGrUrCrCrGrUrUrArUrCrArArCrUrUrGrArArArArArGrUrGrGrCrArCrCrGrArGrUrCrGrGrUr | |
| | 5FE_PB17 | GrCrUrUrUrCrUrCrGrUrCrGrArUrGrGrUrCrArGrCrArCrA*mG*mC*mC | |
| 161 | A1AT_SpRY_ | mG*mG*mC*rUrGrUrGrCrUrGrArCrCrArUrCrGrArCrArGrUrUrUrUrArGrArGrCrUrArGrArArArUrArGrCrArArGrUrUrA | 24230 |
| | ED2-_ | rArArArUrArArGrGrCrUrArGrUrCrCrGrUrUrArUrCrArArCrUrUrGrArArArArArGrUrGrGrCrArCrCrGrArGrUrCrGrGrUr | |
| | 5FE_PB16 | GrCrUrUrUrCrUrCrGrUrCrGrArUrGrGrUrCrArGrCrArC*mA*mG*mC | |
| 162 | A1AT_SpRY_ | mG*mG*mC*rUrGrUrGrCrUrGrArCrCrArUrCrGrArCrArGrUrUrUrUrArGrArGrCrUrArGrArArArUrArGrCrArArGrUrUrA | 24231 |
| | ED2-_ | rArArArUrArArGrGrCrUrArGrUrCrCrGrUrUrArUrCrArArCrUrUrGrArArArArArGrUrGrGrCrArCrCrGrArGrUrCrGrGrUr | |
| | 5FE_PB15 | GrCrUrUrUrCrUrCrGrUrCrGrArUrGrGrUrCrArGrCrA*mC*mA*mG | |
| 163 | A1AT_SpRY_ | mG*mG*mC*rUrGrUrGrCrUrGrArCrCrArUrCrGrArCrArGrUrUrUrUrArGrArGrCrUrArGrArArArUrArGrCrArArGrUrUrA | 24232 |
| | ED2-_ | rArArArUrArArGrGrCrUrArGrUrCrCrGrUrUrArUrCrArArCrUrUrGrArArArArArGrUrGrGrCrArCrCrGrArGrUrCrGrGrUr | |
| | 5FE_PB14 | GrCrUrUrUrCrUrCrGrUrCrGrArUrGrGrUrCrArGrC*mA*mC*mA | |
| 164 | A1AT_SpRY_ | mG*mG*mC*rUrGrUrGrCrUrGrArCrCrArUrCrGrArCrArGrUrUrUrUrArGrArGrCrUrArGrArArArUrArGrCrArArGrUrUrA | 24233 |
| | ED2-_ | rArArArUrArArGrGrCrUrArGrUrCrCrGrUrUrArUrCrArArCrUrUrGrArArArArArGrUrGrGrCrArCrCrGrArGrUrCrGrGrUr | |
| | 5FE_PB13 | GrCrUrUrUrCrUrCrGrUrCrGrArUrGrGrUrCrArG*mC*mA*mC | |
| 165 | A1AT_SpRY_ | mG*mG*mC*rUrGrUrGrCrUrGrArCrCrArUrCrGrArCrArGrUrUrUrUrArGrArGrCrUrArGrArArArUrArGrCrArArGrUrUrA | 24234 |
| | ED2-_ | rArArArUrArArGrGrCrUrArGrUrCrCrGrUrUrArUrCrArArCrUrUrGrArArArArArGrUrGrGrCrArCrCrGrArGrUrCrGrGrUr | |
| | 5FE_PB12 | GrCrUrUrUrCrUrCrGrUrCrGrArUrGrGrUrCrA*mG*mC*mA | |
| 166 | A1AT_SpRY_ | mG*mG*mC*rUrGrUrGrCrUrGrArCrCrArUrCrGrArCrArGrUrUrUrUrArGrArGrCrUrArGrArArArUrArGrCrArArGrUrUrA | 24235 |
| | ED2-_ | ArArArUrArArGrGrCrUrArGrUrCrCrGrUrUrArUrCrArArCrUrUrGrArArArArArGrUrGrGrCrArCrCrGrArGrUrCrGrGrUr | |
| | 5FE_PB11 | GrCrUrUrUrCrUrCrGrUrCrGrArUrGrGrUrC*mA*mG*mC | |
| 167 | A1AT_SpRY_ | mG*mG*mC*rUrGrUrGrCrUrGrArCrCrArUrCrGrArCrArGrUrUrUrUrArGrArGrCrUrArGrArArArUrArGrCrArArGrUrUrA | 24236 |
| | ED2-_ | rArArArUrArArGrGrCrUrArGrUrCrCrGrUrUrArUrCrArArCrUrUrGrArArArArArGrUrGrGrCrArCrCrGrArGrUrCrGrGrUr | |
| | 5FE_PB10 | GrCrUrUrUrCrUrCrGrUrCrGrArUrGrGrU*mC*mA*mG | |
| 168 | A1AT_SpRY_ | mG*mG*mC*rUrGrUrGrCrUrGrArCrCrArUrCrGrArCrArGrUrUrUrUrArGrArGrCrUrArGrArArArUrArGrCrArArGrUrUrA | 24237 |
| | ED2-_ | rArArArUrArArGrGrCrUrArGrUrCrCrGrUrUrArUrCrArArCrUrUrGrArArArArArGrUrGrGrCrArCrCrGrArGrUrCrGrGrUr | |
| | 5FE_PB9 | GrCrUrUrUrCrUrCrGrUrCrGrArUrGrG*mU*mC*mA | |
| 169 | A1AT_SpRY_ | mG*mG*mC*rUrGrUrGrCrUrGrArCrCrArUrCrGrArCrArGrUrUrUrUrArGrArGrCrUrArGrArArArUrArGrCrArArGrUrUrA | 24238 |
| | ED2-_ | rArArArUrArArGrGrCrUrArGrUrCrCrGrUrUrArUrCrArArCrUrUrGrArArArArArGrUrGrGrCrArCrCrGrArGrUrCrGrGrUr | |
| | 5FE_PB8 | GrCrUrUrUrCrUrCrGrUrCrGrArUrG*mG*mU*mC | |
| 170 | A1AT_SpRY_ | mG*mG*mC*rUrGrUrGrCrUrGrArCrCrArUrCrGrArCrArGrUrUrUrUrArGrArGrCrUrArGrArArArUrArGrCrArArGrUrUrA | 24239 |
| | ED2-_ | rArArArUrArArGrGrCrUrArGrUrCrCrGrUrUrArUrCrArArCrUrUrGrArArArArArGrUrGrGrCrArCrCrGrArGrUrCrGrGrUr | |
| | 3FE_PB17 | GrCrUrCrUrCrGrUrCrGrArUrGrGrUrCrArGrCrArCrA*mG*mC*mC | |
| 171 | A1AT_SpRY_ | mG*mG*mC*rUrGrUrGrCrUrGrArCrCrArUrCrGrArCrArGrUrUrUrUrArGrArGrCrUrArGrArArArUrArGrCrArArGrUrUrA | 24240 |
| | ED2-_ | rArArArUrArArGrGrCrUrArGrUrCrCrGrUrUrArUrCrArArCrUrUrGrArArArArArGrUrGrGrCrArCrCrGrArGrUrCrGrGrUr | |
| | 3FE_PB16 | GrCrUrCrUrCrGrUrCrGrArUrGrGrUrCrArGrCrArC*mA*mG*mC | |
| 172 | A1AT_SpRY_ | mG*mG*mC*rUrGrUrGrCrUrGrArCrCrArUrCrGrArCrArGrUrUrUrUrArGrArGrCrUrArGrArArArUrArGrCrArArGrUrUrA | 24241 |
| | ED2-_ | rArArArUrArArGrGrCrUrArGrUrCrCrGrUrUrArUrCrArArCrUrUrGrArArArArArGrUrGrGrCrArCrCrGrArGrUrCrGrGrUr | |
| | 3FE_PB15 | GrCrUrCrUrCrGrUrCrGrArUrGrGrUrCrArGrCrA*mC*mA*mG | |
| 173 | A1AT_SpRY_ | mG*mG*mC*rUrGrUrGrCrUrGrArCrCrArUrCrGrArCrArGrUrUrUrUrArGrArGrCrUrArGrArArArUrArGrCrArArGrUrUrA | 24242 |
| | ED2-_ | rArArArUrArArGrGrCrUrArGrUrCrCrGrUrUrArUrCrArArCrUrUrGrArArArArArGrUrGrGrCrArCrCrGrArGrUrCrGrGrUr | |
| | 3FE_PB14 | GrCrUrCrUrCrGrUrCrGrArUrGrGrUrCrArGrC*mA*mC*mA | |
| 174 | A1AT_SpRY_ | mG*mG*mC*rUrGrUrGrCrUrGrArCrCrArUrCrGrArCrArGrUrUrUrUrArGrArGrCrUrArGrArArArUrArGrCrArArGrUrUrA | 24243 |
| | ED2-_ | rArArArUrArArGrGrCrUrArGrUrCrCrGrUrUrArUrCrArArCrUrUrGrArArArArArGrUrGrGrCrArCrCrGrArGrUrCrGrGrUr | |
| | 3FE_PB13 | GrCrUrCrUrCrGrUrCrGrArUrGrGrUrCrArG*mC*mA*mC | |
| 175 | A1AT_SpRY_ | mG*mG*mC*rUrGrUrGrCrUrGrArCrCrArUrCrGrArCrArGrUrUrUrUrArGrArGrCrUrArGrArArArUrArGrCrArArGrUrUrA | 24244 |
| | ED2-_ | rArArArUrArArGrGrCrUrArGrUrCrCrGrUrUrArUrCrArArCrUrUrGrArArArArArGrUrGrGrCrArCrCrGrArGrUrCrGrGrUr | |
| | 3FE_PB12 | GrCrUrCrUrCrGrUrCrGrArUrGrGrUrCrA*mG*mC*mA | |
| 176 | A1AT_SpRY_ | mG*mG*mC*rUrGrUrGrCrUrGrArCrCrArUrCrGrArCrArGrUrUrUrUrArGrArGrCrUrArGrArArArUrArGrCrArArGrUrUrA | 24245 |
| | ED2-_ | rArArArUrArArGrGrCrUrArGrUrCrCrGrUrUrArUrCrArArCrUrUrGrArArArArArGrUrGrGrCrArCrCrGrArGrUrCrGrGrUr | |
| | 3FE_PB11 | GrCrUrCrUrCrGrUrCrGrArUrGrGrUrC*mA*mG*mC | |
| 177 | A1AT_SpRY_ | mG*mG*mC*rUrGrUrGrCrUrGrArCrCrArUrCrGrArCrArGrUrUrUrUrArGrArGrCrUrArGrArArArUrArGrCrArArGrUrUrA | 24246 |
| | ED2-_ | rArArArUrArArGrGrCrUrArGrUrCrCrGrUrUrArUrCrArArCrUrUrGrArArArArArGrUrGrGrCrArCrCrGrArGrUrCrGrGrUr | |
| | 3FE_PB10 | GrCrUrCrUrCrGrUrCrGrArUrGrGrU*mC*mA*mG | |
| 178 | A1AT_SpRY_ | mG*mG*mC*rUrGrUrGrCrUrGrArCrCrArUrCrGrArCrArGrUrUrUrUrArGrArGrCrUrArGrArArArUrArGrCrArArGrUrUrA | 24247 |
| | ED2-_ | rArArArUrArArGrGrCrUrArGrUrCrCrGrUrUrArUrCrArArCrUrUrGrArArArArArGrUrGrGrCrArCrCrGrArGrUrCrGrGrUr | |
| | 3FE_PB9 | GrCrUrCrUrCrGrUrCrGrArUrGrG*mU*mC*mA | |
| 179 | A1AT_SpRY_ | mG*mG*mC*rUrGrUrGrCrUrGrArCrCrArUrCrGrArCrArGrUrUrUrUrArGrArGrCrUrArGrArArArUrArGrCrArArGrUrUrA | 24248 |
| | ED2-_ | rArArArUrArArGrGrCrUrArGrUrCrCrGrUrUrArUrCrArArCrUrUrGrArArArArArGrUrGrGrCrArCrCrGrArGrUrCrGrGrUr | |
| | 3FE_PB8 | GrCrUrCrUrCrGrUrCrGrArUrG*mG*mU*mC | |
| 180 | A1AT_ | mA*mG*mG*rCrUrGrUrGrCrUrGrArCrCrArUrCrGrArCrGrUrUrUrUrArGrArGrCrUrArGrArArArUrArGrCrArArGrUrUrA | 24249 |
| | ScaCas9++_ | rArArArUrArArGrGrCrUrArGrUrCrCrGrUrUrArUrCrArArCrUrUrGrArArArArArGrUrGrGrCrArCrCrGrArGrUrCrGrGrUr | |
| | SpRY_ED3-_ | GrCrArCrArUrGrGrCrCrCrCrArGrCrArGrCrUrUrCrArGrUrCrCrCrUrUrUrCrUrCrGrUrCrGrArUrGrGrUrCrArGrCrArCrAr | |
| | 30FE_ | G*mC*mC*mU | |
| | PB17 | | |
| 181 | A1AT_ | mA*mG*mG*rCrUrGrUrGrCrUrGrArCrCrArUrCrGrArCrGrUrUrUrUrArGrArGrCrUrArGrArArArUrArGrCrArArGrUrUrA | 24250 |
| | ScaCas9++_ | rArArArUrArArGrGrCrUrArGrUrCrCrGrUrUrArUrCrArArCrUrUrGrArArArArArGrUrGrGrCrArCrCrGrArGrUrCrGrGrUr | |
| | SpRY_ED3-_ | GrCrArCrArUrGrGrCrCrCrCrArGrCrArGrCrUrUrCrArGrUrCrCrCrUrUrUrCrUrCrGrUrCrGrArUrGrGrUrCrArGrCrArCrA* | |
| | 30FE_ | mG*mC*mC | |
| | PB16 | | |
| 182 | A1AT_ | mA*mG*mG*rCrUrGrUrGrCrUrGrArCrCrArUrCrGrArCrGrUrUrUrUrArGrArGrCrUrArGrArArArUrArGrCrArArGrUrUrA | 24251 |
| | ScaCas9++_ | rArArArUrArArGrGrCrUrArGrUrCrCrGrUrUrArUrCrArArCrUrUrGrArArArArArGrUrGrGrCrArCrCrGrArGrUrCrGrGrUr | |
| | SpRY_ED3-_ | GrCrArCrArUrGrGrCrCrCrCrArGrCrArGrCrUrUrCrArGrUrCrCrCrUrUrUrCrUrCrGrUrCrGrArUrGrGrUrCrArGrCrArC* | |
| | 30FE_ | mA*mG*mC | |
| | PB15 | | |
| 183 | A1AT_ | mA*mG*mG*rCrUrGrUrGrCrUrGrArCrCrArUrCrGrArCrGrUrUrUrUrArGrArGrCrUrArGrArArArUrArGrCrArArGrUrUrA | 24252 |
| | ScaCas9++_ | rArArArUrArArGrGrCrUrArGrUrCrCrGrUrUrArUrCrArArCrUrUrGrArArArArArGrUrGrGrCrArCrCrGrArGrUrCrGrGrUr | |
| | SpRY_ED3-_ | GrCrArCrArUrGrGrCrCrCrCrArGrCrArGrCrUrUrCrArGrUrCrCrCrUrUrUrCrUrCrGrUrCrGrArUrGrGrUrCrArGrCrA*mC* | |
| | 30FE_ | mA*mG | |
| | PB14 | | |
| 184 | A1AT_ | mA*mG*mG*rCrUrGrUrGrCrUrGrArCrCrArUrCrGrArCrGrUrUrUrUrArGrArGrCrUrArGrArArArUrArGrCrArArGrUrUrA | 24253 |
| | ScaCas9++_ | rArArArUrArArGrGrCrUrArGrUrCrCrGrUrUrArUrCrArArCrUrUrGrArArArArArGrUrGrGrCrArCrCrGrArGrUrCrGrGrUr | |
| | SpRY_ED3-_ | GrCrArCrArUrGrGrCrCrCrCrArGrCrArGrCrUrUrCrArGrUrCrCrCrUrUrUrCrUrCrGrUrCrGrArUrGrGrUrCrArGrC*mA* | |
| | 30FE_ | mC*mA | |
| | PB13 | | |
| 185 | A1AT_ | mA*mG*mG*rCrUrGrUrGrCrUrGrArCrCrArUrCrGrArCrGrUrUrUrUrArGrArGrCrUrArGrArArArUrArGrCrArArGrUrUrA | 24254 |
| | ScaCas9++_ | rArArArUrArArGrGrCrUrArGrUrCrCrGrUrUrArUrCrArArCrUrUrGrArArArArArGrUrGrGrCrArCrCrGrArGrUrCrGrGrUr | |
| | SpRY_ED3-_ | GrCrArCrArUrGrGrCrCrCrCrArGrCrArGrCrUrUrCrArGrUrCrCrCrUrUrUrCrUrCrGrUrCrGrArUrGrGrUrCrArG*mC*mA* | |
| | 30FE_ | mC | |
| | PB12 | | |
| 186 | A1AT_ | mA*mG*mG*rCrUrGrUrGrCrUrGrArCrCrArUrCrGrArCrGrUrUrUrUrArGrArGrCrUrArGrArArArUrArGrCrArArGrUrUrA | 24255 |
| | ScaCas9++_ | rArArArUrArArGrGrCrUrArGrUrCrCrGrUrUrArUrCrArArCrUrUrGrArArArArArGrUrGrGrCrArCrCrGrArGrUrCrGrGrUr | |
| | SpRY_ED3-_ | GrCrArCrArUrGrGrCrCrCrCrArGrCrArGrCrUrUrCrArGrUrCrCrCrUrUrUrCrUrCrGrUrCrGrArUrGrGrUrCrA*mG*mC* | |
| | 30FE_ | mA | |
| | PB11 | | |
| 187 | A1AT_ | mA*mG*mG*rCrUrGrUrGrCrUrGrArCrCrArUrCrGrArCrGrUrUrUrUrArGrArGrCrUrArGrArArArUrArGrCrArArGrUrUrA | 24256 |
| | ScaCas9++_ | rArArArUrArArGrGrCrUrArGrUrCrCrGrUrUrArUrCrArArCrUrUrGrArArArArArGrUrGrGrCrArCrCrGrArGrUrCrGrGrUr | |
| | SpRY_ED3-_ | GrCrArCrArUrGrGrCrCrCrCrArGrCrArGrCrUrUrCrArGrUrCrCrCrUrUrUrCrUrCrGrUrCrGrArUrGrGrUrC*mA*mG*mC | |
| | 30FE_ | | |
| | PB10 | | |
| 188 | A1AT_ | mA*mG*mG*rCrUrGrUrGrCrUrGrArCrCrArUrCrGrArCrGrUrUrUrUrArGrArGrCrUrArGrArArArUrArGrCrArArGrUrUrA | 24257 |
| | ScaCas9++_ | rArArArUrArArGrGrCrUrArGrUrCrCrGrUrUrArUrCrArArCrUrUrGrArArArArArGrUrGrGrCrArCrCrGrArGrUrCrGrGrUr | |
| | SpRY_ED3-_ | GrCrArCrArUrGrGrCrCrCrCrArGrCrArGrCrUrUrCrArGrUrCrCrCrUrUrUrCrUrCrGrUrCrGrArUrGrGrU*mC*mA*mG | |
| | 30FE_PB9 | | |
| 189 | A1AT_ | mA*mG*mG*rCrUrGrUrGrCrUrGrArCrCrArUrCrGrArCrGrUrUrUrUrArGrArGrCrUrArGrArArArUrArGrCrArArGrUrUrA | 24258 |
| | ScaCas9++_ | rArArArUrArArGrGrCrUrArGrUrCrCrGrUrUrArUrCrArArCrUrUrGrArArArArArGrUrGrGrCrArCrCrGrArGrUrCrGrGrUr | |
| | SpRY_ED3-_ | GrCrArCrArUrGrGrCrCrCrCrArGrCrArGrCrUrUrCrArGrUrCrCrCrUrUrUrCrUrCrGrUrCrGrArUrGrG*mU*mC*mA | |
| | 30FE_PB8 | | |
| 190 | A1AT_ | mA*mG*mG*rCrUrGrUrGrCrUrGrArCrCrArUrCrGrArCrGrUrUrUrUrArGrArGrCrUrArGrArArArUrArGrCrArArGrUrUrA | 24259 |
| | ScaCas9++_ | rArArArUrArArGrGrCrUrArGrUrCrCrGrUrUrArUrCrArArCrUrUrGrArArArArArGrUrGrGrCrArCrCrGrArGrUrCrGrGrUr | |
| | SpRY_ED3-_ | GrCrGrCrCrCrCrArGrCrArGrCrUrUrCrArGrUrCrCrCrUrUrUrCrUrCrGrUrCrGrArUrGrGrUrCrArGrCrArCrArG*mC*mC* | |
| | 25FE_ | mU | |
| | PB17 | | |
| 191 | A1AT_ | mA*mG*mG*rCrUrGrUrGrCrUrGrArCrCrArUrCrGrArCrGrUrUrUrUrArGrArGrCrUrArGrArArArUrArGrCrArArGrUrUrA | 24260 |
| | ScaCas9++_ | ArArArUrArArGrGrCrUrArGrUrCrCrGrUrUrArUrCrArArCrUrUrGrArArArArArGrUrGrGrCrArCrCrGrArGrUrCrGrGrUr | |
| | SpRY_ED3-_ | GrCrGrCrCrCrCrArGrCrArGrCrUrUrCrArGrUrCrCrCrUrUrUrCrUrCrGrUrCrGrArUrGrGrUrCrArGrCrArCrA*mG*mC*m | |
| | 25FE_ | C | |
| | PB16 | | |
| 192 | A1AT_ | mA*mG*mG*rCrUrGrUrGrCrUrGrArCrCrArUrCrGrArCrGrUrUrUrUrArGrArGrCrUrArGrArArArUrArGrCrArArGrUrUrA | 24261 |
| | ScaCas9++_ | rArArArUrArArGrGrCrUrArGrUrCrCrGrUrUrArUrCrArArCrUrUrGrArArArArArGrUrGrGrCrArCrCrGrArGrUrCrGrGrUr | |
| | SpRY_ED3-_ | GrCrGrCrCrCrCrArGrCrArGrCrUrUrCrArGrUrCrCrCrUrUrUrCrUrCrGrUrCrGrArUrGrGrUrCrArGrCrArC*mA*mG*mC | |
| | 25FE_ | | |
| | PB15 | | |
| 193 | A1AT_ | mA*mG*mG*rCrUrGrUrGrCrUrGrArCrCrArUrCrGrArCrGrUrUrUrUrArGrArGrCrUrArGrArArArUrArGrCrArArGrUrUrA | 24262 |
| | ScaCas9++_ | rArArArUrArArGrGrCrUrArGrUrCrCrGrUrUrArUrCrArArCrUrUrGrArArArArArGrUrGrGrCrArCrCrGrArGrUrCrGrGrUr | |
| | SpRY_ED3-_ | GrCrGrCrCrCrCrArGrCrArGrCrUrUrCrArGrUrCrCrCrUrUrUrCrUrCrGrUrCrGrArUrGrGrUrCrArGrCrA*mC*mA*mG | |
| | 25FE_ | | |
| | PB14 | | |
| 194 | A1AT_ | mA*mG*mG*rCrUrGrUrGrCrUrGrArCrCrArUrCrGrArCrGrUrUrUrUrArGrArGrCrUrArGrArArArUrArGrCrArArGrUrUrA | 24263 |
| | ScaCas9++_ | rArArArUrArArGrGrCrUrArGrUrCrCrGrUrUrArUrCrArArCrUrUrGrArArArArArGrUrGrGrCrArCrCrGrArGrUrCrGrGrUr | |
| | SpRY_ED3-_ | GrCrGrCrCrCrCrArGrCrArGrCrUrUrCrArGrUrCrCrCrUrUrUrCrUrCrGrUrCrGrArUrGrGrUrCrArGrC*mA*mC*mA | |
| | 25FE_ | | |
| | PB13 | | |
| 195 | A1AT_ | mA*mG*mG*rCrUrGrUrGrCrUrGrArCrCrArUrCrGrArCrGrUrUrUrUrArGrArGrCrUrArGrArArArUrArGrCrArArGrUrUrA | 24264 |
| | ScaCas9++_ | rArArArUrArArGrGrCrUrArGrUrCrCrGrUrUrArUrCrArArCrUrUrGrArArArArArGrUrGrGrCrArCrCrGrArGrUrCrGrGrUr | |
| | SpRY_ED3-_ | GrCrGrCrCrCrCrArGrCrArGrCrUrUrCrArGrUrCrCrCrUrUrUrCrUrCrGrUrCrGrArUrGrGrUrCrArG*mC*mA*mC | |
| | 25FE_ | | |
| | PB12 | | |
| 196 | A1AT_ | mA*mG*mG*rCrUrGrUrGrCrUrGrArCrCrArUrCrGrArCrGrUrUrUrUrArGrArGrCrUrArGrArArArUrArGrCrArArGrUrUrA | 24265 |
| | ScaCas9++_ | rArArArUrArArGrGrCrUrArGrUrCrCrGrUrUrArUrCrArArCrUrUrGrArArArArArGrUrGrGrCrArCrCrGrArGrUrCrGrGrUr | |
| | SpRY_ED3-_ | GrCrGrCrCrCrCrArGrCrArGrCrUrUrCrArGrUrCrCrCrUrUrUrCrUrCrGrUrCrGrArUrGrGrUrCrA*mG*mC*mA | |
| | 25FE_ | | |
| | PB11 | | |
| 197 | A1AT_ | mA*mG*mG*rCrUrGrUrGrCrUrGrArCrCrArUrCrGrArCrGrUrUrUrUrArGrArGrCrUrArGrArArArUrArGrCrArArGrUrUrA | 24266 |
| | ScaCas9++_ | rArArArUrArArGrGrCrUrArGrUrCrCrGrUrUrArUrCrArArCrUrUrGrArArArArArGrUrGrGrCrArCrCrGrArGrUrCrGrGrUr | |
| | SpRY_ED3-_ | GrCrGrCrCrCrCrArGrCrArGrCrUrUrCrArGrUrCrCrCrUrUrUrCrUrCrGrUrCrGrArUrGrGrUrC*mA*mG*mC | |
| | 25FE_ | | |
| | PB10 | | |
| 198 | A1AT_ | mA*mG*mG*rCrUrGrUrGrCrUrGrArCrCrArUrCrGrArCrGrUrUrUrUrArGrArGrCrUrArGrArArArUrArGrCrArArGrUrUrA | 24267 |
| | ScaCas9++_ | rArArArUrArArGrGrCrUrArGrUrCrCrGrUrUrArUrCrArArCrUrUrGrArArArArArGrUrGrGrCrArCrCrGrArGrUrCrGrGrUr | |
| | SpRY_ED3-_ | GrCrGrCrCrCrCrArGrCrArGrCrUrUrCrArGrUrCrCrCrUrUrUrCrUrCrGrUrCrGrArUrGrGrU*mC*mA*mG | |
| | 25FE_PB9 | | |
| 199 | A1AT_ | mA*mG*mG*rCrUrGrUrGrCrUrGrArCrCrArUrCrGrArCrGrUrUrUrUrArGrArGrCrUrArGrArArArUrArGrCrArArGrUrUrA | 24268 |
| | ScaCas9++_ | rArArArUrArArGrGrCrUrArGrUrCrCrGrUrUrArUrCrArArCrUrUrGrArArArArArGrUrGrGrCrArCrCrGrArGrUrCrGrGrUr | |
| | SpRY_ED3-_ | GrCrGrCrCrCrCrArGrCrArGrCrUrUrCrArGrUrCrCrCrUrUrUrCrUrCrGrUrCrGrArUrGrG*mU*mC*mA | |
| | 25FE_PB8 | | |
| 200 | A1AT_ | mA*mG*mG*rCrUrGrUrGrCrUrGrArCrCrArUrCrGrArCrGrUrUrUrUrArGrArGrCrUrArGrArArArUrArGrCrArArGrUrUrA | 24269 |
| | ScaCas9++_ | rArArArUrArArGrGrCrUrArGrUrCrCrGrUrUrArUrCrArArCrUrUrGrArArArArArGrUrGrGrCrArCrCrGrArGrUrCrGrGrUr | |
| | SpRY_ED3-_ | GrCrArGrCrArGrCrUrUrCrArGrUrCrCrCrUrUrUrCrUrCrGrUrCrGrArUrGrGrUrCrArGrCrArCrArG*mC*mC*mU | |
| | 20FE_ | | |
| | PB17 | | |
| 201 | A1AT_ | mA*mG*mG*rCrUrGrUrGrCrUrGrArCrCrArUrCrGrArCrGrUrUrUrUrArGrArGrCrUrArGrArArArUrArGrCrArArGrUrUrA | 24270 |
| | ScaCas9++_ | rArArArUrArArGrGrCrUrArGrUrCrCrGrUrUrArUrCrArArCrUrUrGrArArArArArGrUrGrGrCrArCrCrGrArGrUrCrGrGrUr | |
| | SpRY_ED3-_ | GrCrArGrCrArGrCrUrUrCrArGrUrCrCrCrUrUrUrCrUrCrGrUrCrGrArUrGrGrUrCrArGrCrArCrA*mG*mC*mC | |
| | 20FE_ | | |
| | PB16 | | |
| 202 | A1AT_ | mA*mG*mG*rCrUrGrUrGrCrUrGrArCrCrArUrCrGrArCrGrUrUrUrUrArGrArGrCrUrArGrArArArUrArGrCrArArGrUrUrA | 24271 |
| | ScaCas9++_ | rArArArUrArArGrGrCrUrArGrUrCrCrGrUrUrArUrCrArArCrUrUrGrArArArArArGrUrGrGrCrArCrCrGrArGrUrCrGrGrUr | |
| | SpRY_ED3-_ | GrCrArGrCrArGrCrUrUrCrArGrUrCrCrCrUrUrUrCrUrCrGrUrCrGrArUrGrGrUrCrArGrCrArC*mA*mG*mC | |
| | 20FE_ | | |
| | PB15 | | |
| 203 | A1AT_ | mA*mG*mG*rCrUrGrUrGrCrUrGrArCrCrArUrCrGrArCrGrUrUrUrUrArGrArGrCrUrArGrArArArUrArGrCrArArGrUrUrA | 24272 |
| | ScaCas9++_ | rArArArUrArArGrGrCrUrArGrUrCrCrGrUrUrArUrCrArArCrUrUrGrArArArArArGrUrGrGrCrArCrCrGrArGrUrCrGrGrUr | |
| | SpRY_ED3-_ | GrCrArGrCrArGrCrUrUrCrArGrUrCrCrCrUrUrUrCrUrCrGrUrCrGrArUrGrGrUrCrArGrCrA*mC*mA*mG | |
| | 20FE_ | | |
| | PB14 | | |
| 204 | A1AT_ | mA*mG*mG*rCrUrGrUrGrCrUrGrArCrCrArUrCrGrArCrGrUrUrUrUrArGrArGrCrUrArGrArArArUrArGrCrArArGrUrUrA | 24273 |
| | ScaCas9++_ | rArArArUrArArGrGrCrUrArGrUrCrCrGrUrUrArUrCrArArCrUrUrGrArArArArArGrUrGrGrCrArCrCrGrArGrUrCrGrGrUr | |
| | SpRY_ED3-_ | GrCrArGrCrArGrCrUrUrCrArGrUrCrCrCrUrUrUrCrUrCrGrUrCrGrArUrGrGrUrCrArGrC*mA*mC*mA | |
| | 20FE_ | | |
| | PB13 | | |
| 205 | A1AT_ | mA*mG*mG*rCrUrGrUrGrCrUrGrArCrCrArUrCrGrArCrGrUrUrUrUrArGrArGrCrUrArGrArArArUrArGrCrArArGrUrUrA | 24274 |
| | ScaCas9++_ | rArArArUrArArGrGrCrUrArGrUrCrCrGrUrUrArUrCrArArCrUrUrGrArArArArArGrUrGrGrCrArCrCrGrArGrUrCrGrGrUr | |
| | SpRY_ED3-_ | GrCrArGrCrArGrCrUrUrCrArGrUrCrCrCrUrUrUrCrUrCrGrUrCrGrArUrGrGrUrCrArG*mC*mA*mC | |
| | 20FE_ | | |
| | PB12 | | |
| 206 | A1AT_ | mA*mG*mG*rCrUrGrUrGrCrUrGrArCrCrArUrCrGrArCrGrUrUrUrUrArGrArGrCrUrArGrArArArUrArGrCrArArGrUrUrA | 24275 |
| | ScaCas9++_ | rArArArUrArArGrGrCrUrArGrUrCrCrGrUrUrArUrCrArArCrUrUrGrArArArArArGrUrGrGrCrArCrCrGrArGrUrCrGrGrUr | |
| | SpRY_ED3-_ | GrCrArGrCrArGrCrUrUrCrArGrUrCrCrCrUrUrUrCrUrCrGrUrCrGrArUrGrGrUrCrA*mG*mC*mA | |
| | 20FE_ | | |
| | PB11 | | |
| 207 | A1AT_ | mA*mG*mG*rCrUrGrUrGrCrUrGrArCrCrArUrCrGrArCrGrUrUrUrUrArGrArGrCrUrArGrArArArUrArGrCrArArGrUrUrA | 24276 |
| | ScaCas9++_ | rArArArUrArArGrGrCrUrArGrUrCrCrGrUrUrArUrCrArArCrUrUrGrArArArArArGrUrGrGrCrArCrCrGrArGrUrCrGrGrUr | |
| | SpRY_ED3-_ | GrCrArGrCrArGrCrUrUrCrArGrUrCrCrCrUrUrUrCrUrCrGrUrCrGrArUrGrGrUrC*mA*mG*mC | |
| | 20FE_ | | |
| | PB10 | | |
| 208 | A1AT_ | mA*mG*mG*rCrUrGrUrGrCrUrGrArCrCrArUrCrGrArCrGrUrUrUrUrArGrArGrCrUrArGrArArArUrArGrCrArArGrUrUrA | 24277 |
| | ScaCas9++_ | rArArArUrArArGrGrCrUrArGrUrCrCrGrUrUrArUrCrArArCrUrUrGrArArArArArGrUrGrGrCrArCrCrGrArGrUrCrGrGrUr | |
| | SpRY_ED3-_ | GrCrArGrCrArGrCrUrUrCrArGrUrCrCrCrUrUrUrCrUrCrGrUrCrGrArUrGrGrU*mC*mA*mG | |
| | 20FE_PB9 | | |
| 209 | A1AT_ | mA*mG*mG*rCrUrGrUrGrCrUrGrArCrCrArUrCrGrArCrGrUrUrUrUrArGrArGrCrUrArGrArArArUrArGrCrArArGrUrUrA | 24278 |
| | ScaCas9++_ | rArArArUrArArGrGrCrUrArGrUrCrCrGrUrUrArUrCrArArCrUrUrGrArArArArArGrUrGrGrCrArCrCrGrArGrUrCrGrGrUr | |
| | SpRY_ED3-_ | GrCrArGrCrArGrCrUrUrCrArGrUrCrCrCrUrUrUrCrUrCrGrUrCrGrArUrGrG*mU*mC*mA | |
| | 20FE_PB8 | | |
| 210 | A1AT_ | mA*mG*mG*rCrUrGrUrGrCrUrGrArCrCrArUrCrGrArCrGrUrUrUrUrArGrArGrCrUrArGrArArArUrArGrCrArArGrUrUrA | 24279 |
| | ScaCas9++_ | rArArArUrArArGrGrCrUrArGrUrCrCrGrUrUrArUrCrArArCrUrUrGrArArArArArGrUrGrGrCrArCrCrGrArGrUrCrGrGrUr | |
| | SpRY_ED3-_ | GrCrUrUrCrArGrUrCrCrCrUrUrUrCrUrCrGrUrCrGrArUrGrGrUrCrArGrCrArCrArG*mC*mC*mU | |
| | 14FE_ | | |
| | PB17 | | |
| 211 | A1AT_ | mA*mG*mG*rCrUrGrUrGrCrUrGrArCrCrArUrCrGrArCrGrUrUrUrUrArGrArGrCrUrArGrArArArUrArGrCrArArGrUrUrA | 24280 |
| | ScaCas9++_ | rArArArUrArArGrGrCrUrArGrUrCrCrGrUrUrArUrCrArArCrUrUrGrArArArArArGrUrGrGrCrArCrCrGrArGrUrCrGrGrUr | |
| | SpRY_ED3-_ | GrCrUrUrCrArGrUrCrCrCrUrUrUrCrUrCrGrUrCrGrArUrGrGrUrCrArGrCrArCrA*mG*mC*mC | |
| | 14FE_ | | |
| | PB16 | | |
| 212 | A1AT_ | mA*mG*mG*rCrUrGrUrGrCrUrGrArCrCrArUrCrGrArCrGrUrUrUrUrArGrArGrCrUrArGrArArArUrArGrCrArArGrUrUrA | 24281 |
| | ScaCas9++_ | rArArArUrArArGrGrCrUrArGrUrCrCrGrUrUrArUrCrArArCrUrUrGrArArArArArGrUrGrGrCrArCrCrGrArGrUrCrGrGrUr | |
| | SpRY_ED3-_ | GrCrUrUrCrArGrUrCrCrCrUrUrUrCrUrCrGrUrCrGrArUrGrGrUrCrArGrCrArC*mA*mG*mC | |
| | 14FE_ | | |
| | PB15 | | |
| 213 | A1AT_ | mA*mG*mG*rCrUrGrUrGrCrUrGrArCrCrArUrCrGrArCrGrUrUrUrUrArGrArGrCrUrArGrArArArUrArGrCrArArGrUrUrA | 24282 |
| | ScaCas9++_ | rArArArUrArArGrGrCrUrArGrUrCrCrGrUrUrArUrCrArArCrUrUrGrArArArArArGrUrGrGrCrArCrCrGrArGrUrCrGrGrUr | |
| | SpRY_ED3-_ | GrCrUrUrCrArGrUrCrCrCrUrUrUrCrUrCrGrUrCrGrArUrGrGrUrCrArGrCrA*mC*mA*mG | |
| | 14FE_ | | |
| | PB14 | | |
| 214 | A1AT_ | mA*mG*mG*rCrUrGrUrGrCrUrGrArCrCrArUrCrGrArCrGrUrUrUrUrArGrArGrCrUrArGrArArArUrArGrCrArArGrUrUrA | 24283 |
| | ScaCas9++_ | rArArArUrArArGrGrCrUrArGrUrCrCrGrUrUrArUrCrArArCrUrUrGrArArArArArGrUrGrGrCrArCrCrGrArGrUrCrGrGrUr | |
| | SpRY_ED3-_ | GrCrUrUrCrArGrUrCrCrCrUrUrUrCrUrCrGrUrCrGrArUrGrGrUrCrArGrC*mA*mC*mA | |
| | 14FE_ | | |
| | PB13 | | |
| 215 | A1AT_ | mA*mG*mG*rCrUrGrUrGrCrUrGrArCrCrArUrCrGrArCrGrUrUrUrUrArGrArGrCrUrArGrArArArUrArGrCrArArGrUrUrA | 24284 |
| | ScaCas9++_ | rArArArUrArArGrGrCrUrArGrUrCrCrGrUrUrArUrCrArArCrUrUrGrArArArArArGrUrGrGrCrArCrCrGrArGrUrCrGrGrUr | |
| | SpRY_ED3-_ | GrCrUrUrCrArGrUrCrCrCrUrUrUrCrUrCrGrUrCrGrArUrGrGrUrCrArG*mC*mA*mC | |
| | 14FE_ | | |
| | PB12 | | |
| 216 | A1AT_ | mA*mG*mG*rCrUrGrUrGrCrUrGrArCrCrArUrCrGrArCrGrUrUrUrUrArGrArGrCrUrArGrArArArUrArGrCrArArGrUrUrA | 24285 |
| | ScaCas9++_ | rArArArUrArArGrGrCrUrArGrUrCrCrGrUrUrArUrCrArArCrUrUrGrArArArArArGrUrGrGrCrArCrCrGrArGrUrCrGrGrUr | |
| | SpRY_ED3-_ | GrCrUrUrCrArGrUrCrCrCrUrUrUrCrUrCrGrUrCrGrArUrGrGrUrCrA*mG*mC*mA | |
| | 14FE_ | | |
| | PB11 | | |
| 217 | A1AT_ | mA*mG*mG*rCrUrGrUrGrCrUrGrArCrCrArUrCrGrArCrGrUrUrUrUrArGrArGrCrUrArGrArArArUrArGrCrArArGrUrUrA | 24286 |
| | ScaCas9++_ | rArArArUrArArGrGrCrUrArGrUrCrCrGrUrUrArUrCrArArCrUrUrGrArArArArArGrUrGrGrCrArCrCrGrArGrUrCrGrGrUr | |
| | SpRY_ED3-_ | GrCrUrUrCrArGrUrCrCrCrUrUrUrCrUrCrGrUrCrGrArUrGrGrUrC*mA*mG*mC | |
| | 14FE_ | | |
| | PB10 | | |
| 218 | A1AT_ | mA*mG*mG*rCrUrGrUrGrCrUrGrArCrCrArUrCrGrArCrGrUrUrUrUrArGrArGrCrUrArGrArArArUrArGrCrArArGrUrUrA | 24287 |
| | ScaCas9++_ | rArArArUrArArGrGrCrUrArGrUrCrCrGrUrUrArUrCrArArCrUrUrGrArArArArArGrUrGrGrCrArCrCrGrArGrUrCrGrGrUr | |
| | SpRY_ED3-_ | GrCrUrUrCrArGrUrCrCrCrUrUrUrCrUrCrGrUrCrGrArUrGrGrU*mC*mA*mG | |
| | 14FE_PB9 | | |
| 219 | A1AT_ | mA*mG*mG*rCrUrGrUrGrCrUrGrArCrCrArUrCrGrArCrGrUrUrUrUrArGrArGrCrUrArGrArArArUrArGrCrArArGrUrUrA | 24288 |
| | ScaCas9++_ | rArArArUrArArGrGrCrUrArGrUrCrCrGrUrUrArUrCrArArCrUrUrGrArArArArArGrUrGrGrCrArCrCrGrArGrUrCrGrGrUr | |
| | SpRY_ED3-_ | GrCrUrUrCrArGrUrCrCrCrUrUrUrCrUrCrGrUrCrGrArUrGrG*mU*mC*mA | |
| | 14FE_PB8 | | |
| 220 | A1AT_ | mA*mG*mG*rCrUrGrUrGrCrUrGrArCrCrArUrCrGrArCrGrUrUrUrUrArGrArGrCrUrArGrArArArUrArGrCrArArGrUrUrA | 24289 |
| | ScaCas9++_ | rArArArUrArArGrGrCrUrArGrUrCrCrGrUrUrArUrCrArArCrUrUrGrArArArArArGrUrGrGrCrArCrCrGrArGrUrCrGrGrUr | |
| | SpRY_ED3-_ | GrCrArGrUrCrCrCrUrUrUrCrUrCrGrUrCrGrArUrGrGrUrCrArGrCrArCrArG*mC*mC*mU | |
| | 11FE_ | | |
| | PB17 | | |
| 221 | A1AT_ | mA*mG*mG*rCrUrGrUrGrCrUrGrArCrCrArUrCrGrArCrGrUrUrUrUrArGrArGrCrUrArGrArArArUrArGrCrArArGrUrUrA | 24290 |
| | ScaCas9++_ | rArArArUrArArGrGrCrUrArGrUrCrCrGrUrUrArUrCrArArCrUrUrGrArArArArArGrUrGrGrCrArCrCrGrArGrUrCrGrGrUr | |
| | SpRY_ED3-_ | GrCrArGrUrCrCrCrUrUrUrCrUrCrGrUrCrGrArUrGrGrUrCrArGrCrArCrA*mG*mC*mC | |
| | 11FE_ | | |
| | PB16 | | |
| 222 | A1AT_ | mA*mG*mG*rCrUrGrUrGrCrUrGrArCrCrArUrCrGrArCrGrUrUrUrUrArGrArGrCrUrArGrArArArUrArGrCrArArGrUrUrA | 24291 |
| | ScaCas9++_ | rArArArUrArArGrGrCrUrArGrUrCrCrGrUrUrArUrCrArArCrUrUrGrArArArArArGrUrGrGrCrArCrCrGrArGrUrCrGrGrUr | |
| | SpRY_ED3-_ | GrCrArGrUrCrCrCrUrUrUrCrUrCrGrUrCrGrArUrGrGrUrCrArGrCrArC*mA*mG*mC | |
| | 11FE_ | | |
| | PB15 | | |
| 223 | A1AT_ | mA*mG*mG*rCrUrGrUrGrCrUrGrArCrCrArUrCrGrArCrGrUrUrUrUrArGrArGrCrUrArGrArArArUrArGrCrArArGrUrUrA | 24292 |
| | ScaCas9++_ | rArArArUrArArGrGrCrUrArGrUrCrCrGrUrUrArUrCrArArCrUrUrGrArArArArArGrUrGrGrCrArCrCrGrArGrUrCrGrGrUr | |
| | SpRY_ED3-_ | GrCrArGrUrCrCrCrUrUrUrCrUrCrGrUrCrGrArUrGrGrUrCrArGrCrA*mC*mA*mG | |
| | 11FE_ | | |
| | PB14 | | |
| 224 | A1AT_ | mA*mG*mG*rCrUrGrUrGrCrUrGrArCrCrArUrCrGrArCrGrUrUrUrUrArGrArGrCrUrArGrArArArUrArGrCrArArGrUrUrA | 24293 |
| | ScaCas9++_ | rArArArUrArArGrGrCrUrArGrUrCrCrGrUrUrArUrCrArArCrUrUrGrArArArArArGrUrGrGrCrArCrCrGrArGrUrCrGrGrUr | |
| | SpRY_ED3-_ | GrCrArGrUrCrCrCrUrUrUrCrUrCrGrUrCrGrArUrGrGrUrCrArGrC*mA*mC*mA | |
| | 11FE_ | | |
| | PB13 | | |
| 225 | A1AT_ | mA*mG*mG*rCrUrGrUrGrCrUrGrArCrCrArUrCrGrArCrGrUrUrUrUrArGrArGrCrUrArGrArArArUrArGrCrArArGrUrUrA | 24294 |
| | ScaCas9++_ | rArArArUrArArGrGrCrUrArGrUrCrCrGrUrUrArUrCrArArCrUrUrGrArArArArArGrUrGrGrCrArCrCrGrArGrUrCrGrGrUr | |
| | SpRY_ED3-_ | GrCrArGrUrCrCrCrUrUrUrCrUrCrGrUrCrGrArUrGrGrUrCrArG*mC*mA*mC | |
| | 11FE_ | | |
| | PB12 | | |
| 226 | A1AT_ | mA*mG*mG*rCrUrGrUrGrCrUrGrArCrCrArUrCrGrArCrGrUrUrUrUrArGrArGrCrUrArGrArArArUrArGrCrArArGrUrUrA | 24295 |
| | ScaCas9++_ | rArArArUrArArGrGrCrUrArGrUrCrCrGrUrUrArUrCrArArCrUrUrGrArArArArArGrUrGrGrCrArCrCrGrArGrUrCrGrGrUr | |
| | SpRY_ED3-_ | GrCrArGrUrCrCrCrUrUrUrCrUrCrGrUrCrGrArUrGrGrUrCrA*mG*mC*mA | |
| | 11FE_ | | |
| | PB11 | | |
| 227 | A1AT_ | mA*mG*mG*rCrUrGrUrGrCrUrGrArCrCrArUrCrGrArCrGrUrUrUrUrArGrArGrCrUrArGrArArArUrArGrCrArArGrUrUrA | 24296 |
| | ScaCas9++_ | rArArArUrArArGrGrCrUrArGrUrCrCrGrUrUrArUrCrArArCrUrUrGrArArArArArGrUrGrGrCrArCrCrGrArGrUrCrGrGrUr | |
| | SpRY_ED3-_ | GrCrArGrUrCrCrCrUrUrUrCrUrCrGrUrCrGrArUrGrGrUrC*mA*mG*mC | |
| | 11FE_ | | |
| | PB10 | | |
| 228 | A1AT_ | mA*mG*mG*rCrUrGrUrGrCrUrGrArCrCrArUrCrGrArCrGrUrUrUrUrArGrArGrCrUrArGrArArArUrArGrCrArArGrUrUrA | 24297 |
| | ScaCas9++_ | rArArArUrArArGrGrCrUrArGrUrCrCrGrUrUrArUrCrArArCrUrUrGrArArArArArGrUrGrGrCrArCrCrGrArGrUrCrGrGrUr | |
| | SpRY_ED3-_ | GrCrArGrUrCrCrCrUrUrUrCrUrCrGrUrCrGrArUrGrGrU*mC*mA*mG | |
| | 11FE_PB9 | | |
| 229 | A1AT_ | mA*mG*mG*rCrUrGrUrGrCrUrGrArCrCrArUrCrGrArCrGrUrUrUrUrArGrArGrCrUrArGrArArArUrArGrCrArArGrUrUrA | 24298 |
| | ScaCas9++_ | rArArArUrArArGrGrCrUrArGrUrCrCrGrUrUrArUrCrArArCrUrUrGrArArArArArGrUrGrGrCrArCrCrGrArGrUrCrGrGrUr | |
| | SpRY_ED3-_ | GrCrArGrUrCrCrCrUrUrUrCrUrCrGrUrCrGrArUrGrG*mU*mC*mA | |
| | 11FE_PB8 | | |
| 230 | A1AT_ | mA*mG*mG*rCrUrGrUrGrCrUrGrArCrCrArUrCrGrArCrGrUrUrUrUrArGrArGrCrUrArGrArArArUrArGrCrArArGrUrUrA | 24299 |
| | ScaCas9++_ | rArArArUrArArGrGrCrUrArGrUrCrCrGrUrUrArUrCrArArCrUrUrGrArArArArArGrUrGrGrCrArCrCrGrArGrUrCrGrGrUr | |
| | SpRY_ED3-_ | GrCrUrCrCrCrUrUrUrCrUrCrGrUrCrGrArUrGrGrUrCrArGrCrArCrArG*mC*mC*mU | |
| | 9FE_PB17 | | |
| 231 | A1AT_ | mA*mG*mG*rCrUrGrUrGrCrUrGrArCrCrArUrCrGrArCrGrUrUrUrUrArGrArGrCrUrArGrArArArUrArGrCrArArGrUrUrA | 24300 |
| | ScaCas9++_ | rArArArUrArArGrGrCrUrArGrUrCrCrGrUrUrArUrCrArArCrUrUrGrArArArArArGrUrGrGrCrArCrCrGrArGrUrCrGrGrUr | |
| | SpRY_ED3-_ | GrCrUrCrCrCrUrUrUrCrUrCrGrUrCrGrArUrGrGrUrCrArGrCrArCrA*mG*mC*mC | |
| | 9FE_PB16 | | |
| 232 | A1AT_ | mA*mG*mG*rCrUrGrUrGrCrUrGrArCrCrArUrCrGrArCrGrUrUrUrUrArGrArGrCrUrArGrArArArUrArGrCrArArGrUrUrA | 24301 |
| | ScaCas9++_ | rArArArUrArArGrGrCrUrArGrUrCrCrGrUrUrArUrCrArArCrUrUrGrArArArArArGrUrGrGrCrArCrCrGrArGrUrCrGrGrUr | |
| | SpRY_ED3-_ | GrCrUrCrCrCrUrUrUrCrUrCrGrUrCrGrArUrGrGrUrCrArGrCrArC*mA*mG*mC | |
| | 9FE_PB15 | | |
| 233 | A1AT_ | mA*mG*mG*rCrUrGrUrGrCrUrGrArCrCrArUrCrGrArCrGrUrUrUrUrArGrArGrCrUrArGrArArArUrArGrCrArArGrUrUrA | 24302 |
| | ScaCas9++_ | rArArArUrArArGrGrCrUrArGrUrCrCrGrUrUrArUrCrArArCrUrUrGrArArArArArGrUrGrGrCrArCrCrGrArGrUrCrGrGrUr | |
| | SpRY_ED3-_ | GrCrUrCrCrCrUrUrUrCrUrCrGrUrCrGrArUrGrGrUrCrArGrCrA*mC*mA*mG | |
| | 9FE_PB14 | | |
| 234 | A1AT_ | mA*mG*mG*rCrUrGrUrGrCrUrGrArCrCrArUrCrGrArCrGrUrUrUrUrArGrArGrCrUrArGrArArArUrArGrCrArArGrUrUrA | 24303 |
| | ScaCas9++_ | rArArArUrArArGrGrCrUrArGrUrCrCrGrUrUrArUrCrArArCrUrUrGrArArArArArGrUrGrGrCrArCrCrGrArGrUrCrGrGrUr | |
| | SpRY_ED3-_ | GrCrUrCrCrCrUrUrUrCrUrCrGrUrCrGrArUrGrGrUrCrArGrC*mA*mC*mA | |
| | 9FE_PB13 | | |
| 235 | A1AT_ | mA*mG*mG*rCrUrGrUrGrCrUrGrArCrCrArUrCrGrArCrGrUrUrUrUrArGrArGrCrUrArGrArArArUrArGrCrArArGrUrUrA | 24304 |
| | ScaCas9++_ | rArArArUrArArGrGrCrUrArGrUrCrCrGrUrUrArUrCrArArCrUrUrGrArArArArArGrUrGrGrCrArCrCrGrArGrUrCrGrGrUr | |
| | SpRY_ED3-_ | GrCrUrCrCrCrUrUrUrCrUrCrGrUrCrGrArUrGrGrUrCrArG*mC*mA*mC | |
| | 9FE_PB12 | | |
| 236 | A1AT_ | mA*mG*mG*rCrUrGrUrGrCrUrGrArCrCrArUrCrGrArCrGrUrUrUrUrArGrArGrCrUrArGrArArArUrArGrCrArArGrUrUrA | 24305 |
| | ScaCas9++_ | rArArArUrArArGrGrCrUrArGrUrCrCrGrUrUrArUrCrArArCrUrUrGrArArArArArGrUrGrGrCrArCrCrGrArGrUrCrGrGrUr | |
| | SpRY_ED3-_ | GrCrUrCrCrCrUrUrUrCrUrCrGrUrCrGrArUrGrGrUrCrA*mG*mC*mA | |
| | 9FE_PB11 | | |
| 237 | A1AT_ | mA*mG*mG*rCrUrGrUrGrCrUrGrArCrCrArUrCrGrArCrGrUrUrUrUrArGrArGrCrUrArGrArArArUrArGrCrArArGrUrUrA | 24306 |
| | ScaCas9++_ | rArArArUrArArGrGrCrUrArGrUrCrCrGrUrUrArUrCrArArCrUrUrGrArArArArArGrUrGrGrCrArCrCrGrArGrUrCrGrGrUr | |
| | SpRY_ED3-_ | GrCrUrCrCrCrUrUrUrCrUrCrGrUrCrGrArUrGrGrUrC*mA*mG*mC | |
| | 9FE_PB10 | | |
| 238 | A1AT_ | mA*mG*mG*rCrUrGrUrGrCrUrGrArCrCrArUrCrGrArCrGrUrUrUrUrArGrArGrCrUrArGrArArArUrArGrCrArArGrUrUrA | 24307 |
| | ScaCas9++_ | rArArArUrArArGrGrCrUrArGrUrCrCrGrUrUrArUrCrArArCrUrUrGrArArArArArGrUrGrGrCrArCrCrGrArGrUrCrGrGrUr | |
| | SpRY_ED3-_ | GrCrUrCrCrCrUrUrUrCrUrCrGrUrCrGrArUrGrGrU*mC*mA*mG | |
| | 9FE_PB9 | | |
| 239 | A1AT_ | mA*mG*mG*rCrUrGrUrGrCrUrGrArCrCrArUrCrGrArCrGrUrUrUrUrArGrArGrCrUrArGrArArArUrArGrCrArArGrUrUrA | 24308 |
| | ScaCas9++_ | rArArArUrArArGrGrCrUrArGrUrCrCrGrUrUrArUrCrArArCrUrUrGrArArArArArGrUrGrGrCrArCrCrGrArGrUrCrGrGrUr | |
| | SpRY_ED3-_ | GrCrUrCrCrCrUrUrUrCrUrCrGrUrCrGrArUrGrG*mU*mC*mA | |
| | 9FE_PB8 | | |
| 240 | A1AT_ | mA*mG*mG*rCrUrGrUrGrCrUrGrArCrCrArUrCrGrArCrGrUrUrUrUrArGrArGrCrUrArGrArArArUrArGrCrArArGrUrUrA | 24309 |
| | ScaCas9++_ | rArArArUrArArGrGrCrUrArGrUrCrCrGrUrUrArUrCrArArCrUrUrGrArArArArArGrUrGrGrCrArCrCrGrArGrUrCrGrGrUr | |
| | SpRY_ED3-_ | GrCrCrCrUrUrUrCrUrCrGrUrCrGrArUrGrGrUrCrArGrCrArCrArG*mC*mC*mU | |
| | 7FE_PB17 | | |
| 241 | A1AT_ | mA*mG*mG*rCrUrGrUrGrCrUrGrArCrCrArUrCrGrArCrGrUrUrUrUrArGrArGrCrUrArGrArArArUrArGrCrArArGrUrUrA | 24310 |
| | ScaCas9++_ | rArArArUrArArGrGrCrUrArGrUrCrCrGrUrUrArUrCrArArCrUrUrGrArArArArArGrUrGrGrCrArCrCrGrArGrUrCrGrGrUr | |
| | SpRY_ED3-_ | GrCrCrCrUrUrUrCrUrCrGrUrCrGrArUrGrGrUrCrArGrCrArCrA*mG*mC*mC | |
| | 7FE_PB16 | | |
| 242 | A1AT_ | mA*mG*mG*rCrUrGrUrGrCrUrGrArCrCrArUrCrGrArCrGrUrUrUrUrArGrArGrCrUrArGrArArArUrArGrCrArArGrUrUrA | 24311 |
| | ScaCas9++_ | rArArArUrArArGrGrCrUrArGrUrCrCrGrUrUrArUrCrArArCrUrUrGrArArArArArGrUrGrGrCrArCrCrGrArGrUrCrGrGrUr | |
| | SpRY_ED3-_ | GrCrCrCrUrUrUrCrUrCrGrUrCrGrArUrGrGrUrCrArGrCrArC*mA*mG*mC | |
| | 7FE_PB15 | | |
| 243 | A1AT_ | mA*mG*mG*rCrUrGrUrGrCrUrGrArCrCrArUrCrGrArCrGrUrUrUrUrArGrArGrCrUrArGrArArArUrArGrCrArArGrUrUrA | 24312 |
| | ScaCas9++_ | rArArArUrArArGrGrCrUrArGrUrCrCrGrUrUrArUrCrArArCrUrUrGrArArArArArGrUrGrGrCrArCrCrGrArGrUrCrGrGrUr | |
| | SpRY_ED3-_ | GrCrCrCrUrUrUrCrUrCrGrUrCrGrArUrGrGrUrCrArGrCrA*mC*mA*mG | |
| | 7FE_PB14 | | |
| 244 | A1AT_ | mA*mG*mG*rCrUrGrUrGrCrUrGrArCrCrArUrCrGrArCrGrUrUrUrUrArGrArGrCrUrArGrArArArUrArGrCrArArGrUrUrA | 24313 |
| | ScaCas9++_ | rArArArUrArArGrGrCrUrArGrUrCrCrGrUrUrArUrCrArArCrUrUrGrArArArArArGrUrGrGrCrArCrCrGrArGrUrCrGrGrUr | |
| | SpRY_ED3-_ | GrCrCrCrUrUrUrCrUrCrGrUrCrGrArUrGrGrUrCrArGrC*mA*mC*mA | |
| | 7FE_PB13 | | |
| 245 | A1AT_ | mA*mG*mG*rCrUrGrUrGrCrUrGrArCrCrArUrCrGrArCrGrUrUrUrUrArGrArGrCrUrArGrArArArUrArGrCrArArGrUrUrA | 24314 |
| | ScaCas9++_ | rArArArUrArArGrGrCrUrArGrUrCrCrGrUrUrArUrCrArArCrUrUrGrArArArArArGrUrGrGrCrArCrCrGrArGrUrCrGrGrUr | |
| | SpRY_ED3-_ | GrCrCrCrUrUrUrCrUrCrGrUrCrGrArUrGrGrUrCrArG*mC*mA*mC | |
| | 7FE_PB12 | | |
| 246 | A1AT_ | mA*mG*mG*rCrUrGrUrGrCrUrGrArCrCrArUrCrGrArCrGrUrUrUrUrArGrArGrCrUrArGrArArArUrArGrCrArArGrUrUrA | 24315 |
| | ScaCas9++_ | rArArArUrArArGrGrCrUrArGrUrCrCrGrUrUrArUrCrArArCrUrUrGrArArArArArGrUrGrGrCrArCrCrGrArGrUrCrGrGrUr | |
| | SpRY_ED3-_ | GrCrCrCrUrUrUrCrUrCrGrUrCrGrArUrGrGrUrCrA*mG*mC*mA | |
| | 7FE_PB11 | | |
| 247 | A1AT_ | mA*mG*mG*rCrUrGrUrGrCrUrGrArCrCrArUrCrGrArCrGrUrUrUrUrArGrArGrCrUrArGrArArArUrArGrCrArArGrUrUrA | 24316 |
| | ScaCas9++_ | rArArArUrArArGrGrCrUrArGrUrCrCrGrUrUrArUrCrArArCrUrUrGrArArArArArGrUrGrGrCrArCrCrGrArGrUrCrGrGrUr | |
| | SpRY_ED3-_ | GrCrCrCrUrUrUrCrUrCrGrUrCrGrArUrGrGrUrC*mA*mG*mC | |
| | 7FE_PB10 | | |
| 248 | A1AT_ | mA*mG*mG*rCrUrGrUrGrCrUrGrArCrCrArUrCrGrArCrGrUrUrUrUrArGrArGrCrUrArGrArArArUrArGrCrArArGrUrUrA | 24317 |
| | ScaCas9++_ | rArArArUrArArGrGrCrUrArGrUrCrCrGrUrUrArUrCrArArCrUrUrGrArArArArArGrUrGrGrCrArCrCrGrArGrUrCrGrGrUr | |
| | SpRY_ED3-_ | GrCrCrCrUrUrUrCrUrCrGrUrCrGrArUrGrGrU*mC*mA*mG | |
| | 7FE_PB9 | | |
| 249 | A1AT_ | mA*mG*mG*rCrUrGrUrGrCrUrGrArCrCrArUrCrGrArCrGrUrUrUrUrArGrArGrCrUrArGrArArArUrArGrCrArArGrUrUrA | 24318 |
| | ScaCas9++_ | rArArArUrArArGrGrCrUrArGrUrCrCrGrUrUrArUrCrArArCrUrUrGrArArArArArGrUrGrGrCrArCrCrGrArGrUrCrGrGrUr | |
| | SpRY_ED3-_ | GrCrCrCrUrUrUrCrUrCrGrUrCrGrArUrGrG*mU*mC*mA | |
| | 7FE_PB8 | | |
| 250 | A1AT_ | mA*mG*mG*rCrUrGrUrGrCrUrGrArCrCrArUrCrGrArCrGrUrUrUrUrArGrArGrCrUrArGrArArArUrArGrCrArArGrUrUrA | 24319 |
| | ScaCas9++_ | rArArArUrArArGrGrCrUrArGrUrCrCrGrUrUrArUrCrArArCrUrUrGrArArArArArGrUrGrGrCrArCrCrGrArGrUrCrGrGrUr | |
| | SpRY_ED3-_ | GrCrUrUrUrCrUrCrGrUrCrGrArUrGrGrUrCrArGrCrArCrArG*mC*mC*mU | |
| | 5FE_PB17 | | |
| 251 | A1AT_ | mA*mG*mG*rCrUrGrUrGrCrUrGrArCrCrArUrCrGrArCrGrUrUrUrUrArGrArGrCrUrArGrArArArUrArGrCrArArGrUrUrA | 24320 |
| | ScaCas9++_ | rArArArUrArArGrGrCrUrArGrUrCrCrGrUrUrArUrCrArArCrUrUrGrArArArArArGrUrGrGrCrArCrCrGrArGrUrCrGrGrUr | |
| | SpRY_ED3-_ | GrCrUrUrUrCrUrCrGrUrCrGrArUrGrGrUrCrArGrCrArCrA*mG*mC*mC | |
| | 5FE_PB16 | | |
| 252 | A1AT_ | mA*mG*mG*rCrUrGrUrGrCrUrGrArCrCrArUrCrGrArCrGrUrUrUrUrArGrArGrCrUrArGrArArArUrArGrCrArArGrUrUrA | 24321 |
| | ScaCas9++_ | rArArArUrArArGrGrCrUrArGrUrCrCrGrUrUrArUrCrArArCrUrUrGrArArArArArGrUrGrGrCrArCrCrGrArGrUrCrGrGrUr | |
| | SpRY_ED3-_ | GrCrUrUrUrCrUrCrGrUrCrGrArUrGrGrUrCrArGrCrArC*mA*mG*mC | |
| | 5FE_PB15 | | |
| 253 | A1AT_ | mA*mG*mG*rCrUrGrUrGrCrUrGrArCrCrArUrCrGrArCrGrUrUrUrUrArGrArGrCrUrArGrArArArUrArGrCrArArGrUrUrA | 24322 |
| | ScaCas9++_ | rArArArUrArArGrGrCrUrArGrUrCrCrGrUrUrArUrCrArArCrUrUrGrArArArArArGrUrGrGrCrArCrCrGrArGrUrCrGrGrUr | |
| | SpRY_ED3-_ | GrCrUrUrUrCrUrCrGrUrCrGrArUrGrGrUrCrArGrCrA*mC*mA*mG | |
| | 5FE_PB14 | | |
| 254 | A1AT_ | mA*mG*mG*rCrUrGrUrGrCrUrGrArCrCrArUrCrGrArCrGrUrUrUrUrArGrArGrCrUrArGrArArArUrArGrCrArArGrUrUrA | 24323 |
| | ScaCas9++_ | rArArArUrArArGrGrCrUrArGrUrCrCrGrUrUrArUrCrArArCrUrUrGrArArArArArGrUrGrGrCrArCrCrGrArGrUrCrGrGrUr | |
| | SpRY_ED3-_ | GrCrUrUrUrCrUrCrGrUrCrGrArUrGrGrUrCrArGrC*mA*mC*mA | |
| | 5FE_PB13 | | |
| 255 | A1AT_ | mA*mG*mG*rCrUrGrUrGrCrUrGrArCrCrArUrCrGrArCrGrUrUrUrUrArGrArGrCrUrArGrArArArUrArGrCrArArGrUrUrA | 24324 |
| | ScaCas9++_ | rArArArUrArArGrGrCrUrArGrUrCrCrGrUrUrArUrCrArArCrUrUrGrArArArArArGrUrGrGrCrArCrCrGrArGrUrCrGrGrUr | |
| | SpRY_ED3-_ | GrCrUrUrUrCrUrCrGrUrCrGrArUrGrGrUrCrArG*mC*mA*mC | |
| | 5FE_PB12 | | |
| 256 | A1AT_ | mA*mG*mG*rCrUrGrUrGrCrUrGrArCrCrArUrCrGrArCrGrUrUrUrUrArGrArGrCrUrArGrArArArUrArGrCrArArGrUrUrA | 24325 |
| | ScaCas9++_ | rArArArUrArArGrGrCrUrArGrUrCrCrGrUrUrArUrCrArArCrUrUrGrArArArArArGrUrGrGrCrArCrCrGrArGrUrCrGrGrUr | |
| | SpRY_ED3-_ | GrCrUrUrUrCrUrCrGrUrCrGrArUrGrGrUrCrA*mG*mC*mA | |
| | 5FE_PB11 | | |
| 257 | A1AT_ | mA*mG*mG*rCrUrGrUrGrCrUrGrArCrCrArUrCrGrArCrGrUrUrUrUrArGrArGrCrUrArGrArArArUrArGrCrArArGrUrUrA | 24326 |
| | ScaCas9++_ | rArArArUrArArGrGrCrUrArGrUrCrCrGrUrUrArUrCrArArCrUrUrGrArArArArArGrUrGrGrCrArCrCrGrArGrUrCrGrGrUr | |
| | SpRY_ED3-_ | GrCrUrUrUrCrUrCrGrUrCrGrArUrGrGrUrC*mA*mG*mC | |
| | 5FE_PB10 | | |
| 258 | A1AT_ | mA*mG*mG*rCrUrGrUrGrCrUrGrArCrCrArUrCrGrArCrGrUrUrUrUrArGrArGrCrUrArGrArArArUrArGrCrArArGrUrUrA | 24327 |
| | ScaCas9++_ | rArArArUrArArGrGrCrUrArGrUrCrCrGrUrUrArUrCrArArCrUrUrGrArArArArArGrUrGrGrCrArCrCrGrArGrUrCrGrGrUr | |
| | SpRY_ED3-_ | GrCrUrUrUrCrUrCrGrUrCrGrArUrGrGrU*mC*mA*mG | |
| | 5FE_PB9 | | |
| 259 | A1AT_ | mA*mG*mG*rCrUrGrUrGrCrUrGrArCrCrArUrCrGrArCrGrUrUrUrUrArGrArGrCrUrArGrArArArUrArGrCrArArGrUrUrA | 24328 |
| | ScaCas9++_ | rArArArUrArArGrGrCrUrArGrUrCrCrGrUrUrArUrCrArArCrUrUrGrArArArArArGrUrGrGrCrArCrCrGrArGrUrCrGrGrUr | |
| | SpRY_ED3-_ | GrCrUrUrUrCrUrCrGrUrCrGrArUrGrG*mU*mC*mA | |
| | 5FE_PB8 | | |
| 260 | A1AT_ | mA*mG*mG*rCrUrGrUrGrCrUrGrArCrCrArUrCrGrArCrGrUrUrUrUrArGrArGrCrUrArGrArArArUrArGrCrArArGrUrUrA | 24329 |
| | ScaCas9++_ | rArArArUrArArGrGrCrUrArGrUrCrCrGrUrUrArUrCrArArCrUrUrGrArArArArArGrUrGrGrCrArCrCrGrArGrUrCrGrGrUr | |
| | SpRY_ED3-_ | GrCrUrCrUrCrGrUrCrGrArUrGrGrUrCrArGrCrArCrArG*mC*mC*mU | |
| | 3FE_PB17 | | |
| 261 | A1AT_ | mA*mG*mG*rCrUrGrUrGrCrUrGrArCrCrArUrCrGrArCrGrUrUrUrUrArGrArGrCrUrArGrArArArUrArGrCrArArGrUrUrA | 24330 |
| | ScaCas9++_ | rArArArUrArArGrGrCrUrArGrUrCrCrGrUrUrArUrCrArArCrUrUrGrArArArArArGrUrGrGrCrArCrCrGrArGrUrCrGrGrUr | |
| | SpRY_ED3-_ | GrCrUrCrUrCrGrUrCrGrArUrGrGrUrCrArGrCrArCrA*mG*mC*mC | |
| | 3FE_PB16 | | |
| 262 | A1AT_ | mA*mG*mG*rCrUrGrUrGrCrUrGrArCrCrArUrCrGrArCrGrUrUrUrUrArGrArGrCrUrArGrArArArUrArGrCrArArGrUrUrA | 24331 |
| | ScaCas9++_ | rArArArUrArArGrGrCrUrArGrUrCrCrGrUrUrArUrCrArArCrUrUrGrArArArArArGrUrGrGrCrArCrCrGrArGrUrCrGrGrUr | |
| | SpRY_ED3-_ | GrCrUrCrUrCrGrUrCrGrArUrGrGrUrCrArGrCrArC*mA*mG*mC | |
| | 3FE_PB15 | | |
| 263 | A1AT_ | mA*mG*mG*rCrUrGrUrGrCrUrGrArCrCrArUrCrGrArCrGrUrUrUrUrArGrArGrCrUrArGrArArArUrArGrCrArArGrUrUrA | 24332 |
| | ScaCas9++_ | ArArArUrArArGrGrCrUrArGrUrCrCrGrUrUrArUrCrArArCrUrUrGrArArArArArGrUrGrGrCrArCrCrGrArGrUrCrGrGrUr | |
| | SpRY_ED3-_ | GrCrUrCrUrCrGrUrCrGrArUrGrGrUrCrArGrCrA*mC*mA*mG | |
| | 3FE_PB14 | | |
| 264 | A1AT_ | mA*mG*mG*rCrUrGrUrGrCrUrGrArCrCrArUrCrGrArCrGrUrUrUrUrArGrArGrCrUrArGrArArArUrArGrCrArArGrUrUrA | 24333 |
| | ScaCas9++_ | rArArArUrArArGrGrCrUrArGrUrCrCrGrUrUrArUrCrArArCrUrUrGrArArArArArGrUrGrGrCrArCrCrGrArGrUrCrGrGrUr | |
| | SpRY_ED3-_ | GrCrUrCrUrCrGrUrCrGrArUrGrGrUrCrArGrC*mA*mC*mA | |
| | 3FE_PB13 | | |
| 265 | A1AT_ | mA*mG*mG*rCrUrGrUrGrCrUrGrArCrCrArUrCrGrArCrGrUrUrUrUrArGrArGrCrUrArGrArArArUrArGrCrArArGrUrUrA | 24334 |
| | ScaCas9++_ | rArArArUrArArGrGrCrUrArGrUrCrCrGrUrUrArUrCrArArCrUrUrGrArArArArArGrUrGrGrCrArCrCrGrArGrUrCrGrGrUr | |
| | SpRY_ED3-_ | GrCrUrCrUrCrGrUrCrGrArUrGrGrUrCrArG*mC*mA*mC | |
| | 3FE_PB12 | | |
| 266 | A1AT_ | mA*mG*mG*rCrUrGrUrGrCrUrGrArCrCrArUrCrGrArCrGrUrUrUrUrArGrArGrCrUrArGrArArArUrArGrCrArArGrUrUrA | 24335 |
| | ScaCas9++_ | rArArArUrArArGrGrCrUrArGrUrCrCrGrUrUrArUrCrArArCrUrUrGrArArArArArGrUrGrGrCrArCrCrGrArGrUrCrGrGrUr | |
| | SpRY_ED3-_ | GrCrUrCrUrCrGrUrCrGrArUrGrGrUrCrA*mG*mC*mA | |
| | 3FE_PB11 | | |
| 267 | A1AT_ | mA*mG*mG*rCrUrGrUrGrCrUrGrArCrCrArUrCrGrArCrGrUrUrUrUrArGrArGrCrUrArGrArArArUrArGrCrArArGrUrUrA | 24336 |
| | ScaCas9++_ | rArArArUrArArGrGrCrUrArGrUrCrCrGrUrUrArUrCrArArCrUrUrGrArArArArArGrUrGrGrCrArCrCrGrArGrUrCrGrGrUr | |
| | SpRY_ED3-_ | GrCrUrCrUrCrGrUrCrGrArUrGrGrUrC*mA*mG*mC | |
| | 3FE_PB10 | | |
| 268 | A1AT_ | mA*mG*mG*rCrUrGrUrGrCrUrGrArCrCrArUrCrGrArCrGrUrUrUrUrArGrArGrCrUrArGrArArArUrArGrCrArArGrUrUrA | 24337 |
| | ScaCas9++_ | rArArArUrArArGrGrCrUrArGrUrCrCrGrUrUrArUrCrArArCrUrUrGrArArArArArGrUrGrGrCrArCrCrGrArGrUrCrGrGrUr | |
| | SpRY_ED3-_ | GrCrUrCrUrCrGrUrCrGrArUrGrGrU*mC*mA*mG | |
| | 3FE_PB9 | | |
| 269 | A1AT_ | mA*mG*mG*rCrUrGrUrGrCrUrGrArCrCrArUrCrGrArCrGrUrUrUrUrArGrArGrCrUrArGrArArArUrArGrCrArArGrUrUrA | 24338 |
| | ScaCas9++_ | rArArArUrArArGrGrCrUrArGrUrCrCrGrUrUrArUrCrArArCrUrUrGrArArArArArGrUrGrGrCrArCrCrGrArGrUrCrGrGrUr | |
| | SpRY_ED3-_ | GrCrUrCrUrCrGrUrCrGrArUrGrG*mU*mC*mA | |
| | 3FE_PB8 | | |
| 270 | A1AT_St1_ | mA*mA*mG*rGrCrUrGrUrGrCrUrGrArCrCrArUrCrGrArGrUrCrUrUrUrGrUrArCrUrCrUrGrGrUrArCrCrArGrArArGrCrU | 24339 |
| | ED4-_ | rArCrArArArGrArUrArArGrGrCrUrUrCrArUrGrCrCrGrArArArUrCrArArCrArCrCrCrUrGrUrCrArUrUrUrUrArUrGrGrCr | |
| | G_30FE_ | ArGrGrGrUrGrUrUrUrUrArCrArUrGrGrCrCrCrCrArGrCrArGrCrUrUrCrArGrUrCrCrCrUrUrUrCrUrCrGrUrCrGrArUrGrGr | |
| | PB17 | UrCrArGrCrArCrArGrC*mC*mU*mU | |
| 271 | A1AT_St1_ | mA*mA*mG*rGrCrUrGrUrGrCrUrGrArCrCrArUrCrGrArGrUrCrUrUrUrGrUrArCrUrCrUrGrGrUrArCrCrArGrArArGrCrU | 24340 |
| | ED4-_ | rArCrArArArGrArUrArArGrGrCrUrUrCrArUrGrCrCrGrArArArUrCrArArCrArCrCrCrUrGrUrCrArUrUrUrUrArUrGrGrCr | |
| | G_30FE_ | ArGrGrGrUrGrUrUrUrUrArCrArUrGrGrCrCrCrCrArGrCrArGrCrUrUrCrArGrUrCrCrCrUrUrUrCrUrCrGrUrCrGrArUrGrGr | |
| | PB16 | UrCrArGrCrArCrArG*mC*mC*mU | |
| 272 | A1AT_St1_ | mA*mA*mG*rGrCrUrGrUrGrCrUrGrArCrCrArUrCrGrArGrUrCrUrUrUrGrUrArCrUrCrUrGrGrUrArCrCrArGrArArGrCrU | 24341 |
| | ED4-_ | rArCrArArArGrArUrArArGrGrCrUrUrCrArUrGrCrCrGrArArArUrCrArArCrArCrCrCrUrGrUrCrArUrUrUrUrArUrGrGrCr | |
| | G_30FE_ | ArGrGrGrUrGrUrUrUrUrArCrArUrGrGrCrCrCrCrArGrCrArGrCrUrUrCrArGrUrCrCrCrUrUrUrCrUrCrGrUrCrGrArUrGrGr | |
| | PB15 | UrCrArGrCrArCrA*mG*mC*mC | |
| 273 | A1AT_St1_ | mA*mA*mG*rGrCrUrGrUrGrCrUrGrArCrCrArUrCrGrArGrUrCrUrUrUrGrUrArCrUrCrUrGrGrUrArCrCrArGrArArGrCrU | 24342 |
| | ED4-_ | rArCrArArArGrArUrArArGrGrCrUrUrCrArUrGrCrCrGrArArArUrCrArArCrArCrCrCrUrGrUrCrArUrUrUrUrArUrGrGrCr | |
| | G_30FE_ | ArGrGrGrUrGrUrUrUrUrArCrArUrGrGrCrCrCrCrArGrCrArGrCrUrUrCrArGrUrCrCrCrUrUrUrCrUrCrGrUrCrGrArUrGrGr | |
| | PB14 | UrCrArGrCrArC*mA*mG*mC | |
| 274 | A1AT_St1_ | mA*mA*mG*rGrCrUrGrUrGrCrUrGrArCrCrArUrCrGrArGrUrCrUrUrUrGrUrArCrUrCrUrGrGrUrArCrCrArGrArArGrCrU | 24343 |
| | ED4-_ | rArCrArArArGrArUrArArGrGrCrUrUrCrArUrGrCrCrGrArArArUrCrArArCrArCrCrCrUrGrUrCrArUrUrUrUrArUrGrGrCr | |
| | G_30FE_ | ArGrGrGrUrGrUrUrUrUrArCrArUrGrGrCrCrCrCrArGrCrArGrCrUrUrCrArGrUrCrCrCrUrUrUrCrUrCrGrUrCrGrArUrGrGr | |
| | PB13 | UrCrArGrCrA*mC*mA*mG | |
| 275 | A1AT_St1_ | mA*mA*mG*rGrCrUrGrUrGrCrUrGrArCrCrArUrCrGrArGrUrCrUrUrUrGrUrArCrUrCrUrGrGrUrArCrCrArGrArArGrCrU | 24344 |
| | ED4-_ | rArCrArArArGrArUrArArGrGrCrUrUrCrArUrGrCrCrGrArArArUrCrArArCrArCrCrCrUrGrUrCrArUrUrUrUrArUrGrGrCr | |
| | G_30FE_ | ArGrGrGrUrGrUrUrUrUrArCrArUrGrGrCrCrCrCrArGrCrArGrCrUrUrCrArGrUrCrCrCrUrUrUrCrUrCrGrUrCrGrArUrGrGr | |
| | PB12 | UrCrArGrC*mA*mC*mA | |
| 276 | A1AT_St1_ | mA*mA*mG*rGrCrUrGrUrGrCrUrGrArCrCrArUrCrGrArGrUrCrUrUrUrGrUrArCrUrCrUrGrGrUrArCrCrArGrArArGrCrU | 24345 |
| | ED4-_ | rArCrArArArGrArUrArArGrGrCrUrUrCrArUrGrCrCrGrArArArUrCrArArCrArCrCrCrUrGrUrCrArUrUrUrUrArUrGrGrCr | |
| | G_30FE_ | ArGrGrGrUrGrUrUrUrUrArCrArUrGrGrCrCrCrCrArGrCrArGrCrUrUrCrArGrUrCrCrCrUrUrUrCrUrCrGrUrCrGrArUrGrGr | |
| | PB11 | UrCrArG*mC*mA*mC | |
| 277 | A1AT_St1_ | mA*mA*mG*rGrCrUrGrUrGrCrUrGrArCrCrArUrCrGrArGrUrCrUrUrUrGrUrArCrUrCrUrGrGrUrArCrCrArGrArArGrCrU | 24346 |
| | ED4-_ | rArCrArArArGrArUrArArGrGrCrUrUrCrArUrGrCrCrGrArArArUrCrArArCrArCrCrCrUrGrUrCrArUrUrUrUrArUrGrGrCr | |
| | G_30FE_ | ArGrGrGrUrGrUrUrUrUrArCrArUrGrGrCrCrCrCrArGrCrArGrCrUrUrCrArGrUrCrCrCrUrUrUrCrUrCrGrUrCrGrArUrGrGr | |
| | PB10 | UrCrA*mG*mC*mA | |
| 278 | A1AT_St1_ | mA*mA*mG*rGrCrUrGrUrGrCrUrGrArCrCrArUrCrGrArGrUrCrUrUrUrGrUrArCrUrCrUrGrGrUrArCrCrArGrArArGrCrU | 24347 |
| | ED4-_ | rArCrArArArGrArUrArArGrGrCrUrUrCrArUrGrCrCrGrArArArUrCrArArCrArCrCrCrUrGrUrCrArUrUrUrUrArUrGrGrCr | |
| | G_30FE_ | ArGrGrGrUrGrUrUrUrUrArCrArUrGrGrCrCrCrCrArGrCrArGrCrUrUrCrArGrUrCrCrCrUrUrUrCrUrCrGrUrCrGrArUrGrGr | |
| | PB9 | UrC*mA*mG*mC | |
| 279 | A1AT_St1_ | mA*mA*mG*rGrCrUrGrUrGrCrUrGrArCrCrArUrCrGrArGrUrCrUrUrUrGrUrArCrUrCrUrGrGrUrArCrCrArGrArArGrCrU | 24348 |
| | ED4-_ | rArCrArArArGrArUrArArGrGrCrUrUrCrArUrGrCrCrGrArArArUrCrArArCrArCrCrCrUrGrUrCrArUrUrUrUrArUrGrGrCr | |
| | G_30FE_ | ArGrGrGrUrGrUrUrUrUrArCrArUrGrGrCrCrCrCrArGrCrArGrCrUrUrCrArGrUrCrCrCrUrUrUrCrUrCrGrUrCrGrArUrGrGr | |
| | PB8 | U*mC*mA*mG | |
| 280 | A1AT_St1_ | mA*mA*mG*rGrCrUrGrUrGrCrUrGrArCrCrArUrCrGrArGrUrCrUrUrUrGrUrArCrUrCrUrGrGrUrArCrCrArGrArArGrCrU | 24349 |
| | ED4-_ | rArCrArArArGrArUrArArGrGrCrUrUrCrArUrGrCrCrGrArArArUrCrArArCrArCrCrCrUrGrUrCrArUrUrUrUrArUrGrGrCr | |
| | G_25FE_ | ArGrGrGrUrGrUrUrUrUrGrCrCrCrCrArGrCrArGrCrUrUrCrArGrUrCrCrCrUrUrUrCrUrCrGrUrCrGrArUrGrGrUrCrArGrCr | |
| | PB17 | ArCrArGrC*mC*mU*mU | |
| 281 | A1AT_St1_ | mA*mA*mG*rGrCrUrGrUrGrCrUrGrArCrCrArUrCrGrArGrUrCrUrUrUrGrUrArCrUrCrUrGrGrUrArCrCrArGrArArGrCrU | 24350 |
| | ED4-_ | rArCrArArArGrArUrArArGrGrCrUrUrCrArUrGrCrCrGrArArArUrCrArArCrArCrCrCrUrGrUrCrArUrUrUrUrArUrGrGrCr | |
| | G_25FE_ | ArGrGrGrUrGrUrUrUrUrGrCrCrCrCrArGrCrArGrCrUrUrCrArGrUrCrCrCrUrUrUrCrUrCrGrUrCrGrArUrGrGrUrCrArGrCr | |
| | PB16 | ArCrArG*mC*mC*mU | |
| 282 | A1AT_St1_ | mA*mA*mG*rGrCrUrGrUrGrCrUrGrArCrCrArUrCrGrArGrUrCrUrUrUrGrUrArCrUrCrUrGrGrUrArCrCrArGrArArGrCrU | 24351 |
| | ED4-_ | rArCrArArArGrArUrArArGrGrCrUrUrCrArUrGrCrCrGrArArArUrCrArArCrArCrCrCrUrGrUrCrArUrUrUrUrArUrGrGrCr | |
| | G_25FE_ | ArGrGrGrUrGrUrUrUrUrGrCrCrCrCrArGrCrArGrCrUrUrCrArGrUrCrCrCrUrUrUrCrUrCrGrUrCrGrArUrGrGrUrCrArGrCr | |
| | PB15 | ArCrA*mG*mC*mC | |
| 283 | A1AT_St1_ | mA*mA*mG*rGrCrUrGrUrGrCrUrGrArCrCrArUrCrGrArGrUrCrUrUrUrGrUrArCrUrCrUrGrGrUrArCrCrArGrArArGrCrU | 24352 |
| | ED4-_ | rArCrArArArGrArUrArArGrGrCrUrUrCrArUrGrCrCrGrArArArUrCrArArCrArCrCrCrUrGrUrCrArUrUrUrUrArUrGrGrCr | |
| | G_25FE_ | ArGrGrGrUrGrUrUrUrUrGrCrCrCrCrArGrCrArGrCrUrUrCrArGrUrCrCrCrUrUrUrCrUrCrGrUrCrGrArUrGrGrUrCrArGrCr | |
| | PB14 | ArC*mA*mG*mC | |
| 284 | A1AT_St1_ | mA*mA*mG*rGrCrUrGrUrGrCrUrGrArCrCrArUrCrGrArGrUrCrUrUrUrGrUrArCrUrCrUrGrGrUrArCrCrArGrArArGrCrU | 24353 |
| | ED4-_ | rArCrArArArGrArUrArArGrGrCrUrUrCrArUrGrCrCrGrArArArUrCrArArCrArCrCrCrUrGrUrCrArUrUrUrUrArUrGrGrCr | |
| | G_25FE_ | ArGrGrGrUrGrUrUrUrUrGrCrCrCrCrArGrCrArGrCrUrUrCrArGrUrCrCrCrUrUrUrCrUrCrGrUrCrGrArUrGrGrUrCrArGrCr | |
| | PB13 | A*mC*mA*mG | |
| 285 | A1AT_St1_ | mA*mA*mG*rGrCrUrGrUrGrCrUrGrArCrCrArUrCrGrArGrUrCrUrUrUrGrUrArCrUrCrUrGrGrUrArCrCrArGrArArGrCrU | 24354 |
| | ED4-_ | rArCrArArArGrArUrArArGrGrCrUrUrCrArUrGrCrCrGrArArArUrCrArArCrArCrCrCrUrGrUrCrArUrUrUrUrArUrGrGrCr | |
| | G_25FE_ | ArGrGrGrUrGrUrUrUrUrGrCrCrCrCrArGrCrArGrCrUrUrCrArGrUrCrCrCrUrUrUrCrUrCrGrUrCrGrArUrGrGrUrCrArGrC | |
| | PB12 | *mA*mC*mA | |
| 286 | A1AT_St1_ | mA*mA*mG*rGrCrUrGrUrGrCrUrGrArCrCrArUrCrGrArGrUrCrUrUrUrGrUrArCrUrCrUrGrGrUrArCrCrArGrArArGrCrU | 24355 |
| | ED4-_ | rArCrArArArGrArUrArArGrGrCrUrUrCrArUrGrCrCrGrArArArUrCrArArCrArCrCrCrUrGrUrCrArUrUrUrUrArUrGrGrCr | |
| | G_25FE_ | ArGrGrGrUrGrUrUrUrUrGrCrCrCrCrArGrCrArGrCrUrUrCrArGrUrCrCrCrUrUrUrCrUrCrGrUrCrGrArUrGrGrUrCrArG*m | |
| | PB11 | C*mA*mC | |
| 287 | A1AT_St1_ | mA*mA*mG*rGrCrUrGrUrGrCrUrGrArCrCrArUrCrGrArGrUrCrUrUrUrGrUrArCrUrCrUrGrGrUrArCrCrArGrArArGrCrU | 24356 |
| | ED4-_ | rArCrArArArGrArUrArArGrGrCrUrUrCrArUrGrCrCrGrArArArUrCrArArCrArCrCrCrUrGrUrCrArUrUrUrUrArUrGrGrCr | |
| | G_25FE_ | ArGrGrGrUrGrUrUrUrUrGrCrCrCrCrArGrCrArGrCrUrUrCrArGrUrCrCrCrUrUrUrCrUrCrGrUrCrGrArUrGrGrUrCrA*mG | |
| | PB10 | *mC*mA | |
| 288 | A1AT_St1_ | mA*mA*mG*rGrCrUrGrUrGrCrUrGrArCrCrArUrCrGrArGrUrCrUrUrUrGrUrArCrUrCrUrGrGrUrArCrCrArGrArArGrCrU | 24357 |
| | ED4-_ | rArCrArArArGrArUrArArGrGrCrUrUrCrArUrGrCrCrGrArArArUrCrArArCrArCrCrCrUrGrUrCrArUrUrUrUrArUrGrGrCr | |
| | G_25FE_ | ArGrGrGrUrGrUrUrUrUrGrCrCrCrCrArGrCrArGrCrUrUrCrArGrUrCrCrCrUrUrUrCrUrCrGrUrCrGrArUrGrGrUrC*mA* | |
| | PB9 | mG*mC | |
| 289 | A1AT_St1_ | mA*mA*mG*rGrCrUrGrUrGrCrUrGrArCrCrArUrCrGrArGrUrCrUrUrUrGrUrArCrUrCrUrGrGrUrArCrCrArGrArArGrCrU | 24358 |
| | ED4-_ | rArCrArArArGrArUrArArGrGrCrUrUrCrArUrGrCrCrGrArArArUrCrArArCrArCrCrCrUrGrUrCrArUrUrUrUrArUrGrGrCr | |
| | G_25FE_ | ArGrGrGrUrGrUrUrUrUrGrCrCrCrCrArGrCrArGrCrUrUrCrArGrUrCrCrCrUrUrUrCrUrCrGrUrCrGrArUrGrGrU*mC*mA* | |
| | PB8 | mG | |
| 290 | A1AT_St1_ | mA*mA*mG*rGrCrUrGrUrGrCrUrGrArCrCrArUrCrGrArGrUrCrUrUrUrGrUrArCrUrCrUrGrGrUrArCrCrArGrArArGrCrU | 24359 |
| | ED4-_ | rArCrArArArGrArUrArArGrGrCrUrUrCrArUrGrCrCrGrArArArUrCrArArCrArCrCrCrUrGrUrCrArUrUrUrUrArUrGrGrCr | |
| | G_20FE_ | ArGrGrGrUrGrUrUrUrUrArGrCrArGrCrUrUrCrArGrUrCrCrCrUrUrUrCrUrCrGrUrCrGrArUrGrGrUrCrArGrCrArCrArGrC | |
| | PB17 | *mC*mU*mU | |
| 291 | A1AT_St1_ | mA*mA*mG*rGrCrUrGrUrGrCrUrGrArCrCrArUrCrGrArGrUrCrUrUrUrGrUrArCrUrCrUrGrGrUrArCrCrArGrArArGrCrU | 24360 |
| | ED4-_ | rArCrArArArGrArUrArArGrGrCrUrUrCrArUrGrCrCrGrArArArUrCrArArCrArCrCrCrUrGrUrCrArUrUrUrUrArUrGrGrCr | |
| | G_20FE_ | ArGrGrGrUrGrUrUrUrUrArGrCrArGrCrUrUrCrArGrUrCrCrCrUrUrUrCrUrCrGrUrCrGrArUrGrGrUrCrArGrCrArCrArG* | |
| | PB16 | mC*mC*mU | |
| 292 | A1AT_St1_ | mA*mA*mG*rGrCrUrGrUrGrCrUrGrArCrCrArUrCrGrArGrUrCrUrUrUrGrUrArCrUrCrUrGrGrUrArCrCrArGrArArGrCrU | 24361 |
| | ED4-_ | rArCrArArArGrArUrArArGrGrCrUrUrCrArUrGrCrCrGrArArArUrCrArArCrArCrCrCrUrGrUrCrArUrUrUrUrArUrGrGrCr | |
| | G_20FE_ | ArGrGrGrUrGrUrUrUrUrArGrCrArGrCrUrUrCrArGrUrCrCrCrUrUrUrCrUrCrGrUrCrGrArUrGrGrUrCrArGrCrArCrA*mG | |
| | PB15 | *mC*mC | |
| 293 | A1AT_St1_ | mA*mA*mG*rGrCrUrGrUrGrCrUrGrArCrCrArUrCrGrArGrUrCrUrUrUrGrUrArCrUrCrUrGrGrUrArCrCrArGrArArGrCrU | 24362 |
| | ED4-_ | rArCrArArArGrArUrArArGrGrCrUrUrCrArUrGrCrCrGrArArArUrCrArArCrArCrCrCrUrGrUrCrArUrUrUrUrArUrGrGrCr | |
| | G_20FE_ | ArGrGrGrUrGrUrUrUrUrArGrCrArGrCrUrUrCrArGrUrCrCrCrUrUrUrCrUrCrGrUrCrGrArUrGrGrUrCrArGrCrArC*mA* | |
| | PB14 | mG*mC | |
| 294 | A1AT_St1_ | mA*mA*mG*rGrCrUrGrUrGrCrUrGrArCrCrArUrCrGrArGrUrCrUrUrUrGrUrArCrUrCrUrGrGrUrArCrCrArGrArArGrCrU | 24363 |
| | ED4-_ | rArCrArArArGrArUrArArGrGrCrUrUrCrArUrGrCrCrGrArArArUrCrArArCrArCrCrCrUrGrUrCrArUrUrUrUrArUrGrGrCr | |
| | G_20FE_ | ArGrGrGrUrGrUrUrUrUrArGrCrArGrCrUrUrCrArGrUrCrCrCrUrUrUrCrUrCrGrUrCrGrArUrGrGrUrCrArGrCrA*mC*mA | |
| | PB13 | *mG | |
| 295 | A1AT_St1_ | mA*mA*mG*rGrCrUrGrUrGrCrUrGrArCrCrArUrCrGrArGrUrCrUrUrUrGrUrArCrUrCrUrGrGrUrArCrCrArGrArArGrCrU | 24364 |
| | ED4-_ | rArCrArArArGrArUrArArGrGrCrUrUrCrArUrGrCrCrGrArArArUrCrArArCrArCrCrCrUrGrUrCrArUrUrUrUrArUrGrGrCr | |
| | G_20FE_ | ArGrGrGrUrGrUrUrUrUrArGrCrArGrCrUrUrCrArGrUrCrCrCrUrUrUrCrUrCrGrUrCrGrArUrGrGrUrCrArGrC*mA*mC* | |
| | PB12 | mA | |
| 296 | A1AT_St1_ | mA*mA*mG*rGrCrUrGrUrGrCrUrGrArCrCrArUrCrGrArGrUrCrUrUrUrGrUrArCrUrCrUrGrGrUrArCrCrArGrArArGrCrU | 24365 |
| | ED4-_ | rArCrArArArGrArUrArArGrGrCrUrUrCrArUrGrCrCrGrArArArUrCrArArCrArCrCrCrUrGrUrCrArUrUrUrUrArUrGrGrCr | |
| | G_20FE_ | ArGrGrGrUrGrUrUrUrUrArGrCrArGrCrUrUrCrArGrUrCrCrCrUrUrUrCrUrCrGrUrCrGrArUrGrGrUrCrArG*mC*mA*mC | |
| | PB11 | | |
| 297 | A1AT_St1_ | mA*mA*mG*rGrCrUrGrUrGrCrUrGrArCrCrArUrCrGrArGrUrCrUrUrUrGrUrArCrUrCrUrGrGrUrArCrCrArGrArArGrCrU | 24366 |
| | ED4-_ | rArCrArArArGrArUrArArGrGrCrUrUrCrArUrGrCrCrGrArArArUrCrArArCrArCrCrCrUrGrUrCrArUrUrUrUrArUrGrGrCr | |
| | G_20FE_ | ArGrGrGrUrGrUrUrUrUrArGrCrArGrCrUrUrCrArGrUrCrCrCrUrUrUrCrUrCrGrUrCrGrArUrGrGrUrCrA*mG*mC*mA | |
| | PB10 | | |
| 298 | A1AT_St1_ | mA*mA*mG*rGrCrUrGrUrGrCrUrGrArCrCrArUrCrGrArGrUrCrUrUrUrGrUrArCrUrCrUrGrGrUrArCrCrArGrArArGrCrU | 24367 |
| | ED4-_ | rArCrArArArGrArUrArArGrGrCrUrUrCrArUrGrCrCrGrArArArUrCrArArCrArCrCrCrUrGrUrCrArUrUrUrUrArUrGrGrCr | |
| | G_20FE_ | ArGrGrGrUrGrUrUrUrUrArGrCrArGrCrUrUrCrArGrUrCrCrCrUrUrUrCrUrCrGrUrCrGrArUrGrGrUrC*mA*mG*mC | |
| | PB9 | | |
| 299 | A1AT_St1_ | mA*mA*mG*rGrCrUrGrUrGrCrUrGrArCrCrArUrCrGrArGrUrCrUrUrUrGrUrArCrUrCrUrGrGrUrArCrCrArGrArArGrCrU | 24368 |
| | ED4-_ | rArCrArArArGrArUrArArGrGrCrUrUrCrArUrGrCrCrGrArArArUrCrArArCrArCrCrCrUrGrUrCrArUrUrUrUrArUrGrGrCr | |
| | G_20FE_ | ArGrGrGrUrGrUrUrUrUrArGrCrArGrCrUrUrCrArGrUrCrCrCrUrUrUrCrUrCrGrUrCrGrArUrGrGrU*mC*mA*mG | |
| | PB8 | | |
| 300 | A1AT_St1_ | mA*mA*mG*rGrCrUrGrUrGrCrUrGrArCrCrArUrCrGrArGrUrCrUrUrUrGrUrArCrUrCrUrGrGrUrArCrCrArGrArArGrCrU | 24369 |
| | ED4-_ | rArCrArArArGrArUrArArGrGrCrUrUrCrArUrGrCrCrGrArArArUrCrArArCrArCrCrCrUrGrUrCrArUrUrUrUrArUrGrGrCr | |
| | G_14FE_ | ArGrGrGrUrGrUrUrUrUrUrUrCrArGrUrCrCrCrUrUrUrCrUrCrGrUrCrGrArUrGrGrUrCrArGrCrArCrArGrC*mC*mU*mU | |
| | PB17 | | |
| 301 | A1AT_St1_ | mA*mA*mG*rGrCrUrGrUrGrCrUrGrArCrCrArUrCrGrArGrUrCrUrUrUrGrUrArCrUrCrUrGrGrUrArCrCrArGrArArGrCrU | 24370 |
| | ED4-_ | rArCrArArArGrArUrArArGrGrCrUrUrCrArUrGrCrCrGrArArArUrCrArArCrArCrCrCrUrGrUrCrArUrUrUrUrArUrGrGrCr | |
| | G_14FE_ | ArGrGrGrUrGrUrUrUrUrUrUrCrArGrUrCrCrCrUrUrUrCrUrCrGrUrCrGrArUrGrGrUrCrArGrCrArCrArG*mC*mC*mU | |
| | PB16 | | |
| 302 | A1AT_St1_ | mA*mA*mG*rGrCrUrGrUrGrCrUrGrArCrCrArUrCrGrArGrUrCrUrUrUrGrUrArCrUrCrUrGrGrUrArCrCrArGrArArGrCrU | 24371 |
| | ED4-_ | rArCrArArArGrArUrArArGrGrCrUrUrCrArUrGrCrCrGrArArArUrCrArArCrArCrCrCrUrGrUrCrArUrUrUrUrArUrGrGrCr | |
| | G_14FE_ | ArGrGrGrUrGrUrUrUrUrUrUrCrArGrUrCrCrCrUrUrUrCrUrCrGrUrCrGrArUrGrGrUrCrArGrCrArCrA*mG*mC*mC | |
| | PB15 | | |
| 303 | A1AT_St1_ | mA*mA*mG*rGrCrUrGrUrGrCrUrGrArCrCrArUrCrGrArGrUrCrUrUrUrGrUrArCrUrCrUrGrGrUrArCrCrArGrArArGrCrU | 24372 |
| | ED4-_ | rArCrArArArGrArUrArArGrGrCrUrUrCrArUrGrCrCrGrArArArUrCrArArCrArCrCrCrUrGrUrCrArUrUrUrUrArUrGrGrCr | |
| | G_14FE_ | ArGrGrGrUrGrUrUrUrUrUrUrCrArGrUrCrCrCrUrUrUrCrUrCrGrUrCrGrArUrGrGrUrCrArGrCrArC*mA*mG*mC | |
| | PB14 | | |
| 304 | A1AT_St1_ | mA*mA*mG*rGrCrUrGrUrGrCrUrGrArCrCrArUrCrGrArGrUrCrUrUrUrGrUrArCrUrCrUrGrGrUrArCrCrArGrArArGrCrU | 24373 |
| | ED4-_ | rArCrArArArGrArUrArArGrGrCrUrUrCrArUrGrCrCrGrArArArUrCrArArCrArCrCrCrUrGrUrCrArUrUrUrUrArUrGrGrCr | |
| | G_14FE_ | ArGrGrGrUrGrUrUrUrUrUrUrCrArGrUrCrCrCrUrUrUrCrUrCrGrUrCrGrArUrGrGrUrCrArGrCrA*mC*mA*mG | |
| | PB13 | | |
| 305 | A1AT_St1_ | mA*mA*mG*rGrCrUrGrUrGrCrUrGrArCrCrArUrCrGrArGrUrCrUrUrUrGrUrArCrUrCrUrGrGrUrArCrCrArGrArArGrCrU | 24374 |
| | ED4-_ | rArCrArArArGrArUrArArGrGrCrUrUrCrArUrGrCrCrGrArArArUrCrArArCrArCrCrCrUrGrUrCrArUrUrUrUrArUrGrGrCr | |
| | G_14FE_ | ArGrGrGrUrGrUrUrUrUrUrUrCrArGrUrCrCrCrUrUrUrCrUrCrGrUrCrGrArUrGrGrUrCrArGrC*mA*mC*mA | |
| | PB12 | | |
| 306 | A1AT_St1_ | mA*mA*mG*rGrCrUrGrUrGrCrUrGrArCrCrArUrCrGrArGrUrCrUrUrUrGrUrArCrUrCrUrGrGrUrArCrCrArGrArArGrCrU | 24375 |
| | ED4-_ | rArCrArArArGrArUrArArGrGrCrUrUrCrArUrGrCrCrGrArArArUrCrArArCrArCrCrCrUrGrUrCrArUrUrUrUrArUrGrGrCr | |
| | G_14FE_ | ArGrGrGrUrGrUrUrUrUrUrUrCrArGrUrCrCrCrUrUrUrCrUrCrGrUrCrGrArUrGrGrUrCrArG*mC*mA*mC | |
| | PB11 | | |
| 307 | A1AT_St1_ | mA*mA*mG*rGrCrUrGrUrGrCrUrGrArCrCrArUrCrGrArGrUrCrUrUrUrGrUrArCrUrCrUrGrGrUrArCrCrArGrArArGrCrU | 24376 |
| | ED4-_ | rArCrArArArGrArUrArArGrGrCrUrUrCrArUrGrCrCrGrArArArUrCrArArCrArCrCrCrUrGrUrCrArUrUrUrUrArUrGrGrCr | |
| | G_14FE_ | ArGrGrGrUrGrUrUrUrUrUrUrCrArGrUrCrCrCrUrUrUrCrUrCrGrUrCrGrArUrGrGrUrCrA*mG*mC*mA | |
| | PB10 | | |
| 308 | A1AT_St1_ | mA*mA*mG*rGrCrUrGrUrGrCrUrGrArCrCrArUrCrGrArGrUrCrUrUrUrGrUrArCrUrCrUrGrGrUrArCrCrArGrArArGrCrU | 24377 |
| | ED4-_ | rArCrArArArGrArUrArArGrGrCrUrUrCrArUrGrCrCrGrArArArUrCrArArCrArCrCrCrUrGrUrCrArUrUrUrUrArUrGrGrCr | |
| | G_14FE_ | ArGrGrGrUrGrUrUrUrUrUrUrCrArGrUrCrCrCrUrUrUrCrUrCrGrUrCrGrArUrGrGrUrC*mA*mG*mC | |
| | PB9 | | |
| 309 | A1AT_St1_ | mA*mA*mG*rGrCrUrGrUrGrCrUrGrArCrCrArUrCrGrArGrUrCrUrUrUrGrUrArCrUrCrUrGrGrUrArCrCrArGrArArGrCrU | 24378 |
| | ED4-_ | rArCrArArArGrArUrArArGrGrCrUrUrCrArUrGrCrCrGrArArArUrCrArArCrArCrCrCrUrGrUrCrArUrUrUrUrArUrGrGrCr | |
| | G_14FE_ | ArGrGrGrUrGrUrUrUrUrUrUrCrArGrUrCrCrCrUrUrUrCrUrCrGrUrCrGrArUrGrGrU*mC*mA*mG | |
| | PB8 | | |
| 310 | A1AT_St1_ | mA*mA*mG*rGrCrUrGrUrGrCrUrGrArCrCrArUrCrGrArGrUrCrUrUrUrGrUrArCrUrCrUrGrGrUrArCrCrArGrArArGrCrU | 24379 |
| | ED4-_ | rArCrArArArGrArUrArArGrGrCrUrUrCrArUrGrCrCrGrArArArUrCrArArCrArCrCrCrUrGrUrCrArUrUrUrUrArUrGrGrCr | |
| | G_11FE_ | ArGrGrGrUrGrUrUrUrUrArGrUrCrCrCrUrUrUrCrUrCrGrUrCrGrArUrGrGrUrCrArGrCrArCrArGrC*mC*mU*mU | |
| | PB17 | | |
| 311 | A1AT_St1_ | mA*mA*mG*rGrCrUrGrUrGrCrUrGrArCrCrArUrCrGrArGrUrCrUrUrUrGrUrArCrUrCrUrGrGrUrArCrCrArGrArArGrCrU | 24380 |
| | ED4-_ | rArCrArArArGrArUrArArGrGrCrUrUrCrArUrGrCrCrGrArArArUrCrArArCrArCrCrCrUrGrUrCrArUrUrUrUrArUrGrGrCr | |
| | G_11FE_ | ArGrGrGrUrGrUrUrUrUrArGrUrCrCrCrUrUrUrCrUrCrGrUrCrGrArUrGrGrUrCrArGrCrArCrArG*mC*mC*mU | |
| | PB16 | | |
| 312 | A1AT_St1_ | mA*mA*mG*rGrCrUrGrUrGrCrUrGrArCrCrArUrCrGrArGrUrCrUrUrUrGrUrArCrUrCrUrGrGrUrArCrCrArGrArArGrCrU | 24381 |
| | ED4-_ | rArCrArArArGrArUrArArGrGrCrUrUrCrArUrGrCrCrGrArArArUrCrArArCrArCrCrCrUrGrUrCrArUrUrUrUrArUrGrGrCr | |
| | G_11FE_ | ArGrGrGrUrGrUrUrUrUrArGrUrCrCrCrUrUrUrCrUrCrGrUrCrGrArUrGrGrUrCrArGrCrArCrA*mG*mC*mC | |
| | PB15 | | |
| 313 | A1AT_St1_ | mA*mA*mG*rGrCrUrGrUrGrCrUrGrArCrCrArUrCrGrArGrUrCrUrUrUrGrUrArCrUrCrUrGrGrUrArCrCrArGrArArGrCrU | 24382 |
| | ED4-_ | rArCrArArArGrArUrArArGrGrCrUrUrCrArUrGrCrCrGrArArArUrCrArArCrArCrCrCrUrGrUrCrArUrUrUrUrArUrGrGrCr | |
| | G_11FE_ | ArGrGrGrUrGrUrUrUrUrArGrUrCrCrCrUrUrUrCrUrCrGrUrCrGrArUrGrGrUrCrArGrCrArC*mA*mG*mC | |
| | PB14 | | |
| 314 | A1AT_St1_ | mA*mA*mG*rGrCrUrGrUrGrCrUrGrArCrCrArUrCrGrArGrUrCrUrUrUrGrUrArCrUrCrUrGrGrUrArCrCrArGrArArGrCrU | 24383 |
| | ED4-_ | rArCrArArArGrArUrArArGrGrCrUrUrCrArUrGrCrCrGrArArArUrCrArArCrArCrCrCrUrGrUrCrArUrUrUrUrArUrGrGrCr | |
| | G_11FE_ | ArGrGrGrUrGrUrUrUrUrArGrUrCrCrCrUrUrUrCrUrCrGrUrCrGrArUrGrGrUrCrArGrCrA*mC*mA*mG | |
| | PB13 | | |
| 315 | A1AT_St1_ | mA*mA*mG*rGrCrUrGrUrGrCrUrGrArCrCrArUrCrGrArGrUrCrUrUrUrGrUrArCrUrCrUrGrGrUrArCrCrArGrArArGrCrU | 24384 |
| | ED4-_ | rArCrArArArGrArUrArArGrGrCrUrUrCrArUrGrCrCrGrArArArUrCrArArCrArCrCrCrUrGrUrCrArUrUrUrUrArUrGrGrCr | |
| | G_11FE_ | ArGrGrGrUrGrUrUrUrUrArGrUrCrCrCrUrUrUrCrUrCrGrUrCrGrArUrGrGrUrCrArGrC*mA*mC*mA | |
| | PB12 | | |
| 316 | A1AT_St1_ | mA*mA*mG*rGrCrUrGrUrGrCrUrGrArCrCrArUrCrGrArGrUrCrUrUrUrGrUrArCrUrCrUrGrGrUrArCrCrArGrArArGrCrU | 24385 |
| | ED4-_ | rArCrArArArGrArUrArArGrGrCrUrUrCrArUrGrCrCrGrArArArUrCrArArCrArCrCrCrUrGrUrCrArUrUrUrUrArUrGrGrCr | |
| | G_11FE_ | ArGrGrGrUrGrUrUrUrUrArGrUrCrCrCrUrUrUrCrUrCrGrUrCrGrArUrGrGrUrCrArG*mC*mA*mC | |
| | PB11 | | |
| 317 | A1AT_St1_ | mA*mA*mG*rGrCrUrGrUrGrCrUrGrArCrCrArUrCrGrArGrUrCrUrUrUrGrUrArCrUrCrUrGrGrUrArCrCrArGrArArGrCrU | 24386 |
| | ED4-_ | rArCrArArArGrArUrArArGrGrCrUrUrCrArUrGrCrCrGrArArArUrCrArArCrArCrCrCrUrGrUrCrArUrUrUrUrArUrGrGrCr | |
| | G_11FE_ | ArGrGrGrUrGrUrUrUrUrArGrUrCrCrCrUrUrUrCrUrCrGrUrCrGrArUrGrGrUrCrA*mG*mC*mA | |
| | PB10 | | |
| 318 | A1AT_St1_ | mA*mA*mG*rGrCrUrGrUrGrCrUrGrArCrCrArUrCrGrArGrUrCrUrUrUrGrUrArCrUrCrUrGrGrUrArCrCrArGrArArGrCrU | 24387 |
| | ED4-_ | rArCrArArArGrArUrArArGrGrCrUrUrCrArUrGrCrCrGrArArArUrCrArArCrArCrCrCrUrGrUrCrArUrUrUrUrArUrGrGrCr | |
| | G_11FE_ | ArGrGrGrUrGrUrUrUrUrArGrUrCrCrCrUrUrUrCrUrCrGrUrCrGrArUrGrGrUrC*mA*mG*mC | |
| | PB9 | | |
| 319 | A1AT_St1_ | mA*mA*mG*rGrCrUrGrUrGrCrUrGrArCrCrArUrCrGrArGrUrCrUrUrUrGrUrArCrUrCrUrGrGrUrArCrCrArGrArArGrCrU | 24388 |
| | ED4-_ | rArCrArArArGrArUrArArGrGrCrUrUrCrArUrGrCrCrGrArArArUrCrArArCrArCrCrCrUrGrUrCrArUrUrUrUrArUrGrGrCr | |
| | G_11FE_ | ArGrGrGrUrGrUrUrUrUrArGrUrCrCrCrUrUrUrCrUrCrGrUrCrGrArUrGrGrU*mC*mA*mG | |
| | PB8 | | |
| 320 | A1AT_St1_ | mA*mA*mG*rGrCrUrGrUrGrCrUrGrArCrCrArUrCrGrArGrUrCrUrUrUrGrUrArCrUrCrUrGrGrUrArCrCrArGrArArGrCrU | 24389 |
| | ED4-_ | rArCrArArArGrArUrArArGrGrCrUrUrCrArUrGrCrCrGrArArArUrCrArArCrArCrCrCrUrGrUrCrArUrUrUrUrArUrGrGrCr | |
| | G_9FE_ | ArGrGrGrUrGrUrUrUrUrUrCrCrCrUrUrUrCrUrCrGrUrCrGrArUrGrGrUrCrArGrCrArCrArGrC*mC*mU*mU | |
| | PB17 | | |
| 321 | A1AT_St1_ | mA*mA*mG*rGrCrUrGrUrGrCrUrGrArCrCrArUrCrGrArGrUrCrUrUrUrGrUrArCrUrCrUrGrGrUrArCrCrArGrArArGrCrU | 24390 |
| | ED4-_ | rArCrArArArGrArUrArArGrGrCrUrUrCrArUrGrCrCrGrArArArUrCrArArCrArCrCrCrUrGrUrCrArUrUrUrUrArUrGrGrCr | |
| | G_9FE_ | ArGrGrGrUrGrUrUrUrUrUrCrCrCrUrUrUrCrUrCrGrUrCrGrArUrGrGrUrCrArGrCrArCrArG*mC*mC*mU | |
| | PB16 | | |
| 322 | A1AT_St1_ | mA*mA*mG*rGrCrUrGrUrGrCrUrGrArCrCrArUrCrGrArGrUrCrUrUrUrGrUrArCrUrCrUrGrGrUrArCrCrArGrArArGrCrU | 24391 |
| | ED4-_ | rArCrArArArGrArUrArArGrGrCrUrUrCrArUrGrCrCrGrArArArUrCrArArCrArCrCrCrUrGrUrCrArUrUrUrUrArUrGrGrCr | |
| | G_9FE_ | ArGrGrGrUrGrUrUrUrUrUrCrCrCrUrUrUrCrUrCrGrUrCrGrArUrGrGrUrCrArGrCrArCrA*mG*mC*mC | |
| | PB15 | | |
| 323 | A1AT_St1_ | mA*mA*mG*rGrCrUrGrUrGrCrUrGrArCrCrArUrCrGrArGrUrCrUrUrUrGrUrArCrUrCrUrGrGrUrArCrCrArGrArArGrCrU | 24392 |
| | ED4-_ | rArCrArArArGrArUrArArGrGrCrUrUrCrArUrGrCrCrGrArArArUrCrArArCrArCrCrCrUrGrUrCrArUrUrUrUrArUrGrGrCr | |
| | G_9FE_PB | ArGrGrGrUrGrUrUrUrUrUrCrCrCrUrUrUrCrUrCrGrUrCrGrArUrGrGrUrCrArGrCrArC*mA*mG*mC | |
| | 14 | | |
| 324 | A1AT_St1_ | mA*mA*mG*rGrCrUrGrUrGrCrUrGrArCrCrArUrCrGrArGrUrCrUrUrUrGrUrArCrUrCrUrGrGrUrArCrCrArGrArArGrCrU | 24393 |
| | ED4-_ | rArCrArArArGrArUrArArGrGrCrUrUrCrArUrGrCrCrGrArArArUrCrArArCrArCrCrCrUrGrUrCrArUrUrUrUrArUrGrGrCr | |
| | G_9FE_ | ArGrGrGrUrGrUrUrUrUrUrCrCrCrUrUrUrCrUrCrGrUrCrGrArUrGrGrUrCrArGrCrA*mC*mA*mG | |
| | PB13 | | |
| 325 | A1AT_St1_ | mA*mA*mG*rGrCrUrGrUrGrCrUrGrArCrCrArUrCrGrArGrUrCrUrUrUrGrUrArCrUrCrUrGrGrUrArCrCrArGrArArGrCrU | 24394 |
| | ED4-_ | rArCrArArArGrArUrArArGrGrCrUrUrCrArUrGrCrCrGrArArArUrCrArArCrArCrCrCrUrGrUrCrArUrUrUrUrArUrGrGrCr | |
| | G_9FE_ | ArGrGrGrUrGrUrUrUrUrUrCrCrCrUrUrUrCrUrCrGrUrCrGrArUrGrGrUrCrArGrC*mA*mC*mA | |
| | PB12 | | |
| 326 | A1AT_St1_ | mA*mA*mG*rGrCrUrGrUrGrCrUrGrArCrCrArUrCrGrArGrUrCrUrUrUrGrUrArCrUrCrUrGrGrUrArCrCrArGrArArGrCrU | 24395 |
| | ED4-_ | rArCrArArArGrArUrArArGrGrCrUrUrCrArUrGrCrCrGrArArArUrCrArArCrArCrCrCrUrGrUrCrArUrUrUrUrArUrGrGrCr | |
| | G_9FE_ | ArGrGrGrUrGrUrUrUrUrUrCrCrCrUrUrUrCrUrCrGrUrCrGrArUrGrGrUrCrArG*mC*mA*mC | |
| | PB11 | | |
| 327 | A1AT_St1_ | mA*mA*mG*rGrCrUrGrUrGrCrUrGrArCrCrArUrCrGrArGrUrCrUrUrUrGrUrArCrUrCrUrGrGrUrArCrCrArGrArArGrCrU | 24396 |
| | ED4-_ | rArCrArArArGrArUrArArGrGrCrUrUrCrArUrGrCrCrGrArArArUrCrArArCrArCrCrCrUrGrUrCrArUrUrUrUrArUrGrGrCr | |
| | G_9FE_ | ArGrGrGrUrGrUrUrUrUrUrCrCrCrUrUrUrCrUrCrGrUrCrGrArUrGrGrUrCrA*mG*mC*mA | |
| | PB10 | | |
| 328 | A1AT_St1_ | mA*mA*mG*rGrCrUrGrUrGrCrUrGrArCrCrArUrCrGrArGrUrCrUrUrUrGrUrArCrUrCrUrGrGrUrArCrCrArGrArArGrCrU | 24397 |
| | ED4-_ | rArCrArArArGrArUrArArGrGrCrUrUrCrArUrGrCrCrGrArArArUrCrArArCrArCrCrCrUrGrUrCrArUrUrUrUrArUrGrGrCr | |
| | G_9FE_ | ArGrGrGrUrGrUrUrUrUrUrCrCrCrUrUrUrCrUrCrGrUrCrGrArUrGrGrUrC*mA*mG*mC | |
| | PB9 | | |
| 329 | A1AT_St1_ | mA*mA*mG*rGrCrUrGrUrGrCrUrGrArCrCrArUrCrGrArGrUrCrUrUrUrGrUrArCrUrCrUrGrGrUrArCrCrArGrArArGrCrU | 24398 |
| | ED4-_ | rArCrArArArGrArUrArArGrGrCrUrUrCrArUrGrCrCrGrArArArUrCrArArCrArCrCrCrUrGrUrCrArUrUrUrUrArUrGrGrCr | |
| | G_9FE_ | ArGrGrGrUrGrUrUrUrUrUrCrCrCrUrUrUrCrUrCrGrUrCrGrArUrGrGrU*mC*mA*mG | |
| | PB8 | | |
| 330 | A1AT_St1_ | mA*mA*mG*rGrCrUrGrUrGrCrUrGrArCrCrArUrCrGrArGrUrCrUrUrUrGrUrArCrUrCrUrGrGrUrArCrCrArGrArArGrCrU | 24399 |
| | ED4-_ | rArCrArArArGrArUrArArGrGrCrUrUrCrArUrGrCrCrGrArArArUrCrArArCrArCrCrCrUrGrUrCrArUrUrUrUrArUrGrGrCr | |
| | G_7FE_ | ArGrGrGrUrGrUrUrUrUrCrCrUrUrUrCrUrCrGrUrCrGrArUrGrGrUrCrArGrCrArCrArGrC*mC*mU*mU | |
| | 1PB7 | | |
| 331 | A1AT_St1_ | mA*mA*mG*rGrCrUrGrUrGrCrUrGrArCrCrArUrCrGrArGrUrCrUrUrUrGrUrArCrUrCrUrGrGrUrArCrCrArGrArArGrCrU | 24400 |
| | ED4-_ | rArCrArArArGrArUrArArGrGrCrUrUrCrArUrGrCrCrGrArArArUrCrArArCrArCrCrCrUrGrUrCrArUrUrUrUrArUrGrGrCr | |
| | G_7FE_ | ArGrGrGrUrGrUrUrUrUrCrCrUrUrUrCrUrCrGrUrCrGrArUrGrGrUrCrArGrCrArCrArG*mC*mC*mU | |
| | PB16 | | |
| 332 | A1AT_St1_ | mA*mA*mG*rGrCrUrGrUrGrCrUrGrArCrCrArUrCrGrArGrUrCrUrUrUrGrUrArCrUrCrUrGrGrUrArCrCrArGrArArGrCrU | 24401 |
| | ED4-_ | rArCrArArArGrArUrArArGrGrCrUrUrCrArUrGrCrCrGrArArArUrCrArArCrArCrCrCrUrGrUrCrArUrUrUrUrArUrGrGrCr | |
| | G_7FE_ | ArGrGrGrUrGrUrUrUrUrCrCrUrUrUrCrUrCrGrUrCrGrArUrGrGrUrCrArGrCrArCrA*mG*mC*mC | |
| | PB15 | | |
| 333 | A1AT_St1_ | mA*mA*mG*rGrCrUrGrUrGrCrUrGrArCrCrArUrCrGrArGrUrCrUrUrUrGrUrArCrUrCrUrGrGrUrArCrCrArGrArArGrCrU | 24402 |
| | ED4-_ | rArCrArArArGrArUrArArGrGrCrUrUrCrArUrGrCrCrGrArArArUrCrArArCrArCrCrCrUrGrUrCrArUrUrUrUrArUrGrGrCr | |
| | G_7FE_ | ArGrGrGrUrGrUrUrUrUrCrCrUrUrUrCrUrCrGrUrCrGrArUrGrGrUrCrArGrCrArC*mA*mG*mC | |
| | PB14 | | |
| 334 | A1AT_St1_ | mA*mA*mG*rGrCrUrGrUrGrCrUrGrArCrCrArUrCrGrArGrUrCrUrUrUrGrUrArCrUrCrUrGrGrUrArCrCrArGrArArGrCrU | 24403 |
| | ED4-_ | rArCrArArArGrArUrArArGrGrCrUrUrCrArUrGrCrCrGrArArArUrCrArArCrArCrCrCrUrGrUrCrArUrUrUrUrArUrGrGrCr | |
| | G_7FE_ | ArGrGrGrUrGrUrUrUrUrCrCrUrUrUrCrUrCrGrUrCrGrArUrGrGrUrCrArGrCrA*mC*mA*mG | |
| | PB13 | | |
| 335 | A1AT_St1_ | mA*mA*mG*rGrCrUrGrUrGrCrUrGrArCrCrArUrCrGrArGrUrCrUrUrUrGrUrArCrUrCrUrGrGrUrArCrCrArGrArArGrCrU | 24404 |
| | ED4-_ | rArCrArArArGrArUrArArGrGrCrUrUrCrArUrGrCrCrGrArArArUrCrArArCrArCrCrCrUrGrUrCrArUrUrUrUrArUrGrGrCr | |
| | G_7FE_ | ArGrGrGrUrGrUrUrUrUrCrCrUrUrUrCrUrCrGrUrCrGrArUrGrGrUrCrArGrC*mA*mC*mA | |
| | PB12 | | |
| 336 | A1AT_St1_ | mA*mA*mG*rGrCrUrGrUrGrCrUrGrArCrCrArUrCrGrArGrUrCrUrUrUrGrUrArCrUrCrUrGrGrUrArCrCrArGrArArGrCrU | 24405 |
| | ED4-_ | rArCrArArArGrArUrArArGrGrCrUrUrCrArUrGrCrCrGrArArArUrCrArArCrArCrCrCrUrGrUrCrArUrUrUrUrArUrGrGrCr | |
| | G_7FE_ | ArGrGrGrUrGrUrUrUrUrCrCrUrUrUrCrUrCrGrUrCrGrArUrGrGrUrCrArG*mC*mA*mC | |
| | PB11 | | |
| 337 | A1AT_St1_ | mA*mA*mG*rGrCrUrGrUrGrCrUrGrArCrCrArUrCrGrArGrUrCrUrUrUrGrUrArCrUrCrUrGrGrUrArCrCrArGrArArGrCrU | 24406 |
| | ED4-_ | rArCrArArArGrArUrArArGrGrCrUrUrCrArUrGrCrCrGrArArArUrCrArArCrArCrCrCrUrGrUrCrArUrUrUrUrArUrGrGrCr | |
| | G_7FE_ | ArGrGrGrUrGrUrUrUrUrCrCrUrUrUrCrUrCrGrUrCrGrArUrGrGrUrCrA*mG*mC*mA | |
| | PB10 | | |
| 338 | A1AT_St1_ | mA*mA*mG*rGrCrUrGrUrGrCrUrGrArCrCrArUrCrGrArGrUrCrUrUrUrGrUrArCrUrCrUrGrGrUrArCrCrArGrArArGrCrU | 24407 |
| | ED4-_ | rArCrArArArGrArUrArArGrGrCrUrUrCrArUrGrCrCrGrArArArUrCrArArCrArCrCrCrUrGrUrCrArUrUrUrUrArUrGrGrCr | |
| | G_7FE_ | ArGrGrGrUrGrUrUrUrUrCrCrUrUrUrCrUrCrGrUrCrGrArUrGrGrUrC*mA*mG*mC | |
| | PB9 | | |
| 339 | A1AT_St1_ | mA*mA*mG*rGrCrUrGrUrGrCrUrGrArCrCrArUrCrGrArGrUrCrUrUrUrGrUrArCrUrCrUrGrGrUrArCrCrArGrArArGrCrU | 24408 |
| | ED4-_ | rArCrArArArGrArUrArArGrGrCrUrUrCrArUrGrCrCrGrArArArUrCrArArCrArCrCrCrUrGrUrCrArUrUrUrUrArUrGrGrCr | |
| | G_7FE_ | ArGrGrGrUrGrUrUrUrUrCrCrUrUrUrCrUrCrGrUrCrGrArUrGrGrU*mC*mA*mG | |
| | PB8 | | |
| 340 | A1AT_St1_ | mA*mA*mG*rGrCrUrGrUrGrCrUrGrArCrCrArUrCrGrArGrUrCrUrUrUrGrUrArCrUrCrUrGrGrUrArCrCrArGrArArGrCrU | 24409 |
| | ED4-_ | rArCrArArArGrArUrArArGrGrCrUrUrCrArUrGrCrCrGrArArArUrCrArArCrArCrCrCrUrGrUrCrArUrUrUrUrArUrGrGrCr | |
| | G_5FE_ | ArGrGrGrUrGrUrUrUrUrUrUrUrCrUrCrGrUrCrGrArUrGrGrUrCrArGrCrArCrArGrC*mC*mU*mU | |
| | PB17 | | |
| 341 | A1AT_St1_ | mA*mA*mG*rGrCrUrGrUrGrCrUrGrArCrCrArUrCrGrArGrUrCrUrUrUrGrUrArCrUrCrUrGrGrUrArCrCrArGrArArGrCrU | 24410 |
| | ED4-_ | rArCrArArArGrArUrArArGrGrCrUrUrCrArUrGrCrCrGrArArArUrCrArArCrArCrCrCrUrGrUrCrArUrUrUrUrArUrGrGrCr | |
| | G_5FE_ | ArGrGrGrUrGrUrUrUrUrUrUrUrCrUrCrGrUrCrGrArUrGrGrUrCrArGrCrArCrArG*mC*mC*mU | |
| | PB16 | | |
| 342 | A1AT_St1_ | mA*mA*mG*rGrCrUrGrUrGrCrUrGrArCrCrArUrCrGrArGrUrCrUrUrUrGrUrArCrUrCrUrGrGrUrArCrCrArGrArArGrCrU | 24411 |
| | ED4-_ | ArCrArArArGrArUrArArGrGrCrUrUrCrArUrGrCrCrGrArArArUrCrArArCrArCrCrCrUrGrUrCrArUrUrUrUrArUrGrGrCr | |
| | G_5FE_ | ArGrGrGrUrGrUrUrUrUrUrUrUrCrUrCrGrUrCrGrArUrGrGrUrCrArGrCrArCrA*mG*mC*mC | |
| | PB15 | | |
| 343 | A1AT_St1_ | mA*mA*mG*rGrCrUrGrUrGrCrUrGrArCrCrArUrCrGrArGrUrCrUrUrUrGrUrArCrUrCrUrGrGrUrArCrCrArGrArArGrCrU | 24412 |
| | ED4-_ | rArCrArArArGrArUrArArGrGrCrUrUrCrArUrGrCrCrGrArArArUrCrArArCrArCrCrCrUrGrUrCrArUrUrUrUrArUrGrGrCr | |
| | G_5FE_ | ArGrGrGrUrGrUrUrUrUrUrUrUrCrUrCrGrUrCrGrArUrGrGrUrCrArGrCrArC*mA*mG*mC | |
| | PB14 | | |
| 344 | A1AT_St1_ | mA*mA*mG*rGrCrUrGrUrGrCrUrGrArCrCrArUrCrGrArGrUrCrUrUrUrGrUrArCrUrCrUrGrGrUrArCrCrArGrArArGrCrU | 24413 |
| | ED4-_ | rArCrArArArGrArUrArArGrGrCrUrUrCrArUrGrCrCrGrArArArUrCrArArCrArCrCrCrUrGrUrCrArUrUrUrUrArUrGrGrCr | |
| | G_5FE_ | ArGrGrGrUrGrUrUrUrUrUrUrUrCrUrCrGrUrCrGrArUrGrGrUrCrArGrCrA*mC*mA*mG | |
| | PB13 | | |
| 345 | A1AT_St1_ | mA*mA*mG*rGrCrUrGrUrGrCrUrGrArCrCrArUrCrGrArGrUrCrUrUrUrGrUrArCrUrCrUrGrGrUrArCrCrArGrArArGrCrU | 24414 |
| | ED4-_ | rArCrArArArGrArUrArArGrGrCrUrUrCrArUrGrCrCrGrArArArUrCrArArCrArCrCrCrUrGrUrCrArUrUrUrUrArUrGrGrCr | |
| | G_5FE_ | ArGrGrGrUrGrUrUrUrUrUrUrUrCrUrCrGrUrCrGrArUrGrGrUrCrArGrC*mA*mC*mA | |
| | PB12 | | |
| 346 | A1AT_St1_ | mA*mA*mG*rGrCrUrGrUrGrCrUrGrArCrCrArUrCrGrArGrUrCrUrUrUrGrUrArCrUrCrUrGrGrUrArCrCrArGrArArGrCrU | 24415 |
| | ED4-_ | rArCrArArArGrArUrArArGrGrCrUrUrCrArUrGrCrCrGrArArArUrCrArArCrArCrCrCrUrGrUrCrArUrUrUrUrArUrGrGrCr | |
| | G_5FE_ | ArGrGrGrUrGrUrUrUrUrUrUrUrCrUrCrGrUrCrGrArUrGrGrUrCrArG*mC*mA*mC | |
| | PB11 | | |
| 347 | A1AT_St1_ | mA*mA*mG*rGrCrUrGrUrGrCrUrGrArCrCrArUrCrGrArGrUrCrUrUrUrGrUrArCrUrCrUrGrGrUrArCrCrArGrArArGrCrU | 24416 |
| | ED4-_ | rArCrArArArGrArUrArArGrGrCrUrUrCrArUrGrCrCrGrArArArUrCrArArCrArCrCrCrUrGrUrCrArUrUrUrUrArUrGrGrCr | |
| | G_5FE_ | ArGrGrGrUrGrUrUrUrUrUrUrUrCrUrCrGrUrCrGrArUrGrGrUrCrA*mG*mC*mA | |
| | PB10 | | |
| 348 | A1AT_St1_ | mA*mA*mG*rGrCrUrGrUrGrCrUrGrArCrCrArUrCrGrArGrUrCrUrUrUrGrUrArCrUrCrUrGrGrUrArCrCrArGrArArGrCrU | 24417 |
| | ED4-_ | rArCrArArArGrArUrArArGrGrCrUrUrCrArUrGrCrCrGrArArArUrCrArArCrArCrCrCrUrGrUrCrArUrUrUrUrArUrGrGrCr | |
| | G_5FE_ | ArGrGrGrUrGrUrUrUrUrUrUrUrCrUrCrGrUrCrGrArUrGrGrUrC*mA*mG*mC | |
| | PB9 | | |
| 349 | A1AT_St1_ | mA*mA*mG*rGrCrUrGrUrGrCrUrGrArCrCrArUrCrGrArGrUrCrUrUrUrGrUrArCrUrCrUrGrGrUrArCrCrArGrArArGrCrU | 24418 |
| | ED4-_ | rArCrArArArGrArUrArArGrGrCrUrUrCrArUrGrCrCrGrArArArUrCrArArCrArCrCrCrUrGrUrCrArUrUrUrUrArUrGrGrCr | |
| | G_5FE_ | ArGrGrGrUrGrUrUrUrUrUrUrUrCrUrCrGrUrCrGrArUrGrGrU*mC*mA*mG | |
| | PB8 | | |
| 350 | A1AT_St1_ | mA*mA*mG*rGrCrUrGrUrGrCrUrGrArCrCrArUrCrGrArGrUrCrUrUrUrGrUrArCrUrCrUrGrGrUrArCrCrArGrArArGrCrU | 24419 |
| | ED4-_ | rArCrArArArGrArUrArArGrGrCrUrUrCrArUrGrCrCrGrArArArUrCrArArCrArCrCrCrUrGrUrCrArUrUrUrUrArUrGrGrCr | |
| | G_3FE_ | ArGrGrGrUrGrUrUrUrUrUrCrUrCrGrUrCrGrArUrGrGrUrCrArGrCrArCrArGrC*mC*mU*mU | |
| | PB17 | | |
| 351 | A1AT_St1_ | mA*mA*mG*rGrCrUrGrUrGrCrUrGrArCrCrArUrCrGrArGrUrCrUrUrUrGrUrArCrUrCrUrGrGrUrArCrCrArGrArArGrCrU | 24420 |
| | ED4-_ | rArCrArArArGrArUrArArGrGrCrUrUrCrArUrGrCrCrGrArArArUrCrArArCrArCrCrCrUrGrUrCrArUrUrUrUrArUrGrGrCr | |
| | G_3FE_ | ArGrGrGrUrGrUrUrUrUrUrCrUrCrGrUrCrGrArUrGrGrUrCrArGrCrArCrArG*mC*mC*mU | |
| | PB16 | | |
| 352 | A1AT_St1_ | mA*mA*mG*rGrCrUrGrUrGrCrUrGrArCrCrArUrCrGrArGrUrCrUrUrUrGrUrArCrUrCrUrGrGrUrArCrCrArGrArArGrCrU | 24421 |
| | ED4-_ | rArCrArArArGrArUrArArGrGrCrUrUrCrArUrGrCrCrGrArArArUrCrArArCrArCrCrCrUrGrUrCrArUrUrUrUrArUrGrGrCr | |
| | G_3FE_ | ArGrGrGrUrGrUrUrUrUrUrCrUrCrGrUrCrGrArUrGrGrUrCrArGrCrArCrA*mG*mC*mC | |
| | PB15 | | |
| 353 | A1AT_St1_ | mA*mA*mG*rGrCrUrGrUrGrCrUrGrArCrCrArUrCrGrArGrUrCrUrUrUrGrUrArCrUrCrUrGrGrUrArCrCrArGrArArGrCrU | 24422 |
| | ED4-_ | rArCrArArArGrArUrArArGrGrCrUrUrCrArUrGrCrCrGrArArArUrCrArArCrArCrCrCrUrGrUrCrArUrUrUrUrArUrGrGrCr | |
| | G_3FE_ | ArGrGrGrUrGrUrUrUrUrUrCrUrCrGrUrCrGrArUrGrGrUrCrArGrCrArC*mA*mG*mC | |
| | PB14 | | |
| 354 | A1AT_St1_ | mA*mA*mG*rGrCrUrGrUrGrCrUrGrArCrCrArUrCrGrArGrUrCrUrUrUrGrUrArCrUrCrUrGrGrUrArCrCrArGrArArGrCrU | 24423 |
| | ED4-_ | rArCrArArArGrArUrArArGrGrCrUrUrCrArUrGrCrCrGrArArArUrCrArArCrArCrCrCrUrGrUrCrArUrUrUrUrArUrGrGrCr | |
| | G_3FE_ | ArGrGrGrUrGrUrUrUrUrUrCrUrCrGrUrCrGrArUrGrGrUrCrArGrCrA*mC*mA*mG | |
| | PB13 | | |
| 355 | A1AT_St1_ | mA*mA*mG*rGrCrUrGrUrGrCrUrGrArCrCrArUrCrGrArGrUrCrUrUrUrGrUrArCrUrCrUrGrGrUrArCrCrArGrArArGrCrU | 24424 |
| | ED4-_ | rArCrArArArGrArUrArArGrGrCrUrUrCrArUrGrCrCrGrArArArUrCrArArCrArCrCrCrUrGrUrCrArUrUrUrUrArUrGrGrCr | |
| | G_3FE_ | ArGrGrGrUrGrUrUrUrUrUrCrUrCrGrUrCrGrArUrGrGrUrCrArGrC*mA*mC*mA | |
| | PB12 | | |
| 356 | A1AT_St1_ | mA*mA*mG*rGrCrUrGrUrGrCrUrGrArCrCrArUrCrGrArGrUrCrUrUrUrGrUrArCrUrCrUrGrGrUrArCrCrArGrArArGrCrU | 24425 |
| | ED4-_ | rArCrArArArGrArUrArArGrGrCrUrUrCrArUrGrCrCrGrArArArUrCrArArCrArCrCrCrUrGrUrCrArUrUrUrUrArUrGrGrCr | |
| | G_3FE_ | ArGrGrGrUrGrUrUrUrUrUrCrUrCrGrUrCrGrArUrGrGrUrCrArG*mC*mA*mC | |
| | PB11 | | |
| 357 | A1AT_St1_ | mA*mA*mG*rGrCrUrGrUrGrCrUrGrArCrCrArUrCrGrArGrUrCrUrUrUrGrUrArCrUrCrUrGrGrUrArCrCrArGrArArGrCrU | 24426 |
| | ED4-_ | rArCrArArArGrArUrArArGrGrCrUrUrCrArUrGrCrCrGrArArArUrCrArArCrArCrCrCrUrGrUrCrArUrUrUrUrArUrGrGrCr | |
| | G_3FE_ | ArGrGrGrUrGrUrUrUrUrUrCrUrCrGrUrCrGrArUrGrGrUrCrA*mG*mC*mA | |
| | PB10 | | |
| 358 | A1AT_St1_ | mA*mA*mG*rGrCrUrGrUrGrCrUrGrArCrCrArUrCrGrArGrUrCrUrUrUrGrUrArCrUrCrUrGrGrUrArCrCrArGrArArGrCrU | 24427 |
| | ED4-_ | rArCrArArArGrArUrArArGrGrCrUrUrCrArUrGrCrCrGrArArArUrCrArArCrArCrCrCrUrGrUrCrArUrUrUrUrArUrGrGrCr | |
| | G_3FE_ | ArGrGrGrUrGrUrUrUrUrUrCrUrCrGrUrCrGrArUrGrGrUrC*mA*mG*mC | |
| | PB9 | | |
| 359 | A1AT_St1_ | mA*mA*mG*rGrCrUrGrUrGrCrUrGrArCrCrArUrCrGrArGrUrCrUrUrUrGrUrArCrUrCrUrGrGrUrArCrCrArGrArArGrCrU | 24428 |
| | ED4-_ | rArCrArArArGrArUrArArGrGrCrUrUrCrArUrGrCrCrGrArArArUrCrArArCrArCrCrCrUrGrUrCrArUrUrUrUrArUrGrGrCr | |
| | G_3FE_ | ArGrGrGrUrGrUrUrUrUrUrCrUrCrGrUrCrGrArUrGrGrU*mC*mA*mG | |
| | PB8 | | |
| 360 | A1AT_Nme2_ | mU*mA*mA*rArArArCrArUrGrGrCrCrCrCrArGrCrArGrCrUrUrGrUrUrGrUrArGrCrUrCrCrCrGrArArArCrGrUrUrGrCrU | 24429 |
| | ED15+_G_ | rArCrArArUrArArGrGrCrCrGrUrCrUrGrArArArArGrArUrGrUrGrCrCrGrCrArArCrGrCrUrCrUrGrCrCrCrCrUrUrArArArG | |
| | 30FE_ | rCrUrUrCrUrGrCrUrUrUrArArGrGrGrGrCrArUrCrGrUrUrGrCrCrGrUrGrCrArUrArArGrGrCrUrGrUrGrCrUrGrArCrCrAr | |
| | PB17 | UrCrGrArCrGrArGrArArArGrGrGrArCrUrGrArArGrCrUrGrCrUrGrGrGrGrCrCrArUrG*mU*mU*mU | |
| 361 | A1AT_Nme2_ | mU*mA*mA*rArArArCrArUrGrGrCrCrCrCrArGrCrArGrCrUrUrGrUrUrGrUrArGrCrUrCrCrCrGrArArArCrGrUrUrGrCrU | 24430 |
| | ED15+_G_ | rArCrArArUrArArGrGrCrCrGrUrCrUrGrArArArArGrArUrGrUrGrCrCrGrCrArArCrGrCrUrCrUrGrCrCrCrCrUrUrArArArG | |
| | 30FE_ | rCrUrUrCrUrGrCrUrUrUrArArGrGrGrGrCrArUrCrGrUrUrGrCrCrGrUrGrCrArUrArArGrGrCrUrGrUrGrCrUrGrArCrCrAr | |
| | PB16 | UrCrGrArCrGrArGrArArArGrGrGrArCrUrGrArArGrCrUrGrCrUrGrGrGrGrCrCrArU*mG*mU*mU | |
| 362 | A1AT_Nme2_ | mU*mA*mA*rArArArCrArUrGrGrCrCrCrCrArGrCrArGrCrUrUrGrUrUrGrUrArGrCrUrCrCrCrGrArArArCrGrUrUrGrCrU | 24431 |
| | ED15+_G_ | rArCrArArUrArArGrGrCrCrGrUrCrUrGrArArArArGrArUrGrUrGrCrCrGrCrArArCrGrCrUrCrUrGrCrCrCrCrUrUrArArArG | |
| | 30FE_ | rCrUrUrCrUrGrCrUrUrUrArArGrGrGrGrCrArUrCrGrUrUrGrCrCrGrUrGrCrArUrArArGrGrCrUrGrUrGrCrUrGrArCrCrAr | |
| | PB15 | UrCrGrArCrGrArGrArArArGrGrGrArCrUrGrArArGrCrUrGrCrUrGrGrGrGrCrCrA*mU*mG*mU | |
| 363 | A1AT_Nme2_ | mU*mA*mA*rArArArCrArUrGrGrCrCrCrCrArGrCrArGrCrUrUrGrUrUrGrUrArGrCrUrCrCrCrGrArArArCrGrUrUrGrCrU | 24432 |
| | ED15+_G_ | rArCrArArUrArArGrGrCrCrGrUrCrUrGrArArArArGrArUrGrUrGrCrCrGrCrArArCrGrCrUrCrUrGrCrCrCrCrUrUrArArArG | |
| | 30FE_ | rCrUrUrCrUrGrCrUrUrUrArArGrGrGrGrCrArUrCrGrUrUrGrCrCrGrUrGrCrArUrArArGrGrCrUrGrUrGrCrUrGrArCrCrAr | |
| | PB14 | UrCrGrArCrGrArGrArArArGrGrGrArCrUrGrArArGrCrUrGrCrUrGrGrGrGrCrC*mA*mU*mG | |
| 364 | A1AT_Nme2_ | mU*mA*mA*rArArArCrArUrGrGrCrCrCrCrArGrCrArGrCrUrUrGrUrUrGrUrArGrCrUrCrCrCrGrArArArCrGrUrUrGrCrU | 24433 |
| | ED15+_G_ | rArCrArArUrArArGrGrCrCrGrUrCrUrGrArArArArGrArUrGrUrGrCrCrGrCrArArCrGrCrUrCrUrGrCrCrCrCrUrUrArArArG | |
| | 30FE_ | rCrUrUrCrUrGrCrUrUrUrArArGrGrGrGrCrArUrCrGrUrUrGrCrCrGrUrGrCrArUrArArGrGrCrUrGrUrGrCrUrGrArCrCrAr | |
| | PB13 | UrCrGrArCrGrArGrArArArGrGrGrArCrUrGrArArGrCrUrGrCrUrGrGrGrGrC*mC*mA*mU | |
| 365 | A1AT_Nme2_ | mU*mA*mA*rArArArCrArUrGrGrCrCrCrCrArGrCrArGrCrUrUrGrUrUrGrUrArGrCrUrCrCrCrGrArArArCrGrUrUrGrCrU | 24434 |
| | ED15+_G_ | rArCrArArUrArArGrGrCrCrGrUrCrUrGrArArArArGrArUrGrUrGrCrCrGrCrArArCrGrCrUrCrUrGrCrCrCrCrUrUrArArArG | |
| | 30FE_ | rCrUrUrCrUrGrCrUrUrUrArArGrGrGrGrCrArUrCrGrUrUrGrCrCrGrUrGrCrArUrArArGrGrCrUrGrUrGrCrUrGrArCrCrAr | |
| | PB12 | UrCrGrArCrGrArGrArArArGrGrGrArCrUrGrArArGrCrUrGrCrUrGrGrGrG*mC*mC*mA | |
| 366 | A1AT_Nme2_ | mU*mA*mA*rArArArCrArUrGrGrCrCrCrCrArGrCrArGrCrUrUrGrUrUrGrUrArGrCrUrCrCrCrGrArArArCrGrUrUrGrCrU | 24435 |
| | ED15+_G_ | rArCrArArUrArArGrGrCrCrGrUrCrUrGrArArArArGrArUrGrUrGrCrCrGrCrArArCrGrCrUrCrUrGrCrCrCrCrUrUrArArArG | |
| | 30FE_ | rCrUrUrCrUrGrCrUrUrUrArArGrGrGrGrCrArUrCrGrUrUrGrCrCrGrUrGrCrArUrArArGrGrCrUrGrUrGrCrUrGrArCrCrAr | |
| | PB11 | UrCrGrArCrGrArGrArArArGrGrGrArCrUrGrArArGrCrUrGrCrUrGrGrG*mG*mC*mC | |
| 367 | A1AT_Nme2_ | mU*mA*mA*rArArArCrArUrGrGrCrCrCrCrArGrCrArGrCrUrUrGrUrUrGrUrArGrCrUrCrCrCrGrArArArCrGrUrUrGrCrU | 24436 |
| | ED15+_G_ | rArCrArArUrArArGrGrCrCrGrUrCrUrGrArArArArGrArUrGrUrGrCrCrGrCrArArCrGrCrUrCrUrGrCrCrCrCrUrUrArArArG | |
| | 30FE_ | rCrUrUrCrUrGrCrUrUrUrArArGrGrGrGrCrArUrCrGrUrUrGrCrCrGrUrGrCrArUrArArGrGrCrUrGrUrGrCrUrGrArCrCrAr | |
| | PB10 | UrCrGrArCrGrArGrArArArGrGrGrArCrUrGrArArGrCrUrGrCrUrGrG*mG*mG*mC | |
| 368 | A1AT_Nme2_ | mU*mA*mA*rArArArCrArUrGrGrCrCrCrCrArGrCrArGrCrUrUrGrUrUrGrUrArGrCrUrCrCrCrGrArArArCrGrUrUrGrCrU | 24437 |
| | ED15+_G_ | rArCrArArUrArArGrGrCrCrGrUrCrUrGrArArArArGrArUrGrUrGrCrCrGrCrArArCrGrCrUrCrUrGrCrCrCrCrUrUrArArArG | |
| | 30FE_PB9 | rCrUrUrCrUrGrCrUrUrUrArArGrGrGrGrCrArUrCrGrUrUrGrCrCrGrUrGrCrArUrArArGrGrCrUrGrUrGrCrUrGrArCrCrAr | |
| | | UrCrGrArCrGrArGrArArArGrGrGrArCrUrGrArArGrCrUrGrCrUrG*mG*mG*mG | |
| 369 | A1AT_Nme2_ | mU*mA*mA*rArArArCrArUrGrGrCrCrCrCrArGrCrArGrCrUrUrGrUrUrGrUrArGrCrUrCrCrCrGrArArArCrGrUrUrGrCrU | 24438 |
| | ED15+_G_ | rArCrArArUrArArGrGrCrCrGrUrCrUrGrArArArArGrArUrGrUrGrCrCrGrCrArArCrGrCrUrCrUrGrCrCrCrCrUrUrArArArG | |
| | 30FE_PB8 | rCrUrUrCrUrGrCrUrUrUrArArGrGrGrGrCrArUrCrGrUrUrGrCrCrGrUrGrCrArUrArArGrGrCrUrGrUrGrCrUrGrArCrCrAr | |
| | | UrCrGrArCrGrArGrArArArGrGrGrArCrUrGrArArGrCrUrGrCrU*mG*mG*mG | |
| 370 | A1AT_Nme2_ | mU*mA*mA*rArArArCrArUrGrGrCrCrCrCrArGrCrArGrCrUrUrGrUrUrGrUrArGrCrUrCrCrCrGrArArArCrGrUrUrGrCrU | 24439 |
| | ED15+_G_ | ArCrArArUrArArGrGrCrCrGrUrCrUrGrArArArArGrArUrGrUrGrCrCrGrCrArArCrGrCrUrCrUrGrCrCrCrCrUrUrArArArG | |
| | 25FE_ | rCrUrUrCrUrGrCrUrUrUrArArGrGrGrGrCrArUrCrGrUrUrGrCrArUrArArGrGrCrUrGrUrGrCrUrGrArCrCrArUrCrGrArCr | |
| | PB17 | GrArGrArArArGrGrGrArCrUrGrArArGrCrUrGrCrUrGrGrGrGrCrCrArUrG*mU*mU*mU | |
| 371 | A1AT_Nme2_ | mU*mA*mA*rArArArCrArUrGrGrCrCrCrCrArGrCrArGrCrUrUrGrUrUrGrUrArGrCrUrCrCrCrGrArArArCrGrUrUrGrCrU | 24440 |
| | ED15+_G_ | rArCrArArUrArArGrGrCrCrGrUrCrUrGrArArArArGrArUrGrUrGrCrCrGrCrArArCrGrCrUrCrUrGrCrCrCrCrUrUrArArArG | |
| | 25FE_ | rCrUrUrCrUrGrCrUrUrUrArArGrGrGrGrCrArUrCrGrUrUrGrCrArUrArArGrGrCrUrGrUrGrCrUrGrArCrCrArUrCrGrArCr | |
| | PB16 | GrArGrArArArGrGrGrArCrUrGrArArGrCrUrGrCrUrGrGrGrGrCrCrArU*mG*mU*mU | |
| 372 | A1AT_Nme2_ | mU*mA*mA*rArArArCrArUrGrGrCrCrCrCrArGrCrArGrCrUrUrGrUrUrGrUrArGrCrUrCrCrCrGrArArArCrGrUrUrGrCrU | 24441 |
| | ED15+_G_ | ArCrArArUrArArGrGrCrCrGrUrCrUrGrArArArArGrArUrGrUrGrCrCrGrCrArArCrGrCrUrCrUrGrCrCrCrCrUrUrArArArG | |
| | 25FE_ | rCrUrUrCrUrGrCrUrUrUrArArGrGrGrGrCrArUrCrGrUrUrGrCrArUrArArGrGrCrUrGrUrGrCrUrGrArCrCrArUrCrGrArCr | |
| | PB15 | GrArGrArArArGrGrGrArCrUrGrArArGrCrUrGrCrUrGrGrGrGrCrCrA*mU*mG*mU | |
| 373 | A1AT_Nme2_ | mU*mA*mA*rArArArCrArUrGrGrCrCrCrCrArGrCrArGrCrUrUrGrUrUrGrUrArGrCrUrCrCrCrGrArArArCrGrUrUrGrCrU | 24442 |
| | ED15+_G_ | rArCrArArUrArArGrGrCrCrGrUrCrUrGrArArArArGrArUrGrUrGrCrCrGrCrArArCrGrCrUrCrUrGrCrCrCrCrUrUrArArArG | |
| | 25FE_ | rCrUrUrCrUrGrCrUrUrUrArArGrGrGrGrCrArUrCrGrUrUrGrCrArUrArArGrGrCrUrGrUrGrCrUrGrArCrCrArUrCrGrArCr | |
| | PB14 | GrArGrArArArGrGrGrArCrUrGrArArGrCrUrGrCrUrGrGrGrGrCrC*mA*mU*mG | |
| 374 | A1AT_Nme2_ | mU*mA*mA*rArArArCrArUrGrGrCrCrCrCrArGrCrArGrCrUrUrGrUrUrGrUrArGrCrUrCrCrCrGrArArArCrGrUrUrGrCrU | 24443 |
| | ED15+_G_ | rArCrArArUrArArGrGrCrCrGrUrCrUrGrArArArArGrArUrGrUrGrCrCrGrCrArArCrGrCrUrCrUrGrCrCrCrCrUrUrArArArG | |
| | 25FE_ | rCrUrUrCrUrGrCrUrUrUrArArGrGrGrGrCrArUrCrGrUrUrGrCrArUrArArGrGrCrUrGrUrGrCrUrGrArCrCrArUrCrGrArCr | |
| | PB13 | GrArGrArArArGrGrGrArCrUrGrArArGrCrUrGrCrUrGrGrGrGrC*mC*mA*mU | |
| 375 | A1AT_Nme2_ | mU*mA*mA*rArArArCrArUrGrGrCrCrCrCrArGrCrArGrCrUrUrGrUrUrGrUrArGrCrUrCrCrCrGrArArArCrGrUrUrGrCrU | 24444 |
| | ED15+_G_ | rArCrArArUrArArGrGrCrCrGrUrCrUrGrArArArArGrArUrGrUrGrCrCrGrCrArArCrGrCrUrCrUrGrCrCrCrCrUrUrArArArG | |
| | 25FE_ | rCrUrUrCrUrGrCrUrUrUrArArGrGrGrGrCrArUrCrGrUrUrGrCrArUrArArGrGrCrUrGrUrGrCrUrGrArCrCrArUrCrGrArCr | |
| | PB12 | GrArGrArArArGrGrGrArCrUrGrArArGrCrUrGrCrUrGrGrGrG*mC*mC*mA | |
| 376 | A1AT_Nme2_ | mU*mA*mA*rArArArCrArUrGrGrCrCrCrCrArGrCrArGrCrUrUrGrUrUrGrUrArGrCrUrCrCrCrGrArArArCrGrUrUrGrCrU | 24445 |
| | ED15+_G_ | rArCrArArUrArArGrGrCrCrGrUrCrUrGrArArArArGrArUrGrUrGrCrCrGrCrArArCrGrCrUrCrUrGrCrCrCrCrUrUrArArArG | |
| | 25FE_ | rCrUrUrCrUrGrCrUrUrUrArArGrGrGrGrCrArUrCrGrUrUrGrCrArUrArArGrGrCrUrGrUrGrCrUrGrArCrCrArUrCrGrArCr | |
| | PB11 | GrArGrArArArGrGrGrArCrUrGrArArGrCrUrGrCrUrGrGrG*mG*mC*mC | |
| 377 | A1AT_Nme2_ | mU*mA*mA*rArArArCrArUrGrGrCrCrCrCrArGrCrArGrCrUrUrGrUrUrGrUrArGrCrUrCrCrCrGrArArArCrGrUrUrGrCrU | 24446 |
| | ED15+_G_ | rArCrArArUrArArGrGrCrCrGrUrCrUrGrArArArArGrArUrGrUrGrCrCrGrCrArArCrGrCrUrCrUrGrCrCrCrCrUrUrArArArG | |
| | 25FE_ | rCrUrUrCrUrGrCrUrUrUrArArGrGrGrGrCrArUrCrGrUrUrGrCrArUrArArGrGrCrUrGrUrGrCrUrGrArCrCrArUrCrGrArCr | |
| | PB10 | GrArGrArArArGrGrGrArCrUrGrArArGrCrUrGrCrUrGrG*mG*mG*mC | |
| 378 | A1AT_Nme2_ | mU*mA*mA*rArArArCrArUrGrGrCrCrCrCrArGrCrArGrCrUrUrGrUrUrGrUrArGrCrUrCrCrCrGrArArArCrGrUrUrGrCrU | 24447 |
| | ED15+_G_ | rArCrArArUrArArGrGrCrCrGrUrCrUrGrArArArArGrArUrGrUrGrCrCrGrCrArArCrGrCrUrCrUrGrCrCrCrCrUrUrArArArG | |
| | 25FE_PB9 | rCrUrUrCrUrGrCrUrUrUrArArGrGrGrGrCrArUrCrGrUrUrGrCrArUrArArGrGrCrUrGrUrGrCrUrGrArCrCrArUrCrGrArCr | |
| | | GrArGrArArArGrGrGrArCrUrGrArArGrCrUrGrCrUrG*mG*mG*mG | |
| 379 | A1AT_Nme2_ | mU*mA*mA*rArArArCrArUrGrGrCrCrCrCrArGrCrArGrCrUrUrGrUrUrGrUrArGrCrUrCrCrCrGrArArArCrGrUrUrGrCrU | 24448 |
| | ED15+_G_ | rArCrArArUrArArGrGrCrCrGrUrCrUrGrArArArArGrArUrGrUrGrCrCrGrCrArArCrGrCrUrCrUrGrCrCrCrCrUrUrArArArG | |
| | 25FE_PB8 | rCrUrUrCrUrGrCrUrUrUrArArGrGrGrGrCrArUrCrGrUrUrGrCrArUrArArGrGrCrUrGrUrGrCrUrGrArCrCrArUrCrGrArCr | |
| | | GrArGrArArArGrGrGrArCrUrGrArArGrCrUrGrCrU*mG*mG*mG | |
| 380 | A1AT_Nme2_ | mU*mA*mA*rArArArCrArUrGrGrCrCrCrCrArGrCrArGrCrUrUrGrUrUrGrUrArGrCrUrCrCrCrGrArArArCrGrUrUrGrCrU | 24449 |
| | ED15+_G_ | rArCrArArUrArArGrGrCrCrGrUrCrUrGrArArArArGrArUrGrUrGrCrCrGrCrArArCrGrCrUrCrUrGrCrCrCrCrUrUrArArArG | |
| | 20FE_ | rCrUrUrCrUrGrCrUrUrUrArArGrGrGrGrCrArUrCrGrUrUrArGrGrCrUrGrUrGrCrUrGrArCrCrArUrCrGrArCrGrArGrArAr | |
| | PB17 | ArGrGrGrArCrUrGrArArGrCrUrGrCrUrGrGrGrGrCrCrArUrG*mU*mU*mU | |
| 381 | A1AT_Nme2_ | mU*mA*mA*rArArArCrArUrGrGrCrCrCrCrArGrCrArGrCrUrUrGrUrUrGrUrArGrCrUrCrCrCrGrArArArCrGrUrUrGrCrU | 24450 |
| | ED15+_G_ | rArCrArArUrArArGrGrCrCrGrUrCrUrGrArArArArGrArUrGrUrGrCrCrGrCrArArCrGrCrUrCrUrGrCrCrCrCrUrUrArArArG | |
| | 20FE_ | rCrUrUrCrUrGrCrUrUrUrArArGrGrGrGrCrArUrCrGrUrUrArGrGrCrUrGrUrGrCrUrGrArCrCrArUrCrGrArCrGrArGrArAr | |
| | PB16 | ArGrGrGrArCrUrGrArArGrCrUrGrCrUrGrGrGrGrCrCrArU*mG*mU*mU | |
| 382 | A1AT_Nme2_ | mU*mA*mA*rArArArCrArUrGrGrCrCrCrCrArGrCrArGrCrUrUrGrUrUrGrUrArGrCrUrCrCrCrGrArArArCrGrUrUrGrCrU | 24451 |
| | ED15+_G_ | rArCrArArUrArArGrGrCrCrGrUrCrUrGrArArArArGrArUrGrUrGrCrCrGrCrArArCrGrCrUrCrUrGrCrCrCrCrUrUrArArArG | |
| | 20FE_ | rCrUrUrCrUrGrCrUrUrUrArArGrGrGrGrCrArUrCrGrUrUrArGrGrCrUrGrUrGrCrUrGrArCrCrArUrCrGrArCrGrArGrArAr | |
| | PB15 | ArGrGrGrArCrUrGrArArGrCrUrGrCrUrGrGrGrGrCrCrA*mU*mG*mU | |
| 383 | A1AT_Nme2_ | mU*mA*mA*rArArArCrArUrGrGrCrCrCrCrArGrCrArGrCrUrUrGrUrUrGrUrArGrCrUrCrCrCrGrArArArCrGrUrUrGrCrU | 24452 |
| | ED15+_G_ | rArCrArArUrArArGrGrCrCrGrUrCrUrGrArArArArGrArUrGrUrGrCrCrGrCrArArCrGrCrUrCrUrGrCrCrCrCrUrUrArArArG | |
| | 20FE_ | rCrUrUrCrUrGrCrUrUrUrArArGrGrGrGrCrArUrCrGrUrUrArGrGrCrUrGrUrGrCrUrGrArCrCrArUrCrGrArCrGrArGrArAr | |
| | PB14 | ArGrGrGrArCrUrGrArArGrCrUrGrCrUrGrGrGrGrCrC*mA*mU*mG | |
| 384 | A1AT_Nme2_ | mU*mA*mA*rArArArCrArUrGrGrCrCrCrCrArGrCrArGrCrUrUrGrUrUrGrUrArGrCrUrCrCrCrGrArArArCrGrUrUrGrCrU | 24453 |
| | ED15+_G_ | rArCrArArUrArArGrGrCrCrGrUrCrUrGrArArArArGrArUrGrUrGrCrCrGrCrArArCrGrCrUrCrUrGrCrCrCrCrUrUrArArArG | |
| | 20FE_ | rCrUrUrCrUrGrCrUrUrUrArArGrGrGrGrCrArUrCrGrUrUrArGrGrCrUrGrUrGrCrUrGrArCrCrArUrCrGrArCrGrArGrArAr | |
| | 3PB1 | ArGrGrGrArCrUrGrArArGrCrUrGrCrUrGrGrGrGrC*mC*mA*mU | |
| 385 | A1AT_Nme2_ | mU*mA*mA*rArArArCrArUrGrGrCrCrCrCrArGrCrArGrCrUrUrGrUrUrGrUrArGrCrUrCrCrCrGrArArArCrGrUrUrGrCrU | 24454 |
| | ED15+_G_ | rArCrArArUrArArGrGrCrCrGrUrCrUrGrArArArArGrArUrGrUrGrCrCrGrCrArArCrGrCrUrCrUrGrCrCrCrCrUrUrArArArG | |
| | 20FE_ | rCrUrUrCrUrGrCrUrUrUrArArGrGrGrGrCrArUrCrGrUrUrArGrGrCrUrGrUrGrCrUrGrArCrCrArUrCrGrArCrGrArGrArAr | |
| | PB12 | ArGrGrGrArCrUrGrArArGrCrUrGrCrUrGrGrGrG*mC*mC*mA | |
| 386 | A1AT_Nme2_ | mU*mA*mA*rArArArCrArUrGrGrCrCrCrCrArGrCrArGrCrUrUrGrUrUrGrUrArGrCrUrCrCrCrGrArArArCrGrUrUrGrCrU | 24455 |
| | ED15+_G_ | rArCrArArUrArArGrGrCrCrGrUrCrUrGrArArArArGrArUrGrUrGrCrCrGrCrArArCrGrCrUrCrUrGrCrCrCrCrUrUrArArArG | |
| | 20FE_ | rCrUrUrCrUrGrCrUrUrUrArArGrGrGrGrCrArUrCrGrUrUrArGrGrCrUrGrUrGrCrUrGrArCrCrArUrCrGrArCrGrArGrArAr | |
| | PB11 | ArGrGrGrArCrUrGrArArGrCrUrGrCrUrGrGrG*mG*mC*mC | |
| 387 | A1AT_Nme2_ | mU*mA*mA*rArArArCrArUrGrGrCrCrCrCrArGrCrArGrCrUrUrGrUrUrGrUrArGrCrUrCrCrCrGrArArArCrGrUrUrGrCrU | 24456 |
| | ED15+_G_ | rArCrArArUrArArGrGrCrCrGrUrCrUrGrArArArArGrArUrGrUrGrCrCrGrCrArArCrGrCrUrCrUrGrCrCrCrCrUrUrArArArG | |
| | 20FE_ | rCrUrUrCrUrGrCrUrUrUrArArGrGrGrGrCrArUrCrGrUrUrArGrGrCrUrGrUrGrCrUrGrArCrCrArUrCrGrArCrGrArGrArAr | |
| | PB10 | ArGrGrGrArCrUrGrArArGrCrUrGrCrUrGrG*mG*mG*mC | |
| 388 | A1AT_Nme2_ | mU*mA*mA*rArArArCrArUrGrGrCrCrCrCrArGrCrArGrCrUrUrGrUrUrGrUrArGrCrUrCrCrCrGrArArArCrGrUrUrGrCrU | 24457 |
| | ED15+_G_ | rArCrArArUrArArGrGrCrCrGrUrCrUrGrArArArArGrArUrGrUrGrCrCrGrCrArArCrGrCrUrCrUrGrCrCrCrCrUrUrArArArG | |
| | 20FE_PB9 | rCrUrUrCrUrGrCrUrUrUrArArGrGrGrGrCrArUrCrGrUrUrArGrGrCrUrGrUrGrCrUrGrArCrCrArUrCrGrArCrGrArGrArAr | |
| | | ArGrGrGrArCrUrGrArArGrCrUrGrCrUrG*mG*mG*mG | |
| 389 | A1AT_Nme2_ | mU*mA*mA*rArArArCrArUrGrGrCrCrCrCrArGrCrArGrCrUrUrGrUrUrGrUrArGrCrUrCrCrCrGrArArArCrGrUrUrGrCrU | 24458 |
| | ED15+_G_ | rArCrArArUrArArGrGrCrCrGrUrCrUrGrArArArArGrArUrGrUrGrCrCrGrCrArArCrGrCrUrCrUrGrCrCrCrCrUrUrArArArG | |
| | 20FE_PB8 | rCrUrUrCrUrGrCrUrUrUrArArGrGrGrGrCrArUrCrGrUrUrArGrGrCrUrGrUrGrCrUrGrArCrCrArUrCrGrArCrGrArGrArAr | |
| | | ArGrGrGrArCrUrGrArArGrCrUrGrCrU*mG*mG*mG | |
| 390 | A1AT_Nme2_ | mU*mA*mA*rArArArCrArUrGrGrCrCrCrCrArGrCrArGrCrUrUrGrUrUrGrUrArGrCrUrCrCrCrGrArArArCrGrUrUrGrCrU | 24459 |
| | ED15+_G_ | rArCrArArUrArArGrGrCrCrGrUrCrUrGrArArArArGrArUrGrUrGrCrCrGrCrArArCrGrCrUrCrUrGrCrCrCrCrUrUrArArArG | |
| | 14FE_ | rCrUrUrCrUrGrCrUrUrUrArArGrGrGrGrCrArUrCrGrUrUrUrGrCrUrGrArCrCrArUrCrGrArCrGrArGrArArArGrGrGrArCr | |
| | PB17 | UrGrArArGrCrUrGrCrUrGrGrGrGrCrCrArUrG*mU*mU*mU | |
| 391 | A1AT_Nme2_ | mU*mA*mA*rArArArCrArUrGrGrCrCrCrCrArGrCrArGrCrUrUrGrUrUrGrUrArGrCrUrCrCrCrGrArArArCrGrUrUrGrCrU | 24460 |
| | ED15+_G_ | rArCrArArUrArArGrGrCrCrGrUrCrUrGrArArArArGrArUrGrUrGrCrCrGrCrArArCrGrCrUrCrUrGrCrCrCrCrUrUrArArArG | |
| | 14FE_ | rCrUrUrCrUrGrCrUrUrUrArArGrGrGrGrCrArUrCrGrUrUrUrGrCrUrGrArCrCrArUrCrGrArCrGrArGrArArArGrGrGrArCr | |
| | PB16 | UrGrArArGrCrUrGrCrUrGrGrGrGrCrCrArU*mG*mU*mU | |
| 392 | A1AT_Nme2_ | mU*mA*mA*rArArArCrArUrGrGrCrCrCrCrArGrCrArGrCrUrUrGrUrUrGrUrArGrCrUrCrCrCrGrArArArCrGrUrUrGrCrU | 24461 |
| | ED15+_G_ | rArCrArArUrArArGrGrCrCrGrUrCrUrGrArArArArGrArUrGrUrGrCrCrGrCrArArCrGrCrUrCrUrGrCrCrCrCrUrUrArArArG | |
| | 14FE_ | rCrUrUrCrUrGrCrUrUrUrArArGrGrGrGrCrArUrCrGrUrUrUrGrCrUrGrArCrCrArUrCrGrArCrGrArGrArArArGrGrGrArCr | |
| | PB15 | UrGrArArGrCrUrGrCrUrGrGrGrGrCrCrA*mU*mG*mU | |
| 393 | A1AT_Nme2_ | mU*mA*mA*rArArArCrArUrGrGrCrCrCrCrArGrCrArGrCrUrUrGrUrUrGrUrArGrCrUrCrCrCrGrArArArCrGrUrUrGrCrU | 24462 |
| | ED15+_G_ | rArCrArArUrArArGrGrCrCrGrUrCrUrGrArArArArGrArUrGrUrGrCrCrGrCrArArCrGrCrUrCrUrGrCrCrCrCrUrUrArArArG | |
| | 14FE_ | rCrUrUrCrUrGrCrUrUrUrArArGrGrGrGrCrArUrCrGrUrUrUrGrCrUrGrArCrCrArUrCrGrArCrGrArGrArArArGrGrGrArCr | |
| | PB14 | UrGrArArGrCrUrGrCrUrGrGrGrGrCrC*mA*mU*mG | |
| 394 | A1AT_Nme2_ | mU*mA*mA*rArArArCrArUrGrGrCrCrCrCrArGrCrArGrCrUrUrGrUrUrGrUrArGrCrUrCrCrCrGrArArArCrGrUrUrGrCrU | 24463 |
| | ED15+_G_ | rArCrArArUrArArGrGrCrCrGrUrCrUrGrArArArArGrArUrGrUrGrCrCrGrCrArArCrGrCrUrCrUrGrCrCrCrCrUrUrArArArG | |
| | 14FE_ | rCrUrUrCrUrGrCrUrUrUrArArGrGrGrGrCrArUrCrGrUrUrUrGrCrUrGrArCrCrArUrCrGrArCrGrArGrArArArGrGrGrArCr | |
| | PB13 | UrGrArArGrCrUrGrCrUrGrGrGrGrC*mC*mA*mU | |
| 395 | A1AT_Nme2_ | mU*mA*mA*rArArArCrArUrGrGrCrCrCrCrArGrCrArGrCrUrUrGrUrUrGrUrArGrCrUrCrCrCrGrArArArCrGrUrUrGrCrU | 24464 |
| | ED15+_G_ | rArCrArArUrArArGrGrCrCrGrUrCrUrGrArArArArGrArUrGrUrGrCrCrGrCrArArCrGrCrUrCrUrGrCrCrCrCrUrUrArArArG | |
| | 14FE_ | rCrUrUrCrUrGrCrUrUrUrArArGrGrGrGrCrArUrCrGrUrUrUrGrCrUrGrArCrCrArUrCrGrArCrGrArGrArArArGrGrGrArCr | |
| | PB12 | UrGrArArGrCrUrGrCrUrGrGrGrG*mC*mC*mA | |
| 396 | A1AT_Nme2_ | mU*mA*mA*rArArArCrArUrGrGrCrCrCrCrArGrCrArGrCrUrUrGrUrUrGrUrArGrCrUrCrCrCrGrArArArCrGrUrUrGrCrU | 24465 |
| | ED15+_G_ | rArCrArArUrArArGrGrCrCrGrUrCrUrGrArArArArGrArUrGrUrGrCrCrGrCrArArCrGrCrUrCrUrGrCrCrCrCrUrUrArArArG | |
| | 14FE_ | rCrUrUrCrUrGrCrUrUrUrArArGrGrGrGrCrArUrCrGrUrUrUrGrCrUrGrArCrCrArUrCrGrArCrGrArGrArArArGrGrGrArCr | |
| | PB11 | UrGrArArGrCrUrGrCrUrGrGrG*mG*mC*mC | |
| 397 | A1AT_Nme2_ | mU*mA*mA*rArArArCrArUrGrGrCrCrCrCrArGrCrArGrCrUrUrGrUrUrGrUrArGrCrUrCrCrCrGrArArArCrGrUrUrGrCrU | 24466 |
| | ED15+_G_ | rArCrArArUrArArGrGrCrCrGrUrCrUrGrArArArArGrArUrGrUrGrCrCrGrCrArArCrGrCrUrCrUrGrCrCrCrCrUrUrArArArG | |
| | 14FE_ | rCrUrUrCrUrGrCrUrUrUrArArGrGrGrGrCrArUrCrGrUrUrUrGrCrUrGrArCrCrArUrCrGrArCrGrArGrArArArGrGrGrArCr | |
| | PB10 | UrGrArArGrCrUrGrCrUrGrG*mG*mG*mC | |
| 398 | A1AT_Nme2_ | mU*mA*mA*rArArArCrArUrGrGrCrCrCrCrArGrCrArGrCrUrUrGrUrUrGrUrArGrCrUrCrCrCrGrArArArCrGrUrUrGrCrU | 24467 |
| | ED15+_G_ | rArCrArArUrArArGrGrCrCrGrUrCrUrGrArArArArGrArUrGrUrGrCrCrGrCrArArCrGrCrUrCrUrGrCrCrCrCrUrUrArArArG | |
| | 14FE_PB9 | rCrUrUrCrUrGrCrUrUrUrArArGrGrGrGrCrArUrCrGrUrUrUrGrCrUrGrArCrCrArUrCrGrArCrGrArGrArArArGrGrGrArCr | |
| | | UrGrArArGrCrUrGrCrUrG*mG*mG*mG | |
| 399 | A1AT_Nme2_ | mU*mA*mA*rArArArCrArUrGrGrCrCrCrCrArGrCrArGrCrUrUrGrUrUrGrUrArGrCrUrCrCrCrGrArArArCrGrUrUrGrCrU | 24468 |
| | ED15+_G_ | rArCrArArUrArArGrGrCrCrGrUrCrUrGrArArArArGrArUrGrUrGrCrCrGrCrArArCrGrCrUrCrUrGrCrCrCrCrUrUrArArArG | |
| | 14FE_PB8 | rCrUrUrCrUrGrCrUrUrUrArArGrGrGrGrCrArUrCrGrUrUrUrGrCrUrGrArCrCrArUrCrGrArCrGrArGrArArArGrGrGrArCr | |
| | | UrGrArArGrCrUrGrCrU*mG*mG*mG | |
| 400 | A1AT_Nme2_ | mU*mA*mA*rArArArCrArUrGrGrCrCrCrCrArGrCrArGrCrUrUrGrUrUrGrUrArGrCrUrCrCrCrGrArArArCrGrUrUrGrCrU | 24469 |
| | ED15+_G_ | rArCrArArUrArArGrGrCrCrGrUrCrUrGrArArArArGrArUrGrUrGrCrCrGrCrArArCrGrCrUrCrUrGrCrCrCrCrUrUrArArArG | |
| | 11FE_ | rCrUrUrCrUrGrCrUrUrUrArArGrGrGrGrCrArUrCrGrUrUrUrGrArCrCrArUrCrGrArCrGrArGrArArArGrGrGrArCrUrGrAr | |
| | PB17 | ArGrCrUrGrCrUrGrGrGrGrCrCrArUrG*mU*mU*mU | |
| 401 | A1AT_Nme2_ | mU*mA*mA*rArArArCrArUrGrGrCrCrCrCrArGrCrArGrCrUrUrGrUrUrGrUrArGrCrUrCrCrCrGrArArArCrGrUrUrGrCrU | 24470 |
| | ED15+_G_ | rArCrArArUrArArGrGrCrCrGrUrCrUrGrArArArArGrArUrGrUrGrCrCrGrCrArArCrGrCrUrCrUrGrCrCrCrCrUrUrArArArG | |
| | 11FE_ | rCrUrUrCrUrGrCrUrUrUrArArGrGrGrGrCrArUrCrGrUrUrUrGrArCrCrArUrCrGrArCrGrArGrArArArGrGrGrArCrUrGrAr | |
| | PB16 | ArGrCrUrGrCrUrGrGrGrGrCrCrArU*mG*mU*mU | |
| 402 | A1AT_Nme2_ | mU*mA*mA*rArArArCrArUrGrGrCrCrCrCrArGrCrArGrCrUrUrGrUrUrGrUrArGrCrUrCrCrCrGrArArArCrGrUrUrGrCrU | 24471 |
| | ED15+_G_ | rArCrArArUrArArGrGrCrCrGrUrCrUrGrArArArArGrArUrGrUrGrCrCrGrCrArArCrGrCrUrCrUrGrCrCrCrCrUrUrArArArG | |
| | 11FE_ | rCrUrUrCrUrGrCrUrUrUrArArGrGrGrGrCrArUrCrGrUrUrUrGrArCrCrArUrCrGrArCrGrArGrArArArGrGrGrArCrUrGrAr | |
| | PB15 | ArGrCrUrGrCrUrGrGrGrGrCrCrA*mU*mG*mU | |
| 403 | A1AT_Nme2_ | mU*mA*mA*rArArArCrArUrGrGrCrCrCrCrArGrCrArGrCrUrUrGrUrUrGrUrArGrCrUrCrCrCrGrArArArCrGrUrUrGrCrU | 24472 |
| | ED15+_G_ | rArCrArArUrArArGrGrCrCrGrUrCrUrGrArArArArGrArUrGrUrGrCrCrGrCrArArCrGrCrUrCrUrGrCrCrCrCrUrUrArArArG | |
| | 11FE_ | rCrUrUrCrUrGrCrUrUrUrArArGrGrGrGrCrArUrCrGrUrUrUrGrArCrCrArUrCrGrArCrGrArGrArArArGrGrGrArCrUrGrAr | |
| | PB14 | ArGrCrUrGrCrUrGrGrGrGrCrC*mA*mU*mG | |
| 404 | A1AT_Nme2_ | mU*mA*mA*rArArArCrArUrGrGrCrCrCrCrArGrCrArGrCrUrUrGrUrUrGrUrArGrCrUrCrCrCrGrArArArCrGrUrUrGrCrU | 24473 |
| | ED15+_G_ | rArCrArArUrArArGrGrCrCrGrUrCrUrGrArArArArGrArUrGrUrGrCrCrGrCrArArCrGrCrUrCrUrGrCrCrCrCrUrUrArArArG | |
| | 11FE_ | rCrUrUrCrUrGrCrUrUrUrArArGrGrGrGrCrArUrCrGrUrUrUrGrArCrCrArUrCrGrArCrGrArGrArArArGrGrGrArCrUrGrAr | |
| | PB13 | ArGrCrUrGrCrUrGrGrGrGrC*mC*mA*mU | |
| 405 | A1AT_Nme2_ | mU*mA*mA*rArArArCrArUrGrGrCrCrCrCrArGrCrArGrCrUrUrGrUrUrGrUrArGrCrUrCrCrCrGrArArArCrGrUrUrGrCrU | 24474 |
| | ED15+_G_ | rArCrArArUrArArGrGrCrCrGrUrCrUrGrArArArArGrArUrGrUrGrCrCrGrCrArArCrGrCrUrCrUrGrCrCrCrCrUrUrArArArG | |
| | 11FE_ | rCrUrUrCrUrGrCrUrUrUrArArGrGrGrGrCrArUrCrGrUrUrUrGrArCrCrArUrCrGrArCrGrArGrArArArGrGrGrArCrUrGrAr | |
| | PB12 | ArGrCrUrGrCrUrGrGrGrG*mC*mC*mA | |
| 406 | A1AT_Nme2_ | mU*mA*mA*rArArArCrArUrGrGrCrCrCrCrArGrCrArGrCrUrUrGrUrUrGrUrArGrCrUrCrCrCrGrArArArCrGrUrUrGrCrU | 24475 |
| | ED15+_G_ | rArCrArArUrArArGrGrCrCrGrUrCrUrGrArArArArGrArUrGrUrGrCrCrGrCrArArCrGrCrUrCrUrGrCrCrCrCrUrUrArArArG | |
| | 11FE_ | rCrUrUrCrUrGrCrUrUrUrArArGrGrGrGrCrArUrCrGrUrUrUrGrArCrCrArUrCrGrArCrGrArGrArArArGrGrGrArCrUrGrAr | |
| | PB11 | ArGrCrUrGrCrUrGrGrG*mG*mC*mC | |
| 407 | A1AT_Nme2_ | mU*mA*mA*rArArArCrArUrGrGrCrCrCrCrArGrCrArGrCrUrUrGrUrUrGrUrArGrCrUrCrCrCrGrArArArCrGrUrUrGrCrU | 24476 |
| | ED15+_G_ | rArCrArArUrArArGrGrCrCrGrUrCrUrGrArArArArGrArUrGrUrGrCrCrGrCrArArCrGrCrUrCrUrGrCrCrCrCrUrUrArArArG | |
| | 11FE_ | rCrUrUrCrUrGrCrUrUrUrArArGrGrGrGrCrArUrCrGrUrUrUrGrArCrCrArUrCrGrArCrGrArGrArArArGrGrGrArCrUrGrAr | |
| | PB10 | ArGrCrUrGrCrUrGrG*mG*mG*mC | |
| 408 | A1AT_Nme2_ | mU*mA*mA*rArArArCrArUrGrGrCrCrCrCrArGrCrArGrCrUrUrGrUrUrGrUrArGrCrUrCrCrCrGrArArArCrGrUrUrGrCrU | 24477 |
| | ED15+_G_ | rArCrArArUrArArGrGrCrCrGrUrCrUrGrArArArArGrArUrGrUrGrCrCrGrCrArArCrGrCrUrCrUrGrCrCrCrCrUrUrArArArG | |
| | 11FE_PB9 | rCrUrUrCrUrGrCrUrUrUrArArGrGrGrGrCrArUrCrGrUrUrUrGrArCrCrArUrCrGrArCrGrArGrArArArGrGrGrArCrUrGrAr | |
| | | ArGrCrUrGrCrUrG*mG*mG*mG | |
| 409 | A1AT_Nme2_ | mU*mA*mA*rArArArCrArUrGrGrCrCrCrCrArGrCrArGrCrUrUrGrUrUrGrUrArGrCrUrCrCrCrGrArArArCrGrUrUrGrCrU | 24478 |
| | ED15+_G_ | rArCrArArUrArArGrGrCrCrGrUrCrUrGrArArArArGrArUrGrUrGrCrCrGrCrArArCrGrCrUrCrUrGrCrCrCrCrUrUrArArArG | |
| | 11FE_PB8 | rCrUrUrCrUrGrCrUrUrUrArArGrGrGrGrCrArUrCrGrUrUrUrGrArCrCrArUrCrGrArCrGrArGrArArArGrGrGrArCrUrGrAr | |
| | | ArGrCrUrGrCrU*mG*mG*mG | |
| 410 | A1AT_Nme2_ | mU*mA*mA*rArArArCrArUrGrGrCrCrCrCrArGrCrArGrCrUrUrGrUrUrGrUrArGrCrUrCrCrCrGrArArArCrGrUrUrGrCrU | 24479 |
| | ED15+_G_ | rArCrArArUrArArGrGrCrCrGrUrCrUrGrArArArArGrArUrGrUrGrCrCrGrCrArArCrGrCrUrCrUrGrCrCrCrCrUrUrArArArG | |
| | 9FE_PB17 | rCrUrUrCrUrGrCrUrUrUrArArGrGrGrGrCrArUrCrGrUrUrArCrCrArUrCrGrArCrGrArGrArArArGrGrGrArCrUrGrArArGr | |
| | | CrUrGrCrUrGrGrGrGrCrCrArUrG*mU*mU*mU | |
| 411 | A1AT_Nme2_ | mU*mA*mA*rArArArCrArUrGrGrCrCrCrCrArGrCrArGrCrUrUrGrUrUrGrUrArGrCrUrCrCrCrGrArArArCrGrUrUrGrCrU | 24480 |
| | ED15+_G_ | rArCrArArUrArArGrGrCrCrGrUrCrUrGrArArArArGrArUrGrUrGrCrCrGrCrArArCrGrCrUrCrUrGrCrCrCrCrUrUrArArArG | |
| | 9FE_PB16 | rCrUrUrCrUrGrCrUrUrUrArArGrGrGrGrCrArUrCrGrUrUrArCrCrArUrCrGrArCrGrArGrArArArGrGrGrArCrUrGrArArGr | |
| | | CrUrGrCrUrGrGrGrGrCrCrArU*mG*mU*mU | |
| 412 | A1AT_Nme2_ | mU*mA*mA*rArArArCrArUrGrGrCrCrCrCrArGrCrArGrCrUrUrGrUrUrGrUrArGrCrUrCrCrCrGrArArArCrGrUrUrGrCrU | 24481 |
| | ED15+_G_ | rArCrArArUrArArGrGrCrCrGrUrCrUrGrArArArArGrArUrGrUrGrCrCrGrCrArArCrGrCrUrCrUrGrCrCrCrCrUrUrArArArG | |
| | 9FE_PB15 | rCrUrUrCrUrGrCrUrUrUrArArGrGrGrGrCrArUrCrGrUrUrArCrCrArUrCrGrArCrGrArGrArArArGrGrGrArCrUrGrArArGr | |
| | | CrUrGrCrUrGrGrGrGrCrCrA*mU*mG*mU | |
| 413 | A1AT_Nme2_ | mU*mA*mA*rArArArCrArUrGrGrCrCrCrCrArGrCrArGrCrUrUrGrUrUrGrUrArGrCrUrCrCrCrGrArArArCrGrUrUrGrCrU | 24482 |
| | ED15+_G_ | rArCrArArUrArArGrGrCrCrGrUrCrUrGrArArArArGrArUrGrUrGrCrCrGrCrArArCrGrCrUrCrUrGrCrCrCrCrUrUrArArArG | |
| | 9FE_PB14 | rCrUrUrCrUrGrCrUrUrUrArArGrGrGrGrCrArUrCrGrUrUrArCrCrArUrCrGrArCrGrArGrArArArGrGrGrArCrUrGrArArGr | |
| | | CrUrGrCrUrGrGrGrGrCrC*mA*mU*mG | |
| 414 | A1AT_Nme2_ | mU*mA*mA*rArArArCrArUrGrGrCrCrCrCrArGrCrArGrCrUrUrGrUrUrGrUrArGrCrUrCrCrCrGrArArArCrGrUrUrGrCrU | |
| | ED15+_G_ | rArCrArArUrArArGrGrCrCrGrUrCrUrGrArArArArGrArUrGrUrGrCrCrGrCrArArCrGrCrUrCrUrGrCrCrCrCrUrUrArArArG | |
| | 9FE_PB13 | rCrUrUrCrUrGrCrUrUrUrArArGrGrGrGrCrArUrCrGrUrUrArCrCrArUrCrGrArCrGrArGrArArArGrGrGrArCrUrGrArArGr | 24483 |
| | | CrUrGrCrUrGrGrGrGrC*mC*mA*mU | |
| 415 | A1AT_Nme2_ | mU*mA*mA*rArArArCrArUrGrGrCrCrCrCrArGrCrArGrCrUrUrGrUrUrGrUrArGrCrUrCrCrCrGrArArArCrGrUrUrGrCrU | 24484 |
| | ED15+_G_ | ArCrArArUrArArGrGrCrCrGrUrCrUrGrArArArArGrArUrGrUrGrCrCrGrCrArArCrGrCrUrCrUrGrCrCrCrCrUrUrArArArG | |
| | 9FE_PB12 | rCrUrUrCrUrGrCrUrUrUrArArGrGrGrGrCrArUrCrGrUrUrArCrCrArUrCrGrArCrGrArGrArArArGrGrGrArCrUrGrArArGr | |
| | | CrUrGrCrUrGrGrGrG*mC*mC*mA | |
| 416 | A1AT_Nme2_ | mU*mA*mA*rArArArCrArUrGrGrCrCrCrCrArGrCrArGrCrUrUrGrUrUrGrUrArGrCrUrCrCrCrGrArArArCrGrUrUrGrCrU | 24485 |
| | ED15+_G_ | rArCrArArUrArArGrGrCrCrGrUrCrUrGrArArArArGrArUrGrUrGrCrCrGrCrArArCrGrCrUrCrUrGrCrCrCrCrUrUrArArArG | |
| | 9FE_PB11 | rCrUrUrCrUrGrCrUrUrUrArArGrGrGrGrCrArUrCrGrUrUrArCrCrArUrCrGrArCrGrArGrArArArGrGrGrArCrUrGrArArGr | |
| | | CrUrGrCrUrGrGrG*mG*mC*mC | |
| 417 | A1AT_Nme2_ | mU*mA*mA*rArArArCrArUrGrGrCrCrCrCrArGrCrArGrCrUrUrGrUrUrGrUrArGrCrUrCrCrCrGrArArArCrGrUrUrGrCrU | 24486 |
| | ED15+_G_ | rArCrArArUrArArGrGrCrCrGrUrCrUrGrArArArArGrArUrGrUrGrCrCrGrCrArArCrGrCrUrCrUrGrCrCrCrCrUrUrArArArG | |
| | 9FE_PB10 | rCrUrUrCrUrGrCrUrUrUrArArGrGrGrGrCrArUrCrGrUrUrArCrCrArUrCrGrArCrGrArGrArArArGrGrGrArCrUrGrArArGr | |
| | | CrUrGrCrUrGrG*mG*mG*mC | |
| 418 | A1AT_Nme2_ | mU*mA*mA*rArArArCrArUrGrGrCrCrCrCrArGrCrArGrCrUrUrGrUrUrGrUrArGrCrUrCrCrCrGrArArArCrGrUrUrGrCrU | 24487 |
| | ED15+_G_ | rArCrArArUrArArGrGrCrCrGrUrCrUrGrArArArArGrArUrGrUrGrCrCrGrCrArArCrGrCrUrCrUrGrCrCrCrCrUrUrArArArG | |
| | 9FE_PB9 | rCrUrUrCrUrGrCrUrUrUrArArGrGrGrGrCrArUrCrGrUrUrArCrCrArUrCrGrArCrGrArGrArArArGrGrGrArCrUrGrArArGr | |
| | | CrUrGrCrUrG*mG*mG*mG | |
| 419 | A1AT_Nme2_ | mU*mA*mA*rArArArCrArUrGrGrCrCrCrCrArGrCrArGrCrUrUrGrUrUrGrUrArGrCrUrCrCrCrGrArArArCrGrUrUrGrCrU | 24488 |
| | ED15+_G_ | rArCrArArUrArArGrGrCrCrGrUrCrUrGrArArArArGrArUrGrUrGrCrCrGrCrArArCrGrCrUrCrUrGrCrCrCrCrUrUrArArArG | |
| | 9FE_PB8 | rCrUrUrCrUrGrCrUrUrUrArArGrGrGrGrCrArUrCrGrUrUrArCrCrArUrCrGrArCrGrArGrArArArGrGrGrArCrUrGrArArGr | |
| | | CrUrGrCrU*mG*mG*mG | |
| 420 | A1AT_Nme2_ | mU*mA*mA*rArArArCrArUrGrGrCrCrCrCrArGrCrArGrCrUrUrGrUrUrGrUrArGrCrUrCrCrCrGrArArArCrGrUrUrGrCrU | 24489 |
| | ED15+_G_ | rArCrArArUrArArGrGrCrCrGrUrCrUrGrArArArArGrArUrGrUrGrCrCrGrCrArArCrGrCrUrCrUrGrCrCrCrCrUrUrArArArG | |
| | 6FE_PB17 | rCrUrUrCrUrGrCrUrUrUrArArGrGrGrGrCrArUrCrGrUrUrArUrCrGrArCrGrArGrArArArGrGrGrArCrUrGrArArGrCrUrGr | |
| | | CrUrGrGrGrGrCrCrArUrG*mU*mU*mU | |
| 421 | A1AT_Nme2_ | mU*mA*mA*rArArArCrArUrGrGrCrCrCrCrArGrCrArGrCrUrUrGrUrUrGrUrArGrCrUrCrCrCrGrArArArCrGrUrUrGrCrU | 24490 |
| | ED15+_G_ | rArCrArArUrArArGrGrCrCrGrUrCrUrGrArArArArGrArUrGrUrGrCrCrGrCrArArCrGrCrUrCrUrGrCrCrCrCrUrUrArArArG | |
| | 6FE_PB16 | rCrUrUrCrUrGrCrUrUrUrArArGrGrGrGrCrArUrCrGrUrUrArUrCrGrArCrGrArGrArArArGrGrGrArCrUrGrArArGrCrUrGr | |
| | | CrUrGrGrGrGrCrCrArU*mG*mU*mU | |
| 422 | A1AT_Nme2_ | mU*mA*mA*rArArArCrArUrGrGrCrCrCrCrArGrCrArGrCrUrUrGrUrUrGrUrArGrCrUrCrCrCrGrArArArCrGrUrUrGrCrU | 24491 |
| | ED15+_G_ | rArCrArArUrArArGrGrCrCrGrUrCrUrGrArArArArGrArUrGrUrGrCrCrGrCrArArCrGrCrUrCrUrGrCrCrCrCrUrUrArArArG | |
| | 6FE_PB15 | rCrUrUrCrUrGrCrUrUrUrArArGrGrGrGrCrArUrCrGrUrUrArUrCrGrArCrGrArGrArArArGrGrGrArCrUrGrArArGrCrUrGr | |
| | | CrUrGrGrGrGrCrCrA*mU*mG*mU | |
| 423 | A1AT_Nme2_ | mU*mA*mA*rArArArCrArUrGrGrCrCrCrCrArGrCrArGrCrUrUrGrUrUrGrUrArGrCrUrCrCrCrGrArArArCrGrUrUrGrCrU | 24492 |
| | ED15+_G_ | rArCrArArUrArArGrGrCrCrGrUrCrUrGrArArArArGrArUrGrUrGrCrCrGrCrArArCrGrCrUrCrUrGrCrCrCrCrUrUrArArArG | |
| | 6FE_PB14 | rCrUrUrCrUrGrCrUrUrUrArArGrGrGrGrCrArUrCrGrUrUrArUrCrGrArCrGrArGrArArArGrGrGrArCrUrGrArArGrCrUrGr | |
| | | CrUrGrGrGrGrCrC*mA*mU*mG | |
| 424 | A1AT_Nme2_ | mU*mA*mA*rArArArCrArUrGrGrCrCrCrCrArGrCrArGrCrUrUrGrUrUrGrUrArGrCrUrCrCrCrGrArArArCrGrUrUrGrCrU | 24493 |
| | ED15+_G_ | rArCrArArUrArArGrGrCrCrGrUrCrUrGrArArArArGrArUrGrUrGrCrCrGrCrArArCrGrCrUrCrUrGrCrCrCrCrUrUrArArArG | |
| | 6FE_PB13 | rCrUrUrCrUrGrCrUrUrUrArArGrGrGrGrCrArUrCrGrUrUrArUrCrGrArCrGrArGrArArArGrGrGrArCrUrGrArArGrCrUrGr | |
| | | CrUrGrGrGrGrC*mC*mA*mU | |
| 425 | A1AT_Nme2_ | mU*mA*mA*rArArArCrArUrGrGrCrCrCrCrArGrCrArGrCrUrUrGrUrUrGrUrArGrCrUrCrCrCrGrArArArCrGrUrUrGrCrU | 24494 |
| | ED15+_G_ | rArCrArArUrArArGrGrCrCrGrUrCrUrGrArArArArGrArUrGrUrGrCrCrGrCrArArCrGrCrUrCrUrGrCrCrCrCrUrUrArArArG | |
| | 6FE_PB12 | rCrUrUrCrUrGrCrUrUrUrArArGrGrGrGrCrArUrCrGrUrUrArUrCrGrArCrGrArGrArArArGrGrGrArCrUrGrArArGrCrUrGr | |
| | | CrUrGrGrGrG*mC*mC*mA | |
| 426 | A1AT_Nme2_ | mU*mA*mA*rArArArCrArUrGrGrCrCrCrCrArGrCrArGrCrUrUrGrUrUrGrUrArGrCrUrCrCrCrGrArArArCrGrUrUrGrCrU | 24495 |
| | ED15+_G_ | rArCrArArUrArArGrGrCrCrGrUrCrUrGrArArArArGrArUrGrUrGrCrCrGrCrArArCrGrCrUrCrUrGrCrCrCrCrUrUrArArArG | |
| | 6FE_PB11 | rCrUrUrCrUrGrCrUrUrUrArArGrGrGrGrCrArUrCrGrUrUrArUrCrGrArCrGrArGrArArArGrGrGrArCrUrGrArArGrCrUrGr | |
| | | CrUrGrGrG*mG*mC*mC | |
| 427 | A1AT_Nme2_ | mU*mA*mA*rArArArCrArUrGrGrCrCrCrCrArGrCrArGrCrUrUrGrUrUrGrUrArGrCrUrCrCrCrGrArArArCrGrUrUrGrCrU | 24496 |
| | ED15+_G_ | rArCrArArUrArArGrGrCrCrGrUrCrUrGrArArArArGrArUrGrUrGrCrCrGrCrArArCrGrCrUrCrUrGrCrCrCrCrUrUrArArArG | |
| | 6FE_PB10 | rCrUrUrCrUrGrCrUrUrUrArArGrGrGrGrCrArUrCrGrUrUrArUrCrGrArCrGrArGrArArArGrGrGrArCrUrGrArArGrCrUrGr | |
| | | CrUrGrG*mG*mG*mC | |
| 428 | A1AT_Nme2_ | mU*mA*mA*rArArArCrArUrGrGrCrCrCrCrArGrCrArGrCrUrUrGrUrUrGrUrArGrCrUrCrCrCrGrArArArCrGrUrUrGrCrU | 24497 |
| | ED15+_G_ | rArCrArArUrArArGrGrCrCrGrUrCrUrGrArArArArGrArUrGrUrGrCrCrGrCrArArCrGrCrUrCrUrGrCrCrCrCrUrUrArArArG | |
| | 6FE_PB9 | rCrUrUrCrUrGrCrUrUrUrArArGrGrGrGrCrArUrCrGrUrUrArUrCrGrArCrGrArGrArArArGrGrGrArCrUrGrArArGrCrUrGr | |
| | | CrUrG*mG*mG*mG | |
| 429 | A1AT_Nme2_ | mU*mA*mA*rArArArCrArUrGrGrCrCrCrCrArGrCrArGrCrUrUrGrUrUrGrUrArGrCrUrCrCrCrGrArArArCrGrUrUrGrCrU | 24498 |
| | ED15+_G_ | rArCrArArUrArArGrGrCrCrGrUrCrUrGrArArArArGrArUrGrUrGrCrCrGrCrArArCrGrCrUrCrUrGrCrCrCrCrUrUrArArArG | |
| | 6FE_PB8 | rCrUrUrCrUrGrCrUrUrUrArArGrGrGrGrCrArUrCrGrUrUrArUrCrGrArCrGrArGrArArArGrGrGrArCrUrGrArArGrCrUrGr | |
| | | CrU*mG*mG*mG | |
| 430 | A1AT_Nme2_ | mU*mA*mA*rArArArCrArUrGrGrCrCrCrCrArGrCrArGrCrUrUrGrUrUrGrUrArGrCrUrCrCrCrGrArArArCrGrUrUrGrCrU | 24499 |
| | ED15+_G_ | rArCrArArUrArArGrGrCrCrGrUrCrUrGrArArArArGrArUrGrUrGrCrCrGrCrArArCrGrCrUrCrUrGrCrCrCrCrUrUrArArArG | |
| | 5FE_PB17 | rCrUrUrCrUrGrCrUrUrUrArArGrGrGrGrCrArUrCrGrUrUrUrCrGrArCrGrArGrArArArGrGrGrArCrUrGrArArGrCrUrGrCr | |
| | | UrGrGrGrGrCrCrArUrG*mU*mU*mU | |
| 431 | A1AT_Nme2_ | mU*mA*mA*rArArArCrArUrGrGrCrCrCrCrArGrCrArGrCrUrUrGrUrUrGrUrArGrCrUrCrCrCrGrArArArCrGrUrUrGrCrU | 24500 |
| | ED15+_G_ | rArCrArArUrArArGrGrCrCrGrUrCrUrGrArArArArGrArUrGrUrGrCrCrGrCrArArCrGrCrUrCrUrGrCrCrCrCrUrUrArArArG | |
| | 5FE_PB16 | rCrUrUrCrUrGrCrUrUrUrArArGrGrGrGrCrArUrCrGrUrUrUrCrGrArCrGrArGrArArArGrGrGrArCrUrGrArArGrCrUrGrCr | |
| | | UrGrGrGrGrCrCrArU*mG*mU*mU | |
| 432 | A1AT_Nme2_ | mU*mA*mA*rArArArCrArUrGrGrCrCrCrCrArGrCrArGrCrUrUrGrUrUrGrUrArGrCrUrCrCrCrGrArArArCrGrUrUrGrCrU | 24501 |
| | ED15+_G_ | rArCrArArUrArArGrGrCrCrGrUrCrUrGrArArArArGrArUrGrUrGrCrCrGrCrArArCrGrCrUrCrUrGrCrCrCrCrUrUrArArArG | |
| | 5FE_PB15 | rCrUrUrCrUrGrCrUrUrUrArArGrGrGrGrCrArUrCrGrUrUrUrCrGrArCrGrArGrArArArGrGrGrArCrUrGrArArGrCrUrGrCr | |
| | | UrGrGrGrGrCrCrA*mU*mG*mU | |
| 433 | A1AT_Nme2_ | mU*mA*mA*rArArArCrArUrGrGrCrCrCrCrArGrCrArGrCrUrUrGrUrUrGrUrArGrCrUrCrCrCrGrArArArCrGrUrUrGrCrU | 24502 |
| | ED15+_G_ | rArCrArArUrArArGrGrCrCrGrUrCrUrGrArArArArGrArUrGrUrGrCrCrGrCrArArCrGrCrUrCrUrGrCrCrCrCrUrUrArArArG | |
| | 5FE_PB14 | rCrUrUrCrUrGrCrUrUrUrArArGrGrGrGrCrArUrCrGrUrUrUrCrGrArCrGrArGrArArArGrGrGrArCrUrGrArArGrCrUrGrCr | |
| | | UrGrGrGrGrCrC*mA*mU*mG | |
| 434 | A1AT_Nme2_ | mU*mA*mA*rArArArCrArUrGrGrCrCrCrCrArGrCrArGrCrUrUrGrUrUrGrUrArGrCrUrCrCrCrGrArArArCrGrUrUrGrCrU | 24503 |
| | ED15+_G_ | rArCrArArUrArArGrGrCrCrGrUrCrUrGrArArArArGrArUrGrUrGrCrCrGrCrArArCrGrCrUrCrUrGrCrCrCrCrUrUrArArArG | |
| | 5FE_PB13 | rCrUrUrCrUrGrCrUrUrUrArArGrGrGrGrCrArUrCrGrUrUrUrCrGrArCrGrArGrArArArGrGrGrArCrUrGrArArGrCrUrGrCr | |
| | | UrGrGrGrGrC*mC*mA*mU | |
| 435 | A1AT_Nme2_ | mU*mA*mA*rArArArCrArUrGrGrCrCrCrCrArGrCrArGrCrUrUrGrUrUrGrUrArGrCrUrCrCrCrGrArArArCrGrUrUrGrCrU | 24504 |
| | ED15+_G_ | rArCrArArUrArArGrGrCrCrGrUrCrUrGrArArArArGrArUrGrUrGrCrCrGrCrArArCrGrCrUrCrUrGrCrCrCrCrUrUrArArArG | |
| | 5FE_PB12 | rCrUrUrCrUrGrCrUrUrUrArArGrGrGrGrCrArUrCrGrUrUrUrCrGrArCrGrArGrArArArGrGrGrArCrUrGrArArGrCrUrGrCr | |
| | | UrGrGrGrG*mC*mC*mA | |
| 436 | A1AT_Nme2_ | mU*mA*mA*rArArArCrArUrGrGrCrCrCrCrArGrCrArGrCrUrUrGrUrUrGrUrArGrCrUrCrCrCrGrArArArCrGrUrUrGrCrU | 24505 |
| | ED15+_G_ | rArCrArArUrArArGrGrCrCrGrUrCrUrGrArArArArGrArUrGrUrGrCrCrGrCrArArCrGrCrUrCrUrGrCrCrCrCrUrUrArArArG | |
| | 5FE_PB11 | rCrUrUrCrUrGrCrUrUrUrArArGrGrGrGrCrArUrCrGrUrUrUrCrGrArCrGrArGrArArArGrGrGrArCrUrGrArArGrCrUrGrCr | |
| | | UrGrGrG*mG*mC*mC | |
| 437 | A1AT_Nme2_ | mU*mA*mA*rArArArCrArUrGrGrCrCrCrCrArGrCrArGrCrUrUrGrUrUrGrUrArGrCrUrCrCrCrGrArArArCrGrUrUrGrCrU | 24506 |
| | ED15+_G_ | rArCrArArUrArArGrGrCrCrGrUrCrUrGrArArArArGrArUrGrUrGrCrCrGrCrArArCrGrCrUrCrUrGrCrCrCrCrUrUrArArArG | |
| | 5FE_PB10 | rCrUrUrCrUrGrCrUrUrUrArArGrGrGrGrCrArUrCrGrUrUrUrCrGrArCrGrArGrArArArGrGrGrArCrUrGrArArGrCrUrGrCr | |
| | | UrGrG*mG*mG*mC | |
| 438 | A1AT_Nme2_ | mU*mA*mA*rArArArCrArUrGrGrCrCrCrCrArGrCrArGrCrUrUrGrUrUrGrUrArGrCrUrCrCrCrGrArArArCrGrUrUrGrCrU | 24507 |
| | ED15+_G_ | rArCrArArUrArArGrGrCrCrGrUrCrUrGrArArArArGrArUrGrUrGrCrCrGrCrArArCrGrCrUrCrUrGrCrCrCrCrUrUrArArArG | |
| | 5FE_PB9 | rCrUrUrCrUrGrCrUrUrUrArArGrGrGrGrCrArUrCrGrUrUrUrCrGrArCrGrArGrArArArGrGrGrArCrUrGrArArGrCrUrGrCr | |
| | | UrG*mG*mG*mG | |
| 439 | A1AT_Nme2_ | mU*mA*mA*rArArArCrArUrGrGrCrCrCrCrArGrCrArGrCrUrUrGrUrUrGrUrArGrCrUrCrCrCrGrArArArCrGrUrUrGrCrU | 24508 |
| | ED15+_G_ | rArCrArArUrArArGrGrCrCrGrUrCrUrGrArArArArGrArUrGrUrGrCrCrGrCrArArCrGrCrUrCrUrGrCrCrCrCrUrUrArArArG | |
| | 5FE_PB8 | rCrUrUrCrUrGrCrUrUrUrArArGrGrGrGrCrArUrCrGrUrUrUrCrGrArCrGrArGrArArArGrGrGrArCrUrGrArArGrCrUrGrCr | |
| | | U*mG*mG*mG | |
| 440 | A1AT_Nme2_ | mU*mA*mA*rArArArCrArUrGrGrCrCrCrCrArGrCrArGrCrUrUrGrUrUrGrUrArGrCrUrCrCrCrGrArArArCrGrUrUrGrCrU | 24509 |
| | ED15+_G_ | rArCrArArUrArArGrGrCrCrGrUrCrUrGrArArArArGrArUrGrUrGrCrCrGrCrArArCrGrCrUrCrUrGrCrCrCrCrUrUrArArArG | |
| | 3FE_PB17 | rCrUrUrCrUrGrCrUrUrUrArArGrGrGrGrCrArUrCrGrUrUrGrArCrGrArGrArArArGrGrGrArCrUrGrArArGrCrUrGrCrUrGr | |
| | | GrGrGrCrCrArUrG*mU*mU*mU | |
| 441 | A1AT_Nme2_ | mU*mA*mA*rArArArCrArUrGrGrCrCrCrCrArGrCrArGrCrUrUrGrUrUrGrUrArGrCrUrCrCrCrGrArArArCrGrUrUrGrCrU | 24510 |
| | ED15+_G_ | rArCrArArUrArArGrGrCrCrGrUrCrUrGrArArArArGrArUrGrUrGrCrCrGrCrArArCrGrCrUrCrUrGrCrCrCrCrUrUrArArArG | |
| | 3FE_PB16 | rCrUrUrCrUrGrCrUrUrUrArArGrGrGrGrCrArUrCrGrUrUrGrArCrGrArGrArArArGrGrGrArCrUrGrArArGrCrUrGrCrUrGr | |
| | | GrGrGrCrCrArU*mG*mU*mU | |
| 442 | A1AT_Nme2_ | mU*mA*mA*rArArArCrArUrGrGrCrCrCrCrArGrCrArGrCrUrUrGrUrUrGrUrArGrCrUrCrCrCrGrArArArCrGrUrUrGrCrU | 24511 |
| | ED15+_G_ | rArCrArArUrArArGrGrCrCrGrUrCrUrGrArArArArGrArUrGrUrGrCrCrGrCrArArCrGrCrUrCrUrGrCrCrCrCrUrUrArArArG | |
| | 3FE_PB15 | rCrUrUrCrUrGrCrUrUrUrArArGrGrGrGrCrArUrCrGrUrUrGrArCrGrArGrArArArGrGrGrArCrUrGrArArGrCrUrGrCrUrGr | |
| | | GrGrGrCrCrA*mU*mG*mU | |
| 443 | A1AT_Nme2_ | mU*mA*mA*rArArArCrArUrGrGrCrCrCrCrArGrCrArGrCrUrUrGrUrUrGrUrArGrCrUrCrCrCrGrArArArCrGrUrUrGrCrU | 24512 |
| | ED15+_G_ | rArCrArArUrArArGrGrCrCrGrUrCrUrGrArArArArGrArUrGrUrGrCrCrGrCrArArCrGrCrUrCrUrGrCrCrCrCrUrUrArArArG | |
| | 3FE_PB14 | rCrUrUrCrUrGrCrUrUrUrArArGrGrGrGrCrArUrCrGrUrUrGrArCrGrArGrArArArGrGrGrArCrUrGrArArGrCrUrGrCrUrGr | |
| | | GrGrGrCrC*mA*mU*mG | |
| 444 | A1AT_Nme2_ | mU*mA*mA*rArArArCrArUrGrGrCrCrCrCrArGrCrArGrCrUrUrGrUrUrGrUrArGrCrUrCrCrCrGrArArArCrGrUrUrGrCrU | 24513 |
| | ED15+_G_ | rArCrArArUrArArGrGrCrCrGrUrCrUrGrArArArArGrArUrGrUrGrCrCrGrCrArArCrGrCrUrCrUrGrCrCrCrCrUrUrArArArG | |
| | 3FE_PB13 | rCrUrUrCrUrGrCrUrUrUrArArGrGrGrGrCrArUrCrGrUrUrGrArCrGrArGrArArArGrGrGrArCrUrGrArArGrCrUrGrCrUrGr | |
| | | GrGrGrC*mC*mA*mU | |
| 445 | A1AT_Nme2_ | mU*mA*mA*rArArArCrArUrGrGrCrCrCrCrArGrCrArGrCrUrUrGrUrUrGrUrArGrCrUrCrCrCrGrArArArCrGrUrUrGrCrU | 24514 |
| | ED15+_G_ | rArCrArArUrArArGrGrCrCrGrUrCrUrGrArArArArGrArUrGrUrGrCrCrGrCrArArCrGrCrUrCrUrGrCrCrCrCrUrUrArArArG | |
| | 3FE_PB12 | rCrUrUrCrUrGrCrUrUrUrArArGrGrGrGrCrArUrCrGrUrUrGrArCrGrArGrArArArGrGrGrArCrUrGrArArGrCrUrGrCrUrGr | |
| | | GrGrG*mC*mC*mA | |
| 446 | A1AT_Nme2_ | mU*mA*mA*rArArArCrArUrGrGrCrCrCrCrArGrCrArGrCrUrUrGrUrUrGrUrArGrCrUrCrCrCrGrArArArCrGrUrUrGrCrU | 24515 |
| | ED15+_G_ | rArCrArArUrArArGrGrCrCrGrUrCrUrGrArArArArGrArUrGrUrGrCrCrGrCrArArCrGrCrUrCrUrGrCrCrCrCrUrUrArArArG | |
| | 3FE_PB11 | rCrUrUrCrUrGrCrUrUrUrArArGrGrGrGrCrArUrCrGrUrUrGrArCrGrArGrArArArGrGrGrArCrUrGrArArGrCrUrGrCrUrGr | |
| | | GrG*mG*mC*mC | |
| 447 | A1AT_Nme2_ | mU*mA*mA*rArArArCrArUrGrGrCrCrCrCrArGrCrArGrCrUrUrGrUrUrGrUrArGrCrUrCrCrCrGrArArArCrGrUrUrGrCrU | 24516 |
| | ED15+_G_ | rArCrArArUrArArGrGrCrCrGrUrCrUrGrArArArArGrArUrGrUrGrCrCrGrCrArArCrGrCrUrCrUrGrCrCrCrCrUrUrArArArG | |
| | 3FE_PB10 | rCrUrUrCrUrGrCrUrUrUrArArGrGrGrGrCrArUrCrGrUrUrGrArCrGrArGrArArArGrGrGrArCrUrGrArArGrCrUrGrCrUrGr | |
| | | G*mG*mG*mC | |
| 448 | A1AT_Nme2_ | mU*mA*mA*rArArArCrArUrGrGrCrCrCrCrArGrCrArGrCrUrUrGrUrUrGrUrArGrCrUrCrCrCrGrArArArCrGrUrUrGrCrU | 24517 |
| | ED15+_G_ | rArCrArArUrArArGrGrCrCrGrUrCrUrGrArArArArGrArUrGrUrGrCrCrGrCrArArCrGrCrUrCrUrGrCrCrCrCrUrUrArArArG | |
| | 3FE_PB9 | rCrUrUrCrUrGrCrUrUrUrArArGrGrGrGrCrArUrCrGrUrUrGrArCrGrArGrArArArGrGrGrArCrUrGrArArGrCrUrGrCrUrG* | |
| | | mG*mG*mG | |
| 449 | A1AT_Nme2_ | mU*mA*mA*rArArArCrArUrGrGrCrCrCrCrArGrCrArGrCrUrUrGrUrUrGrUrArGrCrUrCrCrCrGrArArArCrGrUrUrGrCrU | 24518 |
| | ED15+_G_ | rArCrArArUrArArGrGrCrCrGrUrCrUrGrArArArArGrArUrGrUrGrCrCrGrCrArArCrGrCrUrCrUrGrCrCrCrCrUrUrArArArG | |
| | 3FE_PB8 | rCrUrUrCrUrGrCrUrUrUrArArGrGrGrGrCrArUrCrGrUrUrGrArCrGrArGrArArArGrGrGrArCrUrGrArArGrCrUrGrCrU*m | |
| | | G*mG*mG | |
| 450 | A1AT_ | mA*mG*mG*rCrCrGrUrGrCrArUrArArGrGrCrUrGrUrGrGrUrUrUrUrArGrArGrCrUrArGrArArArUrArGrCrArArGrUrUr | 24519 |
| | SpCas9- | ArArArArUrArArGrGrCrUrArGrUrCrCrGrUrUrArUrCrArArCrUrUrGrArArArArArGrUrGrGrCrArCrCrGrArGrUrCrGrGrU | |
| | NG_SpRY_ | rGrCrArCrArUrGrGrCrCrCrCrArGrCrArGrCrUrUrCrArGrUrCrCrCrUrUrUrCrUrCrGrUrCrGrArUrGrGrUrCrArGrCrArCrA | |
| | ED15-_ | rGrCrCrUrUrArUrGrCrArCrGrG*mC*mC*mU | |
| | 30FE_ | | |
| | PB17 | | |
| 451 | A1AT_ | mA*mG*mG*rCrCrGrUrGrCrArUrArArGrGrCrUrGrUrGrGrUrUrUrUrArGrArGrCrUrArGrArArArUrArGrCrArArGrUrUr | 24520 |
| | SpCas9- | ArArArArUrArArGrGrCrUrArGrUrCrCrGrUrUrArUrCrArArCrUrUrGrArArArArArGrUrGrGrCrArCrCrGrArGrUrCrGrGrU | |
| | NG_SpRY_ | rGrCrArCrArUrGrGrCrCrCrCrArGrCrArGrCrUrUrCrArGrUrCrCrCrUrUrUrCrUrCrGrUrCrGrArUrGrGrUrCrArGrCrArCrA | |
| | ED15-_ | rGrCrCrUrUrArUrGrCrArCrG*mG*mC*mC | |
| | 30FE_ | | |
| | PB16 | | |
| 452 | A1AT_ | mA*mG*mG*rCrCrGrUrGrCrArUrArArGrGrCrUrGrUrGrGrUrUrUrUrArGrArGrCrUrArGrArArArUrArGrCrArArGrUrUr | 24521 |
| | SpCas9- | ArArArArUrArArGrGrCrUrArGrUrCrCrGrUrUrArUrCrArArCrUrUrGrArArArArArGrUrGrGrCrArCrCrGrArGrUrCrGrGrU | |
| | NG_SpRY_ | rGrCrArCrArUrGrGrCrCrCrCrArGrCrArGrCrUrUrCrArGrUrCrCrCrUrUrUrCrUrCrGrUrCrGrArUrGrGrUrCrArGrCrArCrA | |
| | ED15-_ | rGrCrCrUrUrArUrGrCrArC*mG*mG*mC | |
| | 30FE_ | | |
| | PB15 | | |
| 453 | A1AT_ | mA*mG*mG*rCrCrGrUrGrCrArUrArArGrGrCrUrGrUrGrGrUrUrUrUrArGrArGrCrUrArGrArArArUrArGrCrArArGrUrUr | 24522 |
| | SpCas9- | ArArArArUrArArGrGrCrUrArGrUrCrCrGrUrUrArUrCrArArCrUrUrGrArArArArArGrUrGrGrCrArCrCrGrArGrUrCrGrGrU | |
| | NG_SpRY_ | rGrCrArCrArUrGrGrCrCrCrCrArGrCrArGrCrUrUrCrArGrUrCrCrCrUrUrUrCrUrCrGrUrCrGrArUrGrGrUrCrArGrCrArCrA | |
| | ED15-_ | rGrCrCrUrUrArUrGrCrA*mC*mG*mG | |
| | 30FE_ | | |
| | PB14 | | |
| 454 | A1AT_ | mA*mG*mG*rCrCrGrUrGrCrArUrArArGrGrCrUrGrUrGrGrUrUrUrUrArGrArGrCrUrArGrArArArUrArGrCrArArGrUrUr | 24523 |
| | 9- | ArArArArUrArArGrGrCrUrArGrUrCrCrGrUrUrArUrCrArArCrUrUrGrArArArArArGrUrGrGrCrArCrCrGrArGrUrCrGrGrU | |
| | NG_SpRY_ | rGrCrArCrArUrGrGrCrCrCrCrArGrCrArGrCrUrUrCrArGrUrCrCrCrUrUrUrCrUrCrGrUrCrGrArUrGrGrUrCrArGrCrArCrA | |
| | ED15-_ | rGrCrCrUrUrArUrGrC*mA*mC*mG | |
| | 30FE_ | | |
| | PB13 | | |
| 455 | A1AT_ | mA*mG*mG*rCrCrGrUrGrCrArUrArArGrGrCrUrGrUrGrGrUrUrUrUrArGrArGrCrUrArGrArArArUrArGrCrArArGrUrUr | 24524 |
| | SpCas9- | ArArArArUrArArGrGrCrUrArGrUrCrCrGrUrUrArUrCrArArCrUrUrGrArArArArArGrUrGrGrCrArCrCrGrArGrUrCrGrGrU | |
| | NG_SpRY_ | rGrCrArCrArUrGrGrCrCrCrCrArGrCrArGrCrUrUrCrArGrUrCrCrCrUrUrUrCrUrCrGrUrCrGrArUrGrGrUrCrArGrCrArCrA | |
| | ED15-_ | rGrCrCrUrUrArUrG*mC*mA*mC | |
| | 30FE_ | | |
| | PB12 | | |
| 456 | A1AT_ | mA*mG*mG*rCrCrGrUrGrCrArUrArArGrGrCrUrGrUrGrGrUrUrUrUrArGrArGrCrUrArGrArArArUrArGrCrArArGrUrUr | 24525 |
| | SpCas9- | ArArArArUrArArGrGrCrUrArGrUrCrCrGrUrUrArUrCrArArCrUrUrGrArArArArArGrUrGrGrCrArCrCrGrArGrUrCrGrGrU | |
| | NG_SpRY_ | rGrCrArCrArUrGrGrCrCrCrCrArGrCrArGrCrUrUrCrArGrUrCrCrCrUrUrUrCrUrCrGrUrCrGrArUrGrGrUrCrArGrCrArCrA | |
| | ED15-_ | rGrCrCrUrUrArU*mG*mC*mA | |
| | 30FE_ | | |
| | PB11 | | |
| 457 | A1AT_ | mA*mG*mG*rCrCrGrUrGrCrArUrArArGrGrCrUrGrUrGrGrUrUrUrUrArGrArGrCrUrArGrArArArUrArGrCrArArGrUrUr | 24526 |
| | SpCas9- | ArArArArUrArArGrGrCrUrArGrUrCrCrGrUrUrArUrCrArArCrUrUrGrArArArArArGrUrGrGrCrArCrCrGrArGrUrCrGrGrU | |
| | NG_SpRY_ | rGrCrArCrArUrGrGrCrCrCrCrArGrCrArGrCrUrUrCrArGrUrCrCrCrUrUrUrCrUrCrGrUrCrGrArUrGrGrUrCrArGrCrArCrA | |
| | ED15-_ | rGrCrCrUrUrA*mU*mG*mC | |
| | 30FE_ | | |
| | PB10 | | |
| 458 | A1AT_ | mA*mG*mG*rCrCrGrUrGrCrArUrArArGrGrCrUrGrUrGrGrUrUrUrUrArGrArGrCrUrArGrArArArUrArGrCrArArGrUrUr | 24527 |
| | SpCas9- | ArArArArUrArArGrGrCrUrArGrUrCrCrGrUrUrArUrCrArArCrUrUrGrArArArArArGrUrGrGrCrArCrCrGrArGrUrCrGrGrU | |
| | NG_SpRY_ | rGrCrArCrArUrGrGrCrCrCrCrArGrCrArGrCrUrUrCrArGrUrCrCrCrUrUrUrCrUrCrGrUrCrGrArUrGrGrUrCrArGrCrArCrA | |
| | ED15-_ | rGrCrCrUrU*mA*mU*mG | |
| | 30FE_PB9 | | |
| 459 | A1AT_ | mA*mG*mG*rCrCrGrUrGrCrArUrArArGrGrCrUrGrUrGrGrUrUrUrUrArGrArGrCrUrArGrArArArUrArGrCrArArGrUrUr | 24528 |
| | SpCas9- | ArArArArUrArArGrGrCrUrArGrUrCrCrGrUrUrArUrCrArArCrUrUrGrArArArArArGrUrGrGrCrArCrCrGrArGrUrCrGrGrU | |
| | NG_SpRY_ | rGrCrArCrArUrGrGrCrCrCrCrArGrCrArGrCrUrUrCrArGrUrCrCrCrUrUrUrCrUrCrGrUrCrGrArUrGrGrUrCrArGrCrArCrA | |
| | ED15-_ | rGrCrCrU*mU*mA*mU | |
| | 30FE_PB8 | | |
| 460 | A1AT_ | mA*mG*mG*rCrCrGrUrGrCrArUrArArGrGrCrUrGrUrGrGrUrUrUrUrArGrArGrCrUrArGrArArArUrArGrCrArArGrUrUr | 24529 |
| | SpCas9- | ArArArArUrArArGrGrCrUrArGrUrCrCrGrUrUrArUrCrArArCrUrUrGrArArArArArGrUrGrGrCrArCrCrGrArGrUrCrGrGrU | |
| | NG_SpRY_ | rGrCrGrCrCrCrCrArGrCrArGrCrUrUrCrArGrUrCrCrCrUrUrUrCrUrCrGrUrCrGrArUrGrGrUrCrArGrCrArCrArGrCrCrUrU | |
| | ED15-_ | rArUrGrCrArCrGrG*mC*mC*mU | |
| | 25FE_ | | |
| | PB17 | | |
| 461 | A1AT_ | mA*mG*mG*rCrCrGrUrGrCrArUrArArGrGrCrUrGrUrGrGrUrUrUrUrArGrArGrCrUrArGrArArArUrArGrCrArArGrUrUr | 24530 |
| | SpCas9- | ArArArArUrArArGrGrCrUrArGrUrCrCrGrUrUrArUrCrArArCrUrUrGrArArArArArGrUrGrGrCrArCrCrGrArGrUrCrGrGrU | |
| | NG_SpRY_ | rGrCrGrCrCrCrCrArGrCrArGrCrUrUrCrArGrUrCrCrCrUrUrUrCrUrCrGrUrCrGrArUrGrGrUrCrArGrCrArCrArGrCrCrUrU | |
| | ED15-_ | rArUrGrCrArCrG*mG*mC*mC | |
| | 25FE_ | | |
| | PB16 | | |
| 462 | A1AT_ | mA*mG*mG*rCrCrGrUrGrCrArUrArArGrGrCrUrGrUrGrGrUrUrUrUrArGrArGrCrUrArGrArArArUrArGrCrArArGrUrUr | 24531 |
| | SpCas9- | ArArArArUrArArGrGrCrUrArGrUrCrCrGrUrUrArUrCrArArCrUrUrGrArArArArArGrUrGrGrCrArCrCrGrArGrUrCrGrGrU | |
| | NG_SpRY_ | rGrCrGrCrCrCrCrArGrCrArGrCrUrUrCrArGrUrCrCrCrUrUrUrCrUrCrGrUrCrGrArUrGrGrUrCrArGrCrArCrArGrCrCrUrU | |
| | ED15-_ | rArUrGrCrArC*mG*mG*mC | |
| | 25FE_ | | |
| | PB15 | | |
| 463 | A1AT_ | mA*mG*mG*rCrCrGrUrGrCrArUrArArGrGrCrUrGrUrGrGrUrUrUrUrArGrArGrCrUrArGrArArArUrArGrCrArArGrUrUr | 24532 |
| | SpCas9- | ArArArArUrArArGrGrCrUrArGrUrCrCrGrUrUrArUrCrArArCrUrUrGrArArArArArGrUrGrGrCrArCrCrGrArGrUrCrGrGrU | |
| | NG_SpRY_ | rGrCrGrCrCrCrCrArGrCrArGrCrUrUrCrArGrUrCrCrCrUrUrUrCrUrCrGrUrCrGrArUrGrGrUrCrArGrCrArCrArGrCrCrUrU | |
| | ED 15- | rArUrGrCrA*mC*mG*mG | |
| | 25FE_ | | |
| | PB14 | | |
| 464 | A1AT_ | mA*mG*mG*rCrCrGrUrGrCrArUrArArGrGrCrUrGrUrGrGrUrUrUrUrArGrArGrCrUrArGrArArArUrArGrCrArArGrUrUr | 24533 |
| | SpCas9- | ArArArArUrArArGrGrCrUrArGrUrCrCrGrUrUrArUrCrArArCrUrUrGrArArArArArGrUrGrGrCrArCrCrGrArGrUrCrGrGrU | |
| | NG_SpRY_ | rGrCrGrCrCrCrCrArGrCrArGrCrUrUrCrArGrUrCrCrCrUrUrUrCrUrCrGrUrCrGrArUrGrGrUrCrArGrCrArCrArGrCrCrUrU | |
| | ED 15- | rArUrGrC*mA*mC*mG | |
| | 25FE_ | | |
| | PB13 | | |
| 465 | A1AT_ | mA*mG*mG*rCrCrGrUrGrCrArUrArArGrGrCrUrGrUrGrGrUrUrUrUrArGrArGrCrUrArGrArArArUrArGrCrArArGrUrUr | 24534 |
| | SpCas9- | ArArArArUrArArGrGrCrUrArGrUrCrCrGrUrUrArUrCrArArCrUrUrGrArArArArArGrUrGrGrCrArCrCrGrArGrUrCrGrGrU | |
| | NG_SpRY_ | rGrCrGrCrCrCrCrArGrCrArGrCrUrUrCrArGrUrCrCrCrUrUrUrCrUrCrGrUrCrGrArUrGrGrUrCrArGrCrArCrArGrCrCrUrU | |
| | ED15-_ | rArUrG*mC*mA*mC | |
| | 25FE_ | | |
| | PB12 | | |
| 466 | A1AT_ | mA*mG*mG*rCrCrGrUrGrCrArUrArArGrGrCrUrGrUrGrGrUrUrUrUrArGrArGrCrUrArGrArArArUrArGrCrArArGrUrUr | |
| | SpCas9- | ArArArArUrArArGrGrCrUrArGrUrCrCrGrUrUrArUrCrArArCrUrUrGrArArArArArGrUrGrGrCrArCrCrGrArGrUrCrGrGrU | |
| | NG_SpRY_ | rGrCrGrCrCrCrCrArGrCrArGrCrUrUrCrArGrUrCrCrCrUrUrUrCrUrCrGrUrCrGrArUrGrGrUrCrArGrCrArCrArGrCrCrUrU | 24535 |
| | ED15-_ | rArU*mG*mC*mA | |
| | 25FE_ | | |
| | PB11 | | |
| 467 | A1AT_ | mA*mG*mG*rCrCrGrUrGrCrArUrArArGrGrCrUrGrUrGrGrUrUrUrUrArGrArGrCrUrArGrArArArUrArGrCrArArGrUrUr | 24536 |
| | SpCas9- | ArArArArUrArArGrGrCrUrArGrUrCrCrGrUrUrArUrCrArArCrUrUrGrArArArArArGrUrGrGrCrArCrCrGrArGrUrCrGrGrU | |
| | NG_SpRY_ | rGrCrGrCrCrCrCrArGrCrArGrCrUrUrCrArGrUrCrCrCrUrUrUrCrUrCrGrUrCrGrArUrGrGrUrCrArGrCrArCrArGrCrCrUrU | |
| | ED15-_ | rA*mU*mG*mC | |
| | 25FE_ | | |
| | PB10 | | |
| 468 | A1AT_ | mA*mG*mG*rCrCrGrUrGrCrArUrArArGrGrCrUrGrUrGrGrUrUrUrUrArGrArGrCrUrArGrArArArUrArGrCrArArGrUrUr | 24537 |
| | SpCas9- | ArArArArUrArArGrGrCrUrArGrUrCrCrGrUrUrArUrCrArArCrUrUrGrArArArArArGrUrGrGrCrArCrCrGrArGrUrCrGrGrU | |
| | NG_SpRY_ | rGrCrGrCrCrCrCrArGrCrArGrCrUrUrCrArGrUrCrCrCrUrUrUrCrUrCrGrUrCrGrArUrGrGrUrCrArGrCrArCrArGrCrCrUrU | |
| | ED15-_ | *mA*mU*mG | |
| | 25FE_PB9 | | |
| 469 | A1AT_ | mA*mG*mG*rCrCrGrUrGrCrArUrArArGrGrCrUrGrUrGrGrUrUrUrUrArGrArGrCrUrArGrArArArUrArGrCrArArGrUrUr | 24538 |
| | SpCas9- | ArArArArUrArArGrGrCrUrArGrUrCrCrGrUrUrArUrCrArArCrUrUrGrArArArArArGrUrGrGrCrArCrCrGrArGrUrCrGrGrU | |
| | NG_SpRY_ | rGrCrGrCrCrCrCrArGrCrArGrCrUrUrCrArGrUrCrCrCrUrUrUrCrUrCrGrUrCrGrArUrGrGrUrCrArGrCrArCrArGrCrCrU*m | |
| | ED15-_ | U*mA*mU | |
| | 25FE_PB8 | | |
| 470 | A1AT_ | mA*mG*mG*rCrCrGrUrGrCrArUrArArGrGrCrUrGrUrGrGrUrUrUrUrArGrArGrCrUrArGrArArArUrArGrCrArArGrUrUr | 24539 |
| | SpCas9- | ArArArArUrArArGrGrCrUrArGrUrCrCrGrUrUrArUrCrArArCrUrUrGrArArArArArGrUrGrGrCrArCrCrGrArGrUrCrGrGrU | |
| | NG_SpRY_ | rGrCrArGrCrArGrCrUrUrCrArGrUrCrCrCrUrUrUrCrUrCrGrUrCrGrArUrGrGrUrCrArGrCrArCrArGrCrCrUrUrArUrGrCrA | |
| | ED 15- | rCrGrG*mC*mC*mU | |
| | 20FE_ | | |
| | PB17 | | |
| 471 | A1AT_ | mA*mG*mG*rCrCrGrUrGrCrArUrArArGrGrCrUrGrUrGrGrUrUrUrUrArGrArGrCrUrArGrArArArUrArGrCrArArGrUrUr | 24540 |
| | SpCas9- | ArArArArUrArArGrGrCrUrArGrUrCrCrGrUrUrArUrCrArArCrUrUrGrArArArArArGrUrGrGrCrArCrCrGrArGrUrCrGrGrU | |
| | NG_SpRY_ | rGrCrArGrCrArGrCrUrUrCrArGrUrCrCrCrUrUrUrCrUrCrGrUrCrGrArUrGrGrUrCrArGrCrArCrArGrCrCrUrUrArUrGrCrA | |
| | ED15-_ | rCrG*mG*mC*mC | |
| | 20FE_ | | |
| | PB16 | | |
| 472 | A1AT_ | mA*mG*mG*rCrCrGrUrGrCrArUrArArGrGrCrUrGrUrGrGrUrUrUrUrArGrArGrCrUrArGrArArArUrArGrCrArArGrUrUr | 24541 |
| | SpCas9- | ArArArArUrArArGrGrCrUrArGrUrCrCrGrUrUrArUrCrArArCrUrUrGrArArArArArGrUrGrGrCrArCrCrGrArGrUrCrGrGrU | |
| | NG_SpRY_ | rGrCrArGrCrArGrCrUrUrCrArGrUrCrCrCrUrUrUrCrUrCrGrUrCrGrArUrGrGrUrCrArGrCrArCrArGrCrCrUrUrArUrGrCrA | |
| | ED15-_ | rC*mG*mG*mC | |
| | 20FE_ | | |
| | PB15 | | |
| 473 | A1AT_ | mA*mG*mG*rCrCrGrUrGrCrArUrArArGrGrCrUrGrUrGrGrUrUrUrUrArGrArGrCrUrArGrArArArUrArGrCrArArGrUrUr | 24542 |
| | SpCas9- | ArArArArUrArArGrGrCrUrArGrUrCrCrGrUrUrArUrCrArArCrUrUrGrArArArArArGrUrGrGrCrArCrCrGrArGrUrCrGrGrU | |
| | NG_SpRY_ | rGrCrArGrCrArGrCrUrUrCrArGrUrCrCrCrUrUrUrCrUrCrGrUrCrGrArUrGrGrUrCrArGrCrArCrArGrCrCrUrUrArUrGrCrA | |
| | ED15-_ | *mC*mG*mG | |
| | 20FE_ | | |
| | PB14 | | |
| 474 | A1AT_ | mA*mG*mG*rCrCrGrUrGrCrArUrArArGrGrCrUrGrUrGrGrUrUrUrUrArGrArGrCrUrArGrArArArUrArGrCrArArGrUrUr | 24543 |
| | SpCas9- | ArArArArUrArArGrGrCrUrArGrUrCrCrGrUrUrArUrCrArArCrUrUrGrArArArArArGrUrGrGrCrArCrCrGrArGrUrCrGrGrU | |
| | NG_SpRY_ | rGrCrArGrCrArGrCrUrUrCrArGrUrCrCrCrUrUrUrCrUrCrGrUrCrGrArUrGrGrUrCrArGrCrArCrArGrCrCrUrUrArUrGrC* | |
| | ED15-_ | mA*mC*mG | |
| | 20FE_ | | |
| | PB13 | | |
| 475 | A1AT_ | mA*mG*mG*rCrCrGrUrGrCrArUrArArGrGrCrUrGrUrGrGrUrUrUrUrArGrArGrCrUrArGrArArArUrArGrCrArArGrUrUr | 24544 |
| | SpCas9- | ArArArArUrArArGrGrCrUrArGrUrCrCrGrUrUrArUrCrArArCrUrUrGrArArArArArGrUrGrGrCrArCrCrGrArGrUrCrGrGrU | |
| | NG_SpRY_ | rGrCrArGrCrArGrCrUrUrCrArGrUrCrCrCrUrUrUrCrUrCrGrUrCrGrArUrGrGrUrCrArGrCrArCrArGrCrCrUrUrArUrG*mC | |
| | ED15-_ | *mA*mC | |
| | 20FE_ | | |
| | PB12 | | |
| 476 | A1AT_ | mA*mG*mG*rCrCrGrUrGrCrArUrArArGrGrCrUrGrUrGrGrUrUrUrUrArGrArGrCrUrArGrArArArUrArGrCrArArGrUrUr | 24545 |
| | SpCas9- | ArArArArUrArArGrGrCrUrArGrUrCrCrGrUrUrArUrCrArArCrUrUrGrArArArArArGrUrGrGrCrArCrCrGrArGrUrCrGrGrU | |
| | NG_SpRY_ | rGrCrArGrCrArGrCrUrUrCrArGrUrCrCrCrUrUrUrCrUrCrGrUrCrGrArUrGrGrUrCrArGrCrArCrArGrCrCrUrUrArU*mG* | |
| | ED15-_ | mC*mA | |
| | 20FE_ | | |
| | PB11 | | |
| 477 | A1AT_ | mA*mG*mG*rCrCrGrUrGrCrArUrArArGrGrCrUrGrUrGrGrUrUrUrUrArGrArGrCrUrArGrArArArUrArGrCrArArGrUrUr | 24546 |
| | SpCas9- | ArArArArUrArArGrGrCrUrArGrUrCrCrGrUrUrArUrCrArArCrUrUrGrArArArArArGrUrGrGrCrArCrCrGrArGrUrCrGrGrU | |
| | NG_SpRY_ | rGrCrArGrCrArGrCrUrUrCrArGrUrCrCrCrUrUrUrCrUrCrGrUrCrGrArUrGrGrUrCrArGrCrArCrArGrCrCrUrUrA*mU*mG | |
| | ED15-_ | *mC | |
| | 20FE_ | | |
| | PB10 | | |
| 478 | A1AT_ | mA*mG*mG*rCrCrGrUrGrCrArUrArArGrGrCrUrGrUrGrGrUrUrUrUrArGrArGrCrUrArGrArArArUrArGrCrArArGrUrUr | 24547 |
| | SpCas9- | ArArArArUrArArGrGrCrUrArGrUrCrCrGrUrUrArUrCrArArCrUrUrGrArArArArArGrUrGrGrCrArCrCrGrArGrUrCrGrGrU | |
| | NG_SpRY_ | rGrCrArGrCrArGrCrUrUrCrArGrUrCrCrCrUrUrUrCrUrCrGrUrCrGrArUrGrGrUrCrArGrCrArCrArGrCrCrUrU*mA*mU* | |
| | ED15-_ | mG | |
| | 20FE_PB9 | | |
| 479 | A1AT_ | mA*mG*mG*rCrCrGrUrGrCrArUrArArGrGrCrUrGrUrGrGrUrUrUrUrArGrArGrCrUrArGrArArArUrArGrCrArArGrUrUr | 24548 |
| | SpCas9- | ArArArArUrArArGrGrCrUrArGrUrCrCrGrUrUrArUrCrArArCrUrUrGrArArArArArGrUrGrGrCrArCrCrGrArGrUrCrGrGrU | |
| | NG_SpRY_ | rGrCrArGrCrArGrCrUrUrCrArGrUrCrCrCrUrUrUrCrUrCrGrUrCrGrArUrGrGrUrCrArGrCrArCrArGrCrCrU*mU*mA*mU | |
| | ED15-_ | | |
| | 20FE_PB8 | | |
| 480 | A1AT_ | mA*mG*mG*rCrCrGrUrGrCrArUrArArGrGrCrUrGrUrGrGrUrUrUrUrArGrArGrCrUrArGrArArArUrArGrCrArArGrUrUr | 24549 |
| | SpCas9- | ArArArArUrArArGrGrCrUrArGrUrCrCrGrUrUrArUrCrArArCrUrUrGrArArArArArGrUrGrGrCrArCrCrGrArGrUrCrGrGrU | |
| | NG_SpRY_ | rGrCrUrUrCrArGrUrCrCrCrUrUrUrCrUrCrGrUrCrGrArUrGrGrUrCrArGrCrArCrArGrCrCrUrUrArUrGrCrArCrGrG*mC* | |
| | ED15-_ | mC*mU | |
| | 14FE_ | | |
| | PB17 | | |
| 481 | A1AT_ | mA*mG*mG*rCrCrGrUrGrCrArUrArArGrGrCrUrGrUrGrGrUrUrUrUrArGrArGrCrUrArGrArArArUrArGrCrArArGrUrUr | 24550 |
| | SpCas9- | ArArArArUrArArGrGrCrUrArGrUrCrCrGrUrUrArUrCrArArCrUrUrGrArArArArArGrUrGrGrCrArCrCrGrArGrUrCrGrGrU | |
| | NG_SpRY_ | rGrCrUrUrCrArGrUrCrCrCrUrUrUrCrUrCrGrUrCrGrArUrGrGrUrCrArGrCrArCrArGrCrCrUrUrArUrGrCrArCrG*mG*mC | |
| | ED15-_ | *mC | |
| | 14FE_ | | |
| | PB16 | | |
| 482 | A1AT_ | mA*mG*mG*rCrCrGrUrGrCrArUrArArGrGrCrUrGrUrGrGrUrUrUrUrArGrArGrCrUrArGrArArArUrArGrCrArArGrUrUr | 24551 |
| | SpCas9- | ArArArArUrArArGrGrCrUrArGrUrCrCrGrUrUrArUrCrArArCrUrUrGrArArArArArGrUrGrGrCrArCrCrGrArGrUrCrGrGrU | |
| | NG_SpRY_ | rGrCrUrUrCrArGrUrCrCrCrUrUrUrCrUrCrGrUrCrGrArUrGrGrUrCrArGrCrArCrArGrCrCrUrUrArUrGrCrArC*mG*mG* | |
| | ED15-_ | mC | |
| | 14FE_ | | |
| | PB15 | | |
| 483 | A1AT_ | mA*mG*mG*rCrCrGrUrGrCrArUrArArGrGrCrUrGrUrGrGrUrUrUrUrArGrArGrCrUrArGrArArArUrArGrCrArArGrUrUr | 24552 |
| | SpCas9- | ArArArArUrArArGrGrCrUrArGrUrCrCrGrUrUrArUrCrArArCrUrUrGrArArArArArGrUrGrGrCrArCrCrGrArGrUrCrGrGrU | |
| | NG_SpRY_ | rGrCrUrUrCrArGrUrCrCrCrUrUrUrCrUrCrGrUrCrGrArUrGrGrUrCrArGrCrArCrArGrCrCrUrUrArUrGrCrA*mC*mG*mG | |
| | ED15-_ | | |
| | 14FE_ | | |
| | PB14 | | |
| 484 | A1AT_ | mA*mG*mG*rCrCrGrUrGrCrArUrArArGrGrCrUrGrUrGrGrUrUrUrUrArGrArGrCrUrArGrArArArUrArGrCrArArGrUrUr | 24553 |
| | SpCas9- | ArArArArUrArArGrGrCrUrArGrUrCrCrGrUrUrArUrCrArArCrUrUrGrArArArArArGrUrGrGrCrArCrCrGrArGrUrCrGrGrU | |
| | NG_SpRY_ | rGrCrUrUrCrArGrUrCrCrCrUrUrUrCrUrCrGrUrCrGrArUrGrGrUrCrArGrCrArCrArGrCrCrUrUrArUrGrC*mA*mC*mG | |
| | ED15-_ | | |
| | 14FE_ | | |
| | PB13 | | |
| 485 | A1AT_ | mA*mG*mG*rCrCrGrUrGrCrArUrArArGrGrCrUrGrUrGrGrUrUrUrUrArGrArGrCrUrArGrArArArUrArGrCrArArGrUrUr | 24554 |
| | SpCas9- | ArArArArUrArArGrGrCrUrArGrUrCrCrGrUrUrArUrCrArArCrUrUrGrArArArArArGrUrGrGrCrArCrCrGrArGrUrCrGrGrU | |
| | NG_SpRY_ | rGrCrUrUrCrArGrUrCrCrCrUrUrUrCrUrCrGrUrCrGrArUrGrGrUrCrArGrCrArCrArGrCrCrUrUrArUrG*mC*mA*mC | |
| | ED15-_ | | |
| | 14FE_ | | |
| | PB12 | | |
| 486 | A1AT_ | mA*mG*mG*rCrCrGrUrGrCrArUrArArGrGrCrUrGrUrGrGrUrUrUrUrArGrArGrCrUrArGrArArArUrArGrCrArArGrUrUr | 24555 |
| | SpCas9- | ArArArArUrArArGrGrCrUrArGrUrCrCrGrUrUrArUrCrArArCrUrUrGrArArArArArGrUrGrGrCrArCrCrGrArGrUrCrGrGrU | |
| | NG_SpRY_ | rGrCrUrUrCrArGrUrCrCrCrUrUrUrCrUrCrGrUrCrGrArUrGrGrUrCrArGrCrArCrArGrCrCrUrUrArU*mG*mC*mA | |
| | ED15-_ | | |
| | 14FE_ | | |
| | PB11 | | |
| 487 | A1AT_ | mA*mG*mG*rCrCrGrUrGrCrArUrArArGrGrCrUrGrUrGrGrUrUrUrUrArGrArGrCrUrArGrArArArUrArGrCrArArGrUrUr | 24556 |
| | SpCas9- | ArArArArUrArArGrGrCrUrArGrUrCrCrGrUrUrArUrCrArArCrUrUrGrArArArArArGrUrGrGrCrArCrCrGrArGrUrCrGrGrU | |
| | NG_SpRY_ | rGrCrUrUrCrArGrUrCrCrCrUrUrUrCrUrCrGrUrCrGrArUrGrGrUrCrArGrCrArCrArGrCrCrUrUrA*mU*mG*mC | |
| | ED15-_ | | |
| | 14FE_ | | |
| | PB10 | | |
| 488 | A1AT_ | mA*mG*mG*rCrCrGrUrGrCrArUrArArGrGrCrUrGrUrGrGrUrUrUrUrArGrArGrCrUrArGrArArArUrArGrCrArArGrUrUr | 24557 |
| | SpCas9- | ArArArArUrArArGrGrCrUrArGrUrCrCrGrUrUrArUrCrArArCrUrUrGrArArArArArGrUrGrGrCrArCrCrGrArGrUrCrGrGrU | |
| | NG_SpRY_ | rGrCrUrUrCrArGrUrCrCrCrUrUrUrCrUrCrGrUrCrGrArUrGrGrUrCrArGrCrArCrArGrCrCrUrU*mA*mU*mG | |
| | ED15-_ | | |
| | 14FE_PB9 | | |
| 489 | A1AT_ | mA*mG*mG*rCrCrGrUrGrCrArUrArArGrGrCrUrGrUrGrGrUrUrUrUrArGrArGrCrUrArGrArArArUrArGrCrArArGrUrUr | 24558 |
| | SpCas9- | ArArArArUrArArGrGrCrUrArGrUrCrCrGrUrUrArUrCrArArCrUrUrGrArArArArArGrUrGrGrCrArCrCrGrArGrUrCrGrGrU | |
| | NG_SpRY_ | rGrCrUrUrCrArGrUrCrCrCrUrUrUrCrUrCrGrUrCrGrArUrGrGrUrCrArGrCrArCrArGrCrCrU*mU*mA*mU | |
| | ED15-_ | | |
| | 14FE_PB8 | | |
| 490 | A1AT_ | mA*mG*mG*rCrCrGrUrGrCrArUrArArGrGrCrUrGrUrGrGrUrUrUrUrArGrArGrCrUrArGrArArArUrArGrCrArArGrUrUr | 24559 |
| | SpCas9- | ArArArArUrArArGrGrCrUrArGrUrCrCrGrUrUrArUrCrArArCrUrUrGrArArArArArGrUrGrGrCrArCrCrGrArGrUrCrGrGrU | |
| | NG_SpRY_ | rGrCrArGrUrCrCrCrUrUrUrCrUrCrGrUrCrGrArUrGrGrUrCrArGrCrArCrArGrCrCrUrUrArUrGrCrArCrGrG*mC*mC*mU | |
| | ED15-_ | | |
| | 11FE_ | | |
| | PB17 | | |
| 491 | A1AT_ | mA*mG*mG*rCrCrGrUrGrCrArUrArArGrGrCrUrGrUrGrGrUrUrUrUrArGrArGrCrUrArGrArArArUrArGrCrArArGrUrUr | 24560 |
| | SpCas9- | ArArArArUrArArGrGrCrUrArGrUrCrCrGrUrUrArUrCrArArCrUrUrGrArArArArArGrUrGrGrCrArCrCrGrArGrUrCrGrGrU | |
| | NG_SpRY_ | rGrCrArGrUrCrCrCrUrUrUrCrUrCrGrUrCrGrArUrGrGrUrCrArGrCrArCrArGrCrCrUrUrArUrGrCrArCrG*mG*mC*mC | |
| | ED15-_ | | |
| | 11FE_ | | |
| | PB16 | | |
| 492 | A1AT_ | mA*mG*mG*rCrCrGrUrGrCrArUrArArGrGrCrUrGrUrGrGrUrUrUrUrArGrArGrCrUrArGrArArArUrArGrCrArArGrUrUr | 24561 |
| | SpCas9- | ArArArArUrArArGrGrCrUrArGrUrCrCrGrUrUrArUrCrArArCrUrUrGrArArArArArGrUrGrGrCrArCrCrGrArGrUrCrGrGrU | |
| | NG_SpRY_ | rGrCrArGrUrCrCrCrUrUrUrCrUrCrGrUrCrGrArUrGrGrUrCrArGrCrArCrArGrCrCrUrUrArUrGrCrArC*mG*mG*mC | |
| | ED15-_ | | |
| | 11FE_ | | |
| | PB15 | | |
| 493 | A1AT_ | mA*mG*mG*rCrCrGrUrGrCrArUrArArGrGrCrUrGrUrGrGrUrUrUrUrArGrArGrCrUrArGrArArArUrArGrCrArArGrUrUr | 24562 |
| | SpCas9- | ArArArArUrArArGrGrCrUrArGrUrCrCrGrUrUrArUrCrArArCrUrUrGrArArArArArGrUrGrGrCrArCrCrGrArGrUrCrGrGrU | |
| | NG_SpRY_ | rGrCrArGrUrCrCrCrUrUrUrCrUrCrGrUrCrGrArUrGrGrUrCrArGrCrArCrArGrCrCrUrUrArUrGrCrA*mC*mG*mG | |
| | ED15-_ | | |
| | 11FE_ | | |
| | PB14 | | |
| 494 | A1AT_ | mA*mG*mG*rCrCrGrUrGrCrArUrArArGrGrCrUrGrUrGrGrUrUrUrUrArGrArGrCrUrArGrArArArUrArGrCrArArGrUrUr | 24563 |
| | SpCas9- | ArArArArUrArArGrGrCrUrArGrUrCrCrGrUrUrArUrCrArArCrUrUrGrArArArArArGrUrGrGrCrArCrCrGrArGrUrCrGrGrU | |
| | NG_SpRY_ | rGrCrArGrUrCrCrCrUrUrUrCrUrCrGrUrCrGrArUrGrGrUrCrArGrCrArCrArGrCrCrUrUrArUrGrC*mA*mC*mG | |
| | ED15-_ | | |
| | 11FE_ | | |
| | PB13 | | |
| 495 | A1AT_ | mA*mG*mG*rCrCrGrUrGrCrArUrArArGrGrCrUrGrUrGrGrUrUrUrUrArGrArGrCrUrArGrArArArUrArGrCrArArGrUrUr | 24564 |
| | SpCas9- | ArArArArUrArArGrGrCrUrArGrUrCrCrGrUrUrArUrCrArArCrUrUrGrArArArArArGrUrGrGrCrArCrCrGrArGrUrCrGrGrU | |
| | NG_SpRY_ | rGrCrArGrUrCrCrCrUrUrUrCrUrCrGrUrCrGrArUrGrGrUrCrArGrCrArCrArGrCrCrUrUrArUrG*mC*mA*mC | |
| | ED15-_ | | |
| | 11FE_ | | |
| | PB12 | | |
| 496 | A1AT_ | mA*mG*mG*rCrCrGrUrGrCrArUrArArGrGrCrUrGrUrGrGrUrUrUrUrArGrArGrCrUrArGrArArArUrArGrCrArArGrUrUr | 24565 |
| | SpCas9- | ArArArArUrArArGrGrCrUrArGrUrCrCrGrUrUrArUrCrArArCrUrUrGrArArArArArGrUrGrGrCrArCrCrGrArGrUrCrGrGrU | |
| | NG_SpRY_ | rGrCrArGrUrCrCrCrUrUrUrCrUrCrGrUrCrGrArUrGrGrUrCrArGrCrArCrArGrCrCrUrUrArU*mG*mC*mA | |
| | ED15-_ | | |
| | 11FE_ | | |
| | PB11 | | |
| 497 | A1AT_ | mA*mG*mG*rCrCrGrUrGrCrArUrArArGrGrCrUrGrUrGrGrUrUrUrUrArGrArGrCrUrArGrArArArUrArGrCrArArGrUrUr | 24566 |
| | SpCas9- | ArArArArUrArArGrGrCrUrArGrUrCrCrGrUrUrArUrCrArArCrUrUrGrArArArArArGrUrGrGrCrArCrCrGrArGrUrCrGrGrU | |
| | NG_SpRY_ | rGrCrArGrUrCrCrCrUrUrUrCrUrCrGrUrCrGrArUrGrGrUrCrArGrCrArCrArGrCrCrUrUrA*mU*mG*mC | |
| | ED15-_ | | |
| | 11FE_ | | |
| | PB10 | | |
| 498 | A1AT_ | mA*mG*mG*rCrCrGrUrGrCrArUrArArGrGrCrUrGrUrGrGrUrUrUrUrArGrArGrCrUrArGrArArArUrArGrCrArArGrUrUr | 24567 |
| | SpCas9- | ArArArArUrArArGrGrCrUrArGrUrCrCrGrUrUrArUrCrArArCrUrUrGrArArArArArGrUrGrGrCrArCrCrGrArGrUrCrGrGrU | |
| | NG_SpRY_ | rGrCrArGrUrCrCrCrUrUrUrCrUrCrGrUrCrGrArUrGrGrUrCrArGrCrArCrArGrCrCrUrU*mA*mU*mG | |
| | ED15-_ | | |
| | 11FE_PB9 | | |
| 499 | A1AT_ | mA*mG*mG*rCrCrGrUrGrCrArUrArArGrGrCrUrGrUrGrGrUrUrUrUrArGrArGrCrUrArGrArArArUrArGrCrArArGrUrUr | 24568 |
| | SpCas9- | ArArArArUrArArGrGrCrUrArGrUrCrCrGrUrUrArUrCrArArCrUrUrGrArArArArArGrUrGrGrCrArCrCrGrArGrUrCrGrGrU | |
| | NG_SpRY_ | rGrCrArGrUrCrCrCrUrUrUrCrUrCrGrUrCrGrArUrGrGrUrCrArGrCrArCrArGrCrCrU*mU*mA*mU | |
| | ED15-_ | | |
| | 11FE_PB8 | | |
| 500 | A1AT_ | mA*mG*mG*rCrCrGrUrGrCrArUrArArGrGrCrUrGrUrGrGrUrUrUrUrArGrArGrCrUrArGrArArArUrArGrCrArArGrUrUr | 24569 |
| | SpCas9- | ArArArArUrArArGrGrCrUrArGrUrCrCrGrUrUrArUrCrArArCrUrUrGrArArArArArGrUrGrGrCrArCrCrGrArGrUrCrGrGrU | |
| | NG_SpRY_ | rGrCrUrCrCrCrUrUrUrCrUrCrGrUrCrGrArUrGrGrUrCrArGrCrArCrArGrCrCrUrUrArUrGrCrArCrGrG*mC*mC*mU | |
| | ED15-_ | | |
| | 9FE_PB17 | | |
| 501 | A1AT_ | mA*mG*mG*rCrCrGrUrGrCrArUrArArGrGrCrUrGrUrGrGrUrUrUrUrArGrArGrCrUrArGrArArArUrArGrCrArArGrUrUr | 24570 |
| | SpCas9- | ArArArArUrArArGrGrCrUrArGrUrCrCrGrUrUrArUrCrArArCrUrUrGrArArArArArGrUrGrGrCrArCrCrGrArGrUrCrGrGrU | |
| | NG_SpRY_ | rGrCrUrCrCrCrUrUrUrCrUrCrGrUrCrGrArUrGrGrUrCrArGrCrArCrArGrCrCrUrUrArUrGrCrArCrG*mG*mC*mC | |
| | ED15-_ | | |
| | 9FE_PB16 | | |
| 502 | A1AT_ | mA*mG*mG*rCrCrGrUrGrCrArUrArArGrGrCrUrGrUrGrGrUrUrUrUrArGrArGrCrUrArGrArArArUrArGrCrArArGrUrUr | 24571 |
| | SpCas9- | ArArArArUrArArGrGrCrUrArGrUrCrCrGrUrUrArUrCrArArCrUrUrGrArArArArArGrUrGrGrCrArCrCrGrArGrUrCrGrGrU | |
| | NG_SpRY_ | rGrCrUrCrCrCrUrUrUrCrUrCrGrUrCrGrArUrGrGrUrCrArGrCrArCrArGrCrCrUrUrArUrGrCrArC*mG*mG*mC | |
| | ED15-_ | | |
| | 9FE_PB15 | | |
| 503 | A1AT_ | mA*mG*mG*rCrCrGrUrGrCrArUrArArGrGrCrUrGrUrGrGrUrUrUrUrArGrArGrCrUrArGrArArArUrArGrCrArArGrUrUr | 24572 |
| | SpCas9- | ArArArArUrArArGrGrCrUrArGrUrCrCrGrUrUrArUrCrArArCrUrUrGrArArArArArGrUrGrGrCrArCrCrGrArGrUrCrGrGrU | |
| | NG_SpRY_ | rGrCrUrCrCrCrUrUrUrCrUrCrGrUrCrGrArUrGrGrUrCrArGrCrArCrArGrCrCrUrUrArUrGrCrA*mC*mG*mG | |
| | ED15-_ | | |
| | 9FE_PB14 | | |
| 504 | A1AT_ | mA*mG*mG*rCrCrGrUrGrCrArUrArArGrGrCrUrGrUrGrGrUrUrUrUrArGrArGrCrUrArGrArArArUrArGrCrArArGrUrUr | 24573 |
| | SpCas9- | ArArArArUrArArGrGrCrUrArGrUrCrCrGrUrUrArUrCrArArCrUrUrGrArArArArArGrUrGrGrCrArCrCrGrArGrUrCrGrGrU | |
| | NG_SpRY_ | rGrCrUrCrCrCrUrUrUrCrUrCrGrUrCrGrArUrGrGrUrCrArGrCrArCrArGrCrCrUrUrArUrGrC*mA*mC*mG | |
| | ED15-_ | | |
| | 9FE_PB13 | | |
| 505 | A1AT_ | mA*mG*mG*rCrCrGrUrGrCrArUrArArGrGrCrUrGrUrGrGrUrUrUrUrArGrArGrCrUrArGrArArArUrArGrCrArArGrUrUr | 24574 |
| | SpCas9- | ArArArArUrArArGrGrCrUrArGrUrCrCrGrUrUrArUrCrArArCrUrUrGrArArArArArGrUrGrGrCrArCrCrGrArGrUrCrGrGrU | |
| | NG_SpRY_ | rGrCrUrCrCrCrUrUrUrCrUrCrGrUrCrGrArUrGrGrUrCrArGrCrArCrArGrCrCrUrUrArUrG*mC*mA*mC | |
| | ED15-_ | | |
| | 9FE_PB12 | | |
| 506 | A1AT_ | mA*mG*mG*rCrCrGrUrGrCrArUrArArGrGrCrUrGrUrGrGrUrUrUrUrArGrArGrCrUrArGrArArArUrArGrCrArArGrUrUr | 24575 |
| | SpCas9- | ArArArArUrArArGrGrCrUrArGrUrCrCrGrUrUrArUrCrArArCrUrUrGrArArArArArGrUrGrGrCrArCrCrGrArGrUrCrGrGrU | |
| | NG_SpRY_ | rGrCrUrCrCrCrUrUrUrCrUrCrGrUrCrGrArUrGrGrUrCrArGrCrArCrArGrCrCrUrUrArU*mG*mC*mA | |
| | ED15-_ | | |
| | 9FE_PB11 | | |
| 507 | A1AT_ | mA*mG*mG*rCrCrGrUrGrCrArUrArArGrGrCrUrGrUrGrGrUrUrUrUrArGrArGrCrUrArGrArArArUrArGrCrArArGrUrUr | 24576 |
| | SpCas9- | ArArArArUrArArGrGrCrUrArGrUrCrCrGrUrUrArUrCrArArCrUrUrGrArArArArArGrUrGrGrCrArCrCrGrArGrUrCrGrGrU | |
| | NG_SpRY_ | rGrCrUrCrCrCrUrUrUrCrUrCrGrUrCrGrArUrGrGrUrCrArGrCrArCrArGrCrCrUrUrA*mU*mG*mC | |
| | ED15-_ | | |
| | 9FE_PB10 | | |
| 508 | A1AT_ | mA*mG*mG*rCrCrGrUrGrCrArUrArArGrGrCrUrGrUrGrGrUrUrUrUrArGrArGrCrUrArGrArArArUrArGrCrArArGrUrUr | 24577 |
| | SpCas9- | ArArArArUrArArGrGrCrUrArGrUrCrCrGrUrUrArUrCrArArCrUrUrGrArArArArArGrUrGrGrCrArCrCrGrArGrUrCrGrGrU | |
| | NG_SpRY_ | rGrCrUrCrCrCrUrUrUrCrUrCrGrUrCrGrArUrGrGrUrCrArGrCrArCrArGrCrCrUrU*mA*mU*mG | |
| | ED15-_ | | |
| | 9FE_PB9 | | |
| 509 | A1AT_ | mA*mG*mG*rCrCrGrUrGrCrArUrArArGrGrCrUrGrUrGrGrUrUrUrUrArGrArGrCrUrArGrArArArUrArGrCrArArGrUrUr | 24578 |
| | SpCas9- | ArArArArUrArArGrGrCrUrArGrUrCrCrGrUrUrArUrCrArArCrUrUrGrArArArArArGrUrGrGrCrArCrCrGrArGrUrCrGrGrU | |
| | NG_SpRY_ | rGrCrUrCrCrCrUrUrUrCrUrCrGrUrCrGrArUrGrGrUrCrArGrCrArCrArGrCrCrU*mU*mA*mU | |
| | ED15-_ | | |
| | 9FE_PB8 | | |
| 510 | A1AT_ | mA*mG*mG*rCrCrGrUrGrCrArUrArArGrGrCrUrGrUrGrGrUrUrUrUrArGrArGrCrUrArGrArArArUrArGrCrArArGrUrUr | 24579 |
| | SpCas9- | ArArArArUrArArGrGrCrUrArGrUrCrCrGrUrUrArUrCrArArCrUrUrGrArArArArArGrUrGrGrCrArCrCrGrArGrUrCrGrGrU | |
| | NG_SpRY_ | rGrCrCrCrUrUrUrCrUrCrGrUrCrGrArUrGrGrUrCrArGrCrArCrArGrCrCrUrUrArUrGrCrArCrGrG*mC*mC*mU | |
| | ED15-_ | | |
| | 7FE_PB17 | | |
| 511 | A1AT_ | mA*mG*mG*rCrCrGrUrGrCrArUrArArGrGrCrUrGrUrGrGrUrUrUrUrArGrArGrCrUrArGrArArArUrArGrCrArArGrUrUr | 24580 |
| | SpCas9- | ArArArArUrArArGrGrCrUrArGrUrCrCrGrUrUrArUrCrArArCrUrUrGrArArArArArGrUrGrGrCrArCrCrGrArGrUrCrGrGrU | |
| | NG_SpRY_ | rGrCrCrCrUrUrUrCrUrCrGrUrCrGrArUrGrGrUrCrArGrCrArCrArGrCrCrUrUrArUrGrCrArCrG*mG*mC*mC | |
| | ED15-_ | | |
| | 7FE_PB16 | | |
| 512 | A1AT_ | mA*mG*mG*rCrCrGrUrGrCrArUrArArGrGrCrUrGrUrGrGrUrUrUrUrArGrArGrCrUrArGrArArArUrArGrCrArArGrUrUr | 24581 |
| | SpCas9- | ArArArArUrArArGrGrCrUrArGrUrCrCrGrUrUrArUrCrArArCrUrUrGrArArArArArGrUrGrGrCrArCrCrGrArGrUrCrGrGrU | |
| | NG_SpRY_ | rGrCrCrCrUrUrUrCrUrCrGrUrCrGrArUrGrGrUrCrArGrCrArCrArGrCrCrUrUrArUrGrCrArC*mG*mG*mC | |
| | ED15-_ | | |
| | 7FE_PB15 | | |
| 513 | A1AT_ | mA*mG*mG*rCrCrGrUrGrCrArUrArArGrGrCrUrGrUrGrGrUrUrUrUrArGrArGrCrUrArGrArArArUrArGrCrArArGrUrUr | 24582 |
| | SpCas9- | ArArArArUrArArGrGrCrUrArGrUrCrCrGrUrUrArUrCrArArCrUrUrGrArArArArArGrUrGrGrCrArCrCrGrArGrUrCrGrGrU | |
| | NG_SpRY_ | rGrCrCrCrUrUrUrCrUrCrGrUrCrGrArUrGrGrUrCrArGrCrArCrArGrCrCrUrUrArUrGrCrA*mC*mG*mG | |
| | ED15-_ | | |
| | 7FE_PB14 | | |
| 514 | A1AT_ | mA*mG*mG*rCrCrGrUrGrCrArUrArArGrGrCrUrGrUrGrGrUrUrUrUrArGrArGrCrUrArGrArArArUrArGrCrArArGrUrUr | 24583 |
| | SpCas9- | ArArArArUrArArGrGrCrUrArGrUrCrCrGrUrUrArUrCrArArCrUrUrGrArArArArArGrUrGrGrCrArCrCrGrArGrUrCrGrGrU | |
| | NG_SpRY_ | rGrCrCrCrUrUrUrCrUrCrGrUrCrGrArUrGrGrUrCrArGrCrArCrArGrCrCrUrUrArUrGrC*mA*mC*mG | |
| | ED15-_ | | |
| | 7FE_PB13 | | |
| 515 | A1AT_ | mA*mG*mG*rCrCrGrUrGrCrArUrArArGrGrCrUrGrUrGrGrUrUrUrUrArGrArGrCrUrArGrArArArUrArGrCrArArGrUrUr | 24584 |
| | SpCas9- | ArArArArUrArArGrGrCrUrArGrUrCrCrGrUrUrArUrCrArArCrUrUrGrArArArArArGrUrGrGrCrArCrCrGrArGrUrCrGrGrU | |
| | NG_SpRY_ | rGrCrCrCrUrUrUrCrUrCrGrUrCrGrArUrGrGrUrCrArGrCrArCrArGrCrCrUrUrArUrG*mC*mA*mC | |
| | ED15-_ | | |
| | 7FE_PB12 | | |
| 516 | A1AT_ | mA*mG*mG*rCrCrGrUrGrCrArUrArArGrGrCrUrGrUrGrGrUrUrUrUrArGrArGrCrUrArGrArArArUrArGrCrArArGrUrUr | 24585 |
| | SpCas9- | ArArArArUrArArGrGrCrUrArGrUrCrCrGrUrUrArUrCrArArCrUrUrGrArArArArArGrUrGrGrCrArCrCrGrArGrUrCrGrGrU | |
| | NG_SpRY_ | rGrCrCrCrUrUrUrCrUrCrGrUrCrGrArUrGrGrUrCrArGrCrArCrArGrCrCrUrUrArU*mG*mC*mA | |
| | ED15-_ | | |
| | 7FE_PB11 | | |
| 517 | A1AT_ | mA*mG*mG*rCrCrGrUrGrCrArUrArArGrGrCrUrGrUrGrGrUrUrUrUrArGrArGrCrUrArGrArArArUrArGrCrArArGrUrUr | 24586 |
| | SpCas9- | ArArArArUrArArGrGrCrUrArGrUrCrCrGrUrUrArUrCrArArCrUrUrGrArArArArArGrUrGrGrCrArCrCrGrArGrUrCrGrGrU | |
| | NG_SpRY_ | rGrCrCrCrUrUrUrCrUrCrGrUrCrGrArUrGrGrUrCrArGrCrArCrArGrCrCrUrUrA*mU*mG*mC | |
| | ED15-_ | | |
| | 7FE_PB10 | | |
| 518 | A1AT_ | mA*mG*mG*rCrCrGrUrGrCrArUrArArGrGrCrUrGrUrGrGrUrUrUrUrArGrArGrCrUrArGrArArArUrArGrCrArArGrUrUr | 24587 |
| | SpCas9- | ArArArArUrArArGrGrCrUrArGrUrCrCrGrUrUrArUrCrArArCrUrUrGrArArArArArGrUrGrGrCrArCrCrGrArGrUrCrGrGrU | |
| | NG_SpRY_ | rGrCrCrCrUrUrUrCrUrCrGrUrCrGrArUrGrGrUrCrArGrCrArCrArGrCrCrUrU*mA*mU*mG | |
| | ED15-_ | | |
| | 7FE_PB9 | | |
| 519 | A1AT_ | mA*mG*mG*rCrCrGrUrGrCrArUrArArGrGrCrUrGrUrGrGrUrUrUrUrArGrArGrCrUrArGrArArArUrArGrCrArArGrUrUr | 24588 |
| | SpCas9- | ArArArArUrArArGrGrCrUrArGrUrCrCrGrUrUrArUrCrArArCrUrUrGrArArArArArGrUrGrGrCrArCrCrGrArGrUrCrGrGrU | |
| | NG_SpRY_ | rGrCrCrCrUrUrUrCrUrCrGrUrCrGrArUrGrGrUrCrArGrCrArCrArGrCrCrU*mU*mA*mU | |
| | ED15-_ | | |
| | 7FE_PB8 | | |
| 520 | A1AT_ | mA*mG*mG*rCrCrGrUrGrCrArUrArArGrGrCrUrGrUrGrGrUrUrUrUrArGrArGrCrUrArGrArArArUrArGrCrArArGrUrUr | 24589 |
| | SpCas9- | ArArArArUrArArGrGrCrUrArGrUrCrCrGrUrUrArUrCrArArCrUrUrGrArArArArArGrUrGrGrCrArCrCrGrArGrUrCrGrGrU | |
| | NG_SpRY_ | rGrCrUrUrUrCrUrCrGrUrCrGrArUrGrGrUrCrArGrCrArCrArGrCrCrUrUrArUrGrCrArCrGrG*mC*mC*mU | |
| | ED15-_ | | |
| | 5FE_PB17 | | |
| 521 | A1AT_ | mA*mG*mG*rCrCrGrUrGrCrArUrArArGrGrCrUrGrUrGrGrUrUrUrUrArGrArGrCrUrArGrArArArUrArGrCrArArGrUrUr | 24590 |
| | SpCas9- | ArArArArUrArArGrGrCrUrArGrUrCrCrGrUrUrArUrCrArArCrUrUrGrArArArArArGrUrGrGrCrArCrCrGrArGrUrCrGrGrU | |
| | NG_SpRY_ | rGrCrUrUrUrCrUrCrGrUrCrGrArUrGrGrUrCrArGrCrArCrArGrCrCrUrUrArUrGrCrArCrG*mG*mC*mC | |
| | ED15-_ | | |
| | 5FE_PB16 | | |
| 522 | A1AT_ | mA*mG*mG*rCrCrGrUrGrCrArUrArArGrGrCrUrGrUrGrGrUrUrUrUrArGrArGrCrUrArGrArArArUrArGrCrArArGrUrUr | 24591 |
| | SpCas9- | ArArArArUrArArGrGrCrUrArGrUrCrCrGrUrUrArUrCrArArCrUrUrGrArArArArArGrUrGrGrCrArCrCrGrArGrUrCrGrGrU | |
| | NG_SpRY_ | rGrCrUrUrUrCrUrCrGrUrCrGrArUrGrGrUrCrArGrCrArCrArGrCrCrUrUrArUrGrCrArC*mG*mG*mC | |
| | ED15-_ | | |
| | 5FE_PB15 | | |
| 523 | A1AT_ | mA*mG*mG*rCrCrGrUrGrCrArUrArArGrGrCrUrGrUrGrGrUrUrUrUrArGrArGrCrUrArGrArArArUrArGrCrArArGrUrUr | 24592 |
| | SpCas9- | ArArArArUrArArGrGrCrUrArGrUrCrCrGrUrUrArUrCrArArCrUrUrGrArArArArArGrUrGrGrCrArCrCrGrArGrUrCrGrGrU | |
| | NG_SpRY_ | rGrCrUrUrUrCrUrCrGrUrCrGrArUrGrGrUrCrArGrCrArCrArGrCrCrUrUrArUrGrCrA*mC*mG*mG | |
| | ED15-_ | | |
| | 5FE_PB14 | | |
| 524 | A1AT_ | mA*mG*mG*rCrCrGrUrGrCrArUrArArGrGrCrUrGrUrGrGrUrUrUrUrArGrArGrCrUrArGrArArArUrArGrCrArArGrUrUr | 24593 |
| | SpCas9- | ArArArArUrArArGrGrCrUrArGrUrCrCrGrUrUrArUrCrArArCrUrUrGrArArArArArGrUrGrGrCrArCrCrGrArGrUrCrGrGrU | |
| | NG_SpRY_ | rGrCrUrUrUrCrUrCrGrUrCrGrArUrGrGrUrCrArGrCrArCrArGrCrCrUrUrArUrGrC*mA*mC*mG | |
| | ED15-_ | | |
| | 5FE_PB13 | | |
| 525 | A1AT_ | mA*mG*mG*rCrCrGrUrGrCrArUrArArGrGrCrUrGrUrGrGrUrUrUrUrArGrArGrCrUrArGrArArArUrArGrCrArArGrUrUr | 24594 |
| | SpCas9- | ArArArArUrArArGrGrCrUrArGrUrCrCrGrUrUrArUrCrArArCrUrUrGrArArArArArGrUrGrGrCrArCrCrGrArGrUrCrGrGrU | |
| | NG_SpRY_ | rGrCrUrUrUrCrUrCrGrUrCrGrArUrGrGrUrCrArGrCrArCrArGrCrCrUrUrArUrG*mC*mA*mC | |
| | ED15-_ | | |
| | 5FE_PB12 | | |
| 526 | A1AT_ | mA*mG*mG*rCrCrGrUrGrCrArUrArArGrGrCrUrGrUrGrGrUrUrUrUrArGrArGrCrUrArGrArArArUrArGrCrArArGrUrUr | 24595 |
| | SpCas9- | ArArArArUrArArGrGrCrUrArGrUrCrCrGrUrUrArUrCrArArCrUrUrGrArArArArArGrUrGrGrCrArCrCrGrArGrUrCrGrGrU | |
| | NG_SpRY_ | rGrCrUrUrUrCrUrCrGrUrCrGrArUrGrGrUrCrArGrCrArCrArGrCrCrUrUrArU*mG*mC*mA | |
| | ED15-_ | | |
| | 5FE_PB11 | | |
| 527 | A1AT_ | mA*mG*mG*rCrCrGrUrGrCrArUrArArGrGrCrUrGrUrGrGrUrUrUrUrArGrArGrCrUrArGrArArArUrArGrCrArArGrUrUr | 24596 |
| | SpCas9- | ArArArArUrArArGrGrCrUrArGrUrCrCrGrUrUrArUrCrArArCrUrUrGrArArArArArGrUrGrGrCrArCrCrGrArGrUrCrGrGrU | |
| | NG_SpRY_ | rGrCrUrUrUrCrUrCrGrUrCrGrArUrGrGrUrCrArGrCrArCrArGrCrCrUrUrA*mU*mG*mC | |
| | ED15-_ | | |
| | 5FE_PB10 | | |
| 528 | A1AT_ | mA*mG*mG*rCrCrGrUrGrCrArUrArArGrGrCrUrGrUrGrGrUrUrUrUrArGrArGrCrUrArGrArArArUrArGrCrArArGrUrUr | 24597 |
| | SpCas9- | ArArArArUrArArGrGrCrUrArGrUrCrCrGrUrUrArUrCrArArCrUrUrGrArArArArArGrUrGrGrCrArCrCrGrArGrUrCrGrGrU | |
| | NG_SpRY_ | rGrCrUrUrUrCrUrCrGrUrCrGrArUrGrGrUrCrArGrCrArCrArGrCrCrUrU*mA*mU*mG | |
| | ED15-_ | | |
| | 5FE_PB9 | | |
| 529 | A1AT_ | mA*mG*mG*rCrCrGrUrGrCrArUrArArGrGrCrUrGrUrGrGrUrUrUrUrArGrArGrCrUrArGrArArArUrArGrCrArArGrUrUr | 24598 |
| | SpCas9- | ArArArArUrArArGrGrCrUrArGrUrCrCrGrUrUrArUrCrArArCrUrUrGrArArArArArGrUrGrGrCrArCrCrGrArGrUrCrGrGrU | |
| | NG_SpRY_ | rGrCrUrUrUrCrUrCrGrUrCrGrArUrGrGrUrCrArGrCrArCrArGrCrCrU*mU*mA*mU | |
| | ED15-_ | | |
| | 5FE_PB8 | | |
| 530 | A1AT_ | mA*mG*mG*rCrCrGrUrGrCrArUrArArGrGrCrUrGrUrGrGrUrUrUrUrArGrArGrCrUrArGrArArArUrArGrCrArArGrUrUr | 24599 |
| | SpCas9- | ArArArArUrArArGrGrCrUrArGrUrCrCrGrUrUrArUrCrArArCrUrUrGrArArArArArGrUrGrGrCrArCrCrGrArGrUrCrGrGrU | |
| | NG_SpRY_ | rGrCrUrCrUrCrGrUrCrGrArUrGrGrUrCrArGrCrArCrArGrCrCrUrUrArUrGrCrArCrGrG*mC*mC*mU | |
| | ED15-_ | | |
| | 3FE_PB17 | | |
| 531 | A1AT_ | mA*mG*mG*rCrCrGrUrGrCrArUrArArGrGrCrUrGrUrGrGrUrUrUrUrArGrArGrCrUrArGrArArArUrArGrCrArArGrUrUr | 24600 |
| | SpCas9- | ArArArArUrArArGrGrCrUrArGrUrCrCrGrUrUrArUrCrArArCrUrUrGrArArArArArGrUrGrGrCrArCrCrGrArGrUrCrGrGrU | |
| | NG_SpRY_ | rGrCrUrCrUrCrGrUrCrGrArUrGrGrUrCrArGrCrArCrArGrCrCrUrUrArUrGrCrArCrG*mG*mC*mC | |
| | ED15-_ | | |
| | 3FE_PB16 | | |
| 532 | A1AT_ | mA*mG*mG*rCrCrGrUrGrCrArUrArArGrGrCrUrGrUrGrGrUrUrUrUrArGrArGrCrUrArGrArArArUrArGrCrArArGrUrUr | 24601 |
| | SpCas9- | ArArArArUrArArGrGrCrUrArGrUrCrCrGrUrUrArUrCrArArCrUrUrGrArArArArArGrUrGrGrCrArCrCrGrArGrUrCrGrGrU | |
| | NG_SpRY_ | rGrCrUrCrUrCrGrUrCrGrArUrGrGrUrCrArGrCrArCrArGrCrCrUrUrArUrGrCrArC*mG*mG*mC | |
| | ED15-_ | | |
| | 3FE_PB15 | | |
| 533 | A1AT_ | mA*mG*mG*rCrCrGrUrGrCrArUrArArGrGrCrUrGrUrGrGrUrUrUrUrArGrArGrCrUrArGrArArArUrArGrCrArArGrUrUr | 24602 |
| | SpCas9- | ArArArArUrArArGrGrCrUrArGrUrCrCrGrUrUrArUrCrArArCrUrUrGrArArArArArGrUrGrGrCrArCrCrGrArGrUrCrGrGrU | |
| | NG_SpRY_ | rGrCrUrCrUrCrGrUrCrGrArUrGrGrUrCrArGrCrArCrArGrCrCrUrUrArUrGrCrA*mC*mG*mG | |
| | ED15-_ | | |
| | 3FE_PB14 | | |
| 534 | A1AT_ | mA*mG*mG*rCrCrGrUrGrCrArUrArArGrGrCrUrGrUrGrGrUrUrUrUrArGrArGrCrUrArGrArArArUrArGrCrArArGrUrUr | 24603 |
| | SpCas9- | ArArArArUrArArGrGrCrUrArGrUrCrCrGrUrUrArUrCrArArCrUrUrGrArArArArArGrUrGrGrCrArCrCrGrArGrUrCrGrGrU | |
| | NG_SpRY_ | rGrCrUrCrUrCrGrUrCrGrArUrGrGrUrCrArGrCrArCrArGrCrCrUrUrArUrGrC*mA*mC*mG | |
| | ED15-_ | | |
| | 3FE_PB13 | | |
| 535 | A1AT_ | mA*mG*mG*rCrCrGrUrGrCrArUrArArGrGrCrUrGrUrGrGrUrUrUrUrArGrArGrCrUrArGrArArArUrArGrCrArArGrUrUr | 24604 |
| | SpCas9- | ArArArArUrArArGrGrCrUrArGrUrCrCrGrUrUrArUrCrArArCrUrUrGrArArArArArGrUrGrGrCrArCrCrGrArGrUrCrGrGrU | |
| | NG_SpRY_ | rGrCrUrCrUrCrGrUrCrGrArUrGrGrUrCrArGrCrArCrArGrCrCrUrUrArUrG*mC*mA*mC | |
| | ED15-_ | | |
| | 3FE_PB12 | | |
| 536 | A1AT_ | mA*mG*mG*rCrCrGrUrGrCrArUrArArGrGrCrUrGrUrGrGrUrUrUrUrArGrArGrCrUrArGrArArArUrArGrCrArArGrUrUr | 24605 |
| | SpCas9- | ArArArArUrArArGrGrCrUrArGrUrCrCrGrUrUrArUrCrArArCrUrUrGrArArArArArGrUrGrGrCrArCrCrGrArGrUrCrGrGrU | |
| | NG_SpRY_ | rGrCrUrCrUrCrGrUrCrGrArUrGrGrUrCrArGrCrArCrArGrCrCrUrUrArU*mG*mC*mA | |
| | ED15-_ | | |
| | 3FE_PB11 | | |
| 537 | A1AT_ | mA*mG*mG*rCrCrGrUrGrCrArUrArArGrGrCrUrGrUrGrGrUrUrUrUrArGrArGrCrUrArGrArArArUrArGrCrArArGrUrUr | 24606 |
| | SpCas9- | ArArArArUrArArGrGrCrUrArGrUrCrCrGrUrUrArUrCrArArCrUrUrGrArArArArArGrUrGrGrCrArCrCrGrArGrUrCrGrGrU | |
| | NG_SpRY_ | rGrCrUrCrUrCrGrUrCrGrArUrGrGrUrCrArGrCrArCrArGrCrCrUrUrA*mU*mG*mC | |
| | ED15-_ | | |
| | 3FE_PB10 | | |
| 538 | A1AT_ | mA*mG*mG*rCrCrGrUrGrCrArUrArArGrGrCrUrGrUrGrGrUrUrUrUrArGrArGrCrUrArGrArArArUrArGrCrArArGrUrUr | 24607 |
| | SpCas9- | ArArArArUrArArGrGrCrUrArGrUrCrCrGrUrUrArUrCrArArCrUrUrGrArArArArArGrUrGrGrCrArCrCrGrArGrUrCrGrGrU | |
| | NG_SpRY_ | rGrCrUrCrUrCrGrUrCrGrArUrGrGrUrCrArGrCrArCrArGrCrCrUrU*mA*mU*mG | |
| | ED15-_ | | |
| | 3FE_PB9 | | |
| 539 | A1AT_ | mA*mG*mG*rCrCrGrUrGrCrArUrArArGrGrCrUrGrUrGrGrUrUrUrUrArGrArGrCrUrArGrArArArUrArGrCrArArGrUrUr | 24608 |
| | SpCas9- | ArArArArUrArArGrGrCrUrArGrUrCrCrGrUrUrArUrCrArArCrUrUrGrArArArArArGrUrGrGrCrArCrCrGrArGrUrCrGrGrU | |
| | NG_SpRY_ | rGrCrUrCrUrCrGrUrCrGrArUrGrGrUrCrArGrCrArCrArGrCrCrU*mU*mA*mU | |
| | ED15-_ | | |
| | 3FE_PB8 | | |
| 540 | A1AT_Nme2_ | mU*mC*mC*rArGrGrCrCrGrUrGrCrArUrArArGrGrCrUrGrUrGrGrUrUrGrUrArGrCrUrCrCrCrGrArArArCrGrUrUrGrCrU | 24609 |
| | ED15-_ | rArCrArArUrArArGrGrCrCrGrUrCrUrGrArArArArGrArUrGrUrGrCrCrGrCrArArCrGrCrUrCrUrGrCrCrCrCrUrUrArArArG | |
| | G_30FE_ | rCrUrUrCrUrGrCrUrUrUrArArGrGrGrGrCrArUrCrGrUrUrArCrArUrGrGrCrCrCrCrArGrCrArGrCrUrUrCrArGrUrCrCrCrU | |
| | PB17 | rUrUrCrUrCrGrUrCrGrArUrGrGrUrCrArGrCrArCrArGrCrCrUrUrArUrGrCrArCrGrG*mC*mC*mU | |
| 541 | A1AT_Nme2_ | mU*mC*mC*rArGrGrCrCrGrUrGrCrArUrArArGrGrCrUrGrUrGrGrUrUrGrUrArGrCrUrCrCrCrGrArArArCrGrUrUrGrCrU | 24610 |
| | ED15-_ | rArCrArArUrArArGrGrCrCrGrUrCrUrGrArArArArGrArUrGrUrGrCrCrGrCrArArCrGrCrUrCrUrGrCrCrCrCrUrUrArArArG | |
| | G_30FE_ | rCrUrUrCrUrGrCrUrUrUrArArGrGrGrGrCrArUrCrGrUrUrArCrArUrGrGrCrCrCrCrArGrCrArGrCrUrUrCrArGrUrCrCrCrU | |
| | PB16 | rUrUrCrUrCrGrUrCrGrArUrGrGrUrCrArGrCrArCrArGrCrCrUrUrArUrGrCrArCrG*mG*mC*mC | |
| 542 | A1AT_Nme2_ | mU*mC*mC*rArGrGrCrCrGrUrGrCrArUrArArGrGrCrUrGrUrGrGrUrUrGrUrArGrCrUrCrCrCrGrArArArCrGrUrUrGrCrU | 24611 |
| | ED15-_ | ArCrArArUrArArGrGrCrCrGrUrCrUrGrArArArArGrArUrGrUrGrCrCrGrCrArArCrGrCrUrCrUrGrCrCrCrCrUrUrArArArG | |
| | G_30FE_ | rCrUrUrCrUrGrCrUrUrUrArArGrGrGrGrCrArUrCrGrUrUrArCrArUrGrGrCrCrCrCrArGrCrArGrCrUrUrCrArGrUrCrCrCrU | |
| | PB15 | rUrUrCrUrCrGrUrCrGrArUrGrGrUrCrArGrCrArCrArGrCrCrUrUrArUrGrCrArC*mG*mG*mC | |
| 543 | A1AT_Nme2_ | mU*mC*mC*rArGrGrCrCrGrUrGrCrArUrArArGrGrCrUrGrUrGrGrUrUrGrUrArGrCrUrCrCrCrGrArArArCrGrUrUrGrCrU | 24612 |
| | ED15-_ | rArCrArArUrArArGrGrCrCrGrUrCrUrGrArArArArGrArUrGrUrGrCrCrGrCrArArCrGrCrUrCrUrGrCrCrCrCrUrUrArArArG | |
| | G_30FE_ | rCrUrUrCrUrGrCrUrUrUrArArGrGrGrGrCrArUrCrGrUrUrArCrArUrGrGrCrCrCrCrArGrCrArGrCrUrUrCrArGrUrCrCrCrU | |
| | PB14 | rUrUrCrUrCrGrUrCrGrArUrGrGrUrCrArGrCrArCrArGrCrCrUrUrArUrGrCrA*mC*mG*mG | |
| 544 | A1AT_Nme2_ | mU*mC*mC*rArGrGrCrCrGrUrGrCrArUrArArGrGrCrUrGrUrGrGrUrUrGrUrArGrCrUrCrCrCrGrArArArCrGrUrUrGrCrU | 24613 |
| | ED15-_ | rArCrArArUrArArGrGrCrCrGrUrCrUrGrArArArArGrArUrGrUrGrCrCrGrCrArArCrGrCrUrCrUrGrCrCrCrCrUrUrArArArG | |
| | G_30FE_ | rCrUrUrCrUrGrCrUrUrUrArArGrGrGrGrCrArUrCrGrUrUrArCrArUrGrGrCrCrCrCrArGrCrArGrCrUrUrCrArGrUrCrCrCrU | |
| | PB13 | rUrUrCrUrCrGrUrCrGrArUrGrGrUrCrArGrCrArCrArGrCrCrUrUrArUrGrC*mA*mC*mG | |
| 545 | A1AT_Nme2_ | mU*mC*mC*rArGrGrCrCrGrUrGrCrArUrArArGrGrCrUrGrUrGrGrUrUrGrUrArGrCrUrCrCrCrGrArArArCrGrUrUrGrCrU | 24614 |
| | ED15-_ | rArCrArArUrArArGrGrCrCrGrUrCrUrGrArArArArGrArUrGrUrGrCrCrGrCrArArCrGrCrUrCrUrGrCrCrCrCrUrUrArArArG | |
| | G_30FE_ | rCrUrUrCrUrGrCrUrUrUrArArGrGrGrGrCrArUrCrGrUrUrArCrArUrGrGrCrCrCrCrArGrCrArGrCrUrUrCrArGrUrCrCrCrU | |
| | PB12 | rUrUrCrUrCrGrUrCrGrArUrGrGrUrCrArGrCrArCrArGrCrCrUrUrArUrG*mC*mA*mC | |
| 546 | A1AT_Nme2_ | mU*mC*mC*rArGrGrCrCrGrUrGrCrArUrArArGrGrCrUrGrUrGrGrUrUrGrUrArGrCrUrCrCrCrGrArArArCrGrUrUrGrCrU | 24615 |
| | ED15-_ | rArCrArArUrArArGrGrCrCrGrUrCrUrGrArArArArGrArUrGrUrGrCrCrGrCrArArCrGrCrUrCrUrGrCrCrCrCrUrUrArArArG | |
| | G_30FE_ | rCrUrUrCrUrGrCrUrUrUrArArGrGrGrGrCrArUrCrGrUrUrArCrArUrGrGrCrCrCrCrArGrCrArGrCrUrUrCrArGrUrCrCrCrU | |
| | PB11 | rUrUrCrUrCrGrUrCrGrArUrGrGrUrCrArGrCrArCrArGrCrCrUrUrArU*mG*mC*mA | |
| 547 | A1AT_Nme2_ | mU*mC*mC*rArGrGrCrCrGrUrGrCrArUrArArGrGrCrUrGrUrGrGrUrUrGrUrArGrCrUrCrCrCrGrArArArCrGrUrUrGrCrU | 24616 |
| | ED15-_ | rArCrArArUrArArGrGrCrCrGrUrCrUrGrArArArArGrArUrGrUrGrCrCrGrCrArArCrGrCrUrCrUrGrCrCrCrCrUrUrArArArG | |
| | G_30FE_ | rCrUrUrCrUrGrCrUrUrUrArArGrGrGrGrCrArUrCrGrUrUrArCrArUrGrGrCrCrCrCrArGrCrArGrCrUrUrCrArGrUrCrCrCrU | |
| | PB10 | rUrUrCrUrCrGrUrCrGrArUrGrGrUrCrArGrCrArCrArGrCrCrUrUrA*mU*mG*mC | |
| 548 | A1AT_Nme2_ | mU*mC*mC*rArGrGrCrCrGrUrGrCrArUrArArGrGrCrUrGrUrGrGrUrUrGrUrArGrCrUrCrCrCrGrArArArCrGrUrUrGrCrU | 24617 |
| | ED15-_ | rArCrArArUrArArGrGrCrCrGrUrCrUrGrArArArArGrArUrGrUrGrCrCrGrCrArArCrGrCrUrCrUrGrCrCrCrCrUrUrArArArG | |
| | G_30FE_ | rCrUrUrCrUrGrCrUrUrUrArArGrGrGrGrCrArUrCrGrUrUrArCrArUrGrGrCrCrCrCrArGrCrArGrCrUrUrCrArGrUrCrCrCrU | |
| | PB9 | rUrUrCrUrCrGrUrCrGrArUrGrGrUrCrArGrCrArCrArGrCrCrUrU*mA*mU*mG | |
| 549 | A1AT_Nme2_ | mU*mC*mC*rArGrGrCrCrGrUrGrCrArUrArArGrGrCrUrGrUrGrGrUrUrGrUrArGrCrUrCrCrCrGrArArArCrGrUrUrGrCrU | 24618 |
| | ED15-_ | rArCrArArUrArArGrGrCrCrGrUrCrUrGrArArArArGrArUrGrUrGrCrCrGrCrArArCrGrCrUrCrUrGrCrCrCrCrUrUrArArArG | |
| | G_30FE_ | rCrUrUrCrUrGrCrUrUrUrArArGrGrGrGrCrArUrCrGrUrUrArCrArUrGrGrCrCrCrCrArGrCrArGrCrUrUrCrArGrUrCrCrCrU | |
| | PB8 | rUrUrCrUrCrGrUrCrGrArUrGrGrUrCrArGrCrArCrArGrCrCrU*mU*mA*mU | |
| 550 | A1AT_Nme2_ | mU*mC*mC*rArGrGrCrCrGrUrGrCrArUrArArGrGrCrUrGrUrGrGrUrUrGrUrArGrCrUrCrCrCrGrArArArCrGrUrUrGrCrU | 24619 |
| | ED15-_ | rArCrArArUrArArGrGrCrCrGrUrCrUrGrArArArArGrArUrGrUrGrCrCrGrCrArArCrGrCrUrCrUrGrCrCrCrCrUrUrArArArG | |
| | G_25FE_ | rCrUrUrCrUrGrCrUrUrUrArArGrGrGrGrCrArUrCrGrUrUrGrCrCrCrCrArGrCrArGrCrUrUrCrArGrUrCrCrCrUrUrUrCrUrC | |
| | PB17 | rGrUrCrGrArUrGrGrUrCrArGrCrArCrArGrCrCrUrUrArUrGrCrArCrGrG*mC*mC*mU | |
| 551 | A1AT_Nme2_ | mU*mC*mC*rArGrGrCrCrGrUrGrCrArUrArArGrGrCrUrGrUrGrGrUrUrGrUrArGrCrUrCrCrCrGrArArArCrGrUrUrGrCrU | 24620 |
| | ED15-_ | rArCrArArUrArArGrGrCrCrGrUrCrUrGrArArArArGrArUrGrUrGrCrCrGrCrArArCrGrCrUrCrUrGrCrCrCrCrUrUrArArArG | |
| | G_25FE_ | rCrUrUrCrUrGrCrUrUrUrArArGrGrGrGrCrArUrCrGrUrUrGrCrCrCrCrArGrCrArGrCrUrUrCrArGrUrCrCrCrUrUrUrCrUrC | |
| | PB16 | rGrUrCrGrArUrGrGrUrCrArGrCrArCrArGrCrCrUrUrArUrGrCrArCrG*mG*mC*mC | |
| 552 | A1AT_Nme2_ | mU*mC*mC*ArGrGrCrCrGrUrGrCrArUrArArGrGrCrUrGrUrGrGrUrUrGrUrArGrCrUrCrCrCrGrArArArCrGrUrUrGrCrU | 24621 |
| | ED15-_ | rArCrArArUrArArGrGrCrCrGrUrCrUrGrArArArArGrArUrGrUrGrCrCrGrCrArArCrGrCrUrCrUrGrCrCrCrCrUrUrArArArG | |
| | G_25FE_ | rCrUrUrCrUrGrCrUrUrUrArArGrGrGrGrCrArUrCrGrUrUrGrCrCrCrCrArGrCrArGrCrUrUrCrArGrUrCrCrCrUrUrUrCrUrC | |
| | PB15 | rGrUrCrGrArUrGrGrUrCrArGrCrArCrArGrCrCrUrUrArUrGrCrArC*mG*mG*mC | |
| 553 | A1AT_Nme2_ | mU*mC*mC*rArGrGrCrCrGrUrGrCrArUrArArGrGrCrUrGrUrGrGrUrUrGrUrArGrCrUrCrCrCrGrArArArCrGrUrUrGrCrU | 24622 |
| | ED15-_ | rArCrArArUrArArGrGrCrCrGrUrCrUrGrArArArArGrArUrGrUrGrCrCrGrCrArArCrGrCrUrCrUrGrCrCrCrCrUrUrArArArG | |
| | G_25FE_ | rCrUrUrCrUrGrCrUrUrUrArArGrGrGrGrCrArUrCrGrUrUrGrCrCrCrCrArGrCrArGrCrUrUrCrArGrUrCrCrCrUrUrUrCrUrC | |
| | PB14 | rGrUrCrGrArUrGrGrUrCrArGrCrArCrArGrCrCrUrUrArUrGrCrA*mC*mG*mG | |
| 554 | A1AT_Nme2_ | mU*mC*mC*rArGrGrCrCrGrUrGrCrArUrArArGrGrCrUrGrUrGrGrUrUrGrUrArGrCrUrCrCrCrGrArArArCrGrUrUrGrCrU | 24623 |
| | ED15-_ | rArCrArArUrArArGrGrCrCrGrUrCrUrGrArArArArGrArUrGrUrGrCrCrGrCrArArCrGrCrUrCrUrGrCrCrCrCrUrUrArArArG | |
| | G_25FE_ | rCrUrUrCrUrGrCrUrUrUrArArGrGrGrGrCrArUrCrGrUrUrGrCrCrCrCrArGrCrArGrCrUrUrCrArGrUrCrCrCrUrUrUrCrUrC | |
| | PB13 | rGrUrCrGrArUrGrGrUrCrArGrCrArCrArGrCrCrUrUrArUrGrC*mA*mC*mG | |
| 555 | A1AT_Nme2_ | mU*mC*mC*rArGrGrCrCrGrUrGrCrArUrArArGrGrCrUrGrUrGrGrUrUrGrUrArGrCrUrCrCrCrGrArArArCrGrUrUrGrCrU | 24624 |
| | ED15-_ | rArCrArArUrArArGrGrCrCrGrUrCrUrGrArArArArGrArUrGrUrGrCrCrGrCrArArCrGrCrUrCrUrGrCrCrCrCrUrUrArArArG | |
| | G_25FE_ | rCrUrUrCrUrGrCrUrUrUrArArGrGrGrGrCrArUrCrGrUrUrGrCrCrCrCrArGrCrArGrCrUrUrCrArGrUrCrCrCrUrUrUrCrUrC | |
| | PB12 | rGrUrCrGrArUrGrGrUrCrArGrCrArCrArGrCrCrUrUrArUrG*mC*mA*mC | |
| 556 | A1AT_Nme2_ | mU*mC*mC*rArGrGrCrCrGrUrGrCrArUrArArGrGrCrUrGrUrGrGrUrUrGrUrArGrCrUrCrCrCrGrArArArCrGrUrUrGrCrU | 24625 |
| | ED15-_ | rArCrArArUrArArGrGrCrCrGrUrCrUrGrArArArArGrArUrGrUrGrCrCrGrCrArArCrGrCrUrCrUrGrCrCrCrCrUrUrArArArG | |
| | G_25FE_ | rCrUrUrCrUrGrCrUrUrUrArArGrGrGrGrCrArUrCrGrUrUrGrCrCrCrCrArGrCrArGrCrUrUrCrArGrUrCrCrCrUrUrUrCrUrC | |
| | PB11 | rGrUrCrGrArUrGrGrUrCrArGrCrArCrArGrCrCrUrUrArU*mG*mC*mA | |
| 557 | A1AT_Nme2_ | mU*mC*mC*rArGrGrCrCrGrUrGrCrArUrArArGrGrCrUrGrUrGrGrUrUrGrUrArGrCrUrCrCrCrGrArArArCrGrUrUrGrCrU | 24626 |
| | ED15-_ | rArCrArArUrArArGrGrCrCrGrUrCrUrGrArArArArGrArUrGrUrGrCrCrGrCrArArCrGrCrUrCrUrGrCrCrCrCrUrUrArArArG | |
| | G_25FE_ | rCrUrUrCrUrGrCrUrUrUrArArGrGrGrGrCrArUrCrGrUrUrGrCrCrCrCrArGrCrArGrCrUrUrCrArGrUrCrCrCrUrUrUrCrUrC | |
| | PB10 | rGrUrCrGrArUrGrGrUrCrArGrCrArCrArGrCrCrUrUrA*mU*mG*mC | |
| 558 | A1AT_Nme2_ | mU*mC*mC*rArGrGrCrCrGrUrGrCrArUrArArGrGrCrUrGrUrGrGrUrUrGrUrArGrCrUrCrCrCrGrArArArCrGrUrUrGrCrU | 24627 |
| | ED15-_ | rArCrArArUrArArGrGrCrCrGrUrCrUrGrArArArArGrArUrGrUrGrCrCrGrCrArArCrGrCrUrCrUrGrCrCrCrCrUrUrArArArG | |
| | G_25FE_ | rCrUrUrCrUrGrCrUrUrUrArArGrGrGrGrCrArUrCrGrUrUrGrCrCrCrCrArGrCrArGrCrUrUrCrArGrUrCrCrCrUrUrUrCrUrC | |
| | PB9 | rGrUrCrGrArUrGrGrUrCrArGrCrArCrArGrCrCrUrU*mA*mU*mG | |
| 559 | A1AT_Nme2_ | mU*mC*mC*rArGrGrCrCrGrUrGrCrArUrArArGrGrCrUrGrUrGrGrUrUrGrUrArGrCrUrCrCrCrGrArArArCrGrUrUrGrCrU | 24628 |
| | ED15-_ | rArCrArArUrArArGrGrCrCrGrUrCrUrGrArArArArGrArUrGrUrGrCrCrGrCrArArCrGrCrUrCrUrGrCrCrCrCrUrUrArArArG | |
| | G_25FE_ | rCrUrUrCrUrGrCrUrUrUrArArGrGrGrGrCrArUrCrGrUrUrGrCrCrCrCrArGrCrArGrCrUrUrCrArGrUrCrCrCrUrUrUrCrUrC | |
| | PB8 | rGrUrCrGrArUrGrGrUrCrArGrCrArCrArGrCrCrU*mU*mA*mU | |
| 560 | A1AT_Nme2_ | mU*mC*mC*rArGrGrCrCrGrUrGrCrArUrArArGrGrCrUrGrUrGrGrUrUrGrUrArGrCrUrCrCrCrGrArArArCrGrUrUrGrCrU | 24629 |
| | ED15-_ | rArCrArArUrArArGrGrCrCrGrUrCrUrGrArArArArGrArUrGrUrGrCrCrGrCrArArCrGrCrUrCrUrGrCrCrCrCrUrUrArArArG | |
| | G_20FE_ | rCrUrUrCrUrGrCrUrUrUrArArGrGrGrGrCrArUrCrGrUrUrArGrCrArGrCrUrUrCrArGrUrCrCrCrUrUrUrCrUrCrGrUrCrGrA | |
| | PB17 | rUrGrGrUrCrArGrCrArCrArGrCrCrUrUrArUrGrCrArCrGrG*mC*mC*mU | |
| 561 | A1AT_Nme2_ | mU*mC*mC*rArGrGrCrCrGrUrGrCrArUrArArGrGrCrUrGrUrGrGrUrUrGrUrArGrCrUrCrCrCrGrArArArCrGrUrUrGrCrU | 24630 |
| | ED15-_ | rArCrArArUrArArGrGrCrCrGrUrCrUrGrArArArArGrArUrGrUrGrCrCrGrCrArArCrGrCrUrCrUrGrCrCrCrCrUrUrArArArG | |
| | G_20FE_ | rCrUrUrCrUrGrCrUrUrUrArArGrGrGrGrCrArUrCrGrUrUrArGrCrArGrCrUrUrCrArGrUrCrCrCrUrUrUrCrUrCrGrUrCrGrA | |
| | PB16 | rUrGrGrUrCrArGrCrArCrArGrCrCrUrUrArUrGrCrArCrG*mG*mC*mC | |
| 562 | A1AT_Nme2_ | mU*mC*mC*rArGrGrCrCrGrUrGrCrArUrArArGrGrCrUrGrUrGrGrUrUrGrUrArGrCrUrCrCrCrGrArArArCrGrUrUrGrCrU | 24631 |
| | ED15-_ | rArCrArArUrArArGrGrCrCrGrUrCrUrGrArArArArGrArUrGrUrGrCrCrGrCrArArCrGrCrUrCrUrGrCrCrCrCrUrUrArArArG | |
| | G_20FE_ | rCrUrUrCrUrGrCrUrUrUrArArGrGrGrGrCrArUrCrGrUrUrArGrCrArGrCrUrUrCrArGrUrCrCrCrUrUrUrCrUrCrGrUrCrGrA | |
| | PB15 | rUrGrGrUrCrArGrCrArCrArGrCrCrUrUrArUrGrCrArC*mG*mG*mC | |
| 563 | A1AT_Nme2_ | mU*mC*mC*rArGrGrCrCrGrUrGrCrArUrArArGrGrCrUrGrUrGrGrUrUrGrUrArGrCrUrCrCrCrGrArArArCrGrUrUrGrCrU | 24632 |
| | ED15-_ | rArCrArArUrArArGrGrCrCrGrUrCrUrGrArArArArGrArUrGrUrGrCrCrGrCrArArCrGrCrUrCrUrGrCrCrCrCrUrUrArArArG | |
| | G_20FE_ | rCrUrUrCrUrGrCrUrUrUrArArGrGrGrGrCrArUrCrGrUrUrArGrCrArGrCrUrUrCrArGrUrCrCrCrUrUrUrCrUrCrGrUrCrGrA | |
| | PB14 | rUrGrGrUrCrArGrCrArCrArGrCrCrUrUrArUrGrCrA*mC*mG*mG | |
| 564 | A1AT_Nme2_ | mU*mC*mC*rArGrGrCrCrGrUrGrCrArUrArArGrGrCrUrGrUrGrGrUrUrGrUrArGrCrUrCrCrCrGrArArArCrGrUrUrGrCrU | 24633 |
| | ED15-_ | rArCrArArUrArArGrGrCrCrGrUrCrUrGrArArArArGrArUrGrUrGrCrCrGrCrArArCrGrCrUrCrUrGrCrCrCrCrUrUrArArArG | |
| | G_20FE_ | rCrUrUrCrUrGrCrUrUrUrArArGrGrGrGrCrArUrCrGrUrUrArGrCrArGrCrUrUrCrArGrUrCrCrCrUrUrUrCrUrCrGrUrCrGrA | |
| | PB13 | rUrGrGrUrCrArGrCrArCrArGrCrCrUrUrArUrGrC*mA*mC*mG | |
| 565 | A1AT_Nme2_ | mU*mC*mC*rArGrGrCrCrGrUrGrCrArUrArArGrGrCrUrGrUrGrGrUrUrGrUrArGrCrUrCrCrCrGrArArArCrGrUrUrGrCrU | 24634 |
| | ED15-_ | rArCrArArUrArArGrGrCrCrGrUrCrUrGrArArArArGrArUrGrUrGrCrCrGrCrArArCrGrCrUrCrUrGrCrCrCrCrUrUrArArArG | |
| | G_20FE_ | rCrUrUrCrUrGrCrUrUrUrArArGrGrGrGrCrArUrCrGrUrUrArGrCrArGrCrUrUrCrArGrUrCrCrCrUrUrUrCrUrCrGrUrCrGrA | |
| | PB12 | rUrGrGrUrCrArGrCrArCrArGrCrCrUrUrArUrG*mC*mA*mC | |
| 566 | A1AT_Nme2_ | mU*mC*mC*rArGrGrCrCrGrUrGrCrArUrArArGrGrCrUrGrUrGrGrUrUrGrUrArGrCrUrCrCrCrGrArArArCrGrUrUrGrCrU | 24635 |
| | ED15-_ | rArCrArArUrArArGrGrCrCrGrUrCrUrGrArArArArGrArUrGrUrGrCrCrGrCrArArCrGrCrUrCrUrGrCrCrCrCrUrUrArArArG | |
| | G_20FE_ | rCrUrUrCrUrGrCrUrUrUrArArGrGrGrGrCrArUrCrGrUrUrArGrCrArGrCrUrUrCrArGrUrCrCrCrUrUrUrCrUrCrGrUrCrGrA | |
| | PB11 | rUrGrGrUrCrArGrCrArCrArGrCrCrUrUrArU*mG*mC*mA | |
| 567 | A1AT_Nme2_ | mU*mC*mC*rArGrGrCrCrGrUrGrCrArUrArArGrGrCrUrGrUrGrGrUrUrGrUrArGrCrUrCrCrCrGrArArArCrGrUrUrGrCrU | 24636 |
| | ED15-_ | rArCrArArUrArArGrGrCrCrGrUrCrUrGrArArArArGrArUrGrUrGrCrCrGrCrArArCrGrCrUrCrUrGrCrCrCrCrUrUrArArArG | |
| | G_20FE_ | rCrUrUrCrUrGrCrUrUrUrArArGrGrGrGrCrArUrCrGrUrUrArGrCrArGrCrUrUrCrArGrUrCrCrCrUrUrUrCrUrCrGrUrCrGrA | |
| | PB10 | rUrGrGrUrCrArGrCrArCrArGrCrCrUrUrA*mU*mG*mC | |
| 568 | A1AT_Nme2_ | mU*mC*mC*rArGrGrCrCrGrUrGrCrArUrArArGrGrCrUrGrUrGrGrUrUrGrUrArGrCrUrCrCrCrGrArArArCrGrUrUrGrCrU | 24637 |
| | ED15-_ | rArCrArArUrArArGrGrCrCrGrUrCrUrGrArArArArGrArUrGrUrGrCrCrGrCrArArCrGrCrUrCrUrGrCrCrCrCrUrUrArArArG | |
| | G_20FE_ | rCrUrUrCrUrGrCrUrUrUrArArGrGrGrGrCrArUrCrGrUrUrArGrCrArGrCrUrUrCrArGrUrCrCrCrUrUrUrCrUrCrGrUrCrGrA | |
| | PB9 | rUrGrGrUrCrArGrCrArCrArGrCrCrUrU*mA*mU*mG | |
| 569 | A1AT_Nme2_ | mU*mC*mC*rArGrGrCrCrGrUrGrCrArUrArArGrGrCrUrGrUrGrGrUrUrGrUrArGrCrUrCrCrCrGrArArArCrGrUrUrGrCrU | 24638 |
| | ED15-_ | rArCrArArUrArArGrGrCrCrGrUrCrUrGrArArArArGrArUrGrUrGrCrCrGrCrArArCrGrCrUrCrUrGrCrCrCrCrUrUrArArArG | |
| | G_20FE_ | rCrUrUrCrUrGrCrUrUrUrArArGrGrGrGrCrArUrCrGrUrUrArGrCrArGrCrUrUrCrArGrUrCrCrCrUrUrUrCrUrCrGrUrCrGrA | |
| | PB8 | rUrGrGrUrCrArGrCrArCrArGrCrCrU*mU*mA*mU | |
| 570 | A1AT_Nme2_ | mU*mC*mC*rArGrGrCrCrGrUrGrCrArUrArArGrGrCrUrGrUrGrGrUrUrGrUrArGrCrUrCrCrCrGrArArArCrGrUrUrGrCrU | 24639 |
| | ED15-_ | rArCrArArUrArArGrGrCrCrGrUrCrUrGrArArArArGrArUrGrUrGrCrCrGrCrArArCrGrCrUrCrUrGrCrCrCrCrUrUrArArArG | |
| | G_14FE_ | rCrUrUrCrUrGrCrUrUrUrArArGrGrGrGrCrArUrCrGrUrUrUrUrCrArGrUrCrCrCrUrUrUrCrUrCrGrUrCrGrArUrGrGrUrCr | |
| | PB17 | ArGrCrArCrArGrCrCrUrUrArUrGrCrArCrGrG*mC*mC*mU | |
| 571 | A1AT_Nme2_ | mU*mC*mC*rArGrGrCrCrGrUrGrCrArUrArArGrGrCrUrGrUrGrGrUrUrGrUrArGrCrUrCrCrCrGrArArArCrGrUrUrGrCrU | 24640 |
| | ED15-_ | rArCrArArUrArArGrGrCrCrGrUrCrUrGrArArArArGrArUrGrUrGrCrCrGrCrArArCrGrCrUrCrUrGrCrCrCrCrUrUrArArArG | |
| | G_14FE_ | rCrUrUrCrUrGrCrUrUrUrArArGrGrGrGrCrArUrCrGrUrUrUrUrCrArGrUrCrCrCrUrUrUrCrUrCrGrUrCrGrArUrGrGrUrCr | |
| | PB16 | ArGrCrArCrArGrCrCrUrUrArUrGrCrArCrG*mG*mC*mC | |
| 572 | A1AT_Nme2_ | mU*mC*mC*rArGrGrCrCrGrUrGrCrArUrArArGrGrCrUrGrUrGrGrUrUrGrUrArGrCrUrCrCrCrGrArArArCrGrUrUrGrCrU | 24641 |
| | ED15-_ | rArCrArArUrArArGrGrCrCrGrUrCrUrGrArArArArGrArUrGrUrGrCrCrGrCrArArCrGrCrUrCrUrGrCrCrCrCrUrUrArArArG | |
| | G_14FE_ | rCrUrUrCrUrGrCrUrUrUrArArGrGrGrGrCrArUrCrGrUrUrUrUrCrArGrUrCrCrCrUrUrUrCrUrCrGrUrCrGrArUrGrGrUrCr | |
| | PB15 | ArGrCrArCrArGrCrCrUrUrArUrGrCrArC*mG*mG*mC | |
| 573 | A1AT_Nme2_ | mU*mC*mC*rArGrGrCrCrGrUrGrCrArUrArArGrGrCrUrGrUrGrGrUrUrGrUrArGrCrUrCrCrCrGrArArArCrGrUrUrGrCrU | 24642 |
| | ED15-_ | rArCrArArUrArArGrGrCrCrGrUrCrUrGrArArArArGrArUrGrUrGrCrCrGrCrArArCrGrCrUrCrUrGrCrCrCrCrUrUrArArArG | |
| | G_14FE_ | rCrUrUrCrUrGrCrUrUrUrArArGrGrGrGrCrArUrCrGrUrUrUrUrCrArGrUrCrCrCrUrUrUrCrUrCrGrUrCrGrArUrGrGrUrCr | |
| | PB14 | ArGrCrArCrArGrCrCrUrUrArUrGrCrA*mC*mG*mG | |
| 574 | A1AT_Nme2_ | mU*mC*mC*rArGrGrCrCrGrUrGrCrArUrArArGrGrCrUrGrUrGrGrUrUrGrUrArGrCrUrCrCrCrGrArArArCrGrUrUrGrCrU | 24643 |
| | ED15-_ | rArCrArArUrArArGrGrCrCrGrUrCrUrGrArArArArGrArUrGrUrGrCrCrGrCrArArCrGrCrUrCrUrGrCrCrCrCrUrUrArArArG | |
| | G_14FE_ | rCrUrUrCrUrGrCrUrUrUrArArGrGrGrGrCrArUrCrGrUrUrUrUrCrArGrUrCrCrCrUrUrUrCrUrCrGrUrCrGrArUrGrGrUrCr | |
| | PB13 | ArGrCrArCrArGrCrCrUrUrArUrGrC*mA*mC*mG | |
| 575 | A1AT_Nme2_ | mU*mC*mC*rArGrGrCrCrGrUrGrCrArUrArArGrGrCrUrGrUrGrGrUrUrGrUrArGrCrUrCrCrCrGrArArArCrGrUrUrGrCrU | 24644 |
| | ED15-_ | rArCrArArUrArArGrGrCrCrGrUrCrUrGrArArArArGrArUrGrUrGrCrCrGrCrArArCrGrCrUrCrUrGrCrCrCrCrUrUrArArArG | |
| | G_14FE_ | rCrUrUrCrUrGrCrUrUrUrArArGrGrGrGrCrArUrCrGrUrUrUrUrCrArGrUrCrCrCrUrUrUrCrUrCrGrUrCrGrArUrGrGrUrCr | |
| | PB12 | ArGrCrArCrArGrCrCrUrUrArUrG*mC*mA*mC | |
| 576 | A1AT_Nme2_ | mU*mC*mC*rArGrGrCrCrGrUrGrCrArUrArArGrGrCrUrGrUrGrGrUrUrGrUrArGrCrUrCrCrCrGrArArArCrGrUrUrGrCrU | 24645 |
| | ED15-_ | rArCrArArUrArArGrGrCrCrGrUrCrUrGrArArArArGrArUrGrUrGrCrCrGrCrArArCrGrCrUrCrUrGrCrCrCrCrUrUrArArArG | |
| | G_14FE_ | rCrUrUrCrUrGrCrUrUrUrArArGrGrGrGrCrArUrCrGrUrUrUrUrCrArGrUrCrCrCrUrUrUrCrUrCrGrUrCrGrArUrGrGrUrCr | |
| | PB11 | ArGrCrArCrArGrCrCrUrUrArU*mG*mC*mA | |
| 577 | A1AT_Nme2_ | mU*mC*mC*rArGrGrCrCrGrUrGrCrArUrArArGrGrCrUrGrUrGrGrUrUrGrUrArGrCrUrCrCrCrGrArArArCrGrUrUrGrCrU | 24646 |
| | ED15-_ | rArCrArArUrArArGrGrCrCrGrUrCrUrGrArArArArGrArUrGrUrGrCrCrGrCrArArCrGrCrUrCrUrGrCrCrCrCrUrUrArArArG | |
| | G_14FE_ | rCrUrUrCrUrGrCrUrUrUrArArGrGrGrGrCrArUrCrGrUrUrUrUrCrArGrUrCrCrCrUrUrUrCrUrCrGrUrCrGrArUrGrGrUrCr | |
| | PB10 | ArGrCrArCrArGrCrCrUrUrA*mU*mG*mC | |
| 578 | A1AT_Nme2_ | mU*mC*mC*rArGrGrCrCrGrUrGrCrArUrArArGrGrCrUrGrUrGrGrUrUrGrUrArGrCrUrCrCrCrGrArArArCrGrUrUrGrCrU | 24647 |
| | ED15-_ | rArCrArArUrArArGrGrCrCrGrUrCrUrGrArArArArGrArUrGrUrGrCrCrGrCrArArCrGrCrUrCrUrGrCrCrCrCrUrUrArArArG | |
| | G_14FE_ | rCrUrUrCrUrGrCrUrUrUrArArGrGrGrGrCrArUrCrGrUrUrUrUrCrArGrUrCrCrCrUrUrUrCrUrCrGrUrCrGrArUrGrGrUrCr | |
| | PB9 | ArGrCrArCrArGrCrCrUrU*mA*mU*mG | |
| 579 | A1AT_Nme2_ | mU*mC*mC*rArGrGrCrCrGrUrGrCrArUrArArGrGrCrUrGrUrGrGrUrUrGrUrArGrCrUrCrCrCrGrArArArCrGrUrUrGrCrU | 24648 |
| | ED15-_ | rArCrArArUrArArGrGrCrCrGrUrCrUrGrArArArArGrArUrGrUrGrCrCrGrCrArArCrGrCrUrCrUrGrCrCrCrCrUrUrArArArG | |
| | G_14FE_ | rCrUrUrCrUrGrCrUrUrUrArArGrGrGrGrCrArUrCrGrUrUrUrUrCrArGrUrCrCrCrUrUrUrCrUrCrGrUrCrGrArUrGrGrUrCr | |
| | PB8 | ArGrCrArCrArGrCrCrU*mU*mA*mU | |
| 580 | A1AT_Nme2_ | mU*mC*mC*rArGrGrCrCrGrUrGrCrArUrArArGrGrCrUrGrUrGrGrUrUrGrUrArGrCrUrCrCrCrGrArArArCrGrUrUrGrCrU | 24649 |
| | ED15-_ | rArCrArArUrArArGrGrCrCrGrUrCrUrGrArArArArGrArUrGrUrGrCrCrGrCrArArCrGrCrUrCrUrGrCrCrCrCrUrUrArArArG | |
| | G_11FE_ | rCrUrUrCrUrGrCrUrUrUrArArGrGrGrGrCrArUrCrGrUrUrArGrUrCrCrCrUrUrUrCrUrCrGrUrCrGrArUrGrGrUrCrArGrCr | |
| | PB17 | ArCrArGrCrCrUrUrArUrGrCrArCrGrG*mC*mC*mU | |
| 581 | A1AT_Nme2_ | mU*mC*mC*rArGrGrCrCrGrUrGrCrArUrArArGrGrCrUrGrUrGrGrUrUrGrUrArGrCrUrCrCrCrGrArArArCrGrUrUrGrCrU | 24650 |
| | ED15-_ | ArCrArArUrArArGrGrCrCrGrUrCrUrGrArArArArGrArUrGrUrGrCrCrGrCrArArCrGrCrUrCrUrGrCrCrCrCrUrUrArArArG | |
| | G_11FE_ | rCrUrUrCrUrGrCrUrUrUrArArGrGrGrGrCrArUrCrGrUrUrArGrUrCrCrCrUrUrUrCrUrCrGrUrCrGrArUrGrGrUrCrArGrCr | |
| | PB16 | ArCrArGrCrCrUrUrArUrGrCrArCrG*mG*mC*mC | |
| 582 | A1AT_Nme2_ | mU*mC*mC*rArGrGrCrCrGrUrGrCrArUrArArGrGrCrUrGrUrGrGrUrUrGrUrArGrCrUrCrCrCrGrArArArCrGrUrUrGrCrU | 24651 |
| | ED15-_ | rArCrArArUrArArGrGrCrCrGrUrCrUrGrArArArArGrArUrGrUrGrCrCrGrCrArArCrGrCrUrCrUrGrCrCrCrCrUrUrArArArG | |
| | G_11FE_ | rCrUrUrCrUrGrCrUrUrUrArArGrGrGrGrCrArUrCrGrUrUrArGrUrCrCrCrUrUrUrCrUrCrGrUrCrGrArUrGrGrUrCrArGrCr | |
| | PB15 | ArCrArGrCrCrUrUrArUrGrCrArC*mG*mG*mC | |
| 583 | A1AT_Nme2_ | mU*mC*mC*rArGrGrCrCrGrUrGrCrArUrArArGrGrCrUrGrUrGrGrUrUrGrUrArGrCrUrCrCrCrGrArArArCrGrUrUrGrCrU | 24652 |
| | ED15-_ | rArCrArArUrArArGrGrCrCrGrUrCrUrGrArArArArGrArUrGrUrGrCrCrGrCrArArCrGrCrUrCrUrGrCrCrCrCrUrUrArArArG | |
| | G_11FE_ | rCrUrUrCrUrGrCrUrUrUrArArGrGrGrGrCrArUrCrGrUrUrArGrUrCrCrCrUrUrUrCrUrCrGrUrCrGrArUrGrGrUrCrArGrCr | |
| | PB14 | ArCrArGrCrCrUrUrArUrGrCrA*mC*mG*mG | |
| 584 | A1AT_Nme2_ | mU*mC*mC*rArGrGrCrCrGrUrGrCrArUrArArGrGrCrUrGrUrGrGrUrUrGrUrArGrCrUrCrCrCrGrArArArCrGrUrUrGrCrU | 24653 |
| | ED15-_ | rArCrArArUrArArGrGrCrCrGrUrCrUrGrArArArArGrArUrGrUrGrCrCrGrCrArArCrGrCrUrCrUrGrCrCrCrCrUrUrArArArG | |
| | G_11FE_ | rCrUrUrCrUrGrCrUrUrUrArArGrGrGrGrCrArUrCrGrUrUrArGrUrCrCrCrUrUrUrCrUrCrGrUrCrGrArUrGrGrUrCrArGrCr | |
| | PB13 | ArCrArGrCrCrUrUrArUrGrC*mA*mC*mG | |
| 585 | A1AT_Nme2_ | mU*mC*mC*rArGrGrCrCrGrUrGrCrArUrArArGrGrCrUrGrUrGrGrUrUrGrUrArGrCrUrCrCrCrGrArArArCrGrUrUrGrCrU | 24654 |
| | ED15-_ | rArCrArArUrArArGrGrCrCrGrUrCrUrGrArArArArGrArUrGrUrGrCrCrGrCrArArCrGrCrUrCrUrGrCrCrCrCrUrUrArArArG | |
| | G_11FE_ | rCrUrUrCrUrGrCrUrUrUrArArGrGrGrGrCrArUrCrGrUrUrArGrUrCrCrCrUrUrUrCrUrCrGrUrCrGrArUrGrGrUrCrArGrCr | |
| | PB12 | ArCrArGrCrCrUrUrArUrG*mC*mA*mC | |
| 586 | A1AT_Nme2_ | mU*mC*mC*rArGrGrCrCrGrUrGrCrArUrArArGrGrCrUrGrUrGrGrUrUrGrUrArGrCrUrCrCrCrGrArArArCrGrUrUrGrCrU | 24655 |
| | ED15-_ | rArCrArArUrArArGrGrCrCrGrUrCrUrGrArArArArGrArUrGrUrGrCrCrGrCrArArCrGrCrUrCrUrGrCrCrCrCrUrUrArArArG | |
| | G_11FE_ | rCrUrUrCrUrGrCrUrUrUrArArGrGrGrGrCrArUrCrGrUrUrArGrUrCrCrCrUrUrUrCrUrCrGrUrCrGrArUrGrGrUrCrArGrCr | |
| | PB11 | ArCrArGrCrCrUrUrArU*mG*mC*mA | |
| 587 | A1AT_Nme2_ | mU*mC*mC*rArGrGrCrCrGrUrGrCrArUrArArGrGrCrUrGrUrGrGrUrUrGrUrArGrCrUrCrCrCrGrArArArCrGrUrUrGrCrU | 24656 |
| | ED15-_ | rArCrArArUrArArGrGrCrCrGrUrCrUrGrArArArArGrArUrGrUrGrCrCrGrCrArArCrGrCrUrCrUrGrCrCrCrCrUrUrArArArG | |
| | G_11FE_ | rCrUrUrCrUrGrCrUrUrUrArArGrGrGrGrCrArUrCrGrUrUrArGrUrCrCrCrUrUrUrCrUrCrGrUrCrGrArUrGrGrUrCrArGrCr | |
| | PB10 | ArCrArGrCrCrUrUrA*mU*mG*mC | |
| 588 | A1AT_Nme2_ | mU*mC*mC*rArGrGrCrCrGrUrGrCrArUrArArGrGrCrUrGrUrGrGrUrUrGrUrArGrCrUrCrCrCrGrArArArCrGrUrUrGrCrU | 24657 |
| | ED15-_ | rArCrArArUrArArGrGrCrCrGrUrCrUrGrArArArArGrArUrGrUrGrCrCrGrCrArArCrGrCrUrCrUrGrCrCrCrCrUrUrArArArG | |
| | G_11FE_ | rCrUrUrCrUrGrCrUrUrUrArArGrGrGrGrCrArUrCrGrUrUrArGrUrCrCrCrUrUrUrCrUrCrGrUrCrGrArUrGrGrUrCrArGrCr | |
| | PB9 | ArCrArGrCrCrUrU*mA*mU*mG | |
| 589 | A1AT_Nme2_ | mU*mC*mC*rArGrGrCrCrGrUrGrCrArUrArArGrGrCrUrGrUrGrGrUrUrGrUrArGrCrUrCrCrCrGrArArArCrGrUrUrGrCrU | 24658 |
| | ED15-_ | rArCrArArUrArArGrGrCrCrGrUrCrUrGrArArArArGrArUrGrUrGrCrCrGrCrArArCrGrCrUrCrUrGrCrCrCrCrUrUrArArArG | |
| | G_11FE_ | rCrUrUrCrUrGrCrUrUrUrArArGrGrGrGrCrArUrCrGrUrUrArGrUrCrCrCrUrUrUrCrUrCrGrUrCrGrArUrGrGrUrCrArGrCr | |
| | PB8 | ArCrArGrCrCrU*mU*mA*mU | |
| 590 | A1AT_Nme2_ | mU*mC*mC*rArGrGrCrCrGrUrGrCrArUrArArGrGrCrUrGrUrGrGrUrUrGrUrArGrCrUrCrCrCrGrArArArCrGrUrUrGrCrU | 24659 |
| | ED15-_ | rArCrArArUrArArGrGrCrCrGrUrCrUrGrArArArArGrArUrGrUrGrCrCrGrCrArArCrGrCrUrCrUrGrCrCrCrCrUrUrArArArG | |
| | G_9FE_ | rCrUrUrCrUrGrCrUrUrUrArArGrGrGrGrCrArUrCrGrUrUrUrCrCrCrUrUrUrCrUrCrGrUrCrGrArUrGrGrUrCrArGrCrArCrA | |
| | PB17 | rGrCrCrUrUrArUrGrCrArCrGrG*mC*mC*mU | |
| 591 | A1AT_Nme2_ | mU*mC*mC*rArGrGrCrCrGrUrGrCrArUrArArGrGrCrUrGrUrGrGrUrUrGrUrArGrCrUrCrCrCrGrArArArCrGrUrUrGrCrU | 24660 |
| | ED15-_ | rArCrArArUrArArGrGrCrCrGrUrCrUrGrArArArArGrArUrGrUrGrCrCrGrCrArArCrGrCrUrCrUrGrCrCrCrCrUrUrArArArG | |
| | G_9FE_ | rCrUrUrCrUrGrCrUrUrUrArArGrGrGrGrCrArUrCrGrUrUrUrCrCrCrUrUrUrCrUrCrGrUrCrGrArUrGrGrUrCrArGrCrArCrA | |
| | PB16 | rGrCrCrUrUrArUrGrCrArCrG*mG*mC*mC | |
| 592 | A1AT_Nme2_ | mU*mC*mC*rArGrGrCrCrGrUrGrCrArUrArArGrGrCrUrGrUrGrGrUrUrGrUrArGrCrUrCrCrCrGrArArArCrGrUrUrGrCrU | 24661 |
| | ED15-_ | rArCrArArUrArArGrGrCrCrGrUrCrUrGrArArArArGrArUrGrUrGrCrCrGrCrArArCrGrCrUrCrUrGrCrCrCrCrUrUrArArArG | |
| | G_9FE_ | rCrUrUrCrUrGrCrUrUrUrArArGrGrGrGrCrArUrCrGrUrUrUrCrCrCrUrUrUrCrUrCrGrUrCrGrArUrGrGrUrCrArGrCrArCrA | |
| | PB15 | rGrCrCrUrUrArUrGrCrArC*mG*mG*mC | |
| 593 | A1AT_Nme2_ | mU*mC*mC*rArGrGrCrCrGrUrGrCrArUrArArGrGrCrUrGrUrGrGrUrUrGrUrArGrCrUrCrCrCrGrArArArCrGrUrUrGrCrU | 24662 |
| | ED15-_ | rArCrArArUrArArGrGrCrCrGrUrCrUrGrArArArArGrArUrGrUrGrCrCrGrCrArArCrGrCrUrCrUrGrCrCrCrCrUrUrArArArG | |
| | G_9FE_ | rCrUrUrCrUrGrCrUrUrUrArArGrGrGrGrCrArUrCrGrUrUrUrCrCrCrUrUrUrCrUrCrGrUrCrGrArUrGrGrUrCrArGrCrArCrA | |
| | PB14 | rGrCrCrUrUrArUrGrCrA*mC*mG*mG | |
| 594 | A1AT_Nme2_ | mU*mC*mC*rArGrGrCrCrGrUrGrCrArUrArArGrGrCrUrGrUrGrGrUrUrGrUrArGrCrUrCrCrCrGrArArArCrGrUrUrGrCrU | 24663 |
| | ED15-_ | rArCrArArUrArArGrGrCrCrGrUrCrUrGrArArArArGrArUrGrUrGrCrCrGrCrArArCrGrCrUrCrUrGrCrCrCrCrUrUrArArArG | |
| | G_9FE_ | rCrUrUrCrUrGrCrUrUrUrArArGrGrGrGrCrArUrCrGrUrUrUrCrCrCrUrUrUrCrUrCrGrUrCrGrArUrGrGrUrCrArGrCrArCrA | |
| | PB13 | rGrCrCrUrUrArUrGrC*mA*mC*mG | |
| 595 | A1AT_Nme2_ | mU*mC*mC*rArGrGrCrCrGrUrGrCrArUrArArGrGrCrUrGrUrGrGrUrUrGrUrArGrCrUrCrCrCrGrArArArCrGrUrUrGrCrU | 24664 |
| | ED15-_ | rArCrArArUrArArGrGrCrCrGrUrCrUrGrArArArArGrArUrGrUrGrCrCrGrCrArArCrGrCrUrCrUrGrCrCrCrCrUrUrArArArG | |
| | G_9FE_ | rCrUrUrCrUrGrCrUrUrUrArArGrGrGrGrCrArUrCrGrUrUrUrCrCrCrUrUrUrCrUrCrGrUrCrGrArUrGrGrUrCrArGrCrArCrA | |
| | PB12 | rGrCrCrUrUrArUrG*mC*mA*mC | |
| 596 | A1AT_Nme2_ | mU*mC*mC*rArGrGrCrCrGrUrGrCrArUrArArGrGrCrUrGrUrGrGrUrUrGrUrArGrCrUrCrCrCrGrArArArCrGrUrUrGrCrU | 24665 |
| | ED15-_ | rArCrArArUrArArGrGrCrCrGrUrCrUrGrArArArArGrArUrGrUrGrCrCrGrCrArArCrGrCrUrCrUrGrCrCrCrCrUrUrArArArG | |
| | G_9FE_ | rCrUrUrCrUrGrCrUrUrUrArArGrGrGrGrCrArUrCrGrUrUrUrCrCrCrUrUrUrCrUrCrGrUrCrGrArUrGrGrUrCrArGrCrArCrA | |
| | PB11 | rGrCrCrUrUrArU*mG*mC*mA | |
| 597 | A1AT_Nme2_ | mU*mC*mC*rArGrGrCrCrGrUrGrCrArUrArArGrGrCrUrGrUrGrGrUrUrGrUrArGrCrUrCrCrCrGrArArArCrGrUrUrGrCrU | 24666 |
| | ED15-_ | rArCrArArUrArArGrGrCrCrGrUrCrUrGrArArArArGrArUrGrUrGrCrCrGrCrArArCrGrCrUrCrUrGrCrCrCrCrUrUrArArArG | |
| | G_9FE_ | rCrUrUrCrUrGrCrUrUrUrArArGrGrGrGrCrArUrCrGrUrUrUrCrCrCrUrUrUrCrUrCrGrUrCrGrArUrGrGrUrCrArGrCrArCrA | |
| | PB10 | rGrCrCrUrUrA*mU*mG*mC | |
| 598 | A1AT_Nme2_ | mU*mC*mC*rArGrGrCrCrGrUrGrCrArUrArArGrGrCrUrGrUrGrGrUrUrGrUrArGrCrUrCrCrCrGrArArArCrGrUrUrGrCrU | 24667 |
| | ED15-_ | rArCrArArUrArArGrGrCrCrGrUrCrUrGrArArArArGrArUrGrUrGrCrCrGrCrArArCrGrCrUrCrUrGrCrCrCrCrUrUrArArArG | |
| | G_9FE_ | rCrUrUrCrUrGrCrUrUrUrArArGrGrGrGrCrArUrCrGrUrUrUrCrCrCrUrUrUrCrUrCrGrUrCrGrArUrGrGrUrCrArGrCrArCrA | |
| | PB9 | rGrCrCrUrU*mA*mU*mG | |
| 599 | A1AT_Nme2_ | mU*mC*mC*rArGrGrCrCrGrUrGrCrArUrArArGrGrCrUrGrUrGrGrUrUrGrUrArGrCrUrCrCrCrGrArArArCrGrUrUrGrCrU | 24668 |
| | ED15-_ | rArCrArArUrArArGrGrCrCrGrUrCrUrGrArArArArGrArUrGrUrGrCrCrGrCrArArCrGrCrUrCrUrGrCrCrCrCrUrUrArArArG | |
| | G_9FE_ | rCrUrUrCrUrGrCrUrUrUrArArGrGrGrGrCrArUrCrGrUrUrUrCrCrCrUrUrUrCrUrCrGrUrCrGrArUrGrGrUrCrArGrCrArCrA | |
| | PB8 | rGrCrCrU*mU*mA*mU | |
| 600 | A1AT_Nme2_ | mU*mC*mC*rArGrGrCrCrGrUrGrCrArUrArArGrGrCrUrGrUrGrGrUrUrGrUrArGrCrUrCrCrCrGrArArArCrGrUrUrGrCrU | 24669 |
| | ED15-_ | rArCrArArUrArArGrGrCrCrGrUrCrUrGrArArArArGrArUrGrUrGrCrCrGrCrArArCrGrCrUrCrUrGrCrCrCrCrUrUrArArArG | |
| | G_7FE_ | rCrUrUrCrUrGrCrUrUrUrArArGrGrGrGrCrArUrCrGrUrUrCrCrUrUrUrCrUrCrGrUrCrGrArUrGrGrUrCrArGrCrArCrArGrC | |
| | PB17 | rCrUrUrArUrGrCrArCrGrG*mC*mC*mU | |
| 601 | A1AT_Nme2_ | mU*mC*mC*rArGrGrCrCrGrUrGrCrArUrArArGrGrCrUrGrUrGrGrUrUrGrUrArGrCrUrCrCrCrGrArArArCrGrUrUrGrCrU | 24670 |
| | ED15-_ | rArCrArArUrArArGrGrCrCrGrUrCrUrGrArArArArGrArUrGrUrGrCrCrGrCrArArCrGrCrUrCrUrGrCrCrCrCrUrUrArArArG | |
| | G_7FE_ | rCrUrUrCrUrGrCrUrUrUrArArGrGrGrGrCrArUrCrGrUrUrCrCrUrUrUrCrUrCrGrUrCrGrArUrGrGrUrCrArGrCrArCrArGrC | |
| | PB16 | rCrUrUrArUrGrCrArCrG*mG*mC*mC | |
| 602 | A1AT_Nme2_ | mU*mC*mC*rArGrGrCrCrGrUrGrCrArUrArArGrGrCrUrGrUrGrGrUrUrGrUrArGrCrUrCrCrCrGrArArArCrGrUrUrGrCrU | 24671 |
| | ED15-_ | rArCrArArUrArArGrGrCrCrGrUrCrUrGrArArArArGrArUrGrUrGrCrCrGrCrArArCrGrCrUrCrUrGrCrCrCrCrUrUrArArArG | |
| | G_7FE_ | rCrUrUrCrUrGrCrUrUrUrArArGrGrGrGrCrArUrCrGrUrUrCrCrUrUrUrCrUrCrGrUrCrGrArUrGrGrUrCrArGrCrArCrArGrC | |
| | PB15 | rCrUrUrArUrGrCrArC*mG*mG*mC | |
| 603 | A1AT_Nme2_ | mU*mC*mC*rArGrGrCrCrGrUrGrCrArUrArArGrGrCrUrGrUrGrGrUrUrGrUrArGrCrUrCrCrCrGrArArArCrGrUrUrGrCrU | 24672 |
| | ED15-_ | rArCrArArUrArArGrGrCrCrGrUrCrUrGrArArArArGrArUrGrUrGrCrCrGrCrArArCrGrCrUrCrUrGrCrCrCrCrUrUrArArArG | |
| | G_7FE_ | rCrUrUrCrUrGrCrUrUrUrArArGrGrGrGrCrArUrCrGrUrUrCrCrUrUrUrCrUrCrGrUrCrGrArUrGrGrUrCrArGrCrArCrArGrC | |
| | PB14 | rCrUrUrArUrGrCrA*mC*mG*mG | |
| 604 | A1AT_Nme2_ | mU*mC*mC*rArGrGrCrCrGrUrGrCrArUrArArGrGrCrUrGrUrGrGrUrUrGrUrArGrCrUrCrCrCrGrArArArCrGrUrUrGrCrU | 24673 |
| | ED15-_ | ArCrArArUrArArGrGrCrCrGrUrCrUrGrArArArArGrArUrGrUrGrCrCrGrCrArArCrGrCrUrCrUrGrCrCrCrCrUrUrArArArG | |
| | G_7FE_ | rCrUrUrCrUrGrCrUrUrUrArArGrGrGrGrCrArUrCrGrUrUrCrCrUrUrUrCrUrCrGrUrCrGrArUrGrGrUrCrArGrCrArCrArGrC | |
| | PB13 | rCrUrUrArUrGrC*mA*mC*mG | |
| 605 | A1AT_Nme2_ | mU*mC*mC*rArGrGrCrCrGrUrGrCrArUrArArGrGrCrUrGrUrGrGrUrUrGrUrArGrCrUrCrCrCrGrArArArCrGrUrUrGrCrU | 24674 |
| | ED15-_ | rArCrArArUrArArGrGrCrCrGrUrCrUrGrArArArArGrArUrGrUrGrCrCrGrCrArArCrGrCrUrCrUrGrCrCrCrCrUrUrArArArG | |
| | G_7FE_ | rCrUrUrCrUrGrCrUrUrUrArArGrGrGrGrCrArUrCrGrUrUrCrCrUrUrUrCrUrCrGrUrCrGrArUrGrGrUrCrArGrCrArCrArGrC | |
| | PB12 | rCrUrUrArUrG*mC*mA*mC | |
| 606 | A1AT_Nme2_ | mU*mC*mC*rArGrGrCrCrGrUrGrCrArUrArArGrGrCrUrGrUrGrGrUrUrGrUrArGrCrUrCrCrCrGrArArArCrGrUrUrGrCrU | 24675 |
| | ED15-_ | rArCrArArUrArArGrGrCrCrGrUrCrUrGrArArArArGrArUrGrUrGrCrCrGrCrArArCrGrCrUrCrUrGrCrCrCrCrUrUrArArArG | |
| | G_7FE_ | rCrUrUrCrUrGrCrUrUrUrArArGrGrGrGrCrArUrCrGrUrUrCrCrUrUrUrCrUrCrGrUrCrGrArUrGrGrUrCrArGrCrArCrArGrC | |
| | PB11 | rCrUrUrArU*mG*mC*mA | |
| 607 | A1AT_Nme2_ | mU*mC*mC*rArGrGrCrCrGrUrGrCrArUrArArGrGrCrUrGrUrGrGrUrUrGrUrArGrCrUrCrCrCrGrArArArCrGrUrUrGrCrU | 24676 |
| | ED15-_ | rArCrArArUrArArGrGrCrCrGrUrCrUrGrArArArArGrArUrGrUrGrCrCrGrCrArArCrGrCrUrCrUrGrCrCrCrCrUrUrArArArG | |
| | G_7FE_ | rCrUrUrCrUrGrCrUrUrUrArArGrGrGrGrCrArUrCrGrUrUrCrCrUrUrUrCrUrCrGrUrCrGrArUrGrGrUrCrArGrCrArCrArGrC | |
| | PB10 | rCrUrUrA*mU*mG*mC | |
| 608 | A1AT_Nme2_ | mU*mC*mC*rArGrGrCrCrGrUrGrCrArUrArArGrGrCrUrGrUrGrGrUrUrGrUrArGrCrUrCrCrCrGrArArArCrGrUrUrGrCrU | 24677 |
| | ED15-_ | rArCrArArUrArArGrGrCrCrGrUrCrUrGrArArArArGrArUrGrUrGrCrCrGrCrArArCrGrCrUrCrUrGrCrCrCrCrUrUrArArArG | |
| | G_7FE_ | rCrUrUrCrUrGrCrUrUrUrArArGrGrGrGrCrArUrCrGrUrUrCrCrUrUrUrCrUrCrGrUrCrGrArUrGrGrUrCrArGrCrArCrArGrC | |
| | PB9 | rCrUrU*mA*mU*mG | |
| 609 | A1AT_Nme2_ | mU*mC*mC*rArGrGrCrCrGrUrGrCrArUrArArGrGrCrUrGrUrGrGrUrUrGrUrArGrCrUrCrCrCrGrArArArCrGrUrUrGrCrU | 24678 |
| | ED15-_ | ArCrArArUrArArGrGrCrCrGrUrCrUrGrArArArArGrArUrGrUrGrCrCrGrCrArArCrGrCrUrCrUrGrCrCrCrCrUrUrArArArG | |
| | G_7FE_ | rCrUrUrCrUrGrCrUrUrUrArArGrGrGrGrCrArUrCrGrUrUrCrCrUrUrUrCrUrCrGrUrCrGrArUrGrGrUrCrArGrCrArCrArGrC | |
| | PB8 | rCrU*mU*mA*mU | |
| 610 | A1AT_Nme2_ | mU*mC*mC*rArGrGrCrCrGrUrGrCrArUrArArGrGrCrUrGrUrGrGrUrUrGrUrArGrCrUrCrCrCrGrArArArCrGrUrUrGrCrU | 24679 |
| | ED15-_ | rArCrArArUrArArGrGrCrCrGrUrCrUrGrArArArArGrArUrGrUrGrCrCrGrCrArArCrGrCrUrCrUrGrCrCrCrCrUrUrArArArG | |
| | G_5FE_ | rCrUrUrCrUrGrCrUrUrUrArArGrGrGrGrCrArUrCrGrUrUrUrUrUrCrUrCrGrUrCrGrArUrGrGrUrCrArGrCrArCrArGrCrCr | |
| | PB17 | UrUrArUrGrCrArCrGrG*mC*mC*mU | |
| 611 | A1AT_Nme2_ | mU*mC*mC*rArGrGrCrCrGrUrGrCrArUrArArGrGrCrUrGrUrGrGrUrUrGrUrArGrCrUrCrCrCrGrArArArCrGrUrUrGrCrU | 24680 |
| | ED15-_ | rArCrArArUrArArGrGrCrCrGrUrCrUrGrArArArArGrArUrGrUrGrCrCrGrCrArArCrGrCrUrCrUrGrCrCrCrCrUrUrArArArG | |
| | G_5FE_ | rCrUrUrCrUrGrCrUrUrUrArArGrGrGrGrCrArUrCrGrUrUrUrUrUrCrUrCrGrUrCrGrArUrGrGrUrCrArGrCrArCrArGrCrCr | |
| | PB16 | UrUrArUrGrCrArCrG*mG*mC*mC | |
| 612 | A1AT_Nme2_ | mU*mC*mC*rArGrGrCrCrGrUrGrCrArUrArArGrGrCrUrGrUrGrGrUrUrGrUrArGrCrUrCrCrCrGrArArArCrGrUrUrGrCrU | 24681 |
| | ED15-_ | rArCrArArUrArArGrGrCrCrGrUrCrUrGrArArArArGrArUrGrUrGrCrCrGrCrArArCrGrCrUrCrUrGrCrCrCrCrUrUrArArArG | |
| | G_5FE_ | rCrUrUrCrUrGrCrUrUrUrArArGrGrGrGrCrArUrCrGrUrUrUrUrUrCrUrCrGrUrCrGrArUrGrGrUrCrArGrCrArCrArGrCrCr | |
| | PB15 | UrUrArUrGrCrArC*mG*mG*mC | |
| 613 | A1AT_Nme2_ | mU*mC*mC*rArGrGrCrCrGrUrGrCrArUrArArGrGrCrUrGrUrGrGrUrUrGrUrArGrCrUrCrCrCrGrArArArCrGrUrUrGrCrU | 24682 |
| | ED15-_ | rArCrArArUrArArGrGrCrCrGrUrCrUrGrArArArArGrArUrGrUrGrCrCrGrCrArArCrGrCrUrCrUrGrCrCrCrCrUrUrArArArG | |
| | G_5FE_ | rCrUrUrCrUrGrCrUrUrUrArArGrGrGrGrCrArUrCrGrUrUrUrUrUrCrUrCrGrUrCrGrArUrGrGrUrCrArGrCrArCrArGrCrCr | |
| | PB14 | UrUrArUrGrCrA*mC*mG*mG | |
| 614 | A1AT_Nme2_ | mU*mC*mC*rArGrGrCrCrGrUrGrCrArUrArArGrGrCrUrGrUrGrGrUrUrGrUrArGrCrUrCrCrCrGrArArArCrGrUrUrGrCrU | 24683 |
| | ED15-_ | rArCrArArUrArArGrGrCrCrGrUrCrUrGrArArArArGrArUrGrUrGrCrCrGrCrArArCrGrCrUrCrUrGrCrCrCrCrUrUrArArArG | |
| | G_5FE_ | rCrUrUrCrUrGrCrUrUrUrArArGrGrGrGrCrArUrCrGrUrUrUrUrUrCrUrCrGrUrCrGrArUrGrGrUrCrArGrCrArCrArGrCrCr | |
| | PB13 | UrUrArUrGrC*mA*mC*mG | |
| 615 | A1AT_Nme2_ | mU*mC*mC*rArGrGrCrCrGrUrGrCrArUrArArGrGrCrUrGrUrGrGrUrUrGrUrArGrCrUrCrCrCrGrArArArCrGrUrUrGrCrU | 24684 |
| | ED15-_ | rArCrArArUrArArGrGrCrCrGrUrCrUrGrArArArArGrArUrGrUrGrCrCrGrCrArArCrGrCrUrCrUrGrCrCrCrCrUrUrArArArG | |
| | G_5FE_ | rCrUrUrCrUrGrCrUrUrUrArArGrGrGrGrCrArUrCrGrUrUrUrUrUrCrUrCrGrUrCrGrArUrGrGrUrCrArGrCrArCrArGrCrCr | |
| | PB12 | UrUrArUrG*mC*mA*mC | |
| 616 | A1AT_Nme2_ | mU*mC*mC*rArGrGrCrCrGrUrGrCrArUrArArGrGrCrUrGrUrGrGrUrUrGrUrArGrCrUrCrCrCrGrArArArCrGrUrUrGrCrU | 24685 |
| | ED15-_ | rArCrArArUrArArGrGrCrCrGrUrCrUrGrArArArArGrArUrGrUrGrCrCrGrCrArArCrGrCrUrCrUrGrCrCrCrCrUrUrArArArG | |
| | G_5FE_ | rCrUrUrCrUrGrCrUrUrUrArArGrGrGrGrCrArUrCrGrUrUrUrUrUrCrUrCrGrUrCrGrArUrGrGrUrCrArGrCrArCrArGrCrCr | |
| | PB11 | UrUrArU*mG*mC*mA | |
| 617 | A1AT_Nme2_ | mU*mC*mC*rArGrGrCrCrGrUrGrCrArUrArArGrGrCrUrGrUrGrGrUrUrGrUrArGrCrUrCrCrCrGrArArArCrGrUrUrGrCrU | 24686 |
| | ED15-_ | rArCrArArUrArArGrGrCrCrGrUrCrUrGrArArArArGrArUrGrUrGrCrCrGrCrArArCrGrCrUrCrUrGrCrCrCrCrUrUrArArArG | |
| | G_5FE_ | rCrUrUrCrUrGrCrUrUrUrArArGrGrGrGrCrArUrCrGrUrUrUrUrUrCrUrCrGrUrCrGrArUrGrGrUrCrArGrCrArCrArGrCrCr | |
| | PB10 | UrUrA*mU*mG*mC | |
| 618 | A1AT_Nme2_ | mU*mC*mC*rArGrGrCrCrGrUrGrCrArUrArArGrGrCrUrGrUrGrGrUrUrGrUrArGrCrUrCrCrCrGrArArArCrGrUrUrGrCrU | 24687 |
| | ED15-_ | rArCrArArUrArArGrGrCrCrGrUrCrUrGrArArArArGrArUrGrUrGrCrCrGrCrArArCrGrCrUrCrUrGrCrCrCrCrUrUrArArArG | |
| | G_5FE_ | rCrUrUrCrUrGrCrUrUrUrArArGrGrGrGrCrArUrCrGrUrUrUrUrUrCrUrCrGrUrCrGrArUrGrGrUrCrArGrCrArCrArGrCrCr | |
| | PB9 | UrU*mA*mU*mG | |
| 619 | A1AT_Nme2_ | mU*mC*mC*rArGrGrCrCrGrUrGrCrArUrArArGrGrCrUrGrUrGrGrUrUrGrUrArGrCrUrCrCrCrGrArArArCrGrUrUrGrCrU | 24688 |
| | ED15-_ | rArCrArArUrArArGrGrCrCrGrUrCrUrGrArArArArGrArUrGrUrGrCrCrGrCrArArCrGrCrUrCrUrGrCrCrCrCrUrUrArArArG | |
| | G_5FE_ | rCrUrUrCrUrGrCrUrUrUrArArGrGrGrGrCrArUrCrGrUrUrUrUrUrCrUrCrGrUrCrGrArUrGrGrUrCrArGrCrArCrArGrCrCr | |
| | PB8 | U*mU*mA*mU | |
| 620 | A1AT_Nme2_ | mU*mC*mC*rArGrGrCrCrGrUrGrCrArUrArArGrGrCrUrGrUrGrGrUrUrGrUrArGrCrUrCrCrCrGrArArArCrGrUrUrGrCrU | 24689 |
| | ED15-_ | rArCrArArUrArArGrGrCrCrGrUrCrUrGrArArArArGrArUrGrUrGrCrCrGrCrArArCrGrCrUrCrUrGrCrCrCrCrUrUrArArArG | |
| | G_3FE_ | rCrUrUrCrUrGrCrUrUrUrArArGrGrGrGrCrArUrCrGrUrUrUrCrUrCrGrUrCrGrArUrGrGrUrCrArGrCrArCrArGrCrCrUrUr | |
| | PB17 | ArUrGrCrArCrGrG*mC*mC*mU | |
| 621 | A1AT_Nme2_ | mU*mC*mC*rArGrGrCrCrGrUrGrCrArUrArArGrGrCrUrGrUrGrGrUrUrGrUrArGrCrUrCrCrCrGrArArArCrGrUrUrGrCrU | 24690 |
| | ED15-_ | rArCrArArUrArArGrGrCrCrGrUrCrUrGrArArArArGrArUrGrUrGrCrCrGrCrArArCrGrCrUrCrUrGrCrCrCrCrUrUrArArArG | |
| | G_3FE_ | rCrUrUrCrUrGrCrUrUrUrArArGrGrGrGrCrArUrCrGrUrUrUrCrUrCrGrUrCrGrArUrGrGrUrCrArGrCrArCrArGrCrCrUrUr | |
| | PB16 | ArUrGrCrArCrG*mG*mC*mC | |
| 622 | A1AT_Nme2_ | mU*mC*mC*rArGrGrCrCrGrUrGrCrArUrArArGrGrCrUrGrUrGrGrUrUrGrUrArGrCrUrCrCrCrGrArArArCrGrUrUrGrCrU | 24691 |
| | ED15-_ | rArCrArArUrArArGrGrCrCrGrUrCrUrGrArArArArGrArUrGrUrGrCrCrGrCrArArCrGrCrUrCrUrGrCrCrCrCrUrUrArArArG | |
| | G_3FE_ | rCrUrUrCrUrGrCrUrUrUrArArGrGrGrGrCrArUrCrGrUrUrUrCrUrCrGrUrCrGrArUrGrGrUrCrArGrCrArCrArGrCrCrUrUr | |
| | PB15 | ArUrGrCrArC*mG*mG*mC | |
| 623 | A1AT_Nme2_ | mU*mC*mC*rArGrGrCrCrGrUrGrCrArUrArArGrGrCrUrGrUrGrGrUrUrGrUrArGrCrUrCrCrCrGrArArArCrGrUrUrGrCrU | 24692 |
| | ED15-_ | rArCrArArUrArArGrGrCrCrGrUrCrUrGrArArArArGrArUrGrUrGrCrCrGrCrArArCrGrCrUrCrUrGrCrCrCrCrUrUrArArArG | |
| | G_3FE_ | rCrUrUrCrUrGrCrUrUrUrArArGrGrGrGrCrArUrCrGrUrUrUrCrUrCrGrUrCrGrArUrGrGrUrCrArGrCrArCrArGrCrCrUrUr | |
| | PB14 | ArUrGrCrA*mC*mG*mG | |
| 624 | A1AT_Nme2_ | mU*mC*mC*rArGrGrCrCrGrUrGrCrArUrArArGrGrCrUrGrUrGrGrUrUrGrUrArGrCrUrCrCrCrGrArArArCrGrUrUrGrCrU | 24693 |
| | ED15-_ | rArCrArArUrArArGrGrCrCrGrUrCrUrGrArArArArGrArUrGrUrGrCrCrGrCrArArCrGrCrUrCrUrGrCrCrCrCrUrUrArArArG | |
| | G_3FE_ | rCrUrUrCrUrGrCrUrUrUrArArGrGrGrGrCrArUrCrGrUrUrUrCrUrCrGrUrCrGrArUrGrGrUrCrArGrCrArCrArGrCrCrUrUr | |
| | PB13 | ArUrGrC*mA*mC*mG | |
| 625 | A1AT_Nme2_ | mU*mC*mC*rArGrGrCrCrGrUrGrCrArUrArArGrGrCrUrGrUrGrGrUrUrGrUrArGrCrUrCrCrCrGrArArArCrGrUrUrGrCrU | 24694 |
| | ED15-_ | rArCrArArUrArArGrGrCrCrGrUrCrUrGrArArArArGrArUrGrUrGrCrCrGrCrArArCrGrCrUrCrUrGrCrCrCrCrUrUrArArArG | |
| | G_3FE_ | rCrUrUrCrUrGrCrUrUrUrArArGrGrGrGrCrArUrCrGrUrUrUrCrUrCrGrUrCrGrArUrGrGrUrCrArGrCrArCrArGrCrCrUrUr | |
| | PB12 | ArUrG*mC*mA*mC | |
| 626 | A1AT_Nme2_ | mU*mC*mC*rArGrGrCrCrGrUrGrCrArUrArArGrGrCrUrGrUrGrGrUrUrGrUrArGrCrUrCrCrCrGrArArArCrGrUrUrGrCrU | 24695 |
| | ED15-_ | rArCrArArUrArArGrGrCrCrGrUrCrUrGrArArArArGrArUrGrUrGrCrCrGrCrArArCrGrCrUrCrUrGrCrCrCrCrUrUrArArArG | |
| | G_3FE_ | rCrUrUrCrUrGrCrUrUrUrArArGrGrGrGrCrArUrCrGrUrUrUrCrUrCrGrUrCrGrArUrGrGrUrCrArGrCrArCrArGrCrCrUrUr | |
| | PB11 | ArU*mG*mC*mA | |
| 627 | A1AT_Nme2_ | mU*mC*mC*rArGrGrCrCrGrUrGrCrArUrArArGrGrCrUrGrUrGrGrUrUrGrUrArGrCrUrCrCrCrGrArArArCrGrUrUrGrCrU | 24696 |
| | ED15-_ | rArCrArArUrArArGrGrCrCrGrUrCrUrGrArArArArGrArUrGrUrGrCrCrGrCrArArCrGrCrUrCrUrGrCrCrCrCrUrUrArArArG | |
| | G_3FE_ | rCrUrUrCrUrGrCrUrUrUrArArGrGrGrGrCrArUrCrGrUrUrUrCrUrCrGrUrCrGrArUrGrGrUrCrArGrCrArCrArGrCrCrUrUr | |
| | PB10 | A*mU*mG*mC | |
| 628 | A1AT_Nme2_ | mU*mC*mC*rArGrGrCrCrGrUrGrCrArUrArArGrGrCrUrGrUrGrGrUrUrGrUrArGrCrUrCrCrCrGrArArArCrGrUrUrGrCrU | 24697 |
| | ED15-_ | rArCrArArUrArArGrGrCrCrGrUrCrUrGrArArArArGrArUrGrUrGrCrCrGrCrArArCrGrCrUrCrUrGrCrCrCrCrUrUrArArArG | |
| | G_3FE_ | rCrUrUrCrUrGrCrUrUrUrArArGrGrGrGrCrArUrCrGrUrUrUrCrUrCrGrUrCrGrArUrGrGrUrCrArGrCrArCrArGrCrCrUrU* | |
| | PB9 | mA*mU*mG | |
| 629 | A1AT_Nme2_ | mU*mC*mC*rArGrGrCrCrGrUrGrCrArUrArArGrGrCrUrGrUrGrGrUrUrGrUrArGrCrUrCrCrCrGrArArArCrGrUrUrGrCrU | 24698 |
| | ED15-_ | rArCrArArUrArArGrGrCrCrGrUrCrUrGrArArArArGrArUrGrUrGrCrCrGrCrArArCrGrCrUrCrUrGrCrCrCrCrUrUrArArArG | |
| | G_3FE_ | rCrUrUrCrUrGrCrUrUrUrArArGrGrGrGrCrArUrCrGrUrUrUrCrUrCrGrUrCrGrArUrGrGrUrCrArGrCrArCrArGrCrCrU*mU | |
| | PB8 | *mA*mU | |
| 630 | A1AT_ | mC*mC*mA*rGrGrCrCrGrUrGrCrArUrArArGrGrCrUrGrGrUrUrUrUrArGrArGrCrUrArGrArArArUrArGrCrArArGrUrUrA | 24699 |
| | SpCas9- | rArArArUrArArGrGrCrUrArGrUrCrCrGrUrUrArUrCrArArCrUrUrGrArArArArArGrUrGrGrCrArCrCrGrArGrUrCrGrGrUr | |
| | NG_ED17-_ | GrCrArCrArUrGrGrCrCrCrCrArGrCrArGrCrUrUrCrArGrUrCrCrCrUrUrUrCrUrCrGrUrCrGrArUrGrGrUrCrArGrCrArCrAr | |
| | 30FE_ | GrCrCrUrUrArUrGrCrArCrGrGrCrC*mU*mG*mG | |
| | PB17 | | |
| 631 | A1AT_ | mC*mC*mA*rGrGrCrCrGrUrGrCrArUrArArGrGrCrUrGrGrUrUrUrUrArGrArGrCrUrArGrArArArUrArGrCrArArGrUrUrA | 24700 |
| | SpCas9- | rArArArUrArArGrGrCrUrArGrUrCrCrGrUrUrArUrCrArArCrUrUrGrArArArArArGrUrGrGrCrArCrCrGrArGrUrCrGrGrUr | |
| | NG_ED17-_ | GrCrArCrArUrGrGrCrCrCrCrArGrCrArGrCrUrUrCrArGrUrCrCrCrUrUrUrCrUrCrGrUrCrGrArUrGrGrUrCrArGrCrArCrAr | |
| | 30FE_ | GrCrCrUrUrArUrGrCrArCrGrGrC*mC*mU*mG | |
| | PB16 | | |
| 632 | A1AT_ | mC*mC*mA*rGrGrCrCrGrUrGrCrArUrArArGrGrCrUrGrGrUrUrUrUrArGrArGrCrUrArGrArArArUrArGrCrArArGrUrUrA | 24701 |
| | SpCas9- | rArArArUrArArGrGrCrUrArGrUrCrCrGrUrUrArUrCrArArCrUrUrGrArArArArArGrUrGrGrCrArCrCrGrArGrUrCrGrGrUr | |
| | NG_ED17-_ | GrCrArCrArUrGrGrCrCrCrCrArGrCrArGrCrUrUrCrArGrUrCrCrCrUrUrUrCrUrCrGrUrCrGrArUrGrGrUrCrArGrCrArCrAr | |
| | 30FE_ | GrCrCrUrUrArUrGrCrArCrGrG*mC*mC*mU | |
| | PB15 | | |
| 633 | A1AT_ | mC*mC*mA*rGrGrCrCrGrUrGrCrArUrArArGrGrCrUrGrGrUrUrUrUrArGrArGrCrUrArGrArArArUrArGrCrArArGrUrUrA | 24702 |
| | SpCas9- | rArArArUrArArGrGrCrUrArGrUrCrCrGrUrUrArUrCrArArCrUrUrGrArArArArArGrUrGrGrCrArCrCrGrArGrUrCrGrGrUr | |
| | NG_ED17-_ | GrCrArCrArUrGrGrCrCrCrCrArGrCrArGrCrUrUrCrArGrUrCrCrCrUrUrUrCrUrCrGrUrCrGrArUrGrGrUrCrArGrCrArCrAr | |
| | 30FE_ | GrCrCrUrUrArUrGrCrArCrG*mG*mC*mC | |
| | PB14 | | |
| 634 | A1AT_ | mC*mC*mA*rGrGrCrCrGrUrGrCrArUrArArGrGrCrUrGrGrUrUrUrUrArGrArGrCrUrArGrArArArUrArGrCrArArGrUrUrA | 24703 |
| | SpCas9- | rArArArUrArArGrGrCrUrArGrUrCrCrGrUrUrArUrCrArArCrUrUrGrArArArArArGrUrGrGrCrArCrCrGrArGrUrCrGrGrUr | |
| | NG_ED17-_ | GrCrArCrArUrGrGrCrCrCrCrArGrCrArGrCrUrUrCrArGrUrCrCrCrUrUrUrCrUrCrGrUrCrGrArUrGrGrUrCrArGrCrArCrAr | |
| | 30FE_ | GrCrCrUrUrArUrGrCrArC*mG*mG*mC | |
| | PB13 | | |
| 635 | A1AT_ | mC*mC*mA*rGrGrCrCrGrUrGrCrArUrArArGrGrCrUrGrGrUrUrUrUrArGrArGrCrUrArGrArArArUrArGrCrArArGrUrUrA | 24704 |
| | SpCas9- | rArArArUrArArGrGrCrUrArGrUrCrCrGrUrUrArUrCrArArCrUrUrGrArArArArArGrUrGrGrCrArCrCrGrArGrUrCrGrGrUr | |
| | NG_ED17-_ | GrCrArCrArUrGrGrCrCrCrCrArGrCrArGrCrUrUrCrArGrUrCrCrCrUrUrUrCrUrCrGrUrCrGrArUrGrGrUrCrArGrCrArCrAr | |
| | 30FE_ | GrCrCrUrUrArUrGrCrA*mC*mG*mG | |
| | PB12 | | |
| 636 | A1AT_ | mC*mC*mA*rGrGrCrCrGrUrGrCrArUrArArGrGrCrUrGrGrUrUrUrUrArGrArGrCrUrArGrArArArUrArGrCrArArGrUrUrA | 24705 |
| | SpCas9- | rArArArUrArArGrGrCrUrArGrUrCrCrGrUrUrArUrCrArArCrUrUrGrArArArArArGrUrGrGrCrArCrCrGrArGrUrCrGrGrUr | |
| | NG_ED17-_ | GrCrArCrArUrGrGrCrCrCrCrArGrCrArGrCrUrUrCrArGrUrCrCrCrUrUrUrCrUrCrGrUrCrGrArUrGrGrUrCrArGrCrArCrAr | |
| | 30FE_ | GrCrCrUrUrArUrGrC*mA*mC*mG | |
| | PB11 | | |
| 637 | A1AT_ | mC*mC*mA*rGrGrCrCrGrUrGrCrArUrArArGrGrCrUrGrGrUrUrUrUrArGrArGrCrUrArGrArArArUrArGrCrArArGrUrUrA | 24706 |
| | SpCas9- | rArArArUrArArGrGrCrUrArGrUrCrCrGrUrUrArUrCrArArCrUrUrGrArArArArArGrUrGrGrCrArCrCrGrArGrUrCrGrGrUr | |
| | NG_ED17-_ | GrCrArCrArUrGrGrCrCrCrCrArGrCrArGrCrUrUrCrArGrUrCrCrCrUrUrUrCrUrCrGrUrCrGrArUrGrGrUrCrArGrCrArCrAr | |
| | 30FE_ | GrCrCrUrUrArUrG*mC*mA*mC | |
| | PB10 | | |
| 638 | A1AT_ | mC*mC*mA*rGrGrCrCrGrUrGrCrArUrArArGrGrCrUrGrGrUrUrUrUrArGrArGrCrUrArGrArArArUrArGrCrArArGrUrUrA | 24707 |
| | SpCas9- | rArArArUrArArGrGrCrUrArGrUrCrCrGrUrUrArUrCrArArCrUrUrGrArArArArArGrUrGrGrCrArCrCrGrArGrUrCrGrGrUr | |
| | NG_ED17-_ | GrCrArCrArUrGrGrCrCrCrCrArGrCrArGrCrUrUrCrArGrUrCrCrCrUrUrUrCrUrCrGrUrCrGrArUrGrGrUrCrArGrCrArCrAr | |
| | 30FE_PB9 | GrCrCrUrUrArU*mG*mC*mA | |
| 639 | A1AT_ | mC*mC*mA*rGrGrCrCrGrUrGrCrArUrArArGrGrCrUrGrGrUrUrUrUrArGrArGrCrUrArGrArArArUrArGrCrArArGrUrUrA | 24708 |
| | SpCas9- | rArArArUrArArGrGrCrUrArGrUrCrCrGrUrUrArUrCrArArCrUrUrGrArArArArArGrUrGrGrCrArCrCrGrArGrUrCrGrGrUr | |
| | NG_ED17-_ | GrCrArCrArUrGrGrCrCrCrCrArGrCrArGrCrUrUrCrArGrUrCrCrCrUrUrUrCrUrCrGrUrCrGrArUrGrGrUrCrArGrCrArCrAr | |
| | 30FE_PB8 | GrCrCrUrUrA*mU*mG*mC | |
| 640 | A1AT_ | mC*mC*mA*rGrGrCrCrGrUrGrCrArUrArArGrGrCrUrGrGrUrUrUrUrArGrArGrCrUrArGrArArArUrArGrCrArArGrUrUrA | 24709 |
| | SpCas9- | rArArArUrArArGrGrCrUrArGrUrCrCrGrUrUrArUrCrArArCrUrUrGrArArArArArGrUrGrGrCrArCrCrGrArGrUrCrGrGrUr | |
| | NG_ED17-_ | GrCrGrCrCrCrCrArGrCrArGrCrUrUrCrArGrUrCrCrCrUrUrUrCrUrCrGrUrCrGrArUrGrGrUrCrArGrCrArCrArGrCrCrUrUr | |
| | 25FE_ | ArUrGrCrArCrGrGrCrC*mU*mG*mG | |
| | PB17 | | |
| 641 | A1AT_ | mC*mC*mA*rGrGrCrCrGrUrGrCrArUrArArGrGrCrUrGrGrUrUrUrUrArGrArGrCrUrArGrArArArUrArGrCrArArGrUrUrA | 24710 |
| | SpCas9- | rArArArUrArArGrGrCrUrArGrUrCrCrGrUrUrArUrCrArArCrUrUrGrArArArArArGrUrGrGrCrArCrCrGrArGrUrCrGrGrUr | |
| | NG_ED17-_ | GrCrGrCrCrCrCrArGrCrArGrCrUrUrCrArGrUrCrCrCrUrUrUrCrUrCrGrUrCrGrArUrGrGrUrCrArGrCrArCrArGrCrCrUrUr | |
| | 25FE_ | ArUrGrCrArCrGrGrC*mC*mU*mG | |
| | PB16 | | |
| 642 | A1AT_ | mC*mC*mA*rGrGrCrCrGrUrGrCrArUrArArGrGrCrUrGrGrUrUrUrUrArGrArGrCrUrArGrArArArUrArGrCrArArGrUrUrA | 24711 |
| | SpCas9- | rArArArUrArArGrGrCrUrArGrUrCrCrGrUrUrArUrCrArArCrUrUrGrArArArArArGrUrGrGrCrArCrCrGrArGrUrCrGrGrUr | |
| | NG_ED17-_ | GrCrGrCrCrCrCrArGrCrArGrCrUrUrCrArGrUrCrCrCrUrUrUrCrUrCrGrUrCrGrArUrGrGrUrCrArGrCrArCrArGrCrCrUrUr | |
| | 25FE_ | ArUrGrCrArCrGrG*mC*mC*mU | |
| | PB15 | | |
| 643 | A1AT_ | mC*mC*mA*rGrGrCrCrGrUrGrCrArUrArArGrGrCrUrGrGrUrUrUrUrArGrArGrCrUrArGrArArArUrArGrCrArArGrUrUrA | 24712 |
| | SpCas9- | rArArArUrArArGrGrCrUrArGrUrCrCrGrUrUrArUrCrArArCrUrUrGrArArArArArGrUrGrGrCrArCrCrGrArGrUrCrGrGrUr | |
| | NG_ED17-_ | GrCrGrCrCrCrCrArGrCrArGrCrUrUrCrArGrUrCrCrCrUrUrUrCrUrCrGrUrCrGrArUrGrGrUrCrArGrCrArCrArGrCrCrUrUr | |
| | 25FE_ | ArUrGrCrArCrG*mG*mC*mC | |
| | PB14 | | |
| 644 | A1AT_ | mC*mC*mA*rGrGrCrCrGrUrGrCrArUrArArGrGrCrUrGrGrUrUrUrUrArGrArGrCrUrArGrArArArUrArGrCrArArGrUrUrA | 24713 |
| | SpCas9- | rArArArUrArArGrGrCrUrArGrUrCrCrGrUrUrArUrCrArArCrUrUrGrArArArArArGrUrGrGrCrArCrCrGrArGrUrCrGrGrUr | |
| | NG_ED17-_ | GrCrGrCrCrCrCrArGrCrArGrCrUrUrCrArGrUrCrCrCrUrUrUrCrUrCrGrUrCrGrArUrGrGrUrCrArGrCrArCrArGrCrCrUrUr | |
| | 25FE_ | ArUrGrCrArC*mG*mG*mC | |
| | PB13 | | |
| 645 | A1AT_ | mC*mC*mA*rGrGrCrCrGrUrGrCrArUrArArGrGrCrUrGrGrUrUrUrUrArGrArGrCrUrArGrArArArUrArGrCrArArGrUrUrA | 24714 |
| | SpCas9- | rArArArUrArArGrGrCrUrArGrUrCrCrGrUrUrArUrCrArArCrUrUrGrArArArArArGrUrGrGrCrArCrCrGrArGrUrCrGrGrUr | |
| | NG_ED17-_ | GrCrGrCrCrCrCrArGrCrArGrCrUrUrCrArGrUrCrCrCrUrUrUrCrUrCrGrUrCrGrArUrGrGrUrCrArGrCrArCrArGrCrCrUrUr | |
| | 25FE_ | ArUrGrCrA*mC*mG*mG | |
| | PB12 | | |
| 646 | A1AT_ | mC*mC*mA*rGrGrCrCrGrUrGrCrArUrArArGrGrCrUrGrGrUrUrUrUrArGrArGrCrUrArGrArArArUrArGrCrArArGrUrUrA | 24715 |
| | SpCas9- | rArArArUrArArGrGrCrUrArGrUrCrCrGrUrUrArUrCrArArCrUrUrGrArArArArArGrUrGrGrCrArCrCrGrArGrUrCrGrGrUr | |
| | NG_ED17-_ | GrCrGrCrCrCrCrArGrCrArGrCrUrUrCrArGrUrCrCrCrUrUrUrCrUrCrGrUrCrGrArUrGrGrUrCrArGrCrArCrArGrCrCrUrUr | |
| | 25FE_ | ArUrGrC*mA*mC*mG | |
| | PB11 | | |
| 647 | A1AT_ | mC*mC*mA*rGrGrCrCrGrUrGrCrArUrArArGrGrCrUrGrGrUrUrUrUrArGrArGrCrUrArGrArArArUrArGrCrArArGrUrUrA | 24716 |
| | SpCas9- | rArArArUrArArGrGrCrUrArGrUrCrCrGrUrUrArUrCrArArCrUrUrGrArArArArArGrUrGrGrCrArCrCrGrArGrUrCrGrGrUr | |
| | NG_ED17-_ | GrCrGrCrCrCrCrArGrCrArGrCrUrUrCrArGrUrCrCrCrUrUrUrCrUrCrGrUrCrGrArUrGrGrUrCrArGrCrArCrArGrCrCrUrUr | |
| | 25FE_ | ArUrG*mC*mA*mC | |
| | PB10 | | |
| 648 | A1AT_ | mC*mC*mA*rGrGrCrCrGrUrGrCrArUrArArGrGrCrUrGrGrUrUrUrUrArGrArGrCrUrArGrArArArUrArGrCrArArGrUrUrA | 24717 |
| | SpCas9- | rArArArUrArArGrGrCrUrArGrUrCrCrGrUrUrArUrCrArArCrUrUrGrArArArArArGrUrGrGrCrArCrCrGrArGrUrCrGrGrUr | |
| | NG_ED17-_ | GrCrGrCrCrCrCrArGrCrArGrCrUrUrCrArGrUrCrCrCrUrUrUrCrUrCrGrUrCrGrArUrGrGrUrCrArGrCrArCrArGrCrCrUrUr | |
| | 25FE_PB9 | ArU*mG*mC*mA | |
| 649 | A1AT_ | mC*mC*mA*rGrGrCrCrGrUrGrCrArUrArArGrGrCrUrGrGrUrUrUrUrArGrArGrCrUrArGrArArArUrArGrCrArArGrUrUrA | 24718 |
| | SpCas9- | rArArArUrArArGrGrCrUrArGrUrCrCrGrUrUrArUrCrArArCrUrUrGrArArArArArGrUrGrGrCrArCrCrGrArGrUrCrGrGrUr | |
| | NG_ED17-_ | GrCrGrCrCrCrCrArGrCrArGrCrUrUrCrArGrUrCrCrCrUrUrUrCrUrCrGrUrCrGrArUrGrGrUrCrArGrCrArCrArGrCrCrUrUr | |
| | 25FE_PB8 | A*mU*mG*mC | |
| 650 | A1AT_ | mC*mC*mA*rGrGrCrCrGrUrGrCrArUrArArGrGrCrUrGrGrUrUrUrUrArGrArGrCrUrArGrArArArUrArGrCrArArGrUrUrA | 24719 |
| | SpCas9- | rArArArUrArArGrGrCrUrArGrUrCrCrGrUrUrArUrCrArArCrUrUrGrArArArArArGrUrGrGrCrArCrCrGrArGrUrCrGrGrUr | |
| | NG_ED17-_ | GrCrArGrCrArGrCrUrUrCrArGrUrCrCrCrUrUrUrCrUrCrGrUrCrGrArUrGrGrUrCrArGrCrArCrArGrCrCrUrUrArUrGrCrAr | |
| | 20FE_ | CrGrGrCrC*mU*mG*mG | |
| | PB17 | | |
| 651 | A1AT_ | mC*mC*mA*rGrGrCrCrGrUrGrCrArUrArArGrGrCrUrGrGrUrUrUrUrArGrArGrCrUrArGrArArArUrArGrCrArArGrUrUrA | 24720 |
| | SpCas9- | ArArArUrArArGrGrCrUrArGrUrCrCrGrUrUrArUrCrArArCrUrUrGrArArArArArGrUrGrGrCrArCrCrGrArGrUrCrGrGrUr | |
| | NG_ED17-_ | GrCrArGrCrArGrCrUrUrCrArGrUrCrCrCrUrUrUrCrUrCrGrUrCrGrArUrGrGrUrCrArGrCrArCrArGrCrCrUrUrArUrGrCrAr | |
| | 20FE_ | CrGrGrC*mC*mU*mG | |
| | PB16 | | |
| 652 | A1AT_ | mC*mC*mA*rGrGrCrCrGrUrGrCrArUrArArGrGrCrUrGrGrUrUrUrUrArGrArGrCrUrArGrArArArUrArGrCrArArGrUrUrA | 24721 |
| | SpCas9- | rArArArUrArArGrGrCrUrArGrUrCrCrGrUrUrArUrCrArArCrUrUrGrArArArArArGrUrGrGrCrArCrCrGrArGrUrCrGrGrUr | |
| | NG_ED17-_ | GrCrArGrCrArGrCrUrUrCrArGrUrCrCrCrUrUrUrCrUrCrGrUrCrGrArUrGrGrUrCrArGrCrArCrArGrCrCrUrUrArUrGrCrAr | |
| | 20FE_ | CrGrG*mC*mC*mU | |
| | PB15 | | |
| 653 | A1AT_ | mC*mC*mA*rGrGrCrCrGrUrGrCrArUrArArGrGrCrUrGrGrUrUrUrUrArGrArGrCrUrArGrArArArUrArGrCrArArGrUrUrA | 24722 |
| | SpCas9- | rArArArUrArArGrGrCrUrArGrUrCrCrGrUrUrArUrCrArArCrUrUrGrArArArArArGrUrGrGrCrArCrCrGrArGrUrCrGrGrUr | |
| | NG_ED17-_ | GrCrArGrCrArGrCrUrUrCrArGrUrCrCrCrUrUrUrCrUrCrGrUrCrGrArUrGrGrUrCrArGrCrArCrArGrCrCrUrUrArUrGrCrAr | |
| | 20FE_ | CrG*mG*mC*mC | |
| | PB14 | | |
| 654 | A1AT_ | mC*mC*mA*rGrGrCrCrGrUrGrCrArUrArArGrGrCrUrGrGrUrUrUrUrArGrArGrCrUrArGrArArArUrArGrCrArArGrUrUrA | 24723 |
| | SpCas9- | ArArArUrArArGrGrCrUrArGrUrCrCrGrUrUrArUrCrArArCrUrUrGrArArArArArGrUrGrGrCrArCrCrGrArGrUrCrGrGrUr | |
| | NG_ED17-_ | GrCrArGrCrArGrCrUrUrCrArGrUrCrCrCrUrUrUrCrUrCrGrUrCrGrArUrGrGrUrCrArGrCrArCrArGrCrCrUrUrArUrGrCrAr | |
| | 20FE_ | C*mG*mG*mC | |
| | PB13 | | |
| 655 | A1AT_ | mC*mC*mA*rGrGrCrCrGrUrGrCrArUrArArGrGrCrUrGrGrUrUrUrUrArGrArGrCrUrArGrArArArUrArGrCrArArGrUrUrA | 24724 |
| | SpCas9- | rArArArUrArArGrGrCrUrArGrUrCrCrGrUrUrArUrCrArArCrUrUrGrArArArArArGrUrGrGrCrArCrCrGrArGrUrCrGrGrUr | |
| | NG_ED17-_ | GrCrArGrCrArGrCrUrUrCrArGrUrCrCrCrUrUrUrCrUrCrGrUrCrGrArUrGrGrUrCrArGrCrArCrArGrCrCrUrUrArUrGrCrA | |
| | 20FE_ | *mC*mG*mG | |
| | PB12 | | |
| 656 | A1AT_ | mC*mC*mA*rGrGrCrCrGrUrGrCrArUrArArGrGrCrUrGrGrUrUrUrUrArGrArGrCrUrArGrArArArUrArGrCrArArGrUrUrA | 24725 |
| | SpCas9- | rArArArUrArArGrGrCrUrArGrUrCrCrGrUrUrArUrCrArArCrUrUrGrArArArArArGrUrGrGrCrArCrCrGrArGrUrCrGrGrUr | |
| | NG_ED17-_ | GrCrArGrCrArGrCrUrUrCrArGrUrCrCrCrUrUrUrCrUrCrGrUrCrGrArUrGrGrUrCrArGrCrArCrArGrCrCrUrUrArUrGrC* | |
| | 20FE_ | mA*mC*mG | |
| | PB11 | | |
| 657 | A1AT_ | mC*mC*mA*rGrGrCrCrGrUrGrCrArUrArArGrGrCrUrGrGrUrUrUrUrArGrArGrCrUrArGrArArArUrArGrCrArArGrUrUrA | 24726 |
| | SpCas9- | rArArArUrArArGrGrCrUrArGrUrCrCrGrUrUrArUrCrArArCrUrUrGrArArArArArGrUrGrGrCrArCrCrGrArGrUrCrGrGrUr | |
| | NG_ED17-_ | GrCrArGrCrArGrCrUrUrCrArGrUrCrCrCrUrUrUrCrUrCrGrUrCrGrArUrGrGrUrCrArGrCrArCrArGrCrCrUrUrArUrG*mC* | |
| | 20FE_ | mA*mC | |
| | PB10 | | |
| 658 | A1AT_ | mC*mC*mA*rGrGrCrCrGrUrGrCrArUrArArGrGrCrUrGrGrUrUrUrUrArGrArGrCrUrArGrArArArUrArGrCrArArGrUrUrA | 24727 |
| | SpCas9- | rArArArUrArArGrGrCrUrArGrUrCrCrGrUrUrArUrCrArArCrUrUrGrArArArArArGrUrGrGrCrArCrCrGrArGrUrCrGrGrUr | |
| | NG_ED17-_ | GrCrArGrCrArGrCrUrUrCrArGrUrCrCrCrUrUrUrCrUrCrGrUrCrGrArUrGrGrUrCrArGrCrArCrArGrCrCrUrUrArU*mG* | |
| | 20FE_PB9 | mC*mA | |
| 659 | A1AT_ | mC*mC*mA*rGrGrCrCrGrUrGrCrArUrArArGrGrCrUrGrGrUrUrUrUrArGrArGrCrUrArGrArArArUrArGrCrArArGrUrUrA | 24728 |
| | SpCas9- | rArArArUrArArGrGrCrUrArGrUrCrCrGrUrUrArUrCrArArCrUrUrGrArArArArArGrUrGrGrCrArCrCrGrArGrUrCrGrGrUr | |
| | NG_ED17-_ | GrCrArGrCrArGrCrUrUrCrArGrUrCrCrCrUrUrUrCrUrCrGrUrCrGrArUrGrGrUrCrArGrCrArCrArGrCrCrUrUrA*mU*mG* | |
| | 20FE_PB8 | mC | |
| 660 | A1AT_ | mC*mC*mA*rGrGrCrCrGrUrGrCrArUrArArGrGrCrUrGrGrUrUrUrUrArGrArGrCrUrArGrArArArUrArGrCrArArGrUrUrA | 24729 |
| | SpCas9- | rArArArUrArArGrGrCrUrArGrUrCrCrGrUrUrArUrCrArArCrUrUrGrArArArArArGrUrGrGrCrArCrCrGrArGrUrCrGrGrUr | |
| | NG_ED17-_ | GrCrUrUrCrArGrUrCrCrCrUrUrUrCrUrCrGrUrCrGrArUrGrGrUrCrArGrCrArCrArGrCrCrUrUrArUrGrCrArCrGrGrCrC* | |
| | 14FE_ | mU*mG*mG | |
| | PB17 | | |
| 661 | A1AT_ | mC*mC*mA*rGrGrCrCrGrUrGrCrArUrArArGrGrCrUrGrGrUrUrUrUrArGrArGrCrUrArGrArArArUrArGrCrArArGrUrUrA | 24730 |
| | SpCas9- | rArArArUrArArGrGrCrUrArGrUrCrCrGrUrUrArUrCrArArCrUrUrGrArArArArArGrUrGrGrCrArCrCrGrArGrUrCrGrGrUr | |
| | NG_ED17-_ | GrCrUrUrCrArGrUrCrCrCrUrUrUrCrUrCrGrUrCrGrArUrGrGrUrCrArGrCrArCrArGrCrCrUrUrArUrGrCrArCrGrGrC*mC* | |
| | 14FE_ | mU*mG | |
| | PB16 | | |
| 662 | A1AT_ | mC*mC*mA*rGrGrCrCrGrUrGrCrArUrArArGrGrCrUrGrGrUrUrUrUrArGrArGrCrUrArGrArArArUrArGrCrArArGrUrUrA | 24731 |
| | SpCas9- | rArArArUrArArGrGrCrUrArGrUrCrCrGrUrUrArUrCrArArCrUrUrGrArArArArArGrUrGrGrCrArCrCrGrArGrUrCrGrGrUr | |
| | NG_ED17-_ | GrCrUrUrCrArGrUrCrCrCrUrUrUrCrUrCrGrUrCrGrArUrGrGrUrCrArGrCrArCrArGrCrCrUrUrArUrGrCrArCrGrG*mC* | |
| | 14FE_ | mC*mU | |
| | PB15 | | |
| 663 | A1AT_ | mC*mC*mA*rGrGrCrCrGrUrGrCrArUrArArGrGrCrUrGrGrUrUrUrUrArGrArGrCrUrArGrArArArUrArGrCrArArGrUrUrA | 24732 |
| | SpCas9- | rArArArUrArArGrGrCrUrArGrUrCrCrGrUrUrArUrCrArArCrUrUrGrArArArArArGrUrGrGrCrArCrCrGrArGrUrCrGrGrUr | |
| | NG_ED17-_ | GrCrUrUrCrArGrUrCrCrCrUrUrUrCrUrCrGrUrCrGrArUrGrGrUrCrArGrCrArCrArGrCrCrUrUrArUrGrCrArCrG*mG*mC* | |
| | 14FE_ | mC | |
| | PB14 | | |
| 664 | A1AT_ | mC*mC*mA*rGrGrCrCrGrUrGrCrArUrArArGrGrCrUrGrGrUrUrUrUrArGrArGrCrUrArGrArArArUrArGrCrArArGrUrUrA | 24733 |
| | SpCas9- | rArArArUrArArGrGrCrUrArGrUrCrCrGrUrUrArUrCrArArCrUrUrGrArArArArArGrUrGrGrCrArCrCrGrArGrUrCrGrGrUr | |
| | NG_ED17-_ | GrCrUrUrCrArGrUrCrCrCrUrUrUrCrUrCrGrUrCrGrArUrGrGrUrCrArGrCrArCrArGrCrCrUrUrArUrGrCrArC*mG*mG* | |
| | 14FE_ | mC | |
| | PB13 | | |
| 665 | A1AT_ | mC*mC*mA*rGrGrCrCrGrUrGrCrArUrArArGrGrCrUrGrGrUrUrUrUrArGrArGrCrUrArGrArArArUrArGrCrArArGrUrUrA | 24734 |
| | SpCas9- | rArArArUrArArGrGrCrUrArGrUrCrCrGrUrUrArUrCrArArCrUrUrGrArArArArArGrUrGrGrCrArCrCrGrArGrUrCrGrGrUr | |
| | NG_ED17-_ | GrCrUrUrCrArGrUrCrCrCrUrUrUrCrUrCrGrUrCrGrArUrGrGrUrCrArGrCrArCrArGrCrCrUrUrArUrGrCrA*mC*mG*mG | |
| | 14FE_ | | |
| | PB12 | | |
| 666 | A1AT_ | mC*mC*mA*rGrGrCrCrGrUrGrCrArUrArArGrGrCrUrGrGrUrUrUrUrArGrArGrCrUrArGrArArArUrArGrCrArArGrUrUrA | 24735 |
| | SpCas9- | ArArArUrArArGrGrCrUrArGrUrCrCrGrUrUrArUrCrArArCrUrUrGrArArArArArGrUrGrGrCrArCrCrGrArGrUrCrGrGrUr | |
| | NG_ED17-_ | GrCrUrUrCrArGrUrCrCrCrUrUrUrCrUrCrGrUrCrGrArUrGrGrUrCrArGrCrArCrArGrCrCrUrUrArUrGrC*mA*mC*mG | |
| | 14FE_ | | |
| | PB11 | | |
| 667 | A1AT_ | mC*mC*mA*rGrGrCrCrGrUrGrCrArUrArArGrGrCrUrGrGrUrUrUrUrArGrArGrCrUrArGrArArArUrArGrCrArArGrUrUrA | 24736 |
| | SpCas9- | rArArArUrArArGrGrCrUrArGrUrCrCrGrUrUrArUrCrArArCrUrUrGrArArArArArGrUrGrGrCrArCrCrGrArGrUrCrGrGrUr | |
| | NG_ED17-_ | GrCrUrUrCrArGrUrCrCrCrUrUrUrCrUrCrGrUrCrGrArUrGrGrUrCrArGrCrArCrArGrCrCrUrUrArUrG*mC*mA*mC | |
| | 14FE_ | | |
| | PB10 | | |
| 668 | A1AT_ | mC*mC*mA*rGrGrCrCrGrUrGrCrArUrArArGrGrCrUrGrGrUrUrUrUrArGrArGrCrUrArGrArArArUrArGrCrArArGrUrUrA | 24737 |
| | SpCas9- | rArArArUrArArGrGrCrUrArGrUrCrCrGrUrUrArUrCrArArCrUrUrGrArArArArArGrUrGrGrCrArCrCrGrArGrUrCrGrGrUr | |
| | NG_ED17-_ | GrCrUrUrCrArGrUrCrCrCrUrUrUrCrUrCrGrUrCrGrArUrGrGrUrCrArGrCrArCrArGrCrCrUrUrArU*mG*mC*mA | |
| | 14FE_PB9 | | |
| 669 | A1AT_ | mC*mC*mA*rGrGrCrCrGrUrGrCrArUrArArGrGrCrUrGrGrUrUrUrUrArGrArGrCrUrArGrArArArUrArGrCrArArGrUrUrA | 24738 |
| | SpCas9- | rArArArUrArArGrGrCrUrArGrUrCrCrGrUrUrArUrCrArArCrUrUrGrArArArArArGrUrGrGrCrArCrCrGrArGrUrCrGrGrUr | |
| | NG_ED17-_ | GrCrUrUrCrArGrUrCrCrCrUrUrUrCrUrCrGrUrCrGrArUrGrGrUrCrArGrCrArCrArGrCrCrUrUrA*mU*mG*mC | |
| | 14FE_PB8 | | |
| 670 | A1AT_ | mC*mC*mA*rGrGrCrCrGrUrGrCrArUrArArGrGrCrUrGrGrUrUrUrUrArGrArGrCrUrArGrArArArUrArGrCrArArGrUrUrA | 24739 |
| | SpCas9- | rArArArUrArArGrGrCrUrArGrUrCrCrGrUrUrArUrCrArArCrUrUrGrArArArArArGrUrGrGrCrArCrCrGrArGrUrCrGrGrUr | |
| | NG_ED17-_ | GrCrArGrUrCrCrCrUrUrUrCrUrCrGrUrCrGrArUrGrGrUrCrArGrCrArCrArGrCrCrUrUrArUrGrCrArCrGrGrCrC*mU*mG* | |
| | 11FE_ | mG | |
| | PB17 | | |
| 671 | A1AT_ | mC*mC*mA*rGrGrCrCrGrUrGrCrArUrArArGrGrCrUrGrGrUrUrUrUrArGrArGrCrUrArGrArArArUrArGrCrArArGrUrUrA | 24740 |
| | SpCas9- | rArArArUrArArGrGrCrUrArGrUrCrCrGrUrUrArUrCrArArCrUrUrGrArArArArArGrUrGrGrCrArCrCrGrArGrUrCrGrGrUr | |
| | NG_ED17-_ | GrCrArGrUrCrCrCrUrUrUrCrUrCrGrUrCrGrArUrGrGrUrCrArGrCrArCrArGrCrCrUrUrArUrGrCrArCrGrGrC*mC*mU* | |
| | 11FE_ | mG | |
| | PB16 | | |
| 672 | A1AT_ | mC*mC*mA*rGrGrCrCrGrUrGrCrArUrArArGrGrCrUrGrGrUrUrUrUrArGrArGrCrUrArGrArArArUrArGrCrArArGrUrUrA | 24741 |
| | SpCas9- | rArArArUrArArGrGrCrUrArGrUrCrCrGrUrUrArUrCrArArCrUrUrGrArArArArArGrUrGrGrCrArCrCrGrArGrUrCrGrGrUr | |
| | NG_ED17-_ | GrCrArGrUrCrCrCrUrUrUrCrUrCrGrUrCrGrArUrGrGrUrCrArGrCrArCrArGrCrCrUrUrArUrGrCrArCrGrG*mC*mC*mU | |
| | 11FE_ | | |
| | PB15 | | |
| 673 | A1AT_ | mC*mC*mA*rGrGrCrCrGrUrGrCrArUrArArGrGrCrUrGrGrUrUrUrUrArGrArGrCrUrArGrArArArUrArGrCrArArGrUrUrA | 24742 |
| | SpCas9- | rArArArUrArArGrGrCrUrArGrUrCrCrGrUrUrArUrCrArArCrUrUrGrArArArArArGrUrGrGrCrArCrCrGrArGrUrCrGrGrUr | |
| | NG_ED17-_ | GrCrArGrUrCrCrCrUrUrUrCrUrCrGrUrCrGrArUrGrGrUrCrArGrCrArCrArGrCrCrUrUrArUrGrCrArCrG*mG*mC*mC | |
| | 11FE_ | | |
| | PB14 | | |
| 674 | A1AT_ | mC*mC*mA*rGrGrCrCrGrUrGrCrArUrArArGrGrCrUrGrGrUrUrUrUrArGrArGrCrUrArGrArArArUrArGrCrArArGrUrUrA | 24743 |
| | SpCas9- | rArArArUrArArGrGrCrUrArGrUrCrCrGrUrUrArUrCrArArCrUrUrGrArArArArArGrUrGrGrCrArCrCrGrArGrUrCrGrGrUr | |
| | NG_ED17-_ | GrCrArGrUrCrCrCrUrUrUrCrUrCrGrUrCrGrArUrGrGrUrCrArGrCrArCrArGrCrCrUrUrArUrGrCrArC*mG*mG*mC | |
| | 11FE_ | | |
| | PB13 | | |
| 675 | A1AT_ | mC*mC*mA*rGrGrCrCrGrUrGrCrArUrArArGrGrCrUrGrGrUrUrUrUrArGrArGrCrUrArGrArArArUrArGrCrArArGrUrUrA | 24744 |
| | SpCas9- | rArArArUrArArGrGrCrUrArGrUrCrCrGrUrUrArUrCrArArCrUrUrGrArArArArArGrUrGrGrCrArCrCrGrArGrUrCrGrGrUr | |
| | NG_ED17-_ | GrCrArGrUrCrCrCrUrUrUrCrUrCrGrUrCrGrArUrGrGrUrCrArGrCrArCrArGrCrCrUrUrArUrGrCrA*mC*mG*mG | |
| | 11FE_ | | |
| | PB12 | | |
| 676 | A1AT_ | mC*mC*mA*rGrGrCrCrGrUrGrCrArUrArArGrGrCrUrGrGrUrUrUrUrArGrArGrCrUrArGrArArArUrArGrCrArArGrUrUrA | 24745 |
| | SpCas9- | rArArArUrArArGrGrCrUrArGrUrCrCrGrUrUrArUrCrArArCrUrUrGrArArArArArGrUrGrGrCrArCrCrGrArGrUrCrGrGrUr | |
| | NG_ED17-_ | GrCrArGrUrCrCrCrUrUrUrCrUrCrGrUrCrGrArUrGrGrUrCrArGrCrArCrArGrCrCrUrUrArUrGrC*mA*mC*mG | |
| | 11FE_ | | |
| | PB11 | | |
| 677 | A1AT_ | mC*mC*mA*rGrGrCrCrGrUrGrCrArUrArArGrGrCrUrGrGrUrUrUrUrArGrArGrCrUrArGrArArArUrArGrCrArArGrUrUrA | 24746 |
| | SpCas9- | rArArArUrArArGrGrCrUrArGrUrCrCrGrUrUrArUrCrArArCrUrUrGrArArArArArGrUrGrGrCrArCrCrGrArGrUrCrGrGrUr | |
| | NG_ED17-_ | GrCrArGrUrCrCrCrUrUrUrCrUrCrGrUrCrGrArUrGrGrUrCrArGrCrArCrArGrCrCrUrUrArUrG*mC*mA*mC | |
| | 11FE_ | | |
| | PB10 | | |
| 678 | A1AT_ | mC*mC*mA*rGrGrCrCrGrUrGrCrArUrArArGrGrCrUrGrGrUrUrUrUrArGrArGrCrUrArGrArArArUrArGrCrArArGrUrUrA | 24747 |
| | SpCas9- | rArArArUrArArGrGrCrUrArGrUrCrCrGrUrUrArUrCrArArCrUrUrGrArArArArArGrUrGrGrCrArCrCrGrArGrUrCrGrGrUr | |
| | NG_ED17-_ | GrCrArGrUrCrCrCrUrUrUrCrUrCrGrUrCrGrArUrGrGrUrCrArGrCrArCrArGrCrCrUrUrArU*mG*mC*mA | |
| | 11FE_PB9 | | |
| 679 | A1AT_ | mC*mC*mA*rGrGrCrCrGrUrGrCrArUrArArGrGrCrUrGrGrUrUrUrUrArGrArGrCrUrArGrArArArUrArGrCrArArGrUrUrA | 24748 |
| | SpCas9- | rArArArUrArArGrGrCrUrArGrUrCrCrGrUrUrArUrCrArArCrUrUrGrArArArArArGrUrGrGrCrArCrCrGrArGrUrCrGrGrUr | |
| | NG_ED17-_ | GrCrArGrUrCrCrCrUrUrUrCrUrCrGrUrCrGrArUrGrGrUrCrArGrCrArCrArGrCrCrUrUrA*mU*mG*mC | |
| | 11FE_PB8 | | |
| 680 | A1AT_ | mC*mC*mA*rGrGrCrCrGrUrGrCrArUrArArGrGrCrUrGrGrUrUrUrUrArGrArGrCrUrArGrArArArUrArGrCrArArGrUrUrA | 24749 |
| | SpCas9- | rArArArUrArArGrGrCrUrArGrUrCrCrGrUrUrArUrCrArArCrUrUrGrArArArArArGrUrGrGrCrArCrCrGrArGrUrCrGrGrUr | |
| | NG_ED17-_ | GrCrUrCrCrCrUrUrUrCrUrCrGrUrCrGrArUrGrGrUrCrArGrCrArCrArGrCrCrUrUrArUrGrCrArCrGrGrCrC*mU*mG*mG | |
| | 9FE_PB17 | | |
| 681 | A1AT_ | mC*mC*mA*rGrGrCrCrGrUrGrCrArUrArArGrGrCrUrGrGrUrUrUrUrArGrArGrCrUrArGrArArArUrArGrCrArArGrUrUrA | 24750 |
| | SpCas9- | rArArArUrArArGrGrCrUrArGrUrCrCrGrUrUrArUrCrArArCrUrUrGrArArArArArGrUrGrGrCrArCrCrGrArGrUrCrGrGrUr | |
| | NG_ED17-_ | GrCrUrCrCrCrUrUrUrCrUrCrGrUrCrGrArUrGrGrUrCrArGrCrArCrArGrCrCrUrUrArUrGrCrArCrGrGrC*mC*mU*mG | |
| | 9FE_PB16 | | |
| 682 | A1AT_ | mC*mC*mA*rGrGrCrCrGrUrGrCrArUrArArGrGrCrUrGrGrUrUrUrUrArGrArGrCrUrArGrArArArUrArGrCrArArGrUrUrA | 24751 |
| | SpCas9- | ArArArUrArArGrGrCrUrArGrUrCrCrGrUrUrArUrCrArArCrUrUrGrArArArArArGrUrGrGrCrArCrCrGrArGrUrCrGrGrUr | |
| | NG_ED17-_ | GrCrUrCrCrCrUrUrUrCrUrCrGrUrCrGrArUrGrGrUrCrArGrCrArCrArGrCrCrUrUrArUrGrCrArCrGrG*mC*mC*mU | |
| | 9FE_PB15 | | |
| 683 | A1AT_ | mC*mC*mA*rGrGrCrCrGrUrGrCrArUrArArGrGrCrUrGrGrUrUrUrUrArGrArGrCrUrArGrArArArUrArGrCrArArGrUrUrA | 24752 |
| | SpCas9- | rArArArUrArArGrGrCrUrArGrUrCrCrGrUrUrArUrCrArArCrUrUrGrArArArArArGrUrGrGrCrArCrCrGrArGrUrCrGrGrUr | |
| | NG_ED17-_ | GrCrUrCrCrCrUrUrUrCrUrCrGrUrCrGrArUrGrGrUrCrArGrCrArCrArGrCrCrUrUrArUrGrCrArCrG*mG*mC*mC | |
| | 9FE_PB14 | | |
| 684 | A1AT_ | mC*mC*mA*rGrGrCrCrGrUrGrCrArUrArArGrGrCrUrGrGrUrUrUrUrArGrArGrCrUrArGrArArArUrArGrCrArArGrUrUrA | 24753 |
| | SpCas9- | rArArArUrArArGrGrCrUrArGrUrCrCrGrUrUrArUrCrArArCrUrUrGrArArArArArGrUrGrGrCrArCrCrGrArGrUrCrGrGrUr | |
| | NG_ED17-_ | GrCrUrCrCrCrUrUrUrCrUrCrGrUrCrGrArUrGrGrUrCrArGrCrArCrArGrCrCrUrUrArUrGrCrArC*mG*mG*mC | |
| | 9FE_PB13 | | |
| 685 | A1AT_ | mC*mC*mA*rGrGrCrCrGrUrGrCrArUrArArGrGrCrUrGrGrUrUrUrUrArGrArGrCrUrArGrArArArUrArGrCrArArGrUrUrA | 24754 |
| | SpCas9- | rArArArUrArArGrGrCrUrArGrUrCrCrGrUrUrArUrCrArArCrUrUrGrArArArArArGrUrGrGrCrArCrCrGrArGrUrCrGrGrUr | |
| | NG_ED17-_ | GrCrUrCrCrCrUrUrUrCrUrCrGrUrCrGrArUrGrGrUrCrArGrCrArCrArGrCrCrUrUrArUrGrCrA*mC*mG*mG | |
| | 9FE_PB12 | | |
| 686 | A1AT_ | mC*mC*mA*rGrGrCrCrGrUrGrCrArUrArArGrGrCrUrGrGrUrUrUrUrArGrArGrCrUrArGrArArArUrArGrCrArArGrUrUrA | 24755 |
| | SpCas9- | rArArArUrArArGrGrCrUrArGrUrCrCrGrUrUrArUrCrArArCrUrUrGrArArArArArGrUrGrGrCrArCrCrGrArGrUrCrGrGrUr | |
| | NG_ED17-_ | GrCrUrCrCrCrUrUrUrCrUrCrGrUrCrGrArUrGrGrUrCrArGrCrArCrArGrCrCrUrUrArUrGrC*mA*mC*mG | |
| | 9FE_PB11 | | |
| 687 | A1AT_ | mC*mC*mA*rGrGrCrCrGrUrGrCrArUrArArGrGrCrUrGrGrUrUrUrUrArGrArGrCrUrArGrArArArUrArGrCrArArGrUrUrA | 24756 |
| | SpCas9- | rArArArUrArArGrGrCrUrArGrUrCrCrGrUrUrArUrCrArArCrUrUrGrArArArArArGrUrGrGrCrArCrCrGrArGrUrCrGrGrUr | |
| | NG_ED17-_ | GrCrUrCrCrCrUrUrUrCrUrCrGrUrCrGrArUrGrGrUrCrArGrCrArCrArGrCrCrUrUrArUrG*mC*mA*mC | |
| | 9FE_PB10 | | |
| 688 | A1AT_ | mC*mC*mA*rGrGrCrCrGrUrGrCrArUrArArGrGrCrUrGrGrUrUrUrUrArGrArGrCrUrArGrArArArUrArGrCrArArGrUrUrA | 24757 |
| | SpCas9- | rArArArUrArArGrGrCrUrArGrUrCrCrGrUrUrArUrCrArArCrUrUrGrArArArArArGrUrGrGrCrArCrCrGrArGrUrCrGrGrUr | |
| | NG_ED17-_ | GrCrUrCrCrCrUrUrUrCrUrCrGrUrCrGrArUrGrGrUrCrArGrCrArCrArGrCrCrUrUrArU*mG*mC*mA | |
| | 9FE_PB9 | | |
| 689 | A1AT_ | mC*mC*mA*rGrGrCrCrGrUrGrCrArUrArArGrGrCrUrGrGrUrUrUrUrArGrArGrCrUrArGrArArArUrArGrCrArArGrUrUrA | 24758 |
| | SpCas9- | rArArArUrArArGrGrCrUrArGrUrCrCrGrUrUrArUrCrArArCrUrUrGrArArArArArGrUrGrGrCrArCrCrGrArGrUrCrGrGrUr | |
| | NG_ED17-_ | GrCrUrCrCrCrUrUrUrCrUrCrGrUrCrGrArUrGrGrUrCrArGrCrArCrArGrCrCrUrUrA*mU*mG*mC | |
| | 9FE_PB8 | | |
| 690 | A1AT_ | mC*mC*mA*rGrGrCrCrGrUrGrCrArUrArArGrGrCrUrGrGrUrUrUrUrArGrArGrCrUrArGrArArArUrArGrCrArArGrUrUrA | 24759 |
| | SpCas9- | rArArArUrArArGrGrCrUrArGrUrCrCrGrUrUrArUrCrArArCrUrUrGrArArArArArGrUrGrGrCrArCrCrGrArGrUrCrGrGrUr | |
| | NG_ED17-_ | GrCrCrCrUrUrUrCrUrCrGrUrCrGrArUrGrGrUrCrArGrCrArCrArGrCrCrUrUrArUrGrCrArCrGrGrCrC*mU*mG*mG | |
| | 7FE_PB17 | | |
| 691 | A1AT_ | mC*mC*mA*rGrGrCrCrGrUrGrCrArUrArArGrGrCrUrGrGrUrUrUrUrArGrArGrCrUrArGrArArArUrArGrCrArArGrUrUrA | 24760 |
| | SpCas9- | rArArArUrArArGrGrCrUrArGrUrCrCrGrUrUrArUrCrArArCrUrUrGrArArArArArGrUrGrGrCrArCrCrGrArGrUrCrGrGrUr | |
| | NG_ED17-_ | GrCrCrCrUrUrUrCrUrCrGrUrCrGrArUrGrGrUrCrArGrCrArCrArGrCrCrUrUrArUrGrCrArCrGrGrC*mC*mU*mG | |
| | 7FE_PB16 | | |
| 692 | A1AT_ | mC*mC*mA*rGrGrCrCrGrUrGrCrArUrArArGrGrCrUrGrGrUrUrUrUrArGrArGrCrUrArGrArArArUrArGrCrArArGrUrUrA | 24761 |
| | SpCas9- | rArArArUrArArGrGrCrUrArGrUrCrCrGrUrUrArUrCrArArCrUrUrGrArArArArArGrUrGrGrCrArCrCrGrArGrUrCrGrGrUr | |
| | NG_ED17-_ | GrCrCrCrUrUrUrCrUrCrGrUrCrGrArUrGrGrUrCrArGrCrArCrArGrCrCrUrUrArUrGrCrArCrGrG*mC*mC*mU | |
| | 7FE_PB15 | | |
| 693 | A1AT_ | mC*mC*mA*rGrGrCrCrGrUrGrCrArUrArArGrGrCrUrGrGrUrUrUrUrArGrArGrCrUrArGrArArArUrArGrCrArArGrUrUrA | 24762 |
| | SpCas9- | rArArArUrArArGrGrCrUrArGrUrCrCrGrUrUrArUrCrArArCrUrUrGrArArArArArGrUrGrGrCrArCrCrGrArGrUrCrGrGrUr | |
| | NG_ED17-_ | GrCrCrCrUrUrUrCrUrCrGrUrCrGrArUrGrGrUrCrArGrCrArCrArGrCrCrUrUrArUrGrCrArCrG*mG*mC*mC | |
| | 7FE_PB14 | | |
| 694 | A1AT_ | mC*mC*mA*rGrGrCrCrGrUrGrCrArUrArArGrGrCrUrGrGrUrUrUrUrArGrArGrCrUrArGrArArArUrArGrCrArArGrUrUrA | 24763 |
| | SpCas9- | rArArArUrArArGrGrCrUrArGrUrCrCrGrUrUrArUrCrArArCrUrUrGrArArArArArGrUrGrGrCrArCrCrGrArGrUrCrGrGrUr | |
| | NG_ED17-_ | GrCrCrCrUrUrUrCrUrCrGrUrCrGrArUrGrGrUrCrArGrCrArCrArGrCrCrUrUrArUrGrCrArC*mG*mG*mC | |
| | 7FE_PB13 | | |
| 695 | A1AT_ | mC*mC*mA*rGrGrCrCrGrUrGrCrArUrArArGrGrCrUrGrGrUrUrUrUrArGrArGrCrUrArGrArArArUrArGrCrArArGrUrUrA | 24764 |
| | SpCas9- | rArArArUrArArGrGrCrUrArGrUrCrCrGrUrUrArUrCrArArCrUrUrGrArArArArArGrUrGrGrCrArCrCrGrArGrUrCrGrGrUr | |
| | NG_ED17-_ | GrCrCrCrUrUrUrCrUrCrGrUrCrGrArUrGrGrUrCrArGrCrArCrArGrCrCrUrUrArUrGrCrA*mC*mG*mG | |
| | 7FE_PB12 | | |
| 696 | A1AT_ | mC*mC*mA*rGrGrCrCrGrUrGrCrArUrArArGrGrCrUrGrGrUrUrUrUrArGrArGrCrUrArGrArArArUrArGrCrArArGrUrUrA | 24765 |
| | SpCas9- | rArArArUrArArGrGrCrUrArGrUrCrCrGrUrUrArUrCrArArCrUrUrGrArArArArArGrUrGrGrCrArCrCrGrArGrUrCrGrGrUr | |
| | NG_ED17-_ | GrCrCrCrUrUrUrCrUrCrGrUrCrGrArUrGrGrUrCrArGrCrArCrArGrCrCrUrUrArUrGrC*mA*mC*mG | |
| | 7FE_PB11 | | |
| 697 | A1AT_ | mC*mC*mA*rGrGrCrCrGrUrGrCrArUrArArGrGrCrUrGrGrUrUrUrUrArGrArGrCrUrArGrArArArUrArGrCrArArGrUrUrA | 24766 |
| | SpCas9- | rArArArUrArArGrGrCrUrArGrUrCrCrGrUrUrArUrCrArArCrUrUrGrArArArArArGrUrGrGrCrArCrCrGrArGrUrCrGrGrUr | |
| | NG_ED17-_ | GrCrCrCrUrUrUrCrUrCrGrUrCrGrArUrGrGrUrCrArGrCrArCrArGrCrCrUrUrArUrG*mC*mA*mC | |
| | 7FE_PB10 | | |
| 698 | A1AT_ | mC*mC*mA*rGrGrCrCrGrUrGrCrArUrArArGrGrCrUrGrGrUrUrUrUrArGrArGrCrUrArGrArArArUrArGrCrArArGrUrUrA | 24767 |
| | SpCas9- | rArArArUrArArGrGrCrUrArGrUrCrCrGrUrUrArUrCrArArCrUrUrGrArArArArArGrUrGrGrCrArCrCrGrArGrUrCrGrGrUr | |
| | NG_ED17-_ | GrCrCrCrUrUrUrCrUrCrGrUrCrGrArUrGrGrUrCrArGrCrArCrArGrCrCrUrUrArU*mG*mC*mA | |
| | 7FE_PB9 | | |
| 699 | A1AT_ | mC*mC*mA*rGrGrCrCrGrUrGrCrArUrArArGrGrCrUrGrGrUrUrUrUrArGrArGrCrUrArGrArArArUrArGrCrArArGrUrUrA | 24768 |
| | SpCas9- | rArArArUrArArGrGrCrUrArGrUrCrCrGrUrUrArUrCrArArCrUrUrGrArArArArArGrUrGrGrCrArCrCrGrArGrUrCrGrGrUr | |
| | NG_ED17-_ | GrCrCrCrUrUrUrCrUrCrGrUrCrGrArUrGrGrUrCrArGrCrArCrArGrCrCrUrUrA*mU*mG*mC | |
| | 7FE_PB8 | | |
| 700 | A1AT_ | mC*mC*mA*rGrGrCrCrGrUrGrCrArUrArArGrGrCrUrGrGrUrUrUrUrArGrArGrCrUrArGrArArArUrArGrCrArArGrUrUrA | 24769 |
| | SpCas9- | rArArArUrArArGrGrCrUrArGrUrCrCrGrUrUrArUrCrArArCrUrUrGrArArArArArGrUrGrGrCrArCrCrGrArGrUrCrGrGrUr | |
| | NG_ED17-_ | GrCrUrUrUrCrUrCrGrUrCrGrArUrGrGrUrCrArGrCrArCrArGrCrCrUrUrArUrGrCrArCrGrGrCrC*mU*mG*mG | |
| | 5FE_PB17 | | |
| 701 | A1AT_ | mC*mC*mA*rGrGrCrCrGrUrGrCrArUrArArGrGrCrUrGrGrUrUrUrUrArGrArGrCrUrArGrArArArUrArGrCrArArGrUrUrA | 24770 |
| | SpCas9- | rArArArUrArArGrGrCrUrArGrUrCrCrGrUrUrArUrCrArArCrUrUrGrArArArArArGrUrGrGrCrArCrCrGrArGrUrCrGrGrUr | |
| | NG_ED17-_ | GrCrUrUrUrCrUrCrGrUrCrGrArUrGrGrUrCrArGrCrArCrArGrCrCrUrUrArUrGrCrArCrGrGrC*mC*mU*mG | |
| | 5FE_PB16 | | |
| 702 | A1AT_ | mC*mC*mA*rGrGrCrCrGrUrGrCrArUrArArGrGrCrUrGrGrUrUrUrUrArGrArGrCrUrArGrArArArUrArGrCrArArGrUrUrA | 24771 |
| | SpCas9- | rArArArUrArArGrGrCrUrArGrUrCrCrGrUrUrArUrCrArArCrUrUrGrArArArArArGrUrGrGrCrArCrCrGrArGrUrCrGrGrUr | |
| | NG_ED17-_ | GrCrUrUrUrCrUrCrGrUrCrGrArUrGrGrUrCrArGrCrArCrArGrCrCrUrUrArUrGrCrArCrGrG*mC*mC*mU | |
| | 5FE_PB15 | | |
| 703 | A1AT_ | mC*mC*mA*rGrGrCrCrGrUrGrCrArUrArArGrGrCrUrGrGrUrUrUrUrArGrArGrCrUrArGrArArArUrArGrCrArArGrUrUrA | 24772 |
| | SpCas9- | rArArArUrArArGrGrCrUrArGrUrCrCrGrUrUrArUrCrArArCrUrUrGrArArArArArGrUrGrGrCrArCrCrGrArGrUrCrGrGrUr | |
| | NG_ED17-_ | GrCrUrUrUrCrUrCrGrUrCrGrArUrGrGrUrCrArGrCrArCrArGrCrCrUrUrArUrGrCrArCrG*mG*mC*mC | |
| | 5FE_PB14 | | |
| 704 | A1AT_ | mC*mC*mA*rGrGrCrCrGrUrGrCrArUrArArGrGrCrUrGrGrUrUrUrUrArGrArGrCrUrArGrArArArUrArGrCrArArGrUrUrA | 24773 |
| | SpCas9- | rArArArUrArArGrGrCrUrArGrUrCrCrGrUrUrArUrCrArArCrUrUrGrArArArArArGrUrGrGrCrArCrCrGrArGrUrCrGrGrUr | |
| | NG_ED17-_ | GrCrUrUrUrCrUrCrGrUrCrGrArUrGrGrUrCrArGrCrArCrArGrCrCrUrUrArUrGrCrArC*mG*mG*mC | |
| | 5FE_PB13 | | |
| 705 | A1AT_ | mC*mC*mA*rGrGrCrCrGrUrGrCrArUrArArGrGrCrUrGrGrUrUrUrUrArGrArGrCrUrArGrArArArUrArGrCrArArGrUrUrA | 24774 |
| | SpCas9- | rArArArUrArArGrGrCrUrArGrUrCrCrGrUrUrArUrCrArArCrUrUrGrArArArArArGrUrGrGrCrArCrCrGrArGrUrCrGrGrUr | |
| | NG_ED17-_ | GrCrUrUrUrCrUrCrGrUrCrGrArUrGrGrUrCrArGrCrArCrArGrCrCrUrUrArUrGrCrA*mC*mG*mG | |
| | 5FE_PB12 | | |
| 706 | A1AT_ | mC*mC*mA*rGrGrCrCrGrUrGrCrArUrArArGrGrCrUrGrGrUrUrUrUrArGrArGrCrUrArGrArArArUrArGrCrArArGrUrUrA | 24775 |
| | SpCas9- | rArArArUrArArGrGrCrUrArGrUrCrCrGrUrUrArUrCrArArCrUrUrGrArArArArArGrUrGrGrCrArCrCrGrArGrUrCrGrGrUr | |
| | NG_ED17-_ | GrCrUrUrUrCrUrCrGrUrCrGrArUrGrGrUrCrArGrCrArCrArGrCrCrUrUrArUrGrC*mA*mC*mG | |
| | 5FE_PB11 | | |
| 707 | A1AT_ | mC*mC*mA*rGrGrCrCrGrUrGrCrArUrArArGrGrCrUrGrGrUrUrUrUrArGrArGrCrUrArGrArArArUrArGrCrArArGrUrUrA | 24776 |
| | SpCas9- | rArArArUrArArGrGrCrUrArGrUrCrCrGrUrUrArUrCrArArCrUrUrGrArArArArArGrUrGrGrCrArCrCrGrArGrUrCrGrGrUr | |
| | NG_ED17-_ | GrCrUrUrUrCrUrCrGrUrCrGrArUrGrGrUrCrArGrCrArCrArGrCrCrUrUrArUrG*mC*mA*mC | |
| | 5FE_PB10 | | |
| 708 | A1AT_ | mC*mC*mA*rGrGrCrCrGrUrGrCrArUrArArGrGrCrUrGrGrUrUrUrUrArGrArGrCrUrArGrArArArUrArGrCrArArGrUrUrA | 24777 |
| | SpCas9- | rArArArUrArArGrGrCrUrArGrUrCrCrGrUrUrArUrCrArArCrUrUrGrArArArArArGrUrGrGrCrArCrCrGrArGrUrCrGrGrUr | |
| | NG_ED17-_ | GrCrUrUrUrCrUrCrGrUrCrGrArUrGrGrUrCrArGrCrArCrArGrCrCrUrUrArU*mG*mC*mA | |
| | 5FE_PB9 | | |
| 709 | A1AT_ | mC*mC*mA*rGrGrCrCrGrUrGrCrArUrArArGrGrCrUrGrGrUrUrUrUrArGrArGrCrUrArGrArArArUrArGrCrArArGrUrUrA | 24778 |
| | SpCas9- | ArArArUrArArGrGrCrUrArGrUrCrCrGrUrUrArUrCrArArCrUrUrGrArArArArArGrUrGrGrCrArCrCrGrArGrUrCrGrGrUr | |
| | NG_ED17-_ | GrCrUrUrUrCrUrCrGrUrCrGrArUrGrGrUrCrArGrCrArCrArGrCrCrUrUrA*mU*mG*mC | |
| | 5FE_PB8 | | |
| 710 | A1AT_ | mC*mC*mA*rGrGrCrCrGrUrGrCrArUrArArGrGrCrUrGrGrUrUrUrUrArGrArGrCrUrArGrArArArUrArGrCrArArGrUrUrA | 24779 |
| | SpCas9- | rArArArUrArArGrGrCrUrArGrUrCrCrGrUrUrArUrCrArArCrUrUrGrArArArArArGrUrGrGrCrArCrCrGrArGrUrCrGrGrUr | |
| | NG_ED17-_ | GrCrUrCrUrCrGrUrCrGrArUrGrGrUrCrArGrCrArCrArGrCrCrUrUrArUrGrCrArCrGrGrCrC*mU*mG*mG | |
| | 3FE_PB17 | | |
| 711 | A1AT_ | mC*mC*mA*rGrGrCrCrGrUrGrCrArUrArArGrGrCrUrGrGrUrUrUrUrArGrArGrCrUrArGrArArArUrArGrCrArArGrUrUrA | 24780 |
| | SpCas9- | rArArArUrArArGrGrCrUrArGrUrCrCrGrUrUrArUrCrArArCrUrUrGrArArArArArGrUrGrGrCrArCrCrGrArGrUrCrGrGrUr | |
| | NG_ED17-_ | GrCrUrCrUrCrGrUrCrGrArUrGrGrUrCrArGrCrArCrArGrCrCrUrUrArUrGrCrArCrGrGrC*mC*mU*mG | |
| | 3FE_PB16 | | |
| 712 | A1AT_ | mC*mC*mA*rGrGrCrCrGrUrGrCrArUrArArGrGrCrUrGrGrUrUrUrUrArGrArGrCrUrArGrArArArUrArGrCrArArGrUrUrA | 24781 |
| | SpCas9- | rArArArUrArArGrGrCrUrArGrUrCrCrGrUrUrArUrCrArArCrUrUrGrArArArArArGrUrGrGrCrArCrCrGrArGrUrCrGrGrUr | |
| | NG_ED17-_ | GrCrUrCrUrCrGrUrCrGrArUrGrGrUrCrArGrCrArCrArGrCrCrUrUrArUrGrCrArCrGrG*mC*mC*mU | |
| | 3FE_PB15 | | |
| 713 | A1AT_ | mC*mC*mA*rGrGrCrCrGrUrGrCrArUrArArGrGrCrUrGrGrUrUrUrUrArGrArGrCrUrArGrArArArUrArGrCrArArGrUrUrA | 24782 |
| | SpCas9- | ArArArUrArArGrGrCrUrArGrUrCrCrGrUrUrArUrCrArArCrUrUrGrArArArArArGrUrGrGrCrArCrCrGrArGrUrCrGrGrUr | |
| | NG_ED17-_ | GrCrUrCrUrCrGrUrCrGrArUrGrGrUrCrArGrCrArCrArGrCrCrUrUrArUrGrCrArCrG*mG*mC*mC | |
| | 3FE_PB14 | | |
| 714 | A1AT_ | mC*mC*mA*rGrGrCrCrGrUrGrCrArUrArArGrGrCrUrGrGrUrUrUrUrArGrArGrCrUrArGrArArArUrArGrCrArArGrUrUrA | 24783 |
| | SpCas9- | rArArArUrArArGrGrCrUrArGrUrCrCrGrUrUrArUrCrArArCrUrUrGrArArArArArGrUrGrGrCrArCrCrGrArGrUrCrGrGrUr | |
| | NG_ED17-_ | GrCrUrCrUrCrGrUrCrGrArUrGrGrUrCrArGrCrArCrArGrCrCrUrUrArUrGrCrArC*mG*mG*mC | |
| | 3FE_PB13 | | |
| 715 | A1AT_ | mC*mC*mA*rGrGrCrCrGrUrGrCrArUrArArGrGrCrUrGrGrUrUrUrUrArGrArGrCrUrArGrArArArUrArGrCrArArGrUrUrA | 24784 |
| | SpCas9- | rArArArUrArArGrGrCrUrArGrUrCrCrGrUrUrArUrCrArArCrUrUrGrArArArArArGrUrGrGrCrArCrCrGrArGrUrCrGrGrUr | |
| | NG_ED17-_ | GrCrUrCrUrCrGrUrCrGrArUrGrGrUrCrArGrCrArCrArGrCrCrUrUrArUrGrCrA*mC*mG*mG | |
| | 3FE_PB12 | | |
| 716 | A1AT_ | mC*mC*mA*rGrGrCrCrGrUrGrCrArUrArArGrGrCrUrGrGrUrUrUrUrArGrArGrCrUrArGrArArArUrArGrCrArArGrUrUrA | 24785 |
| | SpCas9- | rArArArUrArArGrGrCrUrArGrUrCrCrGrUrUrArUrCrArArCrUrUrGrArArArArArGrUrGrGrCrArCrCrGrArGrUrCrGrGrUr | |
| | NG_ED17-_ | GrCrUrCrUrCrGrUrCrGrArUrGrGrUrCrArGrCrArCrArGrCrCrUrUrArUrGrC*mA*mC*mG | |
| | 3FE_PB11 | | |
| 717 | A1AT_ | mC*mC*mA*rGrGrCrCrGrUrGrCrArUrArArGrGrCrUrGrGrUrUrUrUrArGrArGrCrUrArGrArArArUrArGrCrArArGrUrUrA | 24786 |
| | SpCas9- | rArArArUrArArGrGrCrUrArGrUrCrCrGrUrUrArUrCrArArCrUrUrGrArArArArArGrUrGrGrCrArCrCrGrArGrUrCrGrGrUr | |
| | NG_ED17-_ | GrCrUrCrUrCrGrUrCrGrArUrGrGrUrCrArGrCrArCrArGrCrCrUrUrArUrG*mC*mA*mC | |
| | 3FE_PB10 | | |
| 718 | A1AT_ | mC*mC*mA*rGrGrCrCrGrUrGrCrArUrArArGrGrCrUrGrGrUrUrUrUrArGrArGrCrUrArGrArArArUrArGrCrArArGrUrUrA | 24787 |
| | SpCas9- | rArArArUrArArGrGrCrUrArGrUrCrCrGrUrUrArUrCrArArCrUrUrGrArArArArArGrUrGrGrCrArCrCrGrArGrUrCrGrGrUr | |
| | NG_ED17-_ | GrCrUrCrUrCrGrUrCrGrArUrGrGrUrCrArGrCrArCrArGrCrCrUrUrArU*mG*mC*mA | |
| | 3FE_PB9 | | |
| 719 | A1AT_ | mC*mC*mA*rGrGrCrCrGrUrGrCrArUrArArGrGrCrUrGrGrUrUrUrUrArGrArGrCrUrArGrArArArUrArGrCrArArGrUrUrA | 24788 |
| | SpCas9- | rArArArUrArArGrGrCrUrArGrUrCrCrGrUrUrArUrCrArArCrUrUrGrArArArArArGrUrGrGrCrArCrCrGrArGrUrCrGrGrUr | |
| | NG_ED17-_ | GrCrUrCrUrCrGrUrCrGrArUrGrGrUrCrArGrCrArCrArGrCrCrUrUrA*mU*mG*mC | |
| | 3FE_PB8 | | |
| 720 | A1AT_SpRY_ | mU*mC*mC*rArGrGrCrCrGrUrGrCrArUrArArGrGrCrUrGrUrUrUrUrArGrArGrCrUrArGrArArArUrArGrCrArArGrUrUrA | 24789 |
| | ED18-_ | rArArArUrArArGrGrCrUrArGrUrCrCrGrUrUrArUrCrArArCrUrUrGrArArArArArGrUrGrGrCrArCrCrGrArGrUrCrGrGrUr | |
| | G_30FE_ | GrCrArCrArUrGrGrCrCrCrCrArGrCrArGrCrUrUrCrArGrUrCrCrCrUrUrUrCrUrCrGrUrCrGrArUrGrGrUrCrArGrCrArCrAr | |
| | PB17 | GrCrCrUrUrArUrGrCrArCrGrGrCrCrU*mG*mG*mA | |
| 721 | A1AT_SpRY_ | mU*mC*mC*rArGrGrCrCrGrUrGrCrArUrArArGrGrCrUrGrUrUrUrUrArGrArGrCrUrArGrArArArUrArGrCrArArGrUrUrA | 24790 |
| | ED18-_ | rArArArUrArArGrGrCrUrArGrUrCrCrGrUrUrArUrCrArArCrUrUrGrArArArArArGrUrGrGrCrArCrCrGrArGrUrCrGrGrUr | |
| | G_30FE_ | GrCrArCrArUrGrGrCrCrCrCrArGrCrArGrCrUrUrCrArGrUrCrCrCrUrUrUrCrUrCrGrUrCrGrArUrGrGrUrCrArGrCrArCrAr | |
| | PB16 | GrCrCrUrUrArUrGrCrArCrGrGrCrC*mU*mG*mG | |
| 722 | A1AT_SpRY_ | mU*mC*mC*rArGrGrCrCrGrUrGrCrArUrArArGrGrCrUrGrUrUrUrUrArGrArGrCrUrArGrArArArUrArGrCrArArGrUrUrA | 24791 |
| | ED18-_ | rArArArUrArArGrGrCrUrArGrUrCrCrGrUrUrArUrCrArArCrUrUrGrArArArArArGrUrGrGrCrArCrCrGrArGrUrCrGrGrUr | |
| | G_30FE_ | GrCrArCrArUrGrGrCrCrCrCrArGrCrArGrCrUrUrCrArGrUrCrCrCrUrUrUrCrUrCrGrUrCrGrArUrGrGrUrCrArGrCrArCrAr | |
| | PB15 | GrCrCrUrUrArUrGrCrArCrGrGrC*mC*mU*mG | |
| 723 | A1AT_SpRY_ | mU*mC*mC*rArGrGrCrCrGrUrGrCrArUrArArGrGrCrUrGrUrUrUrUrArGrArGrCrUrArGrArArArUrArGrCrArArGrUrUrA | 24792 |
| | ED18-_ | rArArArUrArArGrGrCrUrArGrUrCrCrGrUrUrArUrCrArArCrUrUrGrArArArArArGrUrGrGrCrArCrCrGrArGrUrCrGrGrUr | |
| | G_30FE_ | GrCrArCrArUrGrGrCrCrCrCrArGrCrArGrCrUrUrCrArGrUrCrCrCrUrUrUrCrUrCrGrUrCrGrArUrGrGrUrCrArGrCrArCrAr | |
| | PB14 | GrCrCrUrUrArUrGrCrArCrGrG*mC*mC*mU | |
| 724 | A1AT_SpRY_ | mU*mC*mC*rArGrGrCrCrGrUrGrCrArUrArArGrGrCrUrGrUrUrUrUrArGrArGrCrUrArGrArArArUrArGrCrArArGrUrUrA | 24793 |
| | ED18-_ | rArArArUrArArGrGrCrUrArGrUrCrCrGrUrUrArUrCrArArCrUrUrGrArArArArArGrUrGrGrCrArCrCrGrArGrUrCrGrGrUr | |
| | G_30FE_ | GrCrArCrArUrGrGrCrCrCrCrArGrCrArGrCrUrUrCrArGrUrCrCrCrUrUrUrCrUrCrGrUrCrGrArUrGrGrUrCrArGrCrArCrAr | |
| | PB13 | GrCrCrUrUrArUrGrCrArCrG*mG*mC*mC | |
| 725 | A1AT_SpRY_ | mU*mC*mC*rArGrGrCrCrGrUrGrCrArUrArArGrGrCrUrGrUrUrUrUrArGrArGrCrUrArGrArArArUrArGrCrArArGrUrUrA | 24794 |
| | ED18-_ | rArArArUrArArGrGrCrUrArGrUrCrCrGrUrUrArUrCrArArCrUrUrGrArArArArArGrUrGrGrCrArCrCrGrArGrUrCrGrGrUr | |
| | G_30FE_ | GrCrArCrArUrGrGrCrCrCrCrArGrCrArGrCrUrUrCrArGrUrCrCrCrUrUrUrCrUrCrGrUrCrGrArUrGrGrUrCrArGrCrArCrAr | |
| | PB12 | GrCrCrUrUrArUrGrCrArC*mG*mG*mC | |
| 726 | A1AT_SpRY_ | mU*mC*mC*rArGrGrCrCrGrUrGrCrArUrArArGrGrCrUrGrUrUrUrUrArGrArGrCrUrArGrArArArUrArGrCrArArGrUrUrA | 24795 |
| | ED18-_ | rArArArUrArArGrGrCrUrArGrUrCrCrGrUrUrArUrCrArArCrUrUrGrArArArArArGrUrGrGrCrArCrCrGrArGrUrCrGrGrUr | |
| | G_30FE_ | GrCrArCrArUrGrGrCrCrCrCrArGrCrArGrCrUrUrCrArGrUrCrCrCrUrUrUrCrUrCrGrUrCrGrArUrGrGrUrCrArGrCrArCrAr | |
| | PB11 | GrCrCrUrUrArUrGrCrA*mC*mG*mG | |
| 727 | A1AT_SpRY_ | mU*mC*mC*rArGrGrCrCrGrUrGrCrArUrArArGrGrCrUrGrUrUrUrUrArGrArGrCrUrArGrArArArUrArGrCrArArGrUrUrA | 24796 |
| | ED18-_ | rArArArUrArArGrGrCrUrArGrUrCrCrGrUrUrArUrCrArArCrUrUrGrArArArArArGrUrGrGrCrArCrCrGrArGrUrCrGrGrUr | |
| | G_30FE_ | GrCrArCrArUrGrGrCrCrCrCrArGrCrArGrCrUrUrCrArGrUrCrCrCrUrUrUrCrUrCrGrUrCrGrArUrGrGrUrCrArGrCrArCrAr | |
| | PB10 | GrCrCrUrUrArUrGrC*mA*mC*mG | |
| 728 | A1AT_SpRY_ | mU*mC*mC*rArGrGrCrCrGrUrGrCrArUrArArGrGrCrUrGrUrUrUrUrArGrArGrCrUrArGrArArArUrArGrCrArArGrUrUrA | 24797 |
| | ED18-_ | rArArArUrArArGrGrCrUrArGrUrCrCrGrUrUrArUrCrArArCrUrUrGrArArArArArGrUrGrGrCrArCrCrGrArGrUrCrGrGrUr | |
| | G_30FE_ | GrCrArCrArUrGrGrCrCrCrCrArGrCrArGrCrUrUrCrArGrUrCrCrCrUrUrUrCrUrCrGrUrCrGrArUrGrGrUrCrArGrCrArCrAr | |
| | PB9 | GrCrCrUrUrArUrG*mC*mA*mC | |
| 729 | A1AT_SpRY_ | mU*mC*mC*rArGrGrCrCrGrUrGrCrArUrArArGrGrCrUrGrUrUrUrUrArGrArGrCrUrArGrArArArUrArGrCrArArGrUrUrA | 24798 |
| | ED18-_ | rArArArUrArArGrGrCrUrArGrUrCrCrGrUrUrArUrCrArArCrUrUrGrArArArArArGrUrGrGrCrArCrCrGrArGrUrCrGrGrUr | |
| | G_30FE_ | GrCrArCrArUrGrGrCrCrCrCrArGrCrArGrCrUrUrCrArGrUrCrCrCrUrUrUrCrUrCrGrUrCrGrArUrGrGrUrCrArGrCrArCrAr | |
| | PB8 | GrCrCrUrUrArU*mG*mC*mA | |
| 730 | A1AT_SpRY_ | mU*mC*mC*rArGrGrCrCrGrUrGrCrArUrArArGrGrCrUrGrUrUrUrUrArGrArGrCrUrArGrArArArUrArGrCrArArGrUrUrA | 24799 |
| | ED18-_ | rArArArUrArArGrGrCrUrArGrUrCrCrGrUrUrArUrCrArArCrUrUrGrArArArArArGrUrGrGrCrArCrCrGrArGrUrCrGrGrUr | |
| | G_25FE_ | GrCrGrCrCrCrCrArGrCrArGrCrUrUrCrArGrUrCrCrCrUrUrUrCrUrCrGrUrCrGrArUrGrGrUrCrArGrCrArCrArGrCrCrUrUr | |
| | PB17 | ArUrGrCrArCrGrGrCrCrU*mG*mG*mA | |
| 731 | A1AT_SpRY_ | mU*mC*mC*rArGrGrCrCrGrUrGrCrArUrArArGrGrCrUrGrUrUrUrUrArGrArGrCrUrArGrArArArUrArGrCrArArGrUrUrA | 24800 |
| | ED18-_ | rArArArUrArArGrGrCrUrArGrUrCrCrGrUrUrArUrCrArArCrUrUrGrArArArArArGrUrGrGrCrArCrCrGrArGrUrCrGrGrUr | |
| | G_25FE_ | GrCrGrCrCrCrCrArGrCrArGrCrUrUrCrArGrUrCrCrCrUrUrUrCrUrCrGrUrCrGrArUrGrGrUrCrArGrCrArCrArGrCrCrUrUr | |
| | PB16 | ArUrGrCrArCrGrGrCrC*mU*mG*mG | |
| 732 | A1AT_SpRY_ | mU*mC*mC*rArGrGrCrCrGrUrGrCrArUrArArGrGrCrUrGrUrUrUrUrArGrArGrCrUrArGrArArArUrArGrCrArArGrUrUrA | 24801 |
| | ED18-_ | rArArArUrArArGrGrCrUrArGrUrCrCrGrUrUrArUrCrArArCrUrUrGrArArArArArGrUrGrGrCrArCrCrGrArGrUrCrGrGrUr | |
| | G_25FE_ | GrCrGrCrCrCrCrArGrCrArGrCrUrUrCrArGrUrCrCrCrUrUrUrCrUrCrGrUrCrGrArUrGrGrUrCrArGrCrArCrArGrCrCrUrUr | |
| | PB15 | ArUrGrCrArCrGrGrC*mC*mU*mG | |
| 733 | A1AT_SpRY_ | mU*mC*mC*rArGrGrCrCrGrUrGrCrArUrArArGrGrCrUrGrUrUrUrUrArGrArGrCrUrArGrArArArUrArGrCrArArGrUrUrA | 24802 |
| | ED18-_ | rArArArUrArArGrGrCrUrArGrUrCrCrGrUrUrArUrCrArArCrUrUrGrArArArArArGrUrGrGrCrArCrCrGrArGrUrCrGrGrUr | |
| | G_25FE_ | GrCrGrCrCrCrCrArGrCrArGrCrUrUrCrArGrUrCrCrCrUrUrUrCrUrCrGrUrCrGrArUrGrGrUrCrArGrCrArCrArGrCrCrUrUr | |
| | PB14 | ArUrGrCrArCrGrG*mC*mC*mU | |
| 734 | A1AT_SpRY_ | mU*mC*mC*rArGrGrCrCrGrUrGrCrArUrArArGrGrCrUrGrUrUrUrUrArGrArGrCrUrArGrArArArUrArGrCrArArGrUrUrA | 24803 |
| | ED18-_ | rArArArUrArArGrGrCrUrArGrUrCrCrGrUrUrArUrCrArArCrUrUrGrArArArArArGrUrGrGrCrArCrCrGrArGrUrCrGrGrUr | |
| | G_25FE_ | GrCrGrCrCrCrCrArGrCrArGrCrUrUrCrArGrUrCrCrCrUrUrUrCrUrCrGrUrCrGrArUrGrGrUrCrArGrCrArCrArGrCrCrUrUr | |
| | PB13 | ArUrGrCrArCrG*mG*mC*mC | |
| 735 | A1AT_SpRY_ | mU*mC*mC*rArGrGrCrCrGrUrGrCrArUrArArGrGrCrUrGrUrUrUrUrArGrArGrCrUrArGrArArArUrArGrCrArArGrUrUrA | 24804 |
| | ED18-_ | rArArArUrArArGrGrCrUrArGrUrCrCrGrUrUrArUrCrArArCrUrUrGrArArArArArGrUrGrGrCrArCrCrGrArGrUrCrGrGrUr | |
| | G_25FE_ | GrCrGrCrCrCrCrArGrCrArGrCrUrUrCrArGrUrCrCrCrUrUrUrCrUrCrGrUrCrGrArUrGrGrUrCrArGrCrArCrArGrCrCrUrUr | |
| | PB12 | ArUrGrCrArC*mG*mG*mC | |
| 736 | A1AT_SpRY_ | mU*mC*mC*rArGrGrCrCrGrUrGrCrArUrArArGrGrCrUrGrUrUrUrUrArGrArGrCrUrArGrArArArUrArGrCrArArGrUrUrA | 24805 |
| | ED18-_ | rArArArUrArArGrGrCrUrArGrUrCrCrGrUrUrArUrCrArArCrUrUrGrArArArArArGrUrGrGrCrArCrCrGrArGrUrCrGrGrUr | |
| | G_25FE_ | GrCrGrCrCrCrCrArGrCrArGrCrUrUrCrArGrUrCrCrCrUrUrUrCrUrCrGrUrCrGrArUrGrGrUrCrArGrCrArCrArGrCrCrUrUr | |
| | PB11 | ArUrGrCrA*mC*mG*mG | |
| 737 | A1AT_SpRY_ | mU*mC*mC*rArGrGrCrCrGrUrGrCrArUrArArGrGrCrUrGrUrUrUrUrArGrArGrCrUrArGrArArArUrArGrCrArArGrUrUrA | 24806 |
| | ED18-_ | rArArArUrArArGrGrCrUrArGrUrCrCrGrUrUrArUrCrArArCrUrUrGrArArArArArGrUrGrGrCrArCrCrGrArGrUrCrGrGrUr | |
| | G_25FE_ | GrCrGrCrCrCrCrArGrCrArGrCrUrUrCrArGrUrCrCrCrUrUrUrCrUrCrGrUrCrGrArUrGrGrUrCrArGrCrArCrArGrCrCrUrUr | |
| | PB10 | ArUrGrC*mA*mC*mG | |
| 738 | A1AT_SpRY_ | mU*mC*mC*rArGrGrCrCrGrUrGrCrArUrArArGrGrCrUrGrUrUrUrUrArGrArGrCrUrArGrArArArUrArGrCrArArGrUrUrA | 24807 |
| | ED18-_ | rArArArUrArArGrGrCrUrArGrUrCrCrGrUrUrArUrCrArArCrUrUrGrArArArArArGrUrGrGrCrArCrCrGrArGrUrCrGrGrUr | |
| | G_25FE_ | GrCrGrCrCrCrCrArGrCrArGrCrUrUrCrArGrUrCrCrCrUrUrUrCrUrCrGrUrCrGrArUrGrGrUrCrArGrCrArCrArGrCrCrUrUr | |
| | PB9 | ArUrG*mC*mA*mC | |
| 739 | A1AT_SpRY_ | mU*mC*mC*rArGrGrCrCrGrUrGrCrArUrArArGrGrCrUrGrUrUrUrUrArGrArGrCrUrArGrArArArUrArGrCrArArGrUrUrA | 24808 |
| | ED18-_ | rArArArUrArArGrGrCrUrArGrUrCrCrGrUrUrArUrCrArArCrUrUrGrArArArArArGrUrGrGrCrArCrCrGrArGrUrCrGrGrUr | |
| | G_25FE_ | GrCrGrCrCrCrCrArGrCrArGrCrUrUrCrArGrUrCrCrCrUrUrUrCrUrCrGrUrCrGrArUrGrGrUrCrArGrCrArCrArGrCrCrUrUr | |
| | PB8 | ArU*mG*mC*mA | |
| 740 | A1AT_SpRY_ | mU*mC*mC*rArGrGrCrCrGrUrGrCrArUrArArGrGrCrUrGrUrUrUrUrArGrArGrCrUrArGrArArArUrArGrCrArArGrUrUrA | 24809 |
| | ED18-_ | rArArArUrArArGrGrCrUrArGrUrCrCrGrUrUrArUrCrArArCrUrUrGrArArArArArGrUrGrGrCrArCrCrGrArGrUrCrGrGrUr | |
| | G_20FE_ | GrCrArGrCrArGrCrUrUrCrArGrUrCrCrCrUrUrUrCrUrCrGrUrCrGrArUrGrGrUrCrArGrCrArCrArGrCrCrUrUrArUrGrCrAr | |
| | PB17 | CrGrGrCrCrU*mG*mG*mA | |
| 741 | A1AT_SpRY_ | mU*mC*mC*rArGrGrCrCrGrUrGrCrArUrArArGrGrCrUrGrUrUrUrUrArGrArGrCrUrArGrArArArUrArGrCrArArGrUrUrA | 24810 |
| | ED18-_ | rArArArUrArArGrGrCrUrArGrUrCrCrGrUrUrArUrCrArArCrUrUrGrArArArArArGrUrGrGrCrArCrCrGrArGrUrCrGrGrUr | |
| | G_20FE_ | GrCrArGrCrArGrCrUrUrCrArGrUrCrCrCrUrUrUrCrUrCrGrUrCrGrArUrGrGrUrCrArGrCrArCrArGrCrCrUrUrArUrGrCrAr | |
| | PB16 | CrGrGrCrC*mU*mG*mG | |
| 742 | A1AT_SpRY_ | mU*mC*mC*rArGrGrCrCrGrUrGrCrArUrArArGrGrCrUrGrUrUrUrUrArGrArGrCrUrArGrArArArUrArGrCrArArGrUrUrA | 24811 |
| | ED18-_ | rArArArUrArArGrGrCrUrArGrUrCrCrGrUrUrArUrCrArArCrUrUrGrArArArArArGrUrGrGrCrArCrCrGrArGrUrCrGrGrUr | |
| | G_20FE_ | GrCrArGrCrArGrCrUrUrCrArGrUrCrCrCrUrUrUrCrUrCrGrUrCrGrArUrGrGrUrCrArGrCrArCrArGrCrCrUrUrArUrGrCrAr | |
| | PB15 | CrGrGrC*mC*mU*mG | |
| 743 | A1AT_SpRY_ | mU*mC*mC*rArGrGrCrCrGrUrGrCrArUrArArGrGrCrUrGrUrUrUrUrArGrArGrCrUrArGrArArArUrArGrCrArArGrUrUrA | 24812 |
| | ED18-_ | rArArArUrArArGrGrCrUrArGrUrCrCrGrUrUrArUrCrArArCrUrUrGrArArArArArGrUrGrGrCrArCrCrGrArGrUrCrGrGrUr | |
| | G_20FE_ | GrCrArGrCrArGrCrUrUrCrArGrUrCrCrCrUrUrUrCrUrCrGrUrCrGrArUrGrGrUrCrArGrCrArCrArGrCrCrUrUrArUrGrCrAr | |
| | PB14 | CrGrG*mC*mC*mU | |
| 744 | A1AT_SpRY_ | mU*mC*mC*rArGrGrCrCrGrUrGrCrArUrArArGrGrCrUrGrUrUrUrUrArGrArGrCrUrArGrArArArUrArGrCrArArGrUrUrA | 24813 |
| | ED18-_ | rArArArUrArArGrGrCrUrArGrUrCrCrGrUrUrArUrCrArArCrUrUrGrArArArArArGrUrGrGrCrArCrCrGrArGrUrCrGrGrUr | |
| | G_20FE_ | GrCrArGrCrArGrCrUrUrCrArGrUrCrCrCrUrUrUrCrUrCrGrUrCrGrArUrGrGrUrCrArGrCrArCrArGrCrCrUrUrArUrGrCrAr | |
| | PB13 | CrG*mG*mC*mC | |
| 745 | A1AT_SpRY_ | mU*mC*mC*rArGrGrCrCrGrUrGrCrArUrArArGrGrCrUrGrUrUrUrUrArGrArGrCrUrArGrArArArUrArGrCrArArGrUrUrA | 24814 |
| | ED18-_ | rArArArUrArArGrGrCrUrArGrUrCrCrGrUrUrArUrCrArArCrUrUrGrArArArArArGrUrGrGrCrArCrCrGrArGrUrCrGrGrUr | |
| | G_20FE_ | GrCrArGrCrArGrCrUrUrCrArGrUrCrCrCrUrUrUrCrUrCrGrUrCrGrArUrGrGrUrCrArGrCrArCrArGrCrCrUrUrArUrGrCrAr | |
| | PB12 | C*mG*mG*mC | |
| 746 | A1AT_SpRY_ | mU*mC*mC*rArGrGrCrCrGrUrGrCrArUrArArGrGrCrUrGrUrUrUrUrArGrArGrCrUrArGrArArArUrArGrCrArArGrUrUrA | 24815 |
| | ED18-_ | rArArArUrArArGrGrCrUrArGrUrCrCrGrUrUrArUrCrArArCrUrUrGrArArArArArGrUrGrGrCrArCrCrGrArGrUrCrGrGrUr | |
| | G_20FE_ | GrCrArGrCrArGrCrUrUrCrArGrUrCrCrCrUrUrUrCrUrCrGrUrCrGrArUrGrGrUrCrArGrCrArCrArGrCrCrUrUrArUrGrCrA | |
| | PB11 | *mC*mG*mG | |
| 747 | A1AT_SpRY_ | mU*mC*mC*rArGrGrCrCrGrUrGrCrArUrArArGrGrCrUrGrUrUrUrUrArGrArGrCrUrArGrArArArUrArGrCrArArGrUrUrA | 24816 |
| | ED18-_ | rArArArUrArArGrGrCrUrArGrUrCrCrGrUrUrArUrCrArArCrUrUrGrArArArArArGrUrGrGrCrArCrCrGrArGrUrCrGrGrUr | |
| | G_20FE_ | GrCrArGrCrArGrCrUrUrCrArGrUrCrCrCrUrUrUrCrUrCrGrUrCrGrArUrGrGrUrCrArGrCrArCrArGrCrCrUrUrArUrGrC* | |
| | PB10 | mA*mC*mG | |
| 748 | A1AT_SpRY_ | mU*mC*mC*rArGrGrCrCrGrUrGrCrArUrArArGrGrCrUrGrUrUrUrUrArGrArGrCrUrArGrArArArUrArGrCrArArGrUrUrA | 24817 |
| | ED18-_ | rArArArUrArArGrGrCrUrArGrUrCrCrGrUrUrArUrCrArArCrUrUrGrArArArArArGrUrGrGrCrArCrCrGrArGrUrCrGrGrUr | |
| | G_20FE_ | GrCrArGrCrArGrCrUrUrCrArGrUrCrCrCrUrUrUrCrUrCrGrUrCrGrArUrGrGrUrCrArGrCrArCrArGrCrCrUrUrArUrG*mC* | |
| | PB9 | mA*mC | |
| 749 | A1AT_SpRY_ | mU*mC*mC*rArGrGrCrCrGrUrGrCrArUrArArGrGrCrUrGrUrUrUrUrArGrArGrCrUrArGrArArArUrArGrCrArArGrUrUrA | 24818 |
| | ED18-_ | rArArArUrArArGrGrCrUrArGrUrCrCrGrUrUrArUrCrArArCrUrUrGrArArArArArGrUrGrGrCrArCrCrGrArGrUrCrGrGrUr | |
| | G_20FE_ | GrCrArGrCrArGrCrUrUrCrArGrUrCrCrCrUrUrUrCrUrCrGrUrCrGrArUrGrGrUrCrArGrCrArCrArGrCrCrUrUrArU*mG* | |
| | PB8 | mC*mA | |
| 750 | A1AT_SpRY_ | mU*mC*mC*rArGrGrCrCrGrUrGrCrArUrArArGrGrCrUrGrUrUrUrUrArGrArGrCrUrArGrArArArUrArGrCrArArGrUrUrA | 24819 |
| | ED18-_ | rArArArUrArArGrGrCrUrArGrUrCrCrGrUrUrArUrCrArArCrUrUrGrArArArArArGrUrGrGrCrArCrCrGrArGrUrCrGrGrUr | |
| | G_14FE_ | GrCrUrUrCrArGrUrCrCrCrUrUrUrCrUrCrGrUrCrGrArUrGrGrUrCrArGrCrArCrArGrCrCrUrUrArUrGrCrArCrGrGrCrCrU* | |
| | PB17 | mG*mG*mA | |
| 751 | A1AT_SpRY_ | mU*mC*mC*rArGrGrCrCrGrUrGrCrArUrArArGrGrCrUrGrUrUrUrUrArGrArGrCrUrArGrArArArUrArGrCrArArGrUrUrA | 24820 |
| | ED18-_ | rArArArUrArArGrGrCrUrArGrUrCrCrGrUrUrArUrCrArArCrUrUrGrArArArArArGrUrGrGrCrArCrCrGrArGrUrCrGrGrUr | |
| | G_14FE_ | GrCrUrUrCrArGrUrCrCrCrUrUrUrCrUrCrGrUrCrGrArUrGrGrUrCrArGrCrArCrArGrCrCrUrUrArUrGrCrArCrGrGrCrC* | |
| | PB16 | mU*mG*mG | |
| 752 | A1AT_SpRY_ | mU*mC*mC*rArGrGrCrCrGrUrGrCrArUrArArGrGrCrUrGrUrUrUrUrArGrArGrCrUrArGrArArArUrArGrCrArArGrUrUrA | 24821 |
| | ED18-_ | rArArArUrArArGrGrCrUrArGrUrCrCrGrUrUrArUrCrArArCrUrUrGrArArArArArGrUrGrGrCrArCrCrGrArGrUrCrGrGrUr | |
| | G_14FE_ | GrCrUrUrCrArGrUrCrCrCrUrUrUrCrUrCrGrUrCrGrArUrGrGrUrCrArGrCrArCrArGrCrCrUrUrArUrGrCrArCrGrGrC*mC* | |
| | PB15 | mU*mG | |
| 753 | A1AT_SpRY_ | mU*mC*mC*rArGrGrCrCrGrUrGrCrArUrArArGrGrCrUrGrUrUrUrUrArGrArGrCrUrArGrArArArUrArGrCrArArGrUrUrA | 24822 |
| | ED18-_ | rArArArUrArArGrGrCrUrArGrUrCrCrGrUrUrArUrCrArArCrUrUrGrArArArArArGrUrGrGrCrArCrCrGrArGrUrCrGrGrUr | |
| | G_14FE_ | GrCrUrUrCrArGrUrCrCrCrUrUrUrCrUrCrGrUrCrGrArUrGrGrUrCrArGrCrArCrArGrCrCrUrUrArUrGrCrArCrGrG*mC* | |
| | PB14 | mC*mU | |
| 754 | A1AT_SpRY_ | mU*mC*mC*rArGrGrCrCrGrUrGrCrArUrArArGrGrCrUrGrUrUrUrUrArGrArGrCrUrArGrArArArUrArGrCrArArGrUrUrA | 24823 |
| | ED18-_ | rArArArUrArArGrGrCrUrArGrUrCrCrGrUrUrArUrCrArArCrUrUrGrArArArArArGrUrGrGrCrArCrCrGrArGrUrCrGrGrUr | |
| | G_14FE_ | GrCrUrUrCrArGrUrCrCrCrUrUrUrCrUrCrGrUrCrGrArUrGrGrUrCrArGrCrArCrArGrCrCrUrUrArUrGrCrArCrG*mG*mC* | |
| | PB13 | mC | |
| 755 | A1AT_SpRY_ | mU*mC*mC*rArGrGrCrCrGrUrGrCrArUrArArGrGrCrUrGrUrUrUrUrArGrArGrCrUrArGrArArArUrArGrCrArArGrUrUrA | 24824 |
| | ED18-_ | rArArArUrArArGrGrCrUrArGrUrCrCrGrUrUrArUrCrArArCrUrUrGrArArArArArGrUrGrGrCrArCrCrGrArGrUrCrGrGrUr | |
| | G_14FE_ | GrCrUrUrCrArGrUrCrCrCrUrUrUrCrUrCrGrUrCrGrArUrGrGrUrCrArGrCrArCrArGrCrCrUrUrArUrGrCrArC*mG*mG* | |
| | PB12 | mC | |
| 756 | A1AT_SpRY_ | mU*mC*mC*rArGrGrCrCrGrUrGrCrArUrArArGrGrCrUrGrUrUrUrUrArGrArGrCrUrArGrArArArUrArGrCrArArGrUrUrA | 24825 |
| | ED18-_ | rArArArUrArArGrGrCrUrArGrUrCrCrGrUrUrArUrCrArArCrUrUrGrArArArArArGrUrGrGrCrArCrCrGrArGrUrCrGrGrUr | |
| | G_14FE_ | GrCrUrUrCrArGrUrCrCrCrUrUrUrCrUrCrGrUrCrGrArUrGrGrUrCrArGrCrArCrArGrCrCrUrUrArUrGrCrA*mC*mG*mG | |
| | PB11 | | |
| 757 | A1AT_SpRY_ | mU*mC*mC*rArGrGrCrCrGrUrGrCrArUrArArGrGrCrUrGrUrUrUrUrArGrArGrCrUrArGrArArArUrArGrCrArArGrUrUrA | 24826 |
| | ED18-_ | rArArArUrArArGrGrCrUrArGrUrCrCrGrUrUrArUrCrArArCrUrUrGrArArArArArGrUrGrGrCrArCrCrGrArGrUrCrGrGrUr | |
| | G_14FE_ | GrCrUrUrCrArGrUrCrCrCrUrUrUrCrUrCrGrUrCrGrArUrGrGrUrCrArGrCrArCrArGrCrCrUrUrArUrGrC*mA*mC*mG | |
| | PB10 | | |
| 758 | A1AT_SpRY_ | mU*mC*mC*rArGrGrCrCrGrUrGrCrArUrArArGrGrCrUrGrUrUrUrUrArGrArGrCrUrArGrArArArUrArGrCrArArGrUrUrA | 24827 |
| | ED18-_ | rArArArUrArArGrGrCrUrArGrUrCrCrGrUrUrArUrCrArArCrUrUrGrArArArArArGrUrGrGrCrArCrCrGrArGrUrCrGrGrUr | |
| | G_14FE_ | GrCrUrUrCrArGrUrCrCrCrUrUrUrCrUrCrGrUrCrGrArUrGrGrUrCrArGrCrArCrArGrCrCrUrUrArUrG*mC*mA*mC | |
| | PB9 | | |
| 759 | A1AT_SpRY_ | mU*mC*mC*rArGrGrCrCrGrUrGrCrArUrArArGrGrCrUrGrUrUrUrUrArGrArGrCrUrArGrArArArUrArGrCrArArGrUrUrA | 24828 |
| | ED18-_ | rArArArUrArArGrGrCrUrArGrUrCrCrGrUrUrArUrCrArArCrUrUrGrArArArArArGrUrGrGrCrArCrCrGrArGrUrCrGrGrUr | |
| | G_14FE_ | GrCrUrUrCrArGrUrCrCrCrUrUrUrCrUrCrGrUrCrGrArUrGrGrUrCrArGrCrArCrArGrCrCrUrUrArU*mG*mC*mA | |
| | PB8 | | |
| 760 | A1AT_SpRY_ | mU*mC*mC*rArGrGrCrCrGrUrGrCrArUrArArGrGrCrUrGrUrUrUrUrArGrArGrCrUrArGrArArArUrArGrCrArArGrUrUrA | 24829 |
| | ED18-_ | rArArArUrArArGrGrCrUrArGrUrCrCrGrUrUrArUrCrArArCrUrUrGrArArArArArGrUrGrGrCrArCrCrGrArGrUrCrGrGrUr | |
| | G_11FE_ | GrCrArGrUrCrCrCrUrUrUrCrUrCrGrUrCrGrArUrGrGrUrCrArGrCrArCrArGrCrCrUrUrArUrGrCrArCrGrGrCrCrU*mG* | |
| | PB17 | mG*mA | |
| 761 | A1AT_SpRY_ | mU*mC*mC*rArGrGrCrCrGrUrGrCrArUrArArGrGrCrUrGrUrUrUrUrArGrArGrCrUrArGrArArArUrArGrCrArArGrUrUrA | 24830 |
| | ED18-_ | rArArArUrArArGrGrCrUrArGrUrCrCrGrUrUrArUrCrArArCrUrUrGrArArArArArGrUrGrGrCrArCrCrGrArGrUrCrGrGrUr | |
| | G_11FE_ | GrCrArGrUrCrCrCrUrUrUrCrUrCrGrUrCrGrArUrGrGrUrCrArGrCrArCrArGrCrCrUrUrArUrGrCrArCrGrGrCrC*mU*mG* | |
| | PB16 | mG | |
| 762 | A1AT_SpRY_ | mU*mC*mC*rArGrGrCrCrGrUrGrCrArUrArArGrGrCrUrGrUrUrUrUrArGrArGrCrUrArGrArArArUrArGrCrArArGrUrUrA | 24831 |
| | ED18-_ | rArArArUrArArGrGrCrUrArGrUrCrCrGrUrUrArUrCrArArCrUrUrGrArArArArArGrUrGrGrCrArCrCrGrArGrUrCrGrGrUr | |
| | G_11FE_ | GrCrArGrUrCrCrCrUrUrUrCrUrCrGrUrCrGrArUrGrGrUrCrArGrCrArCrArGrCrCrUrUrArUrGrCrArCrGrGrC*mC*mU* | |
| | PB15 | mG | |
| 763 | A1AT_SpRY_ | mU*mC*mC*rArGrGrCrCrGrUrGrCrArUrArArGrGrCrUrGrUrUrUrUrArGrArGrCrUrArGrArArArUrArGrCrArArGrUrUrA | 24832 |
| | ED18-_ | rArArArUrArArGrGrCrUrArGrUrCrCrGrUrUrArUrCrArArCrUrUrGrArArArArArGrUrGrGrCrArCrCrGrArGrUrCrGrGrUr | |
| | G_11FE_ | GrCrArGrUrCrCrCrUrUrUrCrUrCrGrUrCrGrArUrGrGrUrCrArGrCrArCrArGrCrCrUrUrArUrGrCrArCrGrG*mC*mC*mU | |
| | PB14 | | |
| 764 | A1AT_SpRY_ | mU*mC*mC*rArGrGrCrCrGrUrGrCrArUrArArGrGrCrUrGrUrUrUrUrArGrArGrCrUrArGrArArArUrArGrCrArArGrUrUrA | 24833 |
| | ED18-_ | ArArArUrArArGrGrCrUrArGrUrCrCrGrUrUrArUrCrArArCrUrUrGrArArArArArGrUrGrGrCrArCrCrGrArGrUrCrGrGrUr | |
| | G_11FE_ | GrCrArGrUrCrCrCrUrUrUrCrUrCrGrUrCrGrArUrGrGrUrCrArGrCrArCrArGrCrCrUrUrArUrGrCrArCrG*mG*mC*mC | |
| | PB13 | | |
| 765 | A1AT_SpRY_ | mU*mC*mC*rArGrGrCrCrGrUrGrCrArUrArArGrGrCrUrGrUrUrUrUrArGrArGrCrUrArGrArArArUrArGrCrArArGrUrUrA | 24834 |
| | ED18-_ | rArArArUrArArGrGrCrUrArGrUrCrCrGrUrUrArUrCrArArCrUrUrGrArArArArArGrUrGrGrCrArCrCrGrArGrUrCrGrGrUr | |
| | G_11FE_ | GrCrArGrUrCrCrCrUrUrUrCrUrCrGrUrCrGrArUrGrGrUrCrArGrCrArCrArGrCrCrUrUrArUrGrCrArC*mG*mG*mC | |
| | PB12 | | |
| 766 | A1AT_SpRY_ | mU*mC*mC*rArGrGrCrCrGrUrGrCrArUrArArGrGrCrUrGrUrUrUrUrArGrArGrCrUrArGrArArArUrArGrCrArArGrUrUrA | 24835 |
| | ED18-_ | rArArArUrArArGrGrCrUrArGrUrCrCrGrUrUrArUrCrArArCrUrUrGrArArArArArGrUrGrGrCrArCrCrGrArGrUrCrGrGrUr | |
| | G_11FE_ | GrCrArGrUrCrCrCrUrUrUrCrUrCrGrUrCrGrArUrGrGrUrCrArGrCrArCrArGrCrCrUrUrArUrGrCrA*mC*mG*mG | |
| | PB11 | | |
| 767 | A1AT_SpRY_ | mU*mC*mC*rArGrGrCrCrGrUrGrCrArUrArArGrGrCrUrGrUrUrUrUrArGrArGrCrUrArGrArArArUrArGrCrArArGrUrUrA | 24836 |
| | ED18-_ | rArArArUrArArGrGrCrUrArGrUrCrCrGrUrUrArUrCrArArCrUrUrGrArArArArArGrUrGrGrCrArCrCrGrArGrUrCrGrGrUr | |
| | G_11FE_ | GrCrArGrUrCrCrCrUrUrUrCrUrCrGrUrCrGrArUrGrGrUrCrArGrCrArCrArGrCrCrUrUrArUrGrC*mA*mC*mG | |
| | PB10 | | |
| 768 | A1AT_SpRY_ | mU*mC*mC*rArGrGrCrCrGrUrGrCrArUrArArGrGrCrUrGrUrUrUrUrArGrArGrCrUrArGrArArArUrArGrCrArArGrUrUrA | 24837 |
| | ED18-_ | rArArArUrArArGrGrCrUrArGrUrCrCrGrUrUrArUrCrArArCrUrUrGrArArArArArGrUrGrGrCrArCrCrGrArGrUrCrGrGrUr | |
| | G_11FE_ | GrCrArGrUrCrCrCrUrUrUrCrUrCrGrUrCrGrArUrGrGrUrCrArGrCrArCrArGrCrCrUrUrArUrG*mC*mA*mC | |
| | PB9 | | |
| 769 | A1AT_SpRY_ | mU*mC*mC*rArGrGrCrCrGrUrGrCrArUrArArGrGrCrUrGrUrUrUrUrArGrArGrCrUrArGrArArArUrArGrCrArArGrUrUrA | 24838 |
| | ED18-_ | rArArArUrArArGrGrCrUrArGrUrCrCrGrUrUrArUrCrArArCrUrUrGrArArArArArGrUrGrGrCrArCrCrGrArGrUrCrGrGrUr | |
| | G_11FE_ | GrCrArGrUrCrCrCrUrUrUrCrUrCrGrUrCrGrArUrGrGrUrCrArGrCrArCrArGrCrCrUrUrArU*mG*mC*mA | |
| | PB8 | | |
| 770 | A1AT_SpRY_ | mU*mC*mC*rArGrGrCrCrGrUrGrCrArUrArArGrGrCrUrGrUrUrUrUrArGrArGrCrUrArGrArArArUrArGrCrArArGrUrUrA | 24839 |
| | ED18-_ | rArArArUrArArGrGrCrUrArGrUrCrCrGrUrUrArUrCrArArCrUrUrGrArArArArArGrUrGrGrCrArCrCrGrArGrUrCrGrGrUr | |
| | G_9FE_ | GrCrUrCrCrCrUrUrUrCrUrCrGrUrCrGrArUrGrGrUrCrArGrCrArCrArGrCrCrUrUrArUrGrCrArCrGrGrCrCrU*mG*mG* | |
| | PB17 | mA | |
| 771 | A1AT_SpRY_ | mU*mC*mC*rArGrGrCrCrGrUrGrCrArUrArArGrGrCrUrGrUrUrUrUrArGrArGrCrUrArGrArArArUrArGrCrArArGrUrUrA | 24840 |
| | ED18-_ | rArArArUrArArGrGrCrUrArGrUrCrCrGrUrUrArUrCrArArCrUrUrGrArArArArArGrUrGrGrCrArCrCrGrArGrUrCrGrGrUr | |
| | G_9FE_ | GrCrUrCrCrCrUrUrUrCrUrCrGrUrCrGrArUrGrGrUrCrArGrCrArCrArGrCrCrUrUrArUrGrCrArCrGrGrCrC*mU*mG*mG | |
| | PB16 | | |
| 772 | A1AT_SpRY_ | mU*mC*mC*rArGrGrCrCrGrUrGrCrArUrArArGrGrCrUrGrUrUrUrUrArGrArGrCrUrArGrArArArUrArGrCrArArGrUrUrA | 24841 |
| | ED18-_ | rArArArUrArArGrGrCrUrArGrUrCrCrGrUrUrArUrCrArArCrUrUrGrArArArArArGrUrGrGrCrArCrCrGrArGrUrCrGrGrUr | |
| | G_9FE_ | GrCrUrCrCrCrUrUrUrCrUrCrGrUrCrGrArUrGrGrUrCrArGrCrArCrArGrCrCrUrUrArUrGrCrArCrGrGrC*mC*mU*mG | |
| | PB15 | | |
| 773 | A1AT_SpRY_ | mU*mC*mC*rArGrGrCrCrGrUrGrCrArUrArArGrGrCrUrGrUrUrUrUrArGrArGrCrUrArGrArArArUrArGrCrArArGrUrUrA | 24842 |
| | ED18-_ | rArArArUrArArGrGrCrUrArGrUrCrCrGrUrUrArUrCrArArCrUrUrGrArArArArArGrUrGrGrCrArCrCrGrArGrUrCrGrGrUr | |
| | G_9FE_ | GrCrUrCrCrCrUrUrUrCrUrCrGrUrCrGrArUrGrGrUrCrArGrCrArCrArGrCrCrUrUrArUrGrCrArCrGrG*mC*mC*mU | |
| | PB14 | | |
| 774 | A1AT_SpRY_ | mU*mC*mC*rArGrGrCrCrGrUrGrCrArUrArArGrGrCrUrGrUrUrUrUrArGrArGrCrUrArGrArArArUrArGrCrArArGrUrUrA | 24843 |
| | ED18-_ | rArArArUrArArGrGrCrUrArGrUrCrCrGrUrUrArUrCrArArCrUrUrGrArArArArArGrUrGrGrCrArCrCrGrArGrUrCrGrGrUr | |
| | G_9FE_ | GrCrUrCrCrCrUrUrUrCrUrCrGrUrCrGrArUrGrGrUrCrArGrCrArCrArGrCrCrUrUrArUrGrCrArCrG*mG*mC*mC | |
| | PB13 | | |
| 775 | A1AT_SpRY_ | mU*mC*mC*rArGrGrCrCrGrUrGrCrArUrArArGrGrCrUrGrUrUrUrUrArGrArGrCrUrArGrArArArUrArGrCrArArGrUrUrA | 24844 |
| | ED18-_ | rArArArUrArArGrGrCrUrArGrUrCrCrGrUrUrArUrCrArArCrUrUrGrArArArArArGrUrGrGrCrArCrCrGrArGrUrCrGrGrUr | |
| | G_9FE_ | GrCrUrCrCrCrUrUrUrCrUrCrGrUrCrGrArUrGrGrUrCrArGrCrArCrArGrCrCrUrUrArUrGrCrArC*mG*mG*mC | |
| | PB12 | | |
| 776 | A1AT_SpRY_ | mU*mC*mC*rArGrGrCrCrGrUrGrCrArUrArArGrGrCrUrGrUrUrUrUrArGrArGrCrUrArGrArArArUrArGrCrArArGrUrUrA | 24845 |
| | ED18-_ | rArArArUrArArGrGrCrUrArGrUrCrCrGrUrUrArUrCrArArCrUrUrGrArArArArArGrUrGrGrCrArCrCrGrArGrUrCrGrGrUr | |
| | G_9FE_ | GrCrUrCrCrCrUrUrUrCrUrCrGrUrCrGrArUrGrGrUrCrArGrCrArCrArGrCrCrUrUrArUrGrCrA*mC*mG*mG | |
| | PB11 | | |
| 777 | A1AT_SpRY_ | mU*mC*mC*rArGrGrCrCrGrUrGrCrArUrArArGrGrCrUrGrUrUrUrUrArGrArGrCrUrArGrArArArUrArGrCrArArGrUrUrA | 24846 |
| | ED18-_ | rArArArUrArArGrGrCrUrArGrUrCrCrGrUrUrArUrCrArArCrUrUrGrArArArArArGrUrGrGrCrArCrCrGrArGrUrCrGrGrUr | |
| | G_9FE_ | GrCrUrCrCrCrUrUrUrCrUrCrGrUrCrGrArUrGrGrUrCrArGrCrArCrArGrCrCrUrUrArUrGrC*mA*mC*mG | |
| | PB10 | | |
| 778 | A1AT_SpRY_ | mU*mC*mC*rArGrGrCrCrGrUrGrCrArUrArArGrGrCrUrGrUrUrUrUrArGrArGrCrUrArGrArArArUrArGrCrArArGrUrUrA | 24847 |
| | ED18-_ | rArArArUrArArGrGrCrUrArGrUrCrCrGrUrUrArUrCrArArCrUrUrGrArArArArArGrUrGrGrCrArCrCrGrArGrUrCrGrGrUr | |
| | G_9FE_ | GrCrUrCrCrCrUrUrUrCrUrCrGrUrCrGrArUrGrGrUrCrArGrCrArCrArGrCrCrUrUrArUrG*mC*mA*mC | |
| | PB9 | | |
| 779 | A1AT_SpRY_ | mU*mC*mC*rArGrGrCrCrGrUrGrCrArUrArArGrGrCrUrGrUrUrUrUrArGrArGrCrUrArGrArArArUrArGrCrArArGrUrUrA | 24848 |
| | ED18-_ | rArArArUrArArGrGrCrUrArGrUrCrCrGrUrUrArUrCrArArCrUrUrGrArArArArArGrUrGrGrCrArCrCrGrArGrUrCrGrGrUr | |
| | G_9FE_ | GrCrUrCrCrCrUrUrUrCrUrCrGrUrCrGrArUrGrGrUrCrArGrCrArCrArGrCrCrUrUrArU*mG*mC*mA | |
| | PB8 | | |
| 780 | A1AT_SpRY_ | mU*mC*mC*rArGrGrCrCrGrUrGrCrArUrArArGrGrCrUrGrUrUrUrUrArGrArGrCrUrArGrArArArUrArGrCrArArGrUrUrA | 24849 |
| | ED18-_ | rArArArUrArArGrGrCrUrArGrUrCrCrGrUrUrArUrCrArArCrUrUrGrArArArArArGrUrGrGrCrArCrCrGrArGrUrCrGrGrUr | |
| | G_7FE_ | GrCrCrCrUrUrUrCrUrCrGrUrCrGrArUrGrGrUrCrArGrCrArCrArGrCrCrUrUrArUrGrCrArCrGrGrCrCrU*mG*mG*mA | |
| | PB17 | | |
| 781 | A1AT_SpRY_ | mU*mC*mC*rArGrGrCrCrGrUrGrCrArUrArArGrGrCrUrGrUrUrUrUrArGrArGrCrUrArGrArArArUrArGrCrArArGrUrUrA | 24850 |
| | ED18-_ | rArArArUrArArGrGrCrUrArGrUrCrCrGrUrUrArUrCrArArCrUrUrGrArArArArArGrUrGrGrCrArCrCrGrArGrUrCrGrGrUr | |
| | G_7FE_ | GrCrCrCrUrUrUrCrUrCrGrUrCrGrArUrGrGrUrCrArGrCrArCrArGrCrCrUrUrArUrGrCrArCrGrGrCrC*mU*mG*mG | |
| | PB16 | | |
| 782 | A1AT_SpRY_ | mU*mC*mC*rArGrGrCrCrGrUrGrCrArUrArArGrGrCrUrGrUrUrUrUrArGrArGrCrUrArGrArArArUrArGrCrArArGrUrUrA | 24851 |
| | ED18-_ | rArArArUrArArGrGrCrUrArGrUrCrCrGrUrUrArUrCrArArCrUrUrGrArArArArArGrUrGrGrCrArCrCrGrArGrUrCrGrGrUr | |
| | G_7FE_ | GrCrCrCrUrUrUrCrUrCrGrUrCrGrArUrGrGrUrCrArGrCrArCrArGrCrCrUrUrArUrGrCrArCrGrGrC*mC*mU*mG | |
| | PB15 | | |
| 783 | A1AT_SpRY_ | mU*mC*mC*rArGrGrCrCrGrUrGrCrArUrArArGrGrCrUrGrUrUrUrUrArGrArGrCrUrArGrArArArUrArGrCrArArGrUrUrA | 24852 |
| | ED18-_ | rArArArUrArArGrGrCrUrArGrUrCrCrGrUrUrArUrCrArArCrUrUrGrArArArArArGrUrGrGrCrArCrCrGrArGrUrCrGrGrUr | |
| | G_7FE_ | GrCrCrCrUrUrUrCrUrCrGrUrCrGrArUrGrGrUrCrArGrCrArCrArGrCrCrUrUrArUrGrCrArCrGrG*mC*mC*mU | |
| | PB14 | | |
| 784 | A1AT_SpRY_ | mU*mC*mC*rArGrGrCrCrGrUrGrCrArUrArArGrGrCrUrGrUrUrUrUrArGrArGrCrUrArGrArArArUrArGrCrArArGrUrUrA | 24853 |
| | ED18-_ | rArArArUrArArGrGrCrUrArGrUrCrCrGrUrUrArUrCrArArCrUrUrGrArArArArArGrUrGrGrCrArCrCrGrArGrUrCrGrGrUr | |
| | G_7FE_ | GrCrCrCrUrUrUrCrUrCrGrUrCrGrArUrGrGrUrCrArGrCrArCrArGrCrCrUrUrArUrGrCrArCrG*mG*mC*mC | |
| | PB13 | | |
| 785 | A1AT_SpRY_ | mU*mC*mC*rArGrGrCrCrGrUrGrCrArUrArArGrGrCrUrGrUrUrUrUrArGrArGrCrUrArGrArArArUrArGrCrArArGrUrUrA | 24854 |
| | ED18-_ | rArArArUrArArGrGrCrUrArGrUrCrCrGrUrUrArUrCrArArCrUrUrGrArArArArArGrUrGrGrCrArCrCrGrArGrUrCrGrGrUr | |
| | G_7FE_ | GrCrCrCrUrUrUrCrUrCrGrUrCrGrArUrGrGrUrCrArGrCrArCrArGrCrCrUrUrArUrGrCrArC*mG*mG*mC | |
| | PB12 | | |
| 786 | A1AT_SpRY_ | mU*mC*mC*rArGrGrCrCrGrUrGrCrArUrArArGrGrCrUrGrUrUrUrUrArGrArGrCrUrArGrArArArUrArGrCrArArGrUrUrA | 24855 |
| | ED18-_ | rArArArUrArArGrGrCrUrArGrUrCrCrGrUrUrArUrCrArArCrUrUrGrArArArArArGrUrGrGrCrArCrCrGrArGrUrCrGrGrUr | |
| | G_7FE_ | GrCrCrCrUrUrUrCrUrCrGrUrCrGrArUrGrGrUrCrArGrCrArCrArGrCrCrUrUrArUrGrCrA*mC*mG*mG | |
| | PB11 | | |
| 787 | A1AT_SpRY_ | mU*mC*mC*rArGrGrCrCrGrUrGrCrArUrArArGrGrCrUrGrUrUrUrUrArGrArGrCrUrArGrArArArUrArGrCrArArGrUrUrA | 24856 |
| | ED18-_ | rArArArUrArArGrGrCrUrArGrUrCrCrGrUrUrArUrCrArArCrUrUrGrArArArArArGrUrGrGrCrArCrCrGrArGrUrCrGrGrUr | |
| | G_7FE_ | GrCrCrCrUrUrUrCrUrCrGrUrCrGrArUrGrGrUrCrArGrCrArCrArGrCrCrUrUrArUrGrC*mA*mC*mG | |
| | PB10 | | |
| 788 | A1AT_SpRY_ | mU*mC*mC*rArGrGrCrCrGrUrGrCrArUrArArGrGrCrUrGrUrUrUrUrArGrArGrCrUrArGrArArArUrArGrCrArArGrUrUrA | 24857 |
| | ED18-_ | rArArArUrArArGrGrCrUrArGrUrCrCrGrUrUrArUrCrArArCrUrUrGrArArArArArGrUrGrGrCrArCrCrGrArGrUrCrGrGrUr | |
| | G_7FE_ | GrCrCrCrUrUrUrCrUrCrGrUrCrGrArUrGrGrUrCrArGrCrArCrArGrCrCrUrUrArUrG*mC*mA*mC | |
| | PB9 | | |
| 789 | A1AT_SpRY_ | mU*mC*mC*rArGrGrCrCrGrUrGrCrArUrArArGrGrCrUrGrUrUrUrUrArGrArGrCrUrArGrArArArUrArGrCrArArGrUrUrA | 24858 |
| | ED18-_ | rArArArUrArArGrGrCrUrArGrUrCrCrGrUrUrArUrCrArArCrUrUrGrArArArArArGrUrGrGrCrArCrCrGrArGrUrCrGrGrUr | |
| | G_7FE_ | GrCrCrCrUrUrUrCrUrCrGrUrCrGrArUrGrGrUrCrArGrCrArCrArGrCrCrUrUrArUmG*mC*mA | |
| | PB8 | | |
| 790 | A1AT_SpRY_ | mU*mC*mC*rArGrGrCrCrGrUrGrCrArUrArArGrGrCrUrGrUrUrUrUrArGrArGrCrUrArGrArArArUrArGrCrArArGrUrUrA | 24859 |
| | ED18-_ | rArArArUrArArGrGrCrUrArGrUrCrCrGrUrUrArUrCrArArCrUrUrGrArArArArArGrUrGrGrCrArCrCrGrArGrUrCrGrGrUr | |
| | G_5FE_ | GrCrUrUrUrCrUrCrGrUrCrGrArUrGrGrUrCrArGrCrArCrArGrCrCrUrUrArUrGrCrArCrGrGrCrCrU*mG*mG*mA | |
| | PB17 | | |
| 791 | A1AT_SpRY_ | mU*mC*mC*rArGrGrCrCrGrUrGrCrArUrArArGrGrCrUrGrUrUrUrUrArGrArGrCrUrArGrArArArUrArGrCrArArGrUrUrA | 24860 |
| | ED18-_ | rArArArUrArArGrGrCrUrArGrUrCrCrGrUrUrArUrCrArArCrUrUrGrArArArArArGrUrGrGrCrArCrCrGrArGrUrCrGrGrUr | |
| | G_5FE_ | GrCrUrUrUrCrUrCrGrUrCrGrArUrGrGrUrCrArGrCrArCrArGrCrCrUrUrArUrGrCrArCrGrGrCrC*mU*mG*mG | |
| | PB16 | | |
| 792 | A1AT_SpRY_ | mU*mC*mC*rArGrGrCrCrGrUrGrCrArUrArArGrGrCrUrGrUrUrUrUrArGrArGrCrUrArGrArArArUrArGrCrArArGrUrUrA | 24861 |
| | ED18-_ | rArArArUrArArGrGrCrUrArGrUrCrCrGrUrUrArUrCrArArCrUrUrGrArArArArArGrUrGrGrCrArCrCrGrArGrUrCrGrGrUr | |
| | G_5FE_ | GrCrUrUrUrCrUrCrGrUrCrGrArUrGrGrUrCrArGrCrArCrArGrCrCrUrUrArUrGrCrArCrGrGrC*mC*mU*mG | |
| | PB15 | | |
| 793 | A1AT_SpRY_ | mU*mC*mC*rArGrGrCrCrGrUrGrCrArUrArArGrGrCrUrGrUrUrUrUrArGrArGrCrUrArGrArArArUrArGrCrArArGrUrUrA | 24862 |
| | ED18-_ | rArArArUrArArGrGrCrUrArGrUrCrCrGrUrUrArUrCrArArCrUrUrGrArArArArArGrUrGrGrCrArCrCrGrArGrUrCrGrGrUr | |
| | G_5FE_ | GrCrUrUrUrCrUrCrGrUrCrGrArUrGrGrUrCrArGrCrArCrArGrCrCrUrUrArUrGrCrArCrGrG*mC*mC*mU | |
| | PB14 | | |
| 794 | A1AT_SpRY_ | mU*mC*mC*rArGrGrCrCrGrUrGrCrArUrArArGrGrCrUrGrUrUrUrUrArGrArGrCrUrArGrArArArUrArGrCrArArGrUrUrA | 24863 |
| | ED18-_ | rArArArUrArArGrGrCrUrArGrUrCrCrGrUrUrArUrCrArArCrUrUrGrArArArArArGrUrGrGrCrArCrCrGrArGrUrCrGrGrUr | |
| | G_5FE_ | GrCrUrUrUrCrUrCrGrUrCrGrArUrGrGrUrCrArGrCrArCrArGrCrCrUrUrArUrGrCrArCrG*mG*mC*mC | |
| | PB13 | | |
| 795 | A1AT_SpRY_ | mU*mC*mC*rArGrGrCrCrGrUrGrCrArUrArArGrGrCrUrGrUrUrUrUrArGrArGrCrUrArGrArArArUrArGrCrArArGrUrUrA | 24864 |
| | ED18-_ | rArArArUrArArGrGrCrUrArGrUrCrCrGrUrUrArUrCrArArCrUrUrGrArArArArArGrUrGrGrCrArCrCrGrArGrUrCrGrGrUr | |
| | G_5FE_ | GrCrUrUrUrCrUrCrGrUrCrGrArUrGrGrUrCrArGrCrArCrArGrCrCrUrUrArUrGrCrArC*mG*mG*mC | |
| | PB12 | | |
| 796 | A1AT_SpRY_ | mU*mC*mC*rArGrGrCrCrGrUrGrCrArUrArArGrGrCrUrGrUrUrUrUrArGrArGrCrUrArGrArArArUrArGrCrArArGrUrUrA | 24865 |
| | ED18-_ | rArArArUrArArGrGrCrUrArGrUrCrCrGrUrUrArUrCrArArCrUrUrGrArArArArArGrUrGrGrCrArCrCrGrArGrUrCrGrGrUr | |
| | G_5FE_ | GrCrUrUrUrCrUrCrGrUrCrGrArUrGrGrUrCrArGrCrArCrArGrCrCrUrUrArUrGrCrA*mC*mG*mG | |
| | PB11 | | |
| 797 | A1AT_SpRY_ | mU*mC*mC*rArGrGrCrCrGrUrGrCrArUrArArGrGrCrUrGrUrUrUrUrArGrArGrCrUrArGrArArArUrArGrCrArArGrUrUrA | 24866 |
| | ED18-_ | rArArArUrArArGrGrCrUrArGrUrCrCrGrUrUrArUrCrArArCrUrUrGrArArArArArGrUrGrGrCrArCrCrGrArGrUrCrGrGrUr | |
| | G_5FE_ | GrCrUrUrUrCrUrCrGrUrCrGrArUrGrGrUrCrArGrCrArCrArGrCrCrUrUrArUrGrC*mA*mC*mG | |
| | PB10 | | |
| 798 | A1AT_SpRY_ | mU*mC*mC*rArGrGrCrCrGrUrGrCrArUrArArGrGrCrUrGrUrUrUrUrArGrArGrCrUrArGrArArArUrArGrCrArArGrUrUrA | 24867 |
| | ED18-_ | rArArArUrArArGrGrCrUrArGrUrCrCrGrUrUrArUrCrArArCrUrUrGrArArArArArGrUrGrGrCrArCrCrGrArGrUrCrGrGrUr | |
| | G_5FE_ | GrCrUrUrUrCrUrCrGrUrCrGrArUrGrGrUrCrArGrCrArCrArGrCrCrUrUrArUrG*mC*mA*mC | |
| | PB9 | | |
| 799 | A1AT_SpRY_ | mU*mC*mC*rArGrGrCrCrGrUrGrCrArUrArArGrGrCrUrGrUrUrUrUrArGrArGrCrUrArGrArArArUrArGrCrArArGrUrUrA | 24868 |
| | ED18-_ | rArArArUrArArGrGrCrUrArGrUrCrCrGrUrUrArUrCrArArCrUrUrGrArArArArArGrUrGrGrCrArCrCrGrArGrUrCrGrGrUr | |
| | G_5FE_ | GrCrUrUrUrCrUrCrGrUrCrGrArUrGrGrUrCrArGrCrArCrArGrCrCrUrUrArU*mG*mC*mA | |
| | PB8 | | |
| 800 | A1AT_SpRY_ | mU*mC*mC*rArGrGrCrCrGrUrGrCrArUrArArGrGrCrUrGrUrUrUrUrArGrArGrCrUrArGrArArArUrArGrCrArArGrUrUrA | 24869 |
| | ED18-_ | rArArArUrArArGrGrCrUrArGrUrCrCrGrUrUrArUrCrArArCrUrUrGrArArArArArGrUrGrGrCrArCrCrGrArGrUrCrGrGrUr | |
| | G_3FE_ | GrCrUrCrUrCrGrUrCrGrArUrGrGrUrCrArGrCrArCrArGrCrCrUrUrArUrGrCrArCrGrGrCrCrU*mG*mG*mA | |
| | PB17 | | |
| 801 | A1AT_SpRY_ | mU*mC*mC*rArGrGrCrCrGrUrGrCrArUrArArGrGrCrUrGrUrUrUrUrArGrArGrCrUrArGrArArArUrArGrCrArArGrUrUrA | 24870 |
| | ED18-_ | rArArArUrArArGrGrCrUrArGrUrCrCrGrUrUrArUrCrArArCrUrUrGrArArArArArGrUrGrGrCrArCrCrGrArGrUrCrGrGrUr | |
| | G_3FE_ | GrCrUrCrUrCrGrUrCrGrArUrGrGrUrCrArGrCrArCrArGrCrCrUrUrArUrGrCrArCrGrGrCrC*mU*mG*mG | |
| | PB16 | | |
| 802 | A1AT_SpRY_ | mU*mC*mC*rArGrGrCrCrGrUrGrCrArUrArArGrGrCrUrGrUrUrUrUrArGrArGrCrUrArGrArArArUrArGrCrArArGrUrUrA | 24871 |
| | ED18-_ | rArArArUrArArGrGrCrUrArGrUrCrCrGrUrUrArUrCrArArCrUrUrGrArArArArArGrUrGrGrCrArCrCrGrArGrUrCrGrGrUr | |
| | G_3FE_ | GrCrUrCrUrCrGrUrCrGrArUrGrGrUrCrArGrCrArCrArGrCrCrUrUrArUrGrCrArCrGrGrC*mC*mU*mG | |
| | PB15 | | |
| 803 | A1AT_SpRY_ | mU*mC*mC*rArGrGrCrCrGrUrGrCrArUrArArGrGrCrUrGrUrUrUrUrArGrArGrCrUrArGrArArArUrArGrCrArArGrUrUrA | 24872 |
| | ED18-_ | rArArArUrArArGrGrCrUrArGrUrCrCrGrUrUrArUrCrArArCrUrUrGrArArArArArGrUrGrGrCrArCrCrGrArGrUrCrGrGrUr | |
| | G_3FE_ | GrCrUrCrUrCrGrUrCrGrArUrGrGrUrCrArGrCrArCrArGrCrCrUrUrArUrGrCrArCrGrG*mC*mC*mU | |
| | PB14 | | |
| 804 | A1AT_SpRY_ | mU*mC*mC*rArGrGrCrCrGrUrGrCrArUrArArGrGrCrUrGrUrUrUrUrArGrArGrCrUrArGrArArArUrArGrCrArArGrUrUrA | 24873 |
| | ED18-_ | rArArArUrArArGrGrCrUrArGrUrCrCrGrUrUrArUrCrArArCrUrUrGrArArArArArGrUrGrGrCrArCrCrGrArGrUrCrGrGrUr | |
| | G_3FE_ | GrCrUrCrUrCrGrUrCrGrArUrGrGrUrCrArGrCrArCrArGrCrCrUrUrArUrGrCrArCrG*mG*mC*mC | |
| | PB13 | | |
| 805 | A1AT_SpRY_ | mU*mC*mC*rArGrGrCrCrGrUrGrCrArUrArArGrGrCrUrGrUrUrUrUrArGrArGrCrUrArGrArArArUrArGrCrArArGrUrUrA | 24874 |
| | ED18-_ | rArArArUrArArGrGrCrUrArGrUrCrCrGrUrUrArUrCrArArCrUrUrGrArArArArArGrUrGrGrCrArCrCrGrArGrUrCrGrGrUr | |
| | G_3FE_ | GrCrUrCrUrCrGrUrCrGrArUrGrGrUrCrArGrCrArCrArGrCrCrUrUrArUrGrCrArC*mG*mG*mC | |
| | PB12 | | |
| 806 | A1AT_SpRY_ | mU*mC*mC*rArGrGrCrCrGrUrGrCrArUrArArGrGrCrUrGrUrUrUrUrArGrArGrCrUrArGrArArArUrArGrCrArArGrUrUrA | 24875 |
| | ED18-_ | rArArArUrArArGrGrCrUrArGrUrCrCrGrUrUrArUrCrArArCrUrUrGrArArArArArGrUrGrGrCrArCrCrGrArGrUrCrGrGrUr | |
| | G_3FE_ | GrCrUrCrUrCrGrUrCrGrArUrGrGrUrCrArGrCrArCrArGrCrCrUrUrArUrGrCrA*mC*mG*mG | |
| | PB11 | | |
| 807 | A1AT_SpRY_ | mU*mC*mC*rArGrGrCrCrGrUrGrCrArUrArArGrGrCrUrGrUrUrUrUrArGrArGrCrUrArGrArArArUrArGrCrArArGrUrUrA | 24876 |
| | ED18-_ | ArArArUrArArGrGrCrUrArGrUrCrCrGrUrUrArUrCrArArCrUrUrGrArArArArArGrUrGrGrCrArCrCrGrArGrUrCrGrGrUr | |
| | G_3FE_ | GrCrUrCrUrCrGrUrCrGrArUrGrGrUrCrArGrCrArCrArGrCrCrUrUrArUrGrC*mA*mC*mG | |
| | PB10 | | |
| 808 | A1AT_SpRY_ | mU*mC*mC*rArGrGrCrCrGrUrGrCrArUrArArGrGrCrUrGrUrUrUrUrArGrArGrCrUrArGrArArArUrArGrCrArArGrUrUrA | 24877 |
| | ED18-_ | rArArArUrArArGrGrCrUrArGrUrCrCrGrUrUrArUrCrArArCrUrUrGrArArArArArGrUrGrGrCrArCrCrGrArGrUrCrGrGrUr | |
| | G_3FE_ | GrCrUrCrUrCrGrUrCrGrArUrGrGrUrCrArGrCrArCrArGrCrCrUrUrArUrG*mC*mA*mC | |
| | PB9 | | |
| 809 | A1AT_SpRY_ | mU*mC*mC*rArGrGrCrCrGrUrGrCrArUrArArGrGrCrUrGrUrUrUrUrArGrArGrCrUrArGrArArArUrArGrCrArArGrUrUrA | 24878 |
| | ED18-_ | rArArArUrArArGrGrCrUrArGrUrCrCrGrUrUrArUrCrArArCrUrUrGrArArArArArGrUrGrGrCrArCrCrGrArGrUrCrGrGrUr | |
| | G_3FE_ | GrCrUrCrUrCrGrUrCrGrArUrGrGrUrCrArGrCrArCrArGrCrCrUrUrArU*mG*mC*mA | |
| | PB8 | | |

[0898] Table X3A shows the sequences of X3 without modifications. In some embodiments, the sequences used in this table can be used without chemical modifications.

TABLE X3A
Table X3 Sequences without Modifications

| | | | SEQ |
|---|---|---|---|
| | | | ID |
| ID | tgRNA Name | tgNA_seq_IDT_formatted | NO |
| 0 | A1AT_ | CUGUGCUGACCAUCGACAAGGUUUUAGAGCUAGAAAUAGCAAGUUAAAAUAAGGCUAGUCCGUUAUCAA | 24879 |
| | SpRY_ED0-_G_ | CUUGAAAAAGUGGCACCGAGUCGGUGCACAUGGCCCCAGCAGCUUCAGUCCCUUUCUCGUCGAUGGUCAG | |
| | 30FE_ | CACAG | |
| | PB17 | | |
| 1 | A1AT_ | CUGUGCUGACCAUCGACAAGGUUUUAGAGCUAGAAAUAGCAAGUUAAAAUAAGGCUAGUCCGUUAUCAA | 24880 |
| | SpRY_ED0-_G_ | CUUGAAAAAGUGGCACCGAGUCGGUGCACAUGGCCCCAGCAGCUUCAGUCCCUUUCUCGUCGAUGGUCAG | |
| | 30FE_ | CACA | |
| | PB16 | | |
| 2 | A1AT_ | CUGUGCUGACCAUCGACAAGGUUUUAGAGCUAGAAAUAGCAAGUUAAAAUAAGGCUAGUCCGUUAUCAA | 24881 |
| | SpRY_ED0-_G_ | CUUGAAAAAGUGGCACCGAGUCGGUGCACAUGGCCCCAGCAGCUUCAGUCCCUUUCUCGUCGAUGGUCAG | |
| | 30FE_ | CAC | |
| | PB15 | | |
| 3 | A1AT_ | CUGUGCUGACCAUCGACAAGGUUUUAGAGCUAGAAAUAGCAAGUUAAAAUAAGGCUAGUCCGUUAUCAA | 24882 |
| | SpRY_ED0-_G_ | CUUGAAAAAGUGGCACCGAGUCGGUGCACAUGGCCCCAGCAGCUUCAGUCCCUUUCUCGUCGAUGGUCAG | |
| | 30FE_ | CA | |
| | PB14 | | |
| 4 | A1AT_ | CUGUGCUGACCAUCGACAAGGUUUUAGAGCUAGAAAUAGCAAGUUAAAAUAAGGCUAGUCCGUUAUCAA | 24883 |
| | SpRY_ED0-_G_ | CUUGAAAAAGUGGCACCGAGUCGGUGCACAUGGCCCCAGCAGCUUCAGUCCCUUUCUCGUCGAUGGUCAG | |
| | 30FE_ | C | |
| | PB13 | | |
| 5 | A1AT_ | CUGUGCUGACCAUCGACAAGGUUUUAGAGCUAGAAAUAGCAAGUUAAAAUAAGGCUAGUCCGUUAUCAA | 24884 |
| | SpRY_ED0-_G_ | CUUGAAAAAGUGGCACCGAGUCGGUGCACAUGGCCCCAGCAGCUUCAGUCCCUUUCUCGUCGAUGGUCAG | |
| | 30FE_ | | |
| | PB12 | | |
| 6 | A1AT_ | CUGUGCUGACCAUCGACAAGGUUUUAGAGCUAGAAAUAGCAAGUUAAAAUAAGGCUAGUCCGUUAUCAA | 24885 |
| | SpRY_ED0-_G_ | CUUGAAAAAGUGGCACCGAGUCGGUGCACAUGGCCCCAGCAGCUUCAGUCCCUUUCUCGUCGAUGGUCA | |
| | 30FE_ | | |
| | PB11 | | |
| 7 | A1AT_ | CUGUGCUGACCAUCGACAAGGUUUUAGAGCUAGAAAUAGCAAGUUAAAAUAAGGCUAGUCCGUUAUCAA | 24886 |
| | SpRY_ED0-_ | CUUGAAAAAGUGGCACCGAGUCGGUGCACAUGGCCCCAGCAGCUUCAGUCCCUUUCUCGUCGAUGGUC | |
| | G_ | | |
| | 30FE_ | | |
| | PB10 | | |
| 8 | A1AT_ | CUGUGCUGACCAUCGACAAGGUUUUAGAGCUAGAAAUAGCAAGUUAAAAUAAGGCUAGUCCGUUAUCAA | 24887 |
| | SpRY_ED0-_G_ | CUUGAAAAAGUGGCACCGAGUCGGUGCACAUGGCCCCAGCAGCUUCAGUCCCUUUCUCGUCGAUGGU | |
| | 30FE_ | | |
| | PB9 | | |
| 9 | A1AT_ | CUGUGCUGACCAUCGACAAGGUUUUAGAGCUAGAAAUAGCAAGUUAAAAUAAGGCUAGUCCGUUAUCAA | 24888 |
| | SpRY_ED0-_G_ | CUUGAAAAAGUGGCACCGAGUCGGUGCACAUGGCCCCAGCAGCUUCAGUCCCUUUCUCGUCGAUGG | |
| | 30FE_ | | |
| | PB8 | | |
| 10 | A1AT_ | CUGUGCUGACCAUCGACAAGGUUUUAGAGCUAGAAAUAGCAAGUUAAAAUAAGGCUAGUCCGUUAUCAA | 24889 |
| | SpRY_ED0-_G_ | CUUGAAAAAGUGGCACCGAGUCGGUGCGCCCCAGCAGCUUCAGUCCCUUUCUCGUCGAUGGUCAGCACAG | |
| | 25FE_ | | |
| | PB17 | | |
| 11 | A1AT_ | CUGUGCUGACCAUCGACAAGGUUUUAGAGCUAGAAAUAGCAAGUUAAAAUAAGGCUAGUCCGUUAUCAA | 24890 |
| | SpRY_ED0-_G_ | CUUGAAAAAGUGGCACCGAGUCGGUGCGCCCCAGCAGCUUCAGUCCCUUUCUCGUCGAUGGUCAGCACA | |
| | 25FE_ | | |
| | PB16 | | |
| 12 | A1AT_ | CUGUGCUGACCAUCGACAAGGUUUUAGAGCUAGAAAUAGCAAGUUAAAAUAAGGCUAGUCCGUUAUCAA | 24891 |
| | SpRY_ED0-_G_ | CUUGAAAAAGUGGCACCGAGUCGGUGCGCCCCAGCAGCUUCAGUCCCUUUCUCGUCGAUGGUCAGCAC | |
| | 25FE_ | | |
| | PB15 | | |
| 13 | A1AT_ | CUGUGCUGACCAUCGACAAGGUUUUAGAGCUAGAAAUAGCAAGUUAAAAUAAGGCUAGUCCGUUAUCAA | 24892 |
| | SpRY_ED0-_G_ | CUUGAAAAAGUGGCACCGAGUCGGUGCGCCCCAGCAGCUUCAGUCCCUUUCUCGUCGAUGGUCAGCA | |
| | 25FE_ | | |
| | PB14 | | |
| 14 | A1AT_ | CUGUGCUGACCAUCGACAAGGUUUUAGAGCUAGAAAUAGCAAGUUAAAAUAAGGCUAGUCCGUUAUCAA | 24893 |
| | SpRY_ED0-_G_ | CUUGAAAAAGUGGCACCGAGUCGGUGCGCCCCAGCAGCUUCAGUCCCUUUCUCGUCGAUGGUCAGC | |
| | 25FE_ | | |
| | PB13 | | |
| 15 | A1AT_ | CUGUGCUGACCAUCGACAAGGUUUUAGAGCUAGAAAUAGCAAGUUAAAAUAAGGCUAGUCCGUUAUCAA | 24894 |
| | SpRY_ED0-_G_ | CUUGAAAAAGUGGCACCGAGUCGGUGCGCCCCAGCAGCUUCAGUCCCUUUCUCGUCGAUGGUCAG | |
| | 25FE_ | | |
| | PB12 | | |
| 16 | A1AT_ | CUGUGCUGACCAUCGACAAGGUUUUAGAGCUAGAAAUAGCAAGUUAAAAUAAGGCUAGUCCGUUAUCAA | 24895 |
| | SpRY_ED0-_G_ | CUUGAAAAAGUGGCACCGAGUCGGUGCGCCCCAGCAGCUUCAGUCCCUUUCUCGUCGAUGGUCA | |
| | 25FE_ | | |
| | PB11 | | |
| 17 | A1AT_ | CUGUGCUGACCAUCGACAAGGUUUUAGAGCUAGAAAUAGCAAGUUAAAAUAAGGCUAGUCCGUUAUCAA | 24896 |
| | SpRY_ED0-_G_ | CUUGAAAAAGUGGCACCGAGUCGGUGCGCCCCAGCAGCUUCAGUCCCUUUCUCGUCGAUGGUC | |
| | 25FE_ | | |
| | PB10 | | |
| 18 | A1AT_ | CUGUGCUGACCAUCGACAAGGUUUUAGAGCUAGAAAUAGCAAGUUAAAAUAAGGCUAGUCCGUUAUCAA | 24897 |
| | SpRY_ED0-_G_ | CUUGAAAAAGUGGCACCGAGUCGGUGCGCCCCAGCAGCUUCAGUCCCUUUCUCGUCGAUGGU | |
| | 25FE_ | | |
| | PB9 | | |
| 19 | A1AT_ | CUGUGCUGACCAUCGACAAGGUUUUAGAGCUAGAAAUAGCAAGUUAAAAUAAGGCUAGUCCGUUAUCAA | 24898 |
| | SpRY_ | CUUGAAAAAGUGGCACCGAGUCGGUGCGCCCCAGCAGCUUCAGUCCCUUUCUCGUCGAUGG | |
| | ED0-_G_ | | |
| | 25FE_ | | |
| | PB8 | | |
| 20 | A1AT_ | CUGUGCUGACCAUCGACAAGGUUUUAGAGCUAGAAAUAGCAAGUUAAAAUAAGGCUAGUCCGUUAUCAA | 24899 |
| | SpRY_ED0-_G_ | CUUGAAAAAGUGGCACCGAGUCGGUGCAGCAGCUUCAGUCCCUUUCUCGUCGAUGGUCAGCACAG | |
| | 20FE_ | | |
| | PB17 | | |
| 21 | A1AT_ | CUGUGCUGACCAUCGACAAGGUUUUAGAGCUAGAAAUAGCAAGUUAAAAUAAGGCUAGUCCGUUAUCAA | 24900 |
| | SpRY_ | CUUGAAAAAGUGGCACCGAGUCGGUGCAGCAGCUUCAGUCCCUUUCUCGUCGAUGGUCAGCACA | |
| | ED0-_G_ | | |
| | 20FE_ | | |
| | PB16 | | |
| 22 | A1AT_ | CUGUGCUGACCAUCGACAAGGUUUUAGAGCUAGAAAUAGCAAGUUAAAAUAAGGCUAGUCCGUUAUCAA | 24901 |
| | SpRY_ED0-_G_ | CUUGAAAAAGUGGCACCGAGUCGGUGCAGCAGCUUCAGUCCCUUUCUCGUCGAUGGUCAGCAC | |
| | 20FE_ | | |
| | PB15 | | |
| 23 | A1AT_ | CUGUGCUGACCAUCGACAAGGUUUUAGAGCUAGAAAUAGCAAGUUAAAAUAAGGCUAGUCCGUUAUCAA | 24902 |
| | SpRY_ | CUUGAAAAAGUGGCACCGAGUCGGUGCAGCAGCUUCAGUCCCUUUCUCGUCGAUGGUCAGCA | |
| | ED0-_G_ | | |
| | 20FE_ | | |
| | PB14 | | |
| 24 | A1AT_ | CUGUGCUGACCAUCGACAAGGUUUUAGAGCUAGAAAUAGCAAGUUAAAAUAAGGCUAGUCCGUUAUCAA | 24903 |
| | SpRY_ | CUUGAAAAAGUGGCACCGAGUCGGUGCAGCAGCUUCAGUCCCUUUCUCGUCGAUGGUCAGC | |
| | ED0-_G_ | | |
| | 20FE_ | | |
| | PB13 | | |
| 25 | A1AT_ | CUGUGCUGACCAUCGACAAGGUUUUAGAGCUAGAAAUAGCAAGUUAAAAUAAGGCUAGUCCGUUAUCAA | 24904 |
| | SpRY_ED0-_G_ | CUUGAAAAAGUGGCACCGAGUCGGUGCAGCAGCUUCAGUCCCUUUCUCGUCGAUGGUCAG | |
| | 20FE_ | | |
| | PB12 | | |
| 26 | A1AT_ | CUGUGCUGACCAUCGACAAGGUUUUAGAGCUAGAAAUAGCAAGUUAAAAUAAGGCUAGUCCGUUAUCAA | 24905 |
| | SpRY_ED0-_G_ | CUUGAAAAAGUGGCACCGAGUCGGUGCAGCAGCUUCAGUCCCUUUCUCGUCGAUGGUCA | |
| | 20FE_ | | |
| | PB11 | | |
| 27 | A1AT_ | CUGUGCUGACCAUCGACAAGGUUUUAGAGCUAGAAAUAGCAAGUUAAAAUAAGGCUAGUCCGUUAUCAA | 24906 |
| | SpRY_ED0-_G_ | CUUGAAAAAGUGGCACCGAGUCGGUGCAGCAGCUUCAGUCCCUUUCUCGUCGAUGGUC | |
| | 20FE_ | | |
| | PB10 | | |
| 28 | A1AT_ | CUGUGCUGACCAUCGACAAGGUUUUAGAGCUAGAAAUAGCAAGUUAAAAUAAGGCUAGUCCGUUAUCAA | 24907 |
| | SpRY_ED0-_G_ | CUUGAAAAAGUGGCACCGAGUCGGUGCAGCAGCUUCAGUCCCUUUCUCGUCGAUGGU | |
| | 20FE_ | | |
| | PB9 | | |
| 29 | A1AT_ | CUGUGCUGACCAUCGACAAGGUUUUAGAGCUAGAAAUAGCAAGUUAAAAUAAGGCUAGUCCGUUAUCAA | 24908 |
| | SpRY_ED0-_G_ | CUUGAAAAAGUGGCACCGAGUCGGUGCAGCAGCUUCAGUCCCUUUCUCGUCGAUGG | |
| | 20FE_ | | |
| | PB8 | | |
| 30 | A1AT_ | CUGUGCUGACCAUCGACAAGGUUUUAGAGCUAGAAAUAGCAAGUUAAAAUAAGGCUAGUCCGUUAUCAA | 24909 |
| | SpRY_ED0-_G_ | CUUGAAAAAGUGGCACCGAGUCGGUGCUUCAGUCCCUUUCUCGUCGAUGGUCAGCACAG | |
| | 14FE_ | | |
| | PB17 | | |
| 31 | A1AT_ | CUGUGCUGACCAUCGACAAGGUUUUAGAGCUAGAAAUAGCAAGUUAAAAUAAGGCUAGUCCGUUAUCAA | 24910 |
| | SpRY_ED0-_G_ | CUUGAAAAAGUGGCACCGAGUCGGUGCUUCAGUCCCUUUCUCGUCGAUGGUCAGCACA | |
| | 14FE_ | | |
| | PB16 | | |
| 32 | A1AT_ | CUGUGCUGACCAUCGACAAGGUUUUAGAGCUAGAAAUAGCAAGUUAAAAUAAGGCUAGUCCGUUAUCAA | 24911 |
| | SpRY_ED0-_G_ | CUUGAAAAAGUGGCACCGAGUCGGUGCUUCAGUCCCUUUCUCGUCGAUGGUCAGCAC | |
| | 14FE_ | | |
| | PB11_ | | |
| | 5 | | |
| 33 | A1AT_ | CUGUGCUGACCAUCGACAAGGUUUUAGAGCUAGAAAUAGCAAGUUAAAAUAAGGCUAGUCCGUUAUCAA | 24912 |
| | SpRY_ED0-_G_ | CUUGAAAAAGUGGCACCGAGUCGGUGCUUCAGUCCCUUUCUCGUCGAUGGUCAGCA | |
| | 14FE_ | | |
| | PB14 | | |
| 34 | A1AT_ | CUGUGCUGACCAUCGACAAGGUUUUAGAGCUAGAAAUAGCAAGUUAAAAUAAGGCUAGUCCGUUAUCAA | 24913 |
| | SpRY_ED0-_G_ | CUUGAAAAAGUGGCACCGAGUCGGUGCUUCAGUCCCUUUCUCGUCGAUGGUCAGC | |
| | 14FE_ | | |
| | PB13 | | |
| 35 | A1AT_ | CUGUGCUGACCAUCGACAAGGUUUUAGAGCUAGAAAUAGCAAGUUAAAAUAAGGCUAGUCCGUUAUCAA | 24914 |
| | SpRY_ED0-_G_ | CUUGAAAAAGUGGCACCGAGUCGGUGCUUCAGUCCCUUUCUCGUCGAUGGUCAG | |
| | 14FE_ | | |
| | PB12 | | |
| 36 | A1AT_ | CUGUGCUGACCAUCGACAAGGUUUUAGAGCUAGAAAUAGCAAGUUAAAAUAAGGCUAGUCCGUUAUCAA | 24915 |
| | SpRY_ED0-_G_ | CUUGAAAAAGUGGCACCGAGUCGGUGCUUCAGUCCCUUUCUCGUCGAUGGUCA | |
| | 14FE_ | | |
| | PB11 | | |
| 37 | A1AT_ | CUGUGCUGACCAUCGACAAGGUUUUAGAGCUAGAAAUAGCAAGUUAAAAUAAGGCUAGUCCGUUAUCAA | 24916 |
| | SpRY_ED0-_G_ | CUUGAAAAAGUGGCACCGAGUCGGUGCUUCAGUCCCUUUCUCGUCGAUGGUC | |
| | 14FE_ | | |
| | PB10 | | |
| 38 | A1AT_ | CUGUGCUGACCAUCGACAAGGUUUUAGAGCUAGAAAUAGCAAGUUAAAAUAAGGCUAGUCCGUUAUCAA | 24917 |
| | SpRY_ED0-_G_ | CUUGAAAAAGUGGCACCGAGUCGGUGCUUCAGUCCCUUUCUCGUCGAUGGU | |
| | 14FE_ | | |
| | PB9 | | |
| 39 | A1AT_ | CUGUGCUGACCAUCGACAAGGUUUUAGAGCUAGAAAUAGCAAGUUAAAAUAAGGCUAGUCCGUUAUCAA | 24918 |
| | SpRY_ED0-_G_ | CUUGAAAAAGUGGCACCGAGUCGGUGCUUCAGUCCCUUUCUCGUCGAUGG | |
| | 14FE_ | | |
| | PB8 | | |
| 40 | A1AT_ | CUGUGCUGACCAUCGACAAGGUUUUAGAGCUAGAAAUAGCAAGUUAAAAUAAGGCUAGUCCGUUAUCAA | 24919 |
| | SpRY_ED0-_G_ | CUUGAAAAAGUGGCACCGAGUCGGUGCAGUCCCUUUCUCGUCGAUGGUCAGCACAG | |
| | 11FE_ | | |
| | PB17 | | |
| 41 | A1AT_ | CUGUGCUGACCAUCGACAAGGUUUUAGAGCUAGAAAUAGCAAGUUAAAAUAAGGCUAGUCCGUUAUCAA | 24920 |
| | SpRY_ED0-_G_ | CUUGAAAAAGUGGCACCGAGUCGGUGCAGUCCCUUUCUCGUCGAUGGUCAGCACA | |
| | 11FE_ | | |
| | PB16 | | |
| 42 | A1AT_ | CUGUGCUGACCAUCGACAAGGUUUUAGAGCUAGAAAUAGCAAGUUAAAAUAAGGCUAGUCCGUUAUCAA | 24921 |
| | SpRY_ED0-_G_ | CUUGAAAAAGUGGCACCGAGUCGGUGCAGUCCCUUUCUCGUCGAUGGUCAGCAC | |
| | 11FE_ | | |
| | PB15 | | |
| 43 | A1AT_ | CUGUGCUGACCAUCGACAAGGUUUUAGAGCUAGAAAUAGCAAGUUAAAAUAAGGCUAGUCCGUUAUCAA | 24922 |
| | SpRY_ED0-_G_ | CUUGAAAAAGUGGCACCGAGUCGGUGCAGUCCCUUUCUCGUCGAUGGUCAGCA | |
| | 11FE_ | | |
| | PB14 | | |
| 44 | A1AT_ | CUGUGCUGACCAUCGACAAGGUUUUAGAGCUAGAAAUAGCAAGUUAAAAUAAGGCUAGUCCGUUAUCAA | 24923 |
| | SpRY_ | CUUGAAAAAGUGGCACCGAGUCGGUGCAGUCCCUUUCUCGUCGAUGGUCAGC | |
| | ED0-_G_ | | |
| | 11FE_ | | |
| | PB13 | | |
| 45 | A1AT_ | CUGUGCUGACCAUCGACAAGGUUUUAGAGCUAGAAAUAGCAAGUUAAAAUAAGGCUAGUCCGUUAUCAA | 24924 |
| | SpRY_ED0-_G_ | CUUGAAAAAGUGGCACCGAGUCGGUGCAGUCCCUUUCUCGUCGAUGGUCAG | |
| | 11FE_ | | |
| | PB12 | | |
| 46 | A1AT_ | CUGUGCUGACCAUCGACAAGGUUUUAGAGCUAGAAAUAGCAAGUUAAAAUAAGGCUAGUCCGUUAUCAA | 24925 |
| | SpRY_ED0-_G_ | CUUGAAAAAGUGGCACCGAGUCGGUGCAGUCCCUUUCUCGUCGAUGGUCA | |
| | 11FE_ | | |
| | PB11 | | |
| 47 | A1AT_ | CUGUGCUGACCAUCGACAAGGUUUUAGAGCUAGAAAUAGCAAGUUAAAAUAAGGCUAGUCCGUUAUCAA | 24926 |
| | SpRY_ | CUUGAAAAAGUGGCACCGAGUCGGUGCAGUCCCUUUCUCGUCGAUGGUC | |
| | ED0-_G_ | | |
| | 11FE_ | | |
| | PB10 | | |
| 48 | A1AT_ | CUGUGCUGACCAUCGACAAGGUUUUAGAGCUAGAAAUAGCAAGUUAAAAUAAGGCUAGUCCGUUAUCAA | 24927 |
| | SpRY_ED0-_G_ | CUUGAAAAAGUGGCACCGAGUCGGUGCAGUCCCUUUCUCGUCGAUGGU | |
| | 11FE_ | | |
| | PB9 | | |
| 49 | A1AT_ | CUGUGCUGACCAUCGACAAGGUUUUAGAGCUAGAAAUAGCAAGUUAAAAUAAGGCUAGUCCGUUAUCAA | 24928 |
| | SpRY_ED0-_G_ | CUUGAAAAAGUGGCACCGAGUCGGUGCAGUCCCUUUCUCGUCGAUGG | |
| | 11FE_ | | |
| | PB8 | | |
| 50 | A1AT_ | CUGUGCUGACCAUCGACAAGGUUUUAGAGCUAGAAAUAGCAAGUUAAAAUAAGGCUAGUCCGUUAUCAA | 24929 |
| | SpRY_ED0-_G_ | CUUGAAAAAGUGGCACCGAGUCGGUGCUCCCUUUCUCGUCGAUGGUCAGCACAG | |
| | 9FE_ | | |
| | PB17 | | |
| 51 | A1AT_ | CUGUGCUGACCAUCGACAAGGUUUUAGAGCUAGAAAUAGCAAGUUAAAAUAAGGCUAGUCCGUUAUCAA | 24930 |
| | SpRY_ED0-_G_ | CUUGAAAAAGUGGCACCGAGUCGGUGCUCCCUUUCUCGUCGAUGGUCAGCACA | |
| | 9FE_ | | |
| | PB16 | | |
| 52 | A1AT_ | CUGUGCUGACCAUCGACAAGGUUUUAGAGCUAGAAAUAGCAAGUUAAAAUAAGGCUAGUCCGUUAUCAA | 24931 |
| | SpRY_ED0-_G_ | CUUGAAAAAGUGGCACCGAGUCGGUGCUCCCUUUCUCGUCGAUGGUCAGCAC | |
| | 9FE_ | | |
| | PB15 | | |
| 53 | A1AT_ | CUGUGCUGACCAUCGACAAGGUUUUAGAGCUAGAAAUAGCAAGUUAAAAUAAGGCUAGUCCGUUAUCAA | 24932 |
| | SpRY_ED0-_G_ | CUUGAAAAAGUGGCACCGAGUCGGUGCUCCCUUUCUCGUCGAUGGUCAGCA | |
| | 9FE_ | | |
| | PB14 | | |
| 54 | A1AT_ | CUGUGCUGACCAUCGACAAGGUUUUAGAGCUAGAAAUAGCAAGUUAAAAUAAGGCUAGUCCGUUAUCAA | 24933 |
| | SpRY_ED0-_G_ | CUUGAAAAAGUGGCACCGAGUCGGUGCUCCCUUUCUCGUCGAUGGUCAGC | |
| | 9FE_ | | |
| | PB13 | | |
| 55 | A1AT_ | CUGUGCUGACCAUCGACAAGGUUUUAGAGCUAGAAAUAGCAAGUUAAAAUAAGGCUAGUCCGUUAUCAA | 24934 |
| | SpRY_ED0-_G_ | CUUGAAAAAGUGGCACCGAGUCGGUGCUCCCUUUCUCGUCGAUGGUCAG | |
| | 9FE_ | | |
| | PB12 | | |
| 56 | A1AT_ | CUGUGCUGACCAUCGACAAGGUUUUAGAGCUAGAAAUAGCAAGUUAAAAUAAGGCUAGUCCGUUAUCAA | 24935 |
| | SpRY_ED0-_G_ | CUUGAAAAAGUGGCACCGAGUCGGUGCUCCCUUUCUCGUCGAUGGUCA | |
| | 9FE_ | | |
| | PB11 | | |
| 57 | A1AT_ | CUGUGCUGACCAUCGACAAGGUUUUAGAGCUAGAAAUAGCAAGUUAAAAUAAGGCUAGUCCGUUAUCAA | 24936 |
| | SpRY_ED0-_G_ | CUUGAAAAAGUGGCACCGAGUCGGUGCUCCCUUUCUCGUCGAUGGUC | |
| | 9FE_ | | |
| | PB10 | | |
| 58 | A1AT_ | CUGUGCUGACCAUCGACAAGGUUUUAGAGCUAGAAAUAGCAAGUUAAAAUAAGGCUAGUCCGUUAUCAA | 24937 |
| | SpRY_ED0-_G_ | CUUGAAAAAGUGGCACCGAGUCGGUGCUCCCUUUCUCGUCGAUGGU | |
| | 9FE_ | | |
| | PB9 | | |
| 59 | A1AT_ | CUGUGCUGACCAUCGACAAGGUUUUAGAGCUAGAAAUAGCAAGUUAAAAUAAGGCUAGUCCGUUAUCAA | 24938 |
| | SpRY_ED0-_G_ | CUUGAAAAAGUGGCACCGAGUCGGUGCUCCCUUUCUCGUCGAUGG | |
| | 9FE_ | | |
| | PB8 | | |
| 60 | A1AT_ | CUGUGCUGACCAUCGACAAGGUUUUAGAGCUAGAAAUAGCAAGUUAAAAUAAGGCUAGUCCGUUAUCAA | 24939 |
| | SpRY_ED0-_G_ | CUUGAAAAAGUGGCACCGAGUCGGUGCCCUUUCUCGUCGAUGGUCAGCACAG | |
| | 7FE_ | | |
| | PB17 | | |
| 61 | A1AT_ | CUGUGCUGACCAUCGACAAGGUUUUAGAGCUAGAAAUAGCAAGUUAAAAUAAGGCUAGUCCGUUAUCAA | 24940 |
| | SpRY_ED0-_G_ | CUUGAAAAAGUGGCACCGAGUCGGUGCCCUUUCUCGUCGAUGGUCAGCACA | |
| | 7FE_ | | |
| | PB16 | | |
| 62 | A1AT_ | CUGUGCUGACCAUCGACAAGGUUUUAGAGCUAGAAAUAGCAAGUUAAAAUAAGGCUAGUCCGUUAUCAA | 24941 |
| | SpRY_ED0-_G_ | CUUGAAAAAGUGGCACCGAGUCGGUGCCCUUUCUCGUCGAUGGUCAGCAC | |
| | 7FE_ | | |
| | PB15 | | |
| 63 | A1AT_ | CUGUGCUGACCAUCGACAAGGUUUUAGAGCUAGAAAUAGCAAGUUAAAAUAAGGCUAGUCCGUUAUCAA | 24942 |
| | SpRY_ED0-_G_ | CUUGAAAAAGUGGCACCGAGUCGGUGCCCUUUCUCGUCGAUGGUCAGCA | |
| | 7FE_ | | |
| | PB14 | | |
| 64 | A1AT_ | CUGUGCUGACCAUCGACAAGGUUUUAGAGCUAGAAAUAGCAAGUUAAAAUAAGGCUAGUCCGUUAUCAA | 24943 |
| | SpRY_ED0-_G_ | CUUGAAAAAGUGGCACCGAGUCGGUGCCCUUUCUCGUCGAUGGUCAGC | |
| | 7FE_ | | |
| | PB13 | | |
| 65 | A1AT_ | CUGUGCUGACCAUCGACAAGGUUUUAGAGCUAGAAAUAGCAAGUUAAAAUAAGGCUAGUCCGUUAUCAA | 24944 |
| | SpRY_ED0-_G_ | CUUGAAAAAGUGGCACCGAGUCGGUGCCCUUUCUCGUCGAUGGUCAG | |
| | 7FE_ | | |
| | PB12 | | |
| 66 | A1AT_ | CUGUGCUGACCAUCGACAAGGUUUUAGAGCUAGAAAUAGCAAGUUAAAAUAAGGCUAGUCCGUUAUCAA | 24945 |
| | SpRY_ED0-_G_ | CUUGAAAAAGUGGCACCGAGUCGGUGCCCUUUCUCGUCGAUGGUCA | |
| | 7FE_ | | |
| | PB11 | | |
| 67 | A1AT_ | CUGUGCUGACCAUCGACAAGGUUUUAGAGCUAGAAAUAGCAAGUUAAAAUAAGGCUAGUCCGUUAUCAA | 24946 |
| | SpRY_ED0-_G_ | CUUGAAAAAGUGGCACCGAGUCGGUGCCCUUUCUCGUCGAUGGUC | |
| | 7FE_ | | |
| | PB10 | | |
| 68 | A1AT_ | CUGUGCUGACCAUCGACAAGGUUUUAGAGCUAGAAAUAGCAAGUUAAAAUAAGGCUAGUCCGUUAUCAA | 24947 |
| | SpRY_ED0-_G_ | CUUGAAAAAGUGGCACCGAGUCGGUGCCCUUUCUCGUCGAUGGU | |
| | 7FE_ | | |
| | PB9 | | |
| 69 | A1AT_ | CUGUGCUGACCAUCGACAAGGUUUUAGAGCUAGAAAUAGCAAGUUAAAAUAAGGCUAGUCCGUUAUCAA | 24948 |
| | SpRY_ED0-_G_ | CUUGAAAAAGUGGCACCGAGUCGGUGCCCUUUCUCGUCGAUGG | |
| | 7FE_ | | |
| | PB8 | | |
| 70 | A1AT_ | CUGUGCUGACCAUCGACAAGGUUUUAGAGCUAGAAAUAGCAAGUUAAAAUAAGGCUAGUCCGUUAUCAA | 24949 |
| | SpRY_ED0-_G_ | CUUGAAAAAGUGGCACCGAGUCGGUGCUUUCUCGUCGAUGGUCAGCACAG | |
| | 5FE_ | | |
| | PB17 | | |
| 71 | A1AT_ | CUGUGCUGACCAUCGACAAGGUUUUAGAGCUAGAAAUAGCAAGUUAAAAUAAGGCUAGUCCGUUAUCAA | 24950 |
| | SpRY_ED0-_G_ | CUUGAAAAAGUGGCACCGAGUCGGUGCUUUCUCGUCGAUGGUCAGCACA | |
| | 5FE_ | | |
| | PB16 | | |
| 72 | A1AT_ | CUGUGCUGACCAUCGACAAGGUUUUAGAGCUAGAAAUAGCAAGUUAAAAUAAGGCUAGUCCGUUAUCAA | 24951 |
| | SpRY_ED0-_G_ | CUUGAAAAAGUGGCACCGAGUCGGUGCUUUCUCGUCGAUGGUCAGCAC | |
| | 5FE_ | | |
| | PB15 | | |
| 73 | A1AT_ | CUGUGCUGACCAUCGACAAGGUUUUAGAGCUAGAAAUAGCAAGUUAAAAUAAGGCUAGUCCGUUAUCAA | 24952 |
| | SpRY_ED0-_G_ | CUUGAAAAAGUGGCACCGAGUCGGUGCUUUCUCGUCGAUGGUCAGCA | |
| | 5FE_ | | |
| | PB14 | | |
| 74 | A1AT_ | CUGUGCUGACCAUCGACAAGGUUUUAGAGCUAGAAAUAGCAAGUUAAAAUAAGGCUAGUCCGUUAUCAA | 24953 |
| | SpRY_ED0-_G_ | CUUGAAAAAGUGGCACCGAGUCGGUGCUUUCUCGUCGAUGGUCAGC | |
| | 5FE_ | | |
| | PB13 | | |
| 75 | A1AT_ | CUGUGCUGACCAUCGACAAGGUUUUAGAGCUAGAAAUAGCAAGUUAAAAUAAGGCUAGUCCGUUAUCAA | 24954 |
| | SpRY_ED0-_G_ | CUUGAAAAAGUGGCACCGAGUCGGUGCUUUCUCGUCGAUGGUCAG | |
| | 5FE_ | | |
| | PB12 | | |
| 76 | A1AT_ | CUGUGCUGACCAUCGACAAGGUUUUAGAGCUAGAAAUAGCAAGUUAAAAUAAGGCUAGUCCGUUAUCAA | 24955 |
| | SpRY_ED0-_G_ | CUUGAAAAAGUGGCACCGAGUCGGUGCUUUCUCGUCGAUGGUCA | |
| | 5FE_ | | |
| | PB11 | | |
| 77 | A1AT_ | CUGUGCUGACCAUCGACAAGGUUUUAGAGCUAGAAAUAGCAAGUUAAAAUAAGGCUAGUCCGUUAUCAA | 24956 |
| | SpRY_ED0-_G_ | CUUGAAAAAGUGGCACCGAGUCGGUGCUUUCUCGUCGAUGGUC | |
| | 5FE_ | | |
| | PB10 | | |
| 78 | A1AT_ | CUGUGCUGACCAUCGACAAGGUUUUAGAGCUAGAAAUAGCAAGUUAAAAUAAGGCUAGUCCGUUAUCAA | 24957 |
| | SpRY_ED0-_G_ | CUUGAAAAAGUGGCACCGAGUCGGUGCUUUCUCGUCGAUGGU | |
| | 5FE_ | | |
| | PB9 | | |
| 79 | A1AT_ | CUGUGCUGACCAUCGACAAGGUUUUAGAGCUAGAAAUAGCAAGUUAAAAUAAGGCUAGUCCGUUAUCAA | 24958 |
| | SpRY_ED0-_G_ | CUUGAAAAAGUGGCACCGAGUCGGUGCUUUCUCGUCGAUGG | |
| | 5FE_ | | |
| | PB8 | | |
| 80 | A1AT_ | CUGUGCUGACCAUCGACAAGGUUUUAGAGCUAGAAAUAGCAAGUUAAAAUAAGGCUAGUCCGUUAUCAA | 24959 |
| | SpRY_ED0-_G_ | CUUGAAAAAGUGGCACCGAGUCGGUGCUCUCGUCGAUGGUCAGCACAG | |
| | 3FE_ | | |
| | PB17 | | |
| 81 | A1AT_ | CUGUGCUGACCAUCGACAAGGUUUUAGAGCUAGAAAUAGCAAGUUAAAAUAAGGCUAGUCCGUUAUCAA | 24960 |
| | SpRY_ED0-_G_ | CUUGAAAAAGUGGCACCGAGUCGGUGCUCUCGUCGAUGGUCAGCACA | |
| | 3FE_ | | |
| | PB16 | | |
| 82 | A1AT_ | CUGUGCUGACCAUCGACAAGGUUUUAGAGCUAGAAAUAGCAAGUUAAAAUAAGGCUAGUCCGUUAUCAA | 24961 |
| | SpRY_ED0-_G_ | CUUGAAAAAGUGGCACCGAGUCGGUGCUCUCGUCGAUGGUCAGCAC | |
| | 3FE_ | | |
| | PB15 | | |
| 83 | A1AT_ | CUGUGCUGACCAUCGACAAGGUUUUAGAGCUAGAAAUAGCAAGUUAAAAUAAGGCUAGUCCGUUAUCAA | 24962 |
| | SpRY_ED0-_G_ | CUUGAAAAAGUGGCACCGAGUCGGUGCUCUCGUCGAUGGUCAGCA | |
| | 3FE_ | | |
| | PB14 | | |
| 84 | A1AT_ | CUGUGCUGACCAUCGACAAGGUUUUAGAGCUAGAAAUAGCAAGUUAAAAUAAGGCUAGUCCGUUAUCAA | 24963 |
| | SpRY_ED0-_G_ | CUUGAAAAAGUGGCACCGAGUCGGUGCUCUCGUCGAUGGUCAGC | |
| | 3FE_ | | |
| | PB13 | | |
| 85 | A1AT_ | CUGUGCUGACCAUCGACAAGGUUUUAGAGCUAGAAAUAGCAAGUUAAAAUAAGGCUAGUCCGUUAUCAA | 24964 |
| | SpRY_ED0-_G_ | CUUGAAAAAGUGGCACCGAGUCGGUGCUCUCGUCGAUGGUCAG | |
| | 3FE_ | | |
| | PB12 | | |
| 86 | A1AT_ | CUGUGCUGACCAUCGACAAGGUUUUAGAGCUAGAAAUAGCAAGUUAAAAUAAGGCUAGUCCGUUAUCAA | 24965 |
| | SpRY_ED0-_G_ | CUUGAAAAAGUGGCACCGAGUCGGUGCUCUCGUCGAUGGUCA | |
| | 3FE_ | | |
| | PB11 | | |
| 87 | A1AT_ | CUGUGCUGACCAUCGACAAGGUUUUAGAGCUAGAAAUAGCAAGUUAAAAUAAGGCUAGUCCGUUAUCAA | 24966 |
| | SpRY_ED0-_G_ | CUUGAAAAAGUGGCACCGAGUCGGUGCUCUCGUCGAUGGUC | |
| | 3FE_ | | |
| | PB10 | | |
| 88 | A1AT_ | CUGUGCUGACCAUCGACAAGGUUUUAGAGCUAGAAAUAGCAAGUUAAAAUAAGGCUAGUCCGUUAUCAA | 24967 |
| | SpRY_ED0-_G_ | CUUGAAAAAGUGGCACCGAGUCGGUGCUCUCGUCGAUGGU | |
| | 3FE_ | | |
| | PB9 | | |
| 89 | A1AT_ | CUGUGCUGACCAUCGACAAGGUUUUAGAGCUAGAAAUAGCAAGUUAAAAUAAGGCUAGUCCGUUAUCAA | 24968 |
| | SpRY_ED0-_G_ | CUUGAAAAAGUGGCACCGAGUCGGUGCUCUCGUCGAUGG | |
| | 3FE_ | | |
| | PB8 | | |
| 90 | A1AT_SpRY_ | GGCUGUGCUGACCAUCGACAGUUUUAGAGCUAGAAAUAGCAAGUUAAAAUAAGGCUAGUCCGUUAUCAA | 24969 |
| | ED2-_30FE_ | CUUGAAAAAGUGGCACCGAGUCGGUGCACAUGGCCCCAGCAGCUUCAGUCCCUUUCUCGUCGAUGGUCAG | |
| | PB17 | CACAGCC | |
| 91 | A1AT_SpRY_ | GGCUGUGCUGACCAUCGACAGUUUUAGAGCUAGAAAUAGCAAGUUAAAAUAAGGCUAGUCCGUUAUCAA | 24970 |
| | ED2-_30FE_ | CUUGAAAAAGUGGCACCGAGUCGGUGCACAUGGCCCCAGCAGCUUCAGUCCCUUUCUCGUCGAUGGUCAG | |
| | PB16 | CACAGC | |
| 92 | A1AT_SpRY_ | GGCUGUGCUGACCAUCGACAGUUUUAGAGCUAGAAAUAGCAAGUUAAAAUAAGGCUAGUCCGUUAUCAA | 24971 |
| | ED2-_30FE_ | CUUGAAAAAGUGGCACCGAGUCGGUGCACAUGGCCCCAGCAGCUUCAGUCCCUUUCUCGUCGAUGGUCAG | |
| | PB15 | CACAG | |
| 93 | A1AT_SpRY_ | GGCUGUGCUGACCAUCGACAGUUUUAGAGCUAGAAAUAGCAAGUUAAAAUAAGGCUAGUCCGUUAUCAA | 24972 |
| | ED2-_30FE_ | CUUGAAAAAGUGGCACCGAGUCGGUGCACAUGGCCCCAGCAGCUUCAGUCCCUUUCUCGUCGAUGGUCAG | |
| | PB14 | CACA | |
| 94 | A1AT_SpRY_ | GGCUGUGCUGACCAUCGACAGUUUUAGAGCUAGAAAUAGCAAGUUAAAAUAAGGCUAGUCCGUUAUCAA | 24973 |
| | ED2-_30FE_ | CUUGAAAAAGUGGCACCGAGUCGGUGCACAUGGCCCCAGCAGCUUCAGUCCCUUUCUCGUCGAUGGUCAG | |
| | PB13 | CAC | |
| 95 | A1AT_SpRY_ | GGCUGUGCUGACCAUCGACAGUUUUAGAGCUAGAAAUAGCAAGUUAAAAUAAGGCUAGUCCGUUAUCAA | 24974 |
| | ED2-_30FE_ | CUUGAAAAAGUGGCACCGAGUCGGUGCACAUGGCCCCAGCAGCUUCAGUCCCUUUCUCGUCGAUGGUCAG | |
| | PB12 | CA | |
| 96 | A1AT_SpRY_ | GGCUGUGCUGACCAUCGACAGUUUUAGAGCUAGAAAUAGCAAGUUAAAAUAAGGCUAGUCCGUUAUCAA | 24975 |
| | ED2-_30FE_ | CUUGAAAAAGUGGCACCGAGUCGGUGCACAUGGCCCCAGCAGCUUCAGUCCCUUUCUCGUCGAUGGUCAG | |
| | PB11 | C | |
| 97 | A1AT_SpRY_ | GGCUGUGCUGACCAUCGACAGUUUUAGAGCUAGAAAUAGCAAGUUAAAAUAAGGCUAGUCCGUUAUCAA | 24976 |
| | ED2-_30FE_ | CUUGAAAAAGUGGCACCGAGUCGGUGCACAUGGCCCCAGCAGCUUCAGUCCCUUUCUCGUCGAUGGUCAG | |
| | PB10 | | |
| 98 | A1AT_SpRY_ | GGCUGUGCUGACCAUCGACAGUUUUAGAGCUAGAAAUAGCAAGUUAAAAUAAGGCUAGUCCGUUAUCAA | 24977 |
| | ED2-_30FE_ | CUUGAAAAAGUGGCACCGAGUCGGUGCACAUGGCCCCAGCAGCUUCAGUCCCUUUCUCGUCGAUGGUCA | |
| | PB9 | | |
| 99 | A1AT_SpRY_ | GGCUGUGCUGACCAUCGACAGUUUUAGAGCUAGAAAUAGCAAGUUAAAAUAAGGCUAGUCCGUUAUCAA | 24978 |
| | ED2-_30FE_ | CUUGAAAAAGUGGCACCGAGUCGGUGCACAUGGCCCCAGCAGCUUCAGUCCCUUUCUCGUCGAUGGUC | |
| | PB8 | | |
| 100 | A1AT_SpRY_ | GGCUGUGCUGACCAUCGACAGUUUUAGAGCUAGAAAUAGCAAGUUAAAAUAAGGCUAGUCCGUUAUCAA | 24979 |
| | ED2-_25FE_ | CUUGAAAAAGUGGCACCGAGUCGGUGCGCCCCAGCAGCUUCAGUCCCUUUCUCGUCGAUGGUCAGCACAG | |
| | PB17 | CC | |
| 101 | A1AT_SpRY_ | GGCUGUGCUGACCAUCGACAGUUUUAGAGCUAGAAAUAGCAAGUUAAAAUAAGGCUAGUCCGUUAUCAA | 24980 |
| | ED2-_25FE_ | CUUGAAAAAGUGGCACCGAGUCGGUGCGCCCCAGCAGCUUCAGUCCCUUUCUCGUCGAUGGUCAGCACAG | |
| | PB16 | C | |
| 102 | A1AT_SpRY_ | GGCUGUGCUGACCAUCGACAGUUUUAGAGCUAGAAAUAGCAAGUUAAAAUAAGGCUAGUCCGUUAUCAA | 24981 |
| | ED2-_25FE_ | CUUGAAAAAGUGGCACCGAGUCGGUGCGCCCCAGCAGCUUCAGUCCCUUUCUCGUCGAUGGUCAGCACAG | |
| | PB15 | | |
| 103 | A1AT_SpRY_ | GGCUGUGCUGACCAUCGACAGUUUUAGAGCUAGAAAUAGCAAGUUAAAAUAAGGCUAGUCCGUUAUCAA | 24982 |
| | ED2-_25FE_ | CUUGAAAAAGUGGCACCGAGUCGGUGCGCCCCAGCAGCUUCAGUCCCUUUCUCGUCGAUGGUCAGCACA | |
| | PB14 | | |
| 104 | A1AT_SpRY_ | GGCUGUGCUGACCAUCGACAGUUUUAGAGCUAGAAAUAGCAAGUUAAAAUAAGGCUAGUCCGUUAUCAA | 24983 |
| | ED2-_25FE_ | CUUGAAAAAGUGGCACCGAGUCGGUGCGCCCCAGCAGCUUCAGUCCCUUUCUCGUCGAUGGUCAGCAC | |
| | PB13 | | |
| 105 | A1AT_SpRY_ | GGCUGUGCUGACCAUCGACAGUUUUAGAGCUAGAAAUAGCAAGUUAAAAUAAGGCUAGUCCGUUAUCAA | 24984 |
| | ED2-_25FE_ | CUUGAAAAAGUGGCACCGAGUCGGUGCGCCCCAGCAGCUUCAGUCCCUUUCUCGUCGAUGGUCAGCA | |
| | PB12 | | |
| 106 | A1AT_SpRY_ | GGCUGUGCUGACCAUCGACAGUUUUAGAGCUAGAAAUAGCAAGUUAAAAUAAGGCUAGUCCGUUAUCAA | 24985 |
| | ED2-_25FE_ | CUUGAAAAAGUGGCACCGAGUCGGUGCGCCCCAGCAGCUUCAGUCCCUUUCUCGUCGAUGGUCAGC | |
| | PB11 | | |
| 107 | A1AT_SpRY_ | GGCUGUGCUGACCAUCGACAGUUUUAGAGCUAGAAAUAGCAAGUUAAAAUAAGGCUAGUCCGUUAUCAA | 24986 |
| | ED2-_25FE_ | CUUGAAAAAGUGGCACCGAGUCGGUGCGCCCCAGCAGCUUCAGUCCCUUUCUCGUCGAUGGUCAG | |
| | PB10 | | |
| 108 | A1AT_SpRY_ | GGCUGUGCUGACCAUCGACAGUUUUAGAGCUAGAAAUAGCAAGUUAAAAUAAGGCUAGUCCGUUAUCAA | 24987 |
| | ED2-_25FE_ | CUUGAAAAAGUGGCACCGAGUCGGUGCGCCCCAGCAGCUUCAGUCCCUUUCUCGUCGAUGGUCA | |
| | PB9 | | |
| 109 | A1AT_SpRY_ | GGCUGUGCUGACCAUCGACAGUUUUAGAGCUAGAAAUAGCAAGUUAAAAUAAGGCUAGUCCGUUAUCAA | 24988 |
| | ED2-_25FE_ | CUUGAAAAAGUGGCACCGAGUCGGUGCGCCCCAGCAGCUUCAGUCCCUUUCUCGUCGAUGGUC | |
| | PB8 | | |
| 110 | A1AT_SpRY_ | GGCUGUGCUGACCAUCGACAGUUUUAGAGCUAGAAAUAGCAAGUUAAAAUAAGGCUAGUCCGUUAUCAA | 24989 |
| | ED2-_20FE_ | CUUGAAAAAGUGGCACCGAGUCGGUGCAGCAGCUUCAGUCCCUUUCUCGUCGAUGGUCAGCACAGCC | |
| | PB17 | | |
| 111 | A1AT_SpRY_ | GGCUGUGCUGACCAUCGACAGUUUUAGAGCUAGAAAUAGCAAGUUAAAAUAAGGCUAGUCCGUUAUCAA | 24990 |
| | ED2-_20FE_ | CUUGAAAAAGUGGCACCGAGUCGGUGCAGCAGCUUCAGUCCCUUUCUCGUCGAUGGUCAGCACAGC | |
| | PB16 | | |
| 112 | A1AT_SpRY_ | GGCUGUGCUGACCAUCGACAGUUUUAGAGCUAGAAAUAGCAAGUUAAAAUAAGGCUAGUCCGUUAUCAA | 24991 |
| | ED2-_20FE_ | CUUGAAAAAGUGGCACCGAGUCGGUGCAGCAGCUUCAGUCCCUUUCUCGUCGAUGGUCAGCACAG | |
| | PB15 | | |
| 113 | A1AT_SpRY_ | GGCUGUGCUGACCAUCGACAGUUUUAGAGCUAGAAAUAGCAAGUUAAAAUAAGGCUAGUCCGUUAUCAA | 24992 |
| | ED2-_20FE_ | CUUGAAAAAGUGGCACCGAGUCGGUGCAGCAGCUUCAGUCCCUUUCUCGUCGAUGGUCAGCACA | |
| | PB14 | | |
| 114 | A1AT_SpRY_ | GGCUGUGCUGACCAUCGACAGUUUUAGAGCUAGAAAUAGCAAGUUAAAAUAAGGCUAGUCCGUUAUCAA | 24993 |
| | ED2-_20FE_ | CUUGAAAAAGUGGCACCGAGUCGGUGCAGCAGCUUCAGUCCCUUUCUCGUCGAUGGUCAGCAC | |
| | PB13 | | |
| 115 | A1AT_SpRY_ | GGCUGUGCUGACCAUCGACAGUUUUAGAGCUAGAAAUAGCAAGUUAAAAUAAGGCUAGUCCGUUAUCAA | 24994 |
| | ED2-_20FE_ | CUUGAAAAAGUGGCACCGAGUCGGUGCAGCAGCUUCAGUCCCUUUCUCGUCGAUGGUCAGCA | |
| | PB12 | | |
| 116 | A1AT_SpRY_ | GGCUGUGCUGACCAUCGACAGUUUUAGAGCUAGAAAUAGCAAGUUAAAAUAAGGCUAGUCCGUUAUCAA | 24995 |
| | ED2-_20FE_ | CUUGAAAAAGUGGCACCGAGUCGGUGCAGCAGCUUCAGUCCCUUUCUCGUCGAUGGUCAGC | |
| | PB11 | | |
| 117 | A1AT_SpRY_ | GGCUGUGCUGACCAUCGACAGUUUUAGAGCUAGAAAUAGCAAGUUAAAAUAAGGCUAGUCCGUUAUCAA | 24996 |
| | ED2-_20FE_ | CUUGAAAAAGUGGCACCGAGUCGGUGCAGCAGCUUCAGUCCCUUUCUCGUCGAUGGUCAG | |
| | PB10 | | |
| 118 | A1AT_SpRY_ | GGCUGUGCUGACCAUCGACAGUUUUAGAGCUAGAAAUAGCAAGUUAAAAUAAGGCUAGUCCGUUAUCAA | 24997 |
| | ED2-_20FE_ | CUUGAAAAAGUGGCACCGAGUCGGUGCAGCAGCUUCAGUCCCUUUCUCGUCGAUGGUCA | |
| | PB9 | | |
| 119 | A1AT_SpRY_ | GGCUGUGCUGACCAUCGACAGUUUUAGAGCUAGAAAUAGCAAGUUAAAAUAAGGCUAGUCCGUUAUCAA | 24998 |
| | ED2-_20FE_ | CUUGAAAAAGUGGCACCGAGUCGGUGCAGCAGCUUCAGUCCCUUUCUCGUCGAUGGUC | |
| | PB8 | | |
| 120 | A1AT_SpRY_ | GGCUGUGCUGACCAUCGACAGUUUUAGAGCUAGAAAUAGCAAGUUAAAAUAAGGCUAGUCCGUUAUCAA | 24999 |
| | ED2-_14FE_ | CUUGAAAAAGUGGCACCGAGUCGGUGCUUCAGUCCCUUUCUCGUCGAUGGUCAGCACAGCC | |
| | PB17 | | |
| 121 | A1AT_SpRY_ | GGCUGUGCUGACCAUCGACAGUUUUAGAGCUAGAAAUAGCAAGUUAAAAUAAGGCUAGUCCGUUAUCAA | 25000 |
| | ED2-_14FE_ | CUUGAAAAAGUGGCACCGAGUCGGUGCUUCAGUCCCUUUCUCGUCGAUGGUCAGCACAGC | |
| | PB16 | | |
| 122 | A1AT_SpRY_ | GGCUGUGCUGACCAUCGACAGUUUUAGAGCUAGAAAUAGCAAGUUAAAAUAAGGCUAGUCCGUUAUCAA | 25001 |
| | ED2-_14FE_ | CUUGAAAAAGUGGCACCGAGUCGGUGCUUCAGUCCCUUUCUCGUCGAUGGUCAGCACAG | |
| | PB15 | | |
| 123 | A1AT_SpRY_ | GGCUGUGCUGACCAUCGACAGUUUUAGAGCUAGAAAUAGCAAGUUAAAAUAAGGCUAGUCCGUUAUCAA | 25002 |
| | ED2-_14FE_ | CUUGAAAAAGUGGCACCGAGUCGGUGCUUCAGUCCCUUUCUCGUCGAUGGUCAGCACA | |
| | PB14 | | |
| 124 | A1AT_SpRY_ | GGCUGUGCUGACCAUCGACAGUUUUAGAGCUAGAAAUAGCAAGUUAAAAUAAGGCUAGUCCGUUAUCAA | 25003 |
| | ED2-_14FE_ | CUUGAAAAAGUGGCACCGAGUCGGUGCUUCAGUCCCUUUCUCGUCGAUGGUCAGCAC | |
| | PB13 | | |
| 125 | A1AT_ | GGCUGUGCUGACCAUCGACAGUUUUAGAGCUAGAAAUAGCAAGUUAAAAUAAGGCUAGUCCGUUAUCAA | 25004 |
| | SpRY_ | CUUGAAAAAGUGGCACCGAGUCGGUGCUUCAGUCCCUUUCUCGUCGAUGGUCAGCA | |
| | ED2-_14FE_ | | |
| | PB12 | | |
| 126 | A1AT_SpRY_ | GGCUGUGCUGACCAUCGACAGUUUUAGAGCUAGAAAUAGCAAGUUAAAAUAAGGCUAGUCCGUUAUCAA | 25005 |
| | ED2-_14FE_ | CUUGAAAAAGUGGCACCGAGUCGGUGCUUCAGUCCCUUUCUCGUCGAUGGUCAGC | |
| | PB11 | | |
| 127 | A1AT_SpRY_ | GGCUGUGCUGACCAUCGACAGUUUUAGAGCUAGAAAUAGCAAGUUAAAAUAAGGCUAGUCCGUUAUCAA | 25006 |
| | ED2-_14FE_ | CUUGAAAAAGUGGCACCGAGUCGGUGCUUCAGUCCCUUUCUCGUCGAUGGUCAG | |
| | PB10 | | |
| 128 | A1AT_SpRY_ | GGCUGUGCUGACCAUCGACAGUUUUAGAGCUAGAAAUAGCAAGUUAAAAUAAGGCUAGUCCGUUAUCAA | 25007 |
| | ED2-_14FE_ | CUUGAAAAAGUGGCACCGAGUCGGUGCUUCAGUCCCUUUCUCGUCGAUGGUCA | |
| | PB9 | | |
| 129 | A1AT_SpRY_ | GGCUGUGCUGACCAUCGACAGUUUUAGAGCUAGAAAUAGCAAGUUAAAAUAAGGCUAGUCCGUUAUCAA | 25008 |
| | ED2-_14FE_ | CUUGAAAAAGUGGCACCGAGUCGGUGCUUCAGUCCCUUUCUCGUCGAUGGUC | |
| | PB8 | | |
| 130 | A1AT_SpRY_ | GGCUGUGCUGACCAUCGACAGUUUUAGAGCUAGAAAUAGCAAGUUAAAAUAAGGCUAGUCCGUUAUCAA | 25009 |
| | ED2-_11FE_ | CUUGAAAAAGUGGCACCGAGUCGGUGCAGUCCCUUUCUCGUCGAUGGUCAGCACAGCC | |
| | PB17 | | |
| 131 | A1AT_SpRY_ | GGCUGUGCUGACCAUCGACAGUUUUAGAGCUAGAAAUAGCAAGUUAAAAUAAGGCUAGUCCGUUAUCAA | 25010 |
| | ED2-_11FE_ | CUUGAAAAAGUGGCACCGAGUCGGUGCAGUCCCUUUCUCGUCGAUGGUCAGCACAGC | |
| | PB16 | | |
| 132 | A1AT_SpRY_ | GGCUGUGCUGACCAUCGACAGUUUUAGAGCUAGAAAUAGCAAGUUAAAAUAAGGCUAGUCCGUUAUCAA | 25011 |
| | ED2-_11FE_ | CUUGAAAAAGUGGCACCGAGUCGGUGCAGUCCCUUUCUCGUCGAUGGUCAGCACAG | |
| | PB15 | | |
| 133 | A1AT_SpRY_ | GGCUGUGCUGACCAUCGACAGUUUUAGAGCUAGAAAUAGCAAGUUAAAAUAAGGCUAGUCCGUUAUCAA | 25012 |
| | ED2-_11FE_ | CUUGAAAAAGUGGCACCGAGUCGGUGCAGUCCCUUUCUCGUCGAUGGUCAGCACA | |
| | PB14 | | |
| 134 | A1AT_SpRY_ | GGCUGUGCUGACCAUCGACAGUUUUAGAGCUAGAAAUAGCAAGUUAAAAUAAGGCUAGUCCGUUAUCAA | 25013 |
| | ED2-_11FE_ | CUUGAAAAAGUGGCACCGAGUCGGUGCAGUCCCUUUCUCGUCGAUGGUCAGCAC | |
| | PB13 | | |
| 135 | A1AT_SpRY_ | GGCUGUGCUGACCAUCGACAGUUUUAGAGCUAGAAAUAGCAAGUUAAAAUAAGGCUAGUCCGUUAUCAA | 25014 |
| | ED2-_11FE_ | CUUGAAAAAGUGGCACCGAGUCGGUGCAGUCCCUUUCUCGUCGAUGGUCAGCA | |
| | PB12 | | |
| 136 | A1AT_SpRY_ | GGCUGUGCUGACCAUCGACAGUUUUAGAGCUAGAAAUAGCAAGUUAAAAUAAGGCUAGUCCGUUAUCAA | 25015 |
| | ED2-_11FE_ | CUUGAAAAAGUGGCACCGAGUCGGUGCAGUCCCUUUCUCGUCGAUGGUCAGC | |
| | PB11 | | |
| 137 | A1AT_SpRY_ | GGCUGUGCUGACCAUCGACAGUUUUAGAGCUAGAAAUAGCAAGUUAAAAUAAGGCUAGUCCGUUAUCAA | 25016 |
| | ED2-_11FE_ | CUUGAAAAAGUGGCACCGAGUCGGUGCAGUCCCUUUCUCGUCGAUGGUCAG | |
| | PB10 | | |
| 138 | A1AT_SpRY_ | GGCUGUGCUGACCAUCGACAGUUUUAGAGCUAGAAAUAGCAAGUUAAAAUAAGGCUAGUCCGUUAUCAA | 25017 |
| | ED2-_11FE_ | CUUGAAAAAGUGGCACCGAGUCGGUGCAGUCCCUUUCUCGUCGAUGGUCA | |
| | PB9 | | |
| 139 | A1AT_SpRY_ | GGCUGUGCUGACCAUCGACAGUUUUAGAGCUAGAAAUAGCAAGUUAAAAUAAGGCUAGUCCGUUAUCAA | 25018 |
| | ED2-_11FE_ | CUUGAAAAAGUGGCACCGAGUCGGUGCAGUCCCUUUCUCGUCGAUGGUC | |
| | PB8 | | |
| 140 | A1AT_SpRY_ | GGCUGUGCUGACCAUCGACAGUUUUAGAGCUAGAAAUAGCAAGUUAAAAUAAGGCUAGUCCGUUAUCAA | 25019 |
| | ED2-_9FE_ | CUUGAAAAAGUGGCACCGAGUCGGUGCUCCCUUUCUCGUCGAUGGUCAGCACAGCC | |
| | PB17 | | |
| 141 | A1AT_SpRY_ | GGCUGUGCUGACCAUCGACAGUUUUAGAGCUAGAAAUAGCAAGUUAAAAUAAGGCUAGUCCGUUAUCAA | 25020 |
| | ED2-_9FE_ | CUUGAAAAAGUGGCACCGAGUCGGUGCUCCCUUUCUCGUCGAUGGUCAGCACAGC | |
| | PB16 | | |
| 142 | A1AT_SpRY_ | GGCUGUGCUGACCAUCGACAGUUUUAGAGCUAGAAAUAGCAAGUUAAAAUAAGGCUAGUCCGUUAUCAA | 25021 |
| | ED2-_9FE_ | CUUGAAAAAGUGGCACCGAGUCGGUGCUCCCUUUCUCGUCGAUGGUCAGCACAG | |
| | PB15 | | |
| 143 | A1AT_SpRY_ | GGCUGUGCUGACCAUCGACAGUUUUAGAGCUAGAAAUAGCAAGUUAAAAUAAGGCUAGUCCGUUAUCAA | 25022 |
| | ED2-_9FE_ | CUUGAAAAAGUGGCACCGAGUCGGUGCUCCCUUUCUCGUCGAUGGUCAGCACA | |
| | PB14 | | |
| 144 | A1AT_SpRY_ | GGCUGUGCUGACCAUCGACAGUUUUAGAGCUAGAAAUAGCAAGUUAAAAUAAGGCUAGUCCGUUAUCAA | 25023 |
| | ED2-_9FE_ | CUUGAAAAAGUGGCACCGAGUCGGUGCUCCCUUUCUCGUCGAUGGUCAGCAC | |
| | PB13 | | |
| 145 | A1AT_SpRY_ | GGCUGUGCUGACCAUCGACAGUUUUAGAGCUAGAAAUAGCAAGUUAAAAUAAGGCUAGUCCGUUAUCAA | 25024 |
| | ED2-_9FE_ | CUUGAAAAAGUGGCACCGAGUCGGUGCUCCCUUUCUCGUCGAUGGUCAGCA | |
| | PB12 | | |
| 146 | A1AT_SpRY_ | GGCUGUGCUGACCAUCGACAGUUUUAGAGCUAGAAAUAGCAAGUUAAAAUAAGGCUAGUCCGUUAUCAA | 25025 |
| | ED2-_9FE_ | CUUGAAAAAGUGGCACCGAGUCGGUGCUCCCUUUCUCGUCGAUGGUCAGC | |
| | PB11 | | |
| 147 | A1AT_SpRY_ | GGCUGUGCUGACCAUCGACAGUUUUAGAGCUAGAAAUAGCAAGUUAAAAUAAGGCUAGUCCGUUAUCAA | 25026 |
| | ED2-_9FE_ | CUUGAAAAAGUGGCACCGAGUCGGUGCUCCCUUUCUCGUCGAUGGUCAG | |
| | PB10 | | |
| 148 | A1AT_SpRY_ | GGCUGUGCUGACCAUCGACAGUUUUAGAGCUAGAAAUAGCAAGUUAAAAUAAGGCUAGUCCGUUAUCAA | 25027 |
| | ED2-_9FE_ | CUUGAAAAAGUGGCACCGAGUCGGUGCUCCCUUUCUCGUCGAUGGUCA | |
| | PB9 | | |
| 149 | A1AT_SpRY_ | GGCUGUGCUGACCAUCGACAGUUUUAGAGCUAGAAAUAGCAAGUUAAAAUAAGGCUAGUCCGUUAUCAA | 25028 |
| | ED2-_9FE_ | CUUGAAAAAGUGGCACCGAGUCGGUGCUCCCUUUCUCGUCGAUGGUC | |
| | PB8 | | |
| 150 | A1AT_SpRY_ | GGCUGUGCUGACCAUCGACAGUUUUAGAGCUAGAAAUAGCAAGUUAAAAUAAGGCUAGUCCGUUAUCAA | 25029 |
| | ED2-_7FE_ | CUUGAAAAAGUGGCACCGAGUCGGUGCCCUUUCUCGUCGAUGGUCAGCACAGCC | |
| | PB17 | | |
| 151 | A1AT_SpRY_ | GGCUGUGCUGACCAUCGACAGUUUUAGAGCUAGAAAUAGCAAGUUAAAAUAAGGCUAGUCCGUUAUCAA | 25030 |
| | ED2-_7FE_ | CUUGAAAAAGUGGCACCGAGUCGGUGCCCUUUCUCGUCGAUGGUCAGCACAGC | |
| | PB16 | | |
| 152 | A1AT_SpRY_ | GGCUGUGCUGACCAUCGACAGUUUUAGAGCUAGAAAUAGCAAGUUAAAAUAAGGCUAGUCCGUUAUCAA | 25031 |
| | ED2-_7FE_ | CUUGAAAAAGUGGCACCGAGUCGGUGCCCUUUCUCGUCGAUGGUCAGCACAG | |
| | PB15 | | |
| 153 | A1AT_SpRY_ | GGCUGUGCUGACCAUCGACAGUUUUAGAGCUAGAAAUAGCAAGUUAAAAUAAGGCUAGUCCGUUAUCAA | 25032 |
| | ED2-_7FE_ | CUUGAAAAAGUGGCACCGAGUCGGUGCCCUUUCUCGUCGAUGGUCAGCACA | |
| | PB14 | | |
| 154 | A1AT_SpRY_ | GGCUGUGCUGACCAUCGACAGUUUUAGAGCUAGAAAUAGCAAGUUAAAAUAAGGCUAGUCCGUUAUCAA | 25033 |
| | ED2-_7FE_ | CUUGAAAAAGUGGCACCGAGUCGGUGCCCUUUCUCGUCGAUGGUCAGCAC | |
| | PB13 | | |
| 155 | A1AT_SpRY_ | GGCUGUGCUGACCAUCGACAGUUUUAGAGCUAGAAAUAGCAAGUUAAAAUAAGGCUAGUCCGUUAUCAA | 25034 |
| | ED2-_7FE_ | CUUGAAAAAGUGGCACCGAGUCGGUGCCCUUUCUCGUCGAUGGUCAGCA | |
| | PB12 | | |
| 156 | A1AT_SpRY_ | GGCUGUGCUGACCAUCGACAGUUUUAGAGCUAGAAAUAGCAAGUUAAAAUAAGGCUAGUCCGUUAUCAA | 25035 |
| | ED2-_7FE_ | CUUGAAAAAGUGGCACCGAGUCGGUGCCCUUUCUCGUCGAUGGUCAGC | |
| | PB11 | | |
| 157 | A1AT_SpRY_ | GGCUGUGCUGACCAUCGACAGUUUUAGAGCUAGAAAUAGCAAGUUAAAAUAAGGCUAGUCCGUUAUCAA | 25036 |
| | ED2-_7FE_ | CUUGAAAAAGUGGCACCGAGUCGGUGCCCUUUCUCGUCGAUGGUCAG | |
| | PB10 | | |
| 158 | A1AT_SpRY_ | GGCUGUGCUGACCAUCGACAGUUUUAGAGCUAGAAAUAGCAAGUUAAAAUAAGGCUAGUCCGUUAUCAA | 25037 |
| | ED2-_7FE_ | CUUGAAAAAGUGGCACCGAGUCGGUGCCCUUUCUCGUCGAUGGUCA | |
| | PB9 | | |
| 159 | A1AT_SpRY_ | GGCUGUGCUGACCAUCGACAGUUUUAGAGCUAGAAAUAGCAAGUUAAAAUAAGGCUAGUCCGUUAUCAA | 25038 |
| | ED2-_7FE_ | CUUGAAAAAGUGGCACCGAGUCGGUGCCCUUUCUCGUCGAUGGUC | |
| | PB8 | | |
| 160 | A1AT_SpRY_ | GGCUGUGCUGACCAUCGACAGUUUUAGAGCUAGAAAUAGCAAGUUAAAAUAAGGCUAGUCCGUUAUCAA | 25039 |
| | ED2-_5FE_ | CUUGAAAAAGUGGCACCGAGUCGGUGCUUUCUCGUCGAUGGUCAGCACAGCC | |
| | PB17 | | |
| 161 | A1AT_SpRY_ | GGCUGUGCUGACCAUCGACAGUUUUAGAGCUAGAAAUAGCAAGUUAAAAUAAGGCUAGUCCGUUAUCAA | 25040 |
| | ED2-_5FE_ | CUUGAAAAAGUGGCACCGAGUCGGUGCUUUCUCGUCGAUGGUCAGCACAGC | |
| | PB16 | | |
| 162 | A1AT_SpRY_ | GGCUGUGCUGACCAUCGACAGUUUUAGAGCUAGAAAUAGCAAGUUAAAAUAAGGCUAGUCCGUUAUCAA | 25041 |
| | ED2-_5FE_ | CUUGAAAAAGUGGCACCGAGUCGGUGCUUUCUCGUCGAUGGUCAGCACAG | |
| | PB15 | | |
| 163 | A1AT_SpRY_ | GGCUGUGCUGACCAUCGACAGUUUUAGAGCUAGAAAUAGCAAGUUAAAAUAAGGCUAGUCCGUUAUCAA | 25042 |
| | ED2-_5FE_ | CUUGAAAAAGUGGCACCGAGUCGGUGCUUUCUCGUCGAUGGUCAGCACA | |
| | PB14 | | |
| 164 | A1AT_SpRY_ | GGCUGUGCUGACCAUCGACAGUUUUAGAGCUAGAAAUAGCAAGUUAAAAUAAGGCUAGUCCGUUAUCAA | 25043 |
| | ED2-_5FE_ | CUUGAAAAAGUGGCACCGAGUCGGUGCUUUCUCGUCGAUGGUCAGCAC | |
| | PB13 | | |
| 165 | A1AT_ | GGCUGUGCUGACCAUCGACAGUUUUAGAGCUAGAAAUAGCAAGUUAAAAUAAGGCUAGUCCGUUAUCAA | 25044 |
| | SpRY_ | CUUGAAAAAGUGGCACCGAGUCGGUGCUUUCUCGUCGAUGGUCAGCA | |
| | ED2-_5FE_ | | |
| | PB12 | | |
| 166 | A1AT_SpRY_ | GGCUGUGCUGACCAUCGACAGUUUUAGAGCUAGAAAUAGCAAGUUAAAAUAAGGCUAGUCCGUUAUCAA | 25045 |
| | ED2-_5FE_ | CUUGAAAAAGUGGCACCGAGUCGGUGCUUUCUCGUCGAUGGUCAGC | |
| | PB11 | | |
| 167 | A1AT_SpRY_ | GGCUGUGCUGACCAUCGACAGUUUUAGAGCUAGAAAUAGCAAGUUAAAAUAAGGCUAGUCCGUUAUCAA | 25046 |
| | ED2-_5FE_ | CUUGAAAAAGUGGCACCGAGUCGGUGCUUUCUCGUCGAUGGUCAG | |
| | PB10 | | |
| 168 | A1AT_SpRY_ | GGCUGUGCUGACCAUCGACAGUUUUAGAGCUAGAAAUAGCAAGUUAAAAUAAGGCUAGUCCGUUAUCAA | 25047 |
| | ED2-_5FE_ | CUUGAAAAAGUGGCACCGAGUCGGUGCUUUCUCGUCGAUGGUCA | |
| | PB9 | | |
| 169 | A1AT_SpRY_ | GGCUGUGCUGACCAUCGACAGUUUUAGAGCUAGAAAUAGCAAGUUAAAAUAAGGCUAGUCCGUUAUCAA | 25048 |
| | ED2-_5FE_ | CUUGAAAAAGUGGCACCGAGUCGGUGCUUUCUCGUCGAUGGUC | |
| | PB8 | | |
| 170 | A1AT_SpRY_ | GGCUGUGCUGACCAUCGACAGUUUUAGAGCUAGAAAUAGCAAGUUAAAAUAAGGCUAGUCCGUUAUCAA | 25049 |
| | ED2-_3FE_ | CUUGAAAAAGUGGCACCGAGUCGGUGCUCUCGUCGAUGGUCAGCACAGCC | |
| | PB17 | | |
| 171 | A1AT_SpRY_ | GGCUGUGCUGACCAUCGACAGUUUUAGAGCUAGAAAUAGCAAGUUAAAAUAAGGCUAGUCCGUUAUCAA | 25050 |
| | ED2-_3FE_ | CUUGAAAAAGUGGCACCGAGUCGGUGCUCUCGUCGAUGGUCAGCACAGC | |
| | PB16 | | |
| 172 | A1AT_SpRY_ | GGCUGUGCUGACCAUCGACAGUUUUAGAGCUAGAAAUAGCAAGUUAAAAUAAGGCUAGUCCGUUAUCAA | 25051 |
| | ED2-_3FE_ | CUUGAAAAAGUGGCACCGAGUCGGUGCUCUCGUCGAUGGUCAGCACAG | |
| | PB15 | | |
| 173 | A1AT_SpRY_ | GGCUGUGCUGACCAUCGACAGUUUUAGAGCUAGAAAUAGCAAGUUAAAAUAAGGCUAGUCCGUUAUCAA | 25052 |
| | ED2-_3FE_ | CUUGAAAAAGUGGCACCGAGUCGGUGCUCUCGUCGAUGGUCAGCACA | |
| | PB14 | | |
| 174 | A1AT_SpRY_ | GGCUGUGCUGACCAUCGACAGUUUUAGAGCUAGAAAUAGCAAGUUAAAAUAAGGCUAGUCCGUUAUCAA | 25053 |
| | ED2-_3FE_ | CUUGAAAAAGUGGCACCGAGUCGGUGCUCUCGUCGAUGGUCAGCAC | |
| | PB13 | | |
| 175 | A1AT_SpRY_ | GGCUGUGCUGACCAUCGACAGUUUUAGAGCUAGAAAUAGCAAGUUAAAAUAAGGCUAGUCCGUUAUCAA | 25054 |
| | ED2-_3FE_ | CUUGAAAAAGUGGCACCGAGUCGGUGCUCUCGUCGAUGGUCAGCA | |
| | PB12 | | |
| 176 | A1AT_SpRY_ | GGCUGUGCUGACCAUCGACAGUUUUAGAGCUAGAAAUAGCAAGUUAAAAUAAGGCUAGUCCGUUAUCAA | 25055 |
| | ED2-_3FE_ | CUUGAAAAAGUGGCACCGAGUCGGUGCUCUCGUCGAUGGUCAGC | |
| | PB11 | | |
| 177 | A1AT_SpRY_ | GGCUGUGCUGACCAUCGACAGUUUUAGAGCUAGAAAUAGCAAGUUAAAAUAAGGCUAGUCCGUUAUCAA | 25056 |
| | ED2-_3FE_ | CUUGAAAAAGUGGCACCGAGUCGGUGCUCUCGUCGAUGGUCAG | |
| | PB10 | | |
| 178 | A1AT_SpRY_ | GGCUGUGCUGACCAUCGACAGUUUUAGAGCUAGAAAUAGCAAGUUAAAAUAAGGCUAGUCCGUUAUCAA | 25057 |
| | ED2-_3FE_ | CUUGAAAAAGUGGCACCGAGUCGGUGCUCUCGUCGAUGGUCA | |
| | PB9 | | |
| 179 | AIAT_ | GGCUGUGCUGACCAUCGACAGUUUUAGAGCUAGAAAUAGCAAGUUAAAAUAAGGCUAGUCCGUUAUCAA | 25058 |
| | ED2-_3FE_ | CUUGAAAAAGUGGCACCGAGUCGGUGCUCUCGUCGAUGGUC | |
| | PB8 | | |
| 180 | A1AT_ | AGGCUGUGCUGACCAUCGACGUUUUAGAGCUAGAAAUAGCAAGUUAAAAUAAGGCUAGUCCGUUAUCAA | 25059 |
| | ScaCas9++_ | CUUGAAAAAGUGGCACCGAGUCGGUGCACAUGGCCCCAGCAGCUUCAGUCCCUUUCUCGUCGAUGGUCAG | |
| | SpRY_ | CACAGCCU | |
| | ED3-_30FE_ | | |
| | PB17 | | |
| 181 | A1AT_ | AGGCUGUGCUGACCAUCGACGUUUUAGAGCUAGAAAUAGCAAGUUAAAAUAAGGCUAGUCCGUUAUCAA | 25060 |
| | ScaCas9++_ | CUUGAAAAAGUGGCACCGAGUCGGUGCACAUGGCCCCAGCAGCUUCAGUCCCUUUCUCGUCGAUGGUCAG | |
| | SpRY_ | CACAGCC | |
| | ED3-_30FE_ | | |
| | PB16 | | |
| 182 | A1AT_ | AGGCUGUGCUGACCAUCGACGUUUUAGAGCUAGAAAUAGCAAGUUAAAAUAAGGCUAGUCCGUUAUCAA | 25061 |
| | ScaCas9++_ | CUUGAAAAAGUGGCACCGAGUCGGUGCACAUGGCCCCAGCAGCUUCAGUCCCUUUCUCGUCGAUGGUCAG | |
| | SpRY_ | CACAGC | |
| | ED3-_30FE_ | | |
| | PB15 | | |
| 183 | A1AT_ | AGGCUGUGCUGACCAUCGACGUUUUAGAGCUAGAAAUAGCAAGUUAAAAUAAGGCUAGUCCGUUAUCAA | 25062 |
| | ScaCas9++_ | CUUGAAAAAGUGGCACCGAGUCGGUGCACAUGGCCCCAGCAGCUUCAGUCCCUUUCUCGUCGAUGGUCAG | |
| | SpRY_ | CACAG | |
| | ED3-_30FE_ | | |
| | PB14 | | |
| 184 | A1AT_ | AGGCUGUGCUGACCAUCGACGUUUUAGAGCUAGAAAUAGCAAGUUAAAAUAAGGCUAGUCCGUUAUCAA | 25063 |
| | ScaCas9++_ | CUUGAAAAAGUGGCACCGAGUCGGUGCACAUGGCCCCAGCAGCUUCAGUCCCUUUCUCGUCGAUGGUCAG | |
| | SpRY_ | CACA | |
| | ED3-_30FE_ | | |
| | PB13 | | |
| 185 | A1AT_ | AGGCUGUGCUGACCAUCGACGUUUUAGAGCUAGAAAUAGCAAGUUAAAAUAAGGCUAGUCCGUUAUCAA | 25064 |
| | ScaCas9++_ | CUUGAAAAAGUGGCACCGAGUCGGUGCACAUGGCCCCAGCAGCUUCAGUCCCUUUCUCGUCGAUGGUCAG | |
| | SpRY_ | CAC | |
| | ED3-_30FE_ | | |
| | PB12 | | |
| 186 | A1AT_ | AGGCUGUGCUGACCAUCGACGUUUUAGAGCUAGAAAUAGCAAGUUAAAAUAAGGCUAGUCCGUUAUCAA | 25065 |
| | ScaCas9++_ | CUUGAAAAAGUGGCACCGAGUCGGUGCACAUGGCCCCAGCAGCUUCAGUCCCUUUCUCGUCGAUGGUCAG | |
| | SpRY_ | CA | |
| | ED3-_30FE_ | | |
| | PB11 | | |
| 187 | A1AT_ | AGGCUGUGCUGACCAUCGACGUUUUAGAGCUAGAAAUAGCAAGUUAAAAUAAGGCUAGUCCGUUAUCAA | 25066 |
| | ScaCas9++_ | CUUGAAAAAGUGGCACCGAGUCGGUGCACAUGGCCCCAGCAGCUUCAGUCCCUUUCUCGUCGAUGGUCAG | |
| | SpRY_ | C | |
| | ED3-_30FE_ | | |
| | PB10 | | |
| 188 | A1AT_ | AGGCUGUGCUGACCAUCGACGUUUUAGAGCUAGAAAUAGCAAGUUAAAAUAAGGCUAGUCCGUUAUCAA | 25067 |
| | ScaCas9++_ | CUUGAAAAAGUGGCACCGAGUCGGUGCACAUGGCCCCAGCAGCUUCAGUCCCUUUCUCGUCGAUGGUCAG | |
| | SpRY_ | | |
| | ED3-_30FE_ | | |
| | PB9 | | |
| 189 | A1AT_ | AGGCUGUGCUGACCAUCGACGUUUUAGAGCUAGAAAUAGCAAGUUAAAAUAAGGCUAGUCCGUUAUCAA | 25068 |
| | ScaCas9++_ | CUUGAAAAAGUGGCACCGAGUCGGUGCACAUGGCCCCAGCAGCUUCAGUCCCUUUCUCGUCGAUGGUCA | |
| | SpRY_ | | |
| | ED3-_30FE_ | | |
| | PB8 | | |
| 190 | A1AT_ | AGGCUGUGCUGACCAUCGACGUUUUAGAGCUAGAAAUAGCAAGUUAAAAUAAGGCUAGUCCGUUAUCAA | 25069 |
| | ScaCas9++_ | CUUGAAAAAGUGGCACCGAGUCGGUGCGCCCCAGCAGCUUCAGUCCCUUUCUCGUCGAUGGUCAGCACAG | |
| | SpRY_ | CCU | |
| | ED3-_25FE_ | | |
| | PB17 | | |
| 191 | A1AT_ | AGGCUGUGCUGACCAUCGACGUUUUAGAGCUAGAAAUAGCAAGUUAAAAUAAGGCUAGUCCGUUAUCAA | 25070 |
| | ScaCas9++_ | CUUGAAAAAGUGGCACCGAGUCGGUGCGCCCCAGCAGCUUCAGUCCCUUUCUCGUCGAUGGUCAGCACAG | |
| | SpRY_ | CC | |
| | ED3-_25FE_ | | |
| | PB16 | | |
| 192 | A1AT_ | AGGCUGUGCUGACCAUCGACGUUUUAGAGCUAGAAAUAGCAAGUUAAAAUAAGGCUAGUCCGUUAUCAA | 25071 |
| | ScaCas9++_ | CUUGAAAAAGUGGCACCGAGUCGGUGCGCCCCAGCAGCUUCAGUCCCUUUCUCGUCGAUGGUCAGCACAG | |
| | SpRY_ | C | |
| | ED3-_25FE_ | | |
| | PB15 | | |
| 193 | A1AT_ | AGGCUGUGCUGACCAUCGACGUUUUAGAGCUAGAAAUAGCAAGUUAAAAUAAGGCUAGUCCGUUAUCAA | 25072 |
| | ScaCas9++_ | CUUGAAAAAGUGGCACCGAGUCGGUGCGCCCCAGCAGCUUCAGUCCCUUUCUCGUCGAUGGUCAGCACAG | |
| | SpRY_ | | |
| | ED3-_25FE_ | | |
| | PB14 | | |
| 194 | A1AT_ | AGGCUGUGCUGACCAUCGACGUUUUAGAGCUAGAAAUAGCAAGUUAAAAUAAGGCUAGUCCGUUAUCAA | 25073 |
| | ScaCas9++_ | CUUGAAAAAGUGGCACCGAGUCGGUGCGCCCCAGCAGCUUCAGUCCCUUUCUCGUCGAUGGUCAGCACA | |
| | SpRY_ | | |
| | ED3-_25FE_ | | |
| | PB13 | | |
| 195 | A1AT_ | AGGCUGUGCUGACCAUCGACGUUUUAGAGCUAGAAAUAGCAAGUUAAAAUAAGGCUAGUCCGUUAUCAA | 25074 |
| | ScaCas9++_ | CUUGAAAAAGUGGCACCGAGUCGGUGCGCCCCAGCAGCUUCAGUCCCUUUCUCGUCGAUGGUCAGCAC | |
| | SpRY_ | | |
| | ED3-_25FE_ | | |
| | PB12 | | |
| 196 | A1AT_ | AGGCUGUGCUGACCAUCGACGUUUUAGAGCUAGAAAUAGCAAGUUAAAAUAAGGCUAGUCCGUUAUCAA | 25075 |
| | ScaCas9++_ | CUUGAAAAAGUGGCACCGAGUCGGUGCGCCCCAGCAGCUUCAGUCCCUUUCUCGUCGAUGGUCAGCA | |
| | SpRY_ | | |
| | ED3-_25FE_ | | |
| | PB11 | | |
| 197 | A1AT_ | AGGCUGUGCUGACCAUCGACGUUUUAGAGCUAGAAAUAGCAAGUUAAAAUAAGGCUAGUCCGUUAUCAA | 25076 |
| | ScaCas9++_ | CUUGAAAAAGUGGCACCGAGUCGGUGCGCCCCAGCAGCUUCAGUCCCUUUCUCGUCGAUGGUCAGC | |
| | SpRY_ | | |
| | ED3-_25FE_ | | |
| | PB10 | | |
| 198 | A1AT_ | AGGCUGUGCUGACCAUCGACGUUUUAGAGCUAGAAAUAGCAAGUUAAAAUAAGGCUAGUCCGUUAUCAA | 25077 |
| | ScaCas9++_ | CUUGAAAAAGUGGCACCGAGUCGGUGCGCCCCAGCAGCUUCAGUCCCUUUCUCGUCGAUGGUCAG | |
| | SpRY_ | | |
| | ED3-_25FE_ | | |
| | PB9 | | |
| 199 | A1AT_ | AGGCUGUGCUGACCAUCGACGUUUUAGAGCUAGAAAUAGCAAGUUAAAAUAAGGCUAGUCCGUUAUCAA | 25078 |
| | ScaCas9++_ | CUUGAAAAAGUGGCACCGAGUCGGUGCGCCCCAGCAGCUUCAGUCCCUUUCUCGUCGAUGGUCA | |
| | SpRY_ | | |
| | ED3-_25FE_ | | |
| | PB8 | | |
| 200 | A1AT_ | AGGCUGUGCUGACCAUCGACGUUUUAGAGCUAGAAAUAGCAAGUUAAAAUAAGGCUAGUCCGUUAUCAA | 25079 |
| | ScaCas9++_ | CUUGAAAAAGUGGCACCGAGUCGGUGCAGCAGCUUCAGUCCCUUUCUCGUCGAUGGUCAGCACAGCCU | |
| | SpRY_ | | |
| | ED3-_20FE_ | | |
| | PB17 | | |
| 201 | A1AT_ | AGGCUGUGCUGACCAUCGACGUUUUAGAGCUAGAAAUAGCAAGUUAAAAUAAGGCUAGUCCGUUAUCAA | 25080 |
| | ScaCas9++_ | CUUGAAAAAGUGGCACCGAGUCGGUGCAGCAGCUUCAGUCCCUUUCUCGUCGAUGGUCAGCACAGCC | |
| | SpRY_ | | |
| | ED3-_20FE_ | | |
| | PB16 | | |
| 202 | A1AT_ | AGGCUGUGCUGACCAUCGACGUUUUAGAGCUAGAAAUAGCAAGUUAAAAUAAGGCUAGUCCGUUAUCAA | 25081 |
| | ScaCas9++_ | CUUGAAAAAGUGGCACCGAGUCGGUGCAGCAGCUUCAGUCCCUUUCUCGUCGAUGGUCAGCACAGC | |
| | SpRY_ | | |
| | ED3-_20FE_ | | |
| | PB15 | | |
| 203 | A1AT_ | AGGCUGUGCUGACCAUCGACGUUUUAGAGCUAGAAAUAGCAAGUUAAAAUAAGGCUAGUCCGUUAUCAA | 25082 |
| | ScaCas9++_ | CUUGAAAAAGUGGCACCGAGUCGGUGCAGCAGCUUCAGUCCCUUUCUCGUCGAUGGUCAGCACAG | |
| | SpRY_ | | |
| | ED3-_20FE_ | | |
| | PB14 | | |
| 204 | A1AT_ | AGGCUGUGCUGACCAUCGACGUUUUAGAGCUAGAAAUAGCAAGUUAAAAUAAGGCUAGUCCGUUAUCAA | 25083 |
| | ScaCas9++_ | CUUGAAAAAGUGGCACCGAGUCGGUGCAGCAGCUUCAGUCCCUUUCUCGUCGAUGGUCAGCACA | |
| | SpRY_ | | |
| | ED3-_20FE_ | | |
| | PB13 | | |
| 205 | A1AT_ | AGGCUGUGCUGACCAUCGACGUUUUAGAGCUAGAAAUAGCAAGUUAAAAUAAGGCUAGUCCGUUAUCAA | 25084 |
| | ScaCas9++_ | CUUGAAAAAGUGGCACCGAGUCGGUGCAGCAGCUUCAGUCCCUUUCUCGUCGAUGGUCAGCAC | |
| | SpRY_ | | |
| | ED3-_20FE_ | | |
| | PB12 | | |
| 206 | A1AT_ | AGGCUGUGCUGACCAUCGACGUUUUAGAGCUAGAAAUAGCAAGUUAAAAUAAGGCUAGUCCGUUAUCAA | 25085 |
| | ScaCas9++_ | CUUGAAAAAGUGGCACCGAGUCGGUGCAGCAGCUUCAGUCCCUUUCUCGUCGAUGGUCAGCA | |
| | SpRY_ | | |
| | ED3-_20FE_ | | |
| | PB11 | | |
| 207 | A1AT_ | AGGCUGUGCUGACCAUCGACGUUUUAGAGCUAGAAAUAGCAAGUUAAAAUAAGGCUAGUCCGUUAUCAA | 25086 |
| | ScaCas9++_ | CUUGAAAAAGUGGCACCGAGUCGGUGCAGCAGCUUCAGUCCCUUUCUCGUCGAUGGUCAGC | |
| | SpRY_ | | |
| | ED3-_20FE_ | | |
| | PB10 | | |
| 208 | A1AT_ | AGGCUGUGCUGACCAUCGACGUUUUAGAGCUAGAAAUAGCAAGUUAAAAUAAGGCUAGUCCGUUAUCAA | 25087 |
| | ScaCas9++_ | CUUGAAAAAGUGGCACCGAGUCGGUGCAGCAGCUUCAGUCCCUUUCUCGUCGAUGGUCAG | |
| | SpRY_ | | |
| | E | | |
| | D3-_20FE_ | | |
| | PB9 | | |
| 209 | A1AT_ | AGGCUGUGCUGACCAUCGACGUUUUAGAGCUAGAAAUAGCAAGUUAAAAUAAGGCUAGUCCGUUAUCAA | 25088 |
| | ScaCas9++_ | CUUGAAAAAGUGGCACCGAGUCGGUGCAGCAGCUUCAGUCCCUUUCUCGUCGAUGGUCA | |
| | SpRY_ | | |
| | ED3-_20FE_ | | |
| | PB8 | | |
| 210 | A1AT_ | AGGCUGUGCUGACCAUCGACGUUUUAGAGCUAGAAAUAGCAAGUUAAAAUAAGGCUAGUCCGUUAUCAA | 25089 |
| | ScaCas9++_ | CUUGAAAAAGUGGCACCGAGUCGGUGCUUCAGUCCCUUUCUCGUCGAUGGUCAGCACAGCCU | |
| | SpRY_ | | |
| | ED3-_14FE_ | | |
| | PB17 | | |
| 211 | A1AT_ | AGGCUGUGCUGACCAUCGACGUUUUAGAGCUAGAAAUAGCAAGUUAAAAUAAGGCUAGUCCGUUAUCAA | 25090 |
| | ScaCas9++_ | CUUGAAAAAGUGGCACCGAGUCGGUGCUUCAGUCCCUUUCUCGUCGAUGGUCAGCACAGCC | |
| | SpRY_ | | |
| | ED3-_14FE_ | | |
| | PB16 | | |
| 212 | A1AT_ | AGGCUGUGCUGACCAUCGACGUUUUAGAGCUAGAAAUAGCAAGUUAAAAUAAGGCUAGUCCGUUAUCAA | 25091 |
| | ScaCas9++_ | CUUGAAAAAGUGGCACCGAGUCGGUGCUUCAGUCCCUUUCUCGUCGAUGGUCAGCACAGC | |
| | SpRY_ | | |
| | ED3-_14FE_ | | |
| | PB15 | | |
| 213 | A1AT_ | AGGCUGUGCUGACCAUCGACGUUUUAGAGCUAGAAAUAGCAAGUUAAAAUAAGGCUAGUCCGUUAUCAA | 25092 |
| | ScaCas9++_ | CUUGAAAAAGUGGCACCGAGUCGGUGCUUCAGUCCCUUUCUCGUCGAUGGUCAGCACAG | |
| | SpRY_ | | |
| | ED3-_14FE_ | | |
| | PB14 | | |
| 214 | A1AT_ | AGGCUGUGCUGACCAUCGACGUUUUAGAGCUAGAAAUAGCAAGUUAAAAUAAGGCUAGUCCGUUAUCAA | 25093 |
| | ScaCas9++_ | CUUGAAAAAGUGGCACCGAGUCGGUGCUUCAGUCCCUUUCUCGUCGAUGGUCAGCACA | |
| | SpRY_ | | |
| | ED3-_14FE_ | | |
| | PB13 | | |
| 215 | A1AT_ | AGGCUGUGCUGACCAUCGACGUUUUAGAGCUAGAAAUAGCAAGUUAAAAUAAGGCUAGUCCGUUAUCAA | 25094 |
| | ScaCas9++_ | CUUGAAAAAGUGGCACCGAGUCGGUGCUUCAGUCCCUUUCUCGUCGAUGGUCAGCAC | |
| | SpRY_ | | |
| | ED3-_14FE_ | | |
| | PB12 | | |
| 216 | A1AT_ | AGGCUGUGCUGACCAUCGACGUUUUAGAGCUAGAAAUAGCAAGUUAAAAUAAGGCUAGUCCGUUAUCAA | 25095 |
| | ScaCas9++_ | CUUGAAAAAGUGGCACCGAGUCGGUGCUUCAGUCCCUUUCUCGUCGAUGGUCAGCA | |
| | SpRY_ | | |
| | ED3-_14FE_ | | |
| | PB11 | | |
| 217 | A1AT_ | AGGCUGUGCUGACCAUCGACGUUUUAGAGCUAGAAAUAGCAAGUUAAAAUAAGGCUAGUCCGUUAUCAA | 25096 |
| | ScaCas9++_ | CUUGAAAAAGUGGCACCGAGUCGGUGCUUCAGUCCCUUUCUCGUCGAUGGUCAGC | |
| | SpRY_ | | |
| | ED3-_14FE_ | | |
| | PB10 | | |
| 218 | A1AT_ | AGGCUGUGCUGACCAUCGACGUUUUAGAGCUAGAAAUAGCAAGUUAAAAUAAGGCUAGUCCGUUAUCAA | 25097 |
| | ScaCas9++_ | CUUGAAAAAGUGGCACCGAGUCGGUGCUUCAGUCCCUUUCUCGUCGAUGGUCAG | |
| | SpRY_ | | |
| | E | | |
| | D3-_14FE_ | | |
| | PB9 | | |
| 219 | A1AT_ | AGGCUGUGCUGACCAUCGACGUUUUAGAGCUAGAAAUAGCAAGUUAAAAUAAGGCUAGUCCGUUAUCAA | 25098 |
| | ScaCas9++_ | CUUGAAAAAGUGGCACCGAGUCGGUGCUUCAGUCCCUUUCUCGUCGAUGGUCA | |
| | SpRY_ | | |
| | ED3-_14FE_ | | |
| | PB8 | | |
| 220 | A1AT_ | AGGCUGUGCUGACCAUCGACGUUUUAGAGCUAGAAAUAGCAAGUUAAAAUAAGGCUAGUCCGUUAUCAA | 25099 |
| | ScaCas9++_ | CUUGAAAAAGUGGCACCGAGUCGGUGCAGUCCCUUUCUCGUCGAUGGUCAGCACAGCCU | |
| | SpRY_ | | |
| | ED3-_11FE_ | | |
| | PB17 | | |
| 221 | A1AT_ | AGGCUGUGCUGACCAUCGACGUUUUAGAGCUAGAAAUAGCAAGUUAAAAUAAGGCUAGUCCGUUAUCAA | 25100 |
| | ScaCas9++_ | CUUGAAAAAGUGGCACCGAGUCGGUGCAGUCCCUUUCUCGUCGAUGGUCAGCACAGCC | |
| | SpRY_ | | |
| | ED3-_11FE_ | | |
| | PB16 | | |
| 222 | A1AT_ | AGGCUGUGCUGACCAUCGACGUUUUAGAGCUAGAAAUAGCAAGUUAAAAUAAGGCUAGUCCGUUAUCAA | 25101 |
| | ScaCas9++_ | CUUGAAAAAGUGGCACCGAGUCGGUGCAGUCCCUUUCUCGUCGAUGGUCAGCACAGC | |
| | SpRY_ | | |
| | ED3-_11FE_ | | |
| | PB15 | | |
| 223 | A1AT_ | AGGCUGUGCUGACCAUCGACGUUUUAGAGCUAGAAAUAGCAAGUUAAAAUAAGGCUAGUCCGUUAUCAA | 25102 |
| | ScaCas9++_ | CUUGAAAAAGUGGCACCGAGUCGGUGCAGUCCCUUUCUCGUCGAUGGUCAGCACAG | |
| | SpRY_ | | |
| | ED3-_11FE_ | | |
| | PB14 | | |
| 224 | A1AT_ | AGGCUGUGCUGACCAUCGACGUUUUAGAGCUAGAAAUAGCAAGUUAAAAUAAGGCUAGUCCGUUAUCAA | 25103 |
| | ScaCas9++_ | CUUGAAAAAGUGGCACCGAGUCGGUGCAGUCCCUUUCUCGUCGAUGGUCAGCACA | |
| | SpRY_ | | |
| | ED3-_11FE_ | | |
| | PB13 | | |
| 225 | A1AT_ | AGGCUGUGCUGACCAUCGACGUUUUAGAGCUAGAAAUAGCAAGUUAAAAUAAGGCUAGUCCGUUAUCAA | 25104 |
| | ScaCas9++_ | CUUGAAAAAGUGGCACCGAGUCGGUGCAGUCCCUUUCUCGUCGAUGGUCAGCAC | |
| | SpRY_ | | |
| | ED3-_11FE_ | | |
| | PB12 | | |
| 226 | A1AT_ | AGGCUGUGCUGACCAUCGACGUUUUAGAGCUAGAAAUAGCAAGUUAAAAUAAGGCUAGUCCGUUAUCAA | 25105 |
| | ScaCas9++_ | CUUGAAAAAGUGGCACCGAGUCGGUGCAGUCCCUUUCUCGUCGAUGGUCAGCA | |
| | SpRY_ | | |
| | ED3-_11FE_ | | |
| | PB11 | | |
| 227 | A1AT_ | AGGCUGUGCUGACCAUCGACGUUUUAGAGCUAGAAAUAGCAAGUUAAAAUAAGGCUAGUCCGUUAUCAA | 25106 |
| | ScaCas9++_ | CUUGAAAAAGUGGCACCGAGUCGGUGCAGUCCCUUUCUCGUCGAUGGUCAGC | |
| | SpRY_ | | |
| | ED3-_11FE_ | | |
| | PB10 | | |
| 228 | A1AT_ | AGGCUGUGCUGACCAUCGACGUUUUAGAGCUAGAAAUAGCAAGUUAAAAUAAGGCUAGUCCGUUAUCAA | 25107 |
| | ScaCas9++_ | CUUGAAAAAGUGGCACCGAGUCGGUGCAGUCCCUUUCUCGUCGAUGGUCAG | |
| | SpRY_ | | |
| | ED3-_11FE_ | | |
| | PB9 | | |
| 229 | A1AT_ | AGGCUGUGCUGACCAUCGACGUUUUAGAGCUAGAAAUAGCAAGUUAAAAUAAGGCUAGUCCGUUAUCAA | 25108 |
| | ScaCas9++_ | CUUGAAAAAGUGGCACCGAGUCGGUGCAGUCCCUUUCUCGUCGAUGGUCA | |
| | SpRY_ | | |
| | ED3-_11FE_ | | |
| | PB8 | | |
| 230 | A1AT_ | AGGCUGUGCUGACCAUCGACGUUUUAGAGCUAGAAAUAGCAAGUUAAAAUAAGGCUAGUCCGUUAUCAA | 25109 |
| | ScaCas9++_ | CUUGAAAAAGUGGCACCGAGUCGGUGCUCCCUUUCUCGUCGAUGGUCAGCACAGCCU | |
| | SpRY_ | | |
| | ED3-_9FE_ | | |
| | PB17 | | |
| 231 | A1AT_ | AGGCUGUGCUGACCAUCGACGUUUUAGAGCUAGAAAUAGCAAGUUAAAAUAAGGCUAGUCCGUUAUCAA | 25110 |
| | ScaCas9++_ | CUUGAAAAAGUGGCACCGAGUCGGUGCUCCCUUUCUCGUCGAUGGUCAGCACAGCC | |
| | SpRY_ | | |
| | ED3-_9FE_ | | |
| | PB16 | | |
| 232 | A1AT_ | AGGCUGUGCUGACCAUCGACGUUUUAGAGCUAGAAAUAGCAAGUUAAAAUAAGGCUAGUCCGUUAUCAA | 25111 |
| | ScaCas9++_ | CUUGAAAAAGUGGCACCGAGUCGGUGCUCCCUUUCUCGUCGAUGGUCAGCACAGC | |
| | SpRY_ | | |
| | ED3-_9FE_ | | |
| | PB15 | | |
| 233 | A1AT_ | AGGCUGUGCUGACCAUCGACGUUUUAGAGCUAGAAAUAGCAAGUUAAAAUAAGGCUAGUCCGUUAUCAA | 25112 |
| | ScaCas9++_ | CUUGAAAAAGUGGCACCGAGUCGGUGCUCCCUUUCUCGUCGAUGGUCAGCACAG | |
| | SpRY_ | | |
| | ED3-_9FE_ | | |
| | PB14 | | |
| 234 | A1AT_ | AGGCUGUGCUGACCAUCGACGUUUUAGAGCUAGAAAUAGCAAGUUAAAAUAAGGCUAGUCCGUUAUCAA | 25113 |
| | ScaCas9++_ | CUUGAAAAAGUGGCACCGAGUCGGUGCUCCCUUUCUCGUCGAUGGUCAGCACA | |
| | SpRY_ | | |
| | ED3-_9FE_ | | |
| | PB13 | | |
| 235 | A1AT_ | AGGCUGUGCUGACCAUCGACGUUUUAGAGCUAGAAAUAGCAAGUUAAAAUAAGGCUAGUCCGUUAUCAA | 25114 |
| | ScaCas9++_ | CUUGAAAAAGUGGCACCGAGUCGGUGCUCCCUUUCUCGUCGAUGGUCAGCAC | |
| | SpRY_ | | |
| | ED3-_9FE_ | | |
| | PB12 | | |
| 236 | A1AT_ | AGGCUGUGCUGACCAUCGACGUUUUAGAGCUAGAAAUAGCAAGUUAAAAUAAGGCUAGUCCGUUAUCAA | 25115 |
| | ScaCas9++_ | CUUGAAAAAGUGGCACCGAGUCGGUGCUCCCUUUCUCGUCGAUGGUCAGCA | |
| | SpRY_ | | |
| | ED3-_9FE_ | | |
| | PB11 | | |
| 237 | A1AT_ | AGGCUGUGCUGACCAUCGACGUUUUAGAGCUAGAAAUAGCAAGUUAAAAUAAGGCUAGUCCGUUAUCAA | 25116 |
| | ScaCas9++_ | CUUGAAAAAGUGGCACCGAGUCGGUGCUCCCUUUCUCGUCGAUGGUCAGC | |
| | SpRY_ | | |
| | ED3-_9FE_ | | |
| | PB10 | | |
| 238 | A1AT_ | AGGCUGUGCUGACCAUCGACGUUUUAGAGCUAGAAAUAGCAAGUUAAAAUAAGGCUAGUCCGUUAUCAA | 25117 |
| | ScaCas9++_ | CUUGAAAAAGUGGCACCGAGUCGGUGCUCCCUUUCUCGUCGAUGGUCAG | |
| | SpRY_ | | |
| | ED3-_ | | |
| | 9FE_ | | |
| | PB9 | | |
| 239 | A1AT_ | AGGCUGUGCUGACCAUCGACGUUUUAGAGCUAGAAAUAGCAAGUUAAAAUAAGGCUAGUCCGUUAUCAA | 25118 |
| | ScaCas9++_ | CUUGAAAAAGUGGCACCGAGUCGGUGCUCCCUUUCUCGUCGAUGGUCA | |
| | SpRY_ | | |
| | ED3-_ | | |
| | 9FE_ | | |
| | PB8 | | |
| 240 | A1AT_ | AGGCUGUGCUGACCAUCGACGUUUUAGAGCUAGAAAUAGCAAGUUAAAAUAAGGCUAGUCCGUUAUCAA | 25119 |
| | ScaCas9++_ | CUUGAAAAAGUGGCACCGAGUCGGUGCCCUUUCUCGUCGAUGGUCAGCACAGCCU | |
| | SpRY_ | | |
| | ED3-_7FE_ | | |
| | PB17 | | |
| 241 | A1AT_ | AGGCUGUGCUGACCAUCGACGUUUUAGAGCUAGAAAUAGCAAGUUAAAAUAAGGCUAGUCCGUUAUCAA | 25120 |
| | ScaCas9++_ | CUUGAAAAAGUGGCACCGAGUCGGUGCCCUUUCUCGUCGAUGGUCAGCACAGCC | |
| | SpRY_ | | |
| | ED3-_7FE_ | | |
| | PB16 | | |
| 242 | A1AT_ | AGGCUGUGCUGACCAUCGACGUUUUAGAGCUAGAAAUAGCAAGUUAAAAUAAGGCUAGUCCGUUAUCAA | 25121 |
| | ScaCas9++_ | CUUGAAAAAGUGGCACCGAGUCGGUGCCCUUUCUCGUCGAUGGUCAGCACAGC | |
| | SpRY_ | | |
| | ED3-_7FE_ | | |
| | PB15 | | |
| 243 | A1AT_ | AGGCUGUGCUGACCAUCGACGUUUUAGAGCUAGAAAUAGCAAGUUAAAAUAAGGCUAGUCCGUUAUCAA | 25122 |
| | ScaCas9++_ | CUUGAAAAAGUGGCACCGAGUCGGUGCCCUUUCUCGUCGAUGGUCAGCACAG | |
| | SpRY_ | | |
| | ED3-_7FE_ | | |
| | PB14 | | |
| 244 | A1AT_ | AGGCUGUGCUGACCAUCGACGUUUUAGAGCUAGAAAUAGCAAGUUAAAAUAAGGCUAGUCCGUUAUCAA | 25123 |
| | ScaCas9++_ | CUUGAAAAAGUGGCACCGAGUCGGUGCCCUUUCUCGUCGAUGGUCAGCACA | |
| | SpRY_ | | |
| | ED3-_7FE_ | | |
| | PB13 | | |
| 245 | A1AT_ | AGGCUGUGCUGACCAUCGACGUUUUAGAGCUAGAAAUAGCAAGUUAAAAUAAGGCUAGUCCGUUAUCAA | 25124 |
| | ScaCas9++_ | CUUGAAAAAGUGGCACCGAGUCGGUGCCCUUUCUCGUCGAUGGUCAGCAC | |
| | SpRY_ | | |
| | ED3-_7FE_ | | |
| | PB12 | | |
| 246 | A1AT_ | AGGCUGUGCUGACCAUCGACGUUUUAGAGCUAGAAAUAGCAAGUUAAAAUAAGGCUAGUCCGUUAUCAA | 25125 |
| | ScaCas9++_ | CUUGAAAAAGUGGCACCGAGUCGGUGCCCUUUCUCGUCGAUGGUCAGCA | |
| | SpRY_ | | |
| | ED3-_7FE_ | | |
| | PB11 | | |
| 247 | A1AT_ | AGGCUGUGCUGACCAUCGACGUUUUAGAGCUAGAAAUAGCAAGUUAAAAUAAGGCUAGUCCGUUAUCAA | 25126 |
| | ScaCas9++_ | CUUGAAAAAGUGGCACCGAGUCGGUGCCCUUUCUCGUCGAUGGUCAGC | |
| | SpRY_ | | |
| | ED3-_7FE_ | | |
| | PB10 | | |
| 248 | A1AT_ | AGGCUGUGCUGACCAUCGACGUUUUAGAGCUAGAAAUAGCAAGUUAAAAUAAGGCUAGUCCGUUAUCAA | 25127 |
| | ScaCas9++_ | CUUGAAAAAGUGGCACCGAGUCGGUGCCCUUUCUCGUCGAUGGUCAG | |
| | SpRY_ | | |
| | ED3-_ | | |
| | 7FE_ | | |
| | PB9 | | |
| 249 | A1AT_ | AGGCUGUGCUGACCAUCGACGUUUUAGAGCUAGAAAUAGCAAGUUAAAAUAAGGCUAGUCCGUUAUCAA | 25128 |
| | ScaCas9++_ | CUUGAAAAAGUGGCACCGAGUCGGUGCCCUUUCUCGUCGAUGGUCA | |
| | SpRY_ | | |
| | ED3-_ | | |
| | 7FE_ | | |
| | PB8 | | |
| 250 | A1AT_ | AGGCUGUGCUGACCAUCGACGUUUUAGAGCUAGAAAUAGCAAGUUAAAAUAAGGCUAGUCCGUUAUCAA | 25129 |
| | ScaCas9++_ | CUUGAAAAAGUGGCACCGAGUCGGUGCUUUCUCGUCGAUGGUCAGCACAGCCU | |
| | SpRY_ | | |
| | ED3-_5FE_ | | |
| | PB17 | | |
| 251 | A1AT_ | AGGCUGUGCUGACCAUCGACGUUUUAGAGCUAGAAAUAGCAAGUUAAAAUAAGGCUAGUCCGUUAUCAA | 25130 |
| | ScaCas9++_ | CUUGAAAAAGUGGCACCGAGUCGGUGCUUUCUCGUCGAUGGUCAGCACAGCC | |
| | SpRY_ | | |
| | ED3-_5FE_ | | |
| | PB16 | | |
| 252 | A1AT_ | AGGCUGUGCUGACCAUCGACGUUUUAGAGCUAGAAAUAGCAAGUUAAAAUAAGGCUAGUCCGUUAUCAA | 25131 |
| | ScaCas9++_ | CUUGAAAAAGUGGCACCGAGUCGGUGCUUUCUCGUCGAUGGUCAGCACAGC | |
| | SpRY_ | | |
| | ED3-_5FE_ | | |
| | PB15 | | |
| 253 | A1AT_ | AGGCUGUGCUGACCAUCGACGUUUUAGAGCUAGAAAUAGCAAGUUAAAAUAAGGCUAGUCCGUUAUCAA | 25132 |
| | ScaCas9++_ | CUUGAAAAAGUGGCACCGAGUCGGUGCUUUCUCGUCGAUGGUCAGCACAG | |
| | SpRY_ | | |
| | ED3-_5FE_ | | |
| | PB14 | | |
| 254 | A1AT_ | AGGCUGUGCUGACCAUCGACGUUUUAGAGCUAGAAAUAGCAAGUUAAAAUAAGGCUAGUCCGUUAUCAA | 25133 |
| | ScaCas9++_ | CUUGAAAAAGUGGCACCGAGUCGGUGCUUUCUCGUCGAUGGUCAGCACA | |
| | SpRY_ | | |
| | ED3-_5FE_ | | |
| | PB13 | | |
| 255 | A1AT_ | AGGCUGUGCUGACCAUCGACGUUUUAGAGCUAGAAAUAGCAAGUUAAAAUAAGGCUAGUCCGUUAUCAA | 25134 |
| | ScaCas9++_ | CUUGAAAAAGUGGCACCGAGUCGGUGCUUUCUCGUCGAUGGUCAGCAC | |
| | SpRY_ | | |
| | ED3-_5FE_ | | |
| | PB12 | | |
| 256 | A1AT_ | AGGCUGUGCUGACCAUCGACGUUUUAGAGCUAGAAAUAGCAAGUUAAAAUAAGGCUAGUCCGUUAUCAA | 25135 |
| | ScaCas9++_ | CUUGAAAAAGUGGCACCGAGUCGGUGCUUUCUCGUCGAUGGUCAGCA | |
| | SpRY_ | | |
| | ED3-_5FE_ | | |
| | PB11 | | |
| 257 | A1AT_ | AGGCUGUGCUGACCAUCGACGUUUUAGAGCUAGAAAUAGCAAGUUAAAAUAAGGCUAGUCCGUUAUCAA | 25136 |
| | ScaCas9++_ | CUUGAAAAAGUGGCACCGAGUCGGUGCUUUCUCGUCGAUGGUCAGC | |
| | SpRY_ | | |
| | ED3-_5FE_ | | |
| | PB10 | | |
| 258 | A1AT_ | AGGCUGUGCUGACCAUCGACGUUUUAGAGCUAGAAAUAGCAAGUUAAAAUAAGGCUAGUCCGUUAUCAA | 25137 |
| | ScaCas9++_ | CUUGAAAAAGUGGCACCGAGUCGGUGCUUUCUCGUCGAUGGUCAG | |
| | SpRY_ | | |
| | ED3-_ | | |
| | 5FE_ | | |
| | PB9 | | |
| 259 | A1AT_ | AGGCUGUGCUGACCAUCGACGUUUUAGAGCUAGAAAUAGCAAGUUAAAAUAAGGCUAGUCCGUUAUCAA | 25138 |
| | ScaCas9++_ | CUUGAAAAAGUGGCACCGAGUCGGUGCUUUCUCGUCGAUGGUCA | |
| | SpRY_ | | |
| | ED3-_ | | |
| | 5FE_ | | |
| | PB8 | | |
| 260 | A1AT_ | AGGCUGUGCUGACCAUCGACGUUUUAGAGCUAGAAAUAGCAAGUUAAAAUAAGGCUAGUCCGUUAUCAA | 25139 |
| | ScaCas9++_ | CUUGAAAAAGUGGCACCGAGUCGGUGCUCUCGUCGAUGGUCAGCACAGCCU | |
| | SpRY_ | | |
| | ED3-_3FE_ | | |
| | PB17 | | |
| 261_ | A1AT_ | AGGCUGUGCUGACCAUCGACGUUUUAGAGCUAGAAAUAGCAAGUUAAAAUAAGGCUAGUCCGUUAUCAA | 25140 |
| 1 | ScaCas9++_ | CUUGAAAAAGUGGCACCGAGUCGGUGCUCUCGUCGAUGGUCAGCACAGCC | |
| | SpRY_ | | |
| | ED3-_3FE_ | | |
| | PB16 | | |
| 262 | A1AT_ | AGGCUGUGCUGACCAUCGACGUUUUAGAGCUAGAAAUAGCAAGUUAAAAUAAGGCUAGUCCGUUAUCAA | 25141 |
| | ScaCas9++_ | CUUGAAAAAGUGGCACCGAGUCGGUGCUCUCGUCGAUGGUCAGCACAGC | |
| | SpRY_ | | |
| | ED3-_3FE_ | | |
| | PB15 | | |
| 263 | A1AT_ | AGGCUGUGCUGACCAUCGACGUUUUAGAGCUAGAAAUAGCAAGUUAAAAUAAGGCUAGUCCGUUAUCAA | 25142 |
| | ScaCas9++_ | CUUGAAAAAGUGGCACCGAGUCGGUGCUCUCGUCGAUGGUCAGCACAG | |
| | SpRY_ | | |
| | ED3-_3FE_ | | |
| | PB14 | | |
| 264 | A1AT_ | AGGCUGUGCUGACCAUCGACGUUUUAGAGCUAGAAAUAGCAAGUUAAAAUAAGGCUAGUCCGUUAUCAA | 25143 |
| | ScaCas9++_ | CUUGAAAAAGUGGCACCGAGUCGGUGCUCUCGUCGAUGGUCAGCACA | |
| | SpRY_ | | |
| | ED3-_3FE_ | | |
| | PB13 | | |
| 265 | A1AT_ | AGGCUGUGCUGACCAUCGACGUUUUAGAGCUAGAAAUAGCAAGUUAAAAUAAGGCUAGUCCGUUAUCAA | 25144 |
| | ScaCas9++_ | CUUGAAAAAGUGGCACCGAGUCGGUGCUCUCGUCGAUGGUCAGCAC | |
| | SpRY_ | | |
| | ED3-_3FE_ | | |
| | PB12 | | |
| 266 | A1AT_ | AGGCUGUGCUGACCAUCGACGUUUUAGAGCUAGAAAUAGCAAGUUAAAAUAAGGCUAGUCCGUUAUCAA | 25145 |
| | ScaCas9++_ | CUUGAAAAAGUGGCACCGAGUCGGUGCUCUCGUCGAUGGUCAGCA | |
| | SpRY_ | | |
| | ED3-_3FE_ | | |
| | PB11 | | |
| 267 | A1AT_ | AGGCUGUGCUGACCAUCGACGUUUUAGAGCUAGAAAUAGCAAGUUAAAAUAAGGCUAGUCCGUUAUCAA | 25146 |
| | ScaCas9++_ | CUUGAAAAAGUGGCACCGAGUCGGUGCUCUCGUCGAUGGUCAGC | |
| | SpRY_ | | |
| | ED3-_3FE_ | | |
| | PB10 | | |
| 268 | A1AT_ | AGGCUGUGCUGACCAUCGACGUUUUAGAGCUAGAAAUAGCAAGUUAAAAUAAGGCUAGUCCGUUAUCAA | 25147 |
| | ScaCas9++_ | CUUGAAAAAGUGGCACCGAGUCGGUGCUCUCGUCGAUGGUCAG | |
| | SpRY_ | | |
| | ED3-_ | | |
| | 3FE_ | | |
| | PB9 | | |
| 269 | A1AT_ | AGGCUGUGCUGACCAUCGACGUUUUAGAGCUAGAAAUAGCAAGUUAAAAUAAGGCUAGUCCGUUAUCAA | 25148 |
| | ScaCas9++_ | CUUGAAAAAGUGGCACCGAGUCGGUGCUCUCGUCGAUGGUCA | |
| | SpRY_ | | |
| | ED3-_ | | |
| | 3FE_ | | |
| | PB8 | | |
| 270 | A1AT_ | AAGGCUGUGCUGACCAUCGAGUCUUUGUACUCUGGUACCAGAAGCUACAAAGAUAAGGCUUCAUGCCGAA | 25149 |
| | St1_ | AUCAACACCCUGUCAUUUUAUGGCAGGGUGUUUUACAUGGCCCCAGCAGCUUCAGUCCCUUUCUCGUCGA | |
| | ED4-_G_ | UGGUCAGCACAGCCUU | |
| | 30FE_ | | |
| | PB17 | | |
| 271 | A1AT_ | AAGGCUGUGCUGACCAUCGAGUCUUUGUACUCUGGUACCAGAAGCUACAAAGAUAAGGCUUCAUGCCGAA | 25150 |
| | St1_ | AUCAACACCCUGUCAUUUUAUGGCAGGGUGUUUUACAUGGCCCCAGCAGCUUCAGUCCCUUUCUCGUCGA | |
| | ED4-_G_ | UGGUCAGCACAGCCU | |
| | 30FE_ | | |
| | PB16 | | |
| 272 | A1AT_ | AAGGCUGUGCUGACCAUCGAGUCUUUGUACUCUGGUACCAGAAGCUACAAAGAUAAGGCUUCAUGCCGAA | 25151 |
| | St1_ | AUCAACACCCUGUCAUUUUAUGGCAGGGUGUUUUACAUGGCCCCAGCAGCUUCAGUCCCUUUCUCGUCGA | |
| | ED4-_G_ | UGGUCAGCACAGCC | |
| | 30FE_ | | |
| | PB15 | | |
| 273 | A1AT_ | AAGGCUGUGCUGACCAUCGAGUCUUUGUACUCUGGUACCAGAAGCUACAAAGAUAAGGCUUCAUGCCGAA | 25152 |
| | St1_ | AUCAACACCCUGUCAUUUUAUGGCAGGGUGUUUUACAUGGCCCCAGCAGCUUCAGUCCCUUUCUCGUCGA | |
| | ED4-_G_ | UGGUCAGCACAGC | |
| | 30FE_ | | |
| | PB14 | | |
| 274 | A1AT_ | AAGGCUGUGCUGACCAUCGAGUCUUUGUACUCUGGUACCAGAAGCUACAAAGAUAAGGCUUCAUGCCGAA | 25153 |
| | St1_ | AUCAACACCCUGUCAUUUUAUGGCAGGGUGUUUUACAUGGCCCCAGCAGCUUCAGUCCCUUUCUCGUCGA | |
| | ED4-_G_ | UGGUCAGCACAG | |
| | 30FE_ | | |
| | PB13 | | |
| 275 | A1AT_ | AAGGCUGUGCUGACCAUCGAGUCUUUGUACUCUGGUACCAGAAGCUACAAAGAUAAGGCUUCAUGCCGAA | 25154 |
| | St1_ | AUCAACACCCUGUCAUUUUAUGGCAGGGUGUUUUACAUGGCCCCAGCAGCUUCAGUCCCUUUCUCGUCGA | |
| | ED4-_G_ | UGGUCAGCACA | |
| | 30FE_ | | |
| | PB12 | | |
| 276 | A1AT_ | AAGGCUGUGCUGACCAUCGAGUCUUUGUACUCUGGUACCAGAAGCUACAAAGAUAAGGCUUCAUGCCGAA | 25155 |
| | St1_ | AUCAACACCCUGUCAUUUUAUGGCAGGGUGUUUUACAUGGCCCCAGCAGCUUCAGUCCCUUUCUCGUCGA | |
| | ED4-_G_ | UGGUCAGCAC | |
| | 30FE_ | | |
| | PB11 | | |
| 277 | A1AT_ | AAGGCUGUGCUGACCAUCGAGUCUUUGUACUCUGGUACCAGAAGCUACAAAGAUAAGGCUUCAUGCCGAA | 25156 |
| | St1_ | AUCAACACCCUGUCAUUUUAUGGCAGGGUGUUUUACAUGGCCCCAGCAGCUUCAGUCCCUUUCUCGUCGA | |
| | ED4-_G_ | UGGUCAGCA | |
| | 30FE_ | | |
| | PB10 | | |
| 278 | A1AT_ | AAGGCUGUGCUGACCAUCGAGUCUUUGUACUCUGGUACCAGAAGCUACAAAGAUAAGGCUUCAUGCCGAA | 25157 |
| | St1_ | AUCAACACCCUGUCAUUUUAUGGCAGGGUGUUUUACAUGGCCCCAGCAGCUUCAGUCCCUUUCUCGUCGA | |
| | ED4-_G_ | UGGUCAGC | |
| | 30FE_ | | |
| | PB9 | | |
| 279 | A1AT_ | AAGGCUGUGCUGACCAUCGAGUCUUUGUACUCUGGUACCAGAAGCUACAAAGAUAAGGCUUCAUGCCGAA | 25158 |
| | St1_ | AUCAACACCCUGUCAUUUUAUGGCAGGGUGUUUUACAUGGCCCCAGCAGCUUCAGUCCCUUUCUCGUCGA | |
| | ED4-_G_ | UGGUCAG | |
| | 30FE_ | | |
| | PB8 | | |
| 280 | A1AT_ | AAGGCUGUGCUGACCAUCGAGUCUUUGUACUCUGGUACCAGAAGCUACAAAGAUAAGGCUUCAUGCCGAA | 25159 |
| | St1_ | AUCAACACCCUGUCAUUUUAUGGCAGGGUGUUUUGCCCCAGCAGCUUCAGUCCCUUUCUCGUCGAUGGUC | |
| | ED4-_G_ | AGCACAGCCUU | |
| | 25FE_ | | |
| | PB17 | | |
| 281 | A1AT_ | AAGGCUGUGCUGACCAUCGAGUCUUUGUACUCUGGUACCAGAAGCUACAAAGAUAAGGCUUCAUGCCGAA | 25160 |
| | St1_ | AUCAACACCCUGUCAUUUUAUGGCAGGGUGUUUUGCCCCAGCAGCUUCAGUCCCUUUCUCGUCGAUGGUC | |
| | ED4-_G_ | AGCACAGCCU | |
| | 25FE_ | | |
| | PB16 | | |
| 282 | A1AT_ | AAGGCUGUGCUGACCAUCGAGUCUUUGUACUCUGGUACCAGAAGCUACAAAGAUAAGGCUUCAUGCCGAA | 25161 |
| | St1_ | AUCAACACCCUGUCAUUUUAUGGCAGGGUGUUUUGCCCCAGCAGCUUCAGUCCCUUUCUCGUCGAUGGUC | |
| | ED4-_G_ | AGCACAGCC | |
| | 25FE_ | | |
| | PB15 | | |
| 283 | A1AT_ | AAGGCUGUGCUGACCAUCGAGUCUUUGUACUCUGGUACCAGAAGCUACAAAGAUAAGGCUUCAUGCCGAA | 25162 |
| | St1_ | AUCAACACCCUGUCAUUUUAUGGCAGGGUGUUUUGCCCCAGCAGCUUCAGUCCCUUUCUCGUCGAUGGUC | |
| | ED4-_G_ | AGCACAGC | |
| | 25FE_ | | |
| | PB14 | | |
| 284 | A1AT_ | AAGGCUGUGCUGACCAUCGAGUCUUUGUACUCUGGUACCAGAAGCUACAAAGAUAAGGCUUCAUGCCGAA | 25163 |
| | St1_ | AUCAACACCCUGUCAUUUUAUGGCAGGGUGUUUUGCCCCAGCAGCUUCAGUCCCUUUCUCGUCGAUGGUC | |
| | ED4-_G_ | AGCACAG | |
| | 25FE_ | | |
| | PB13 | | |
| 285 | A1AT_ | AAGGCUGUGCUGACCAUCGAGUCUUUGUACUCUGGUACCAGAAGCUACAAAGAUAAGGCUUCAUGCCGAA | 25164 |
| | St1_ | AUCAACACCCUGUCAUUUUAUGGCAGGGUGUUUUGCCCCAGCAGCUUCAGUCCCUUUCUCGUCGAUGGUC | |
| | ED4-_G_ | AGCACA | |
| | 25FE_ | | |
| | PB12 | | |
| 286 | A1AT_ | AAGGCUGUGCUGACCAUCGAGUCUUUGUACUCUGGUACCAGAAGCUACAAAGAUAAGGCUUCAUGCCGAA | 25165 |
| | St1_ | AUCAACACCCUGUCAUUUUAUGGCAGGGUGUUUUGCCCCAGCAGCUUCAGUCCCUUUCUCGUCGAUGGUC | |
| | ED4-_G_ | AGCAC | |
| | 25FE_ | | |
| | PB11 | | |
| 287 | A1AT_ | AAGGCUGUGCUGACCAUCGAGUCUUUGUACUCUGGUACCAGAAGCUACAAAGAUAAGGCUUCAUGCCGAA | 25166 |
| | St1_ | AUCAACACCCUGUCAUUUUAUGGCAGGGUGUUUUGCCCCAGCAGCUUCAGUCCCUUUCUCGUCGAUGGUC | |
| | ED4-_G_ | AGCA | |
| | 25FE_ | | |
| | PB10 | | |
| 288 | A1AT_ | AAGGCUGUGCUGACCAUCGAGUCUUUGUACUCUGGUACCAGAAGCUACAAAGAUAAGGCUUCAUGCCGAA | 25167 |
| | St1_ | AUCAACACCCUGUCAUUUUAUGGCAGGGUGUUUUGCCCCAGCAGCUUCAGUCCCUUUCUCGUCGAUGGUC | |
| | ED4-_G_ | AGC | |
| | 25FE_ | | |
| | PB9 | | |
| 289 | A1AT_ | AAGGCUGUGCUGACCAUCGAGUCUUUGUACUCUGGUACCAGAAGCUACAAAGAUAAGGCUUCAUGCCGAA | 25168 |
| | St1_ | AUCAACACCCUGUCAUUUUAUGGCAGGGUGUUUUGCCCCAGCAGCUUCAGUCCCUUUCUCGUCGAUGGUC | |
| | ED4-_G_ | AG | |
| | 25FE_ | | |
| | PB8 | | |
| 290 | A1AT_ | AAGGCUGUGCUGACCAUCGAGUCUUUGUACUCUGGUACCAGAAGCUACAAAGAUAAGGCUUCAUGCCGAA | 25169 |
| | St1_ | AUCAACACCCUGUCAUUUUAUGGCAGGGUGUUUUAGCAGCUUCAGUCCCUUUCUCGUCGAUGGUCAGCAC | |
| | ED4-_G_ | AGCCUU | |
| | 20FE_ | | |
| | PB17 | | |
| 291 | A1AT_ | AAGGCUGUGCUGACCAUCGAGUCUUUGUACUCUGGUACCAGAAGCUACAAAGAUAAGGCUUCAUGCCGAA | 25170 |
| | St1_ | AUCAACACCCUGUCAUUUUAUGGCAGGGUGUUUUAGCAGCUUCAGUCCCUUUCUCGUCGAUGGUCAGCAC | |
| | ED4-_G_ | AGCCU | |
| | 20FE_ | | |
| | PB16 | | |
| 292 | A1AT_ | AAGGCUGUGCUGACCAUCGAGUCUUUGUACUCUGGUACCAGAAGCUACAAAGAUAAGGCUUCAUGCCGAA | 25171 |
| | St1_ | AUCAACACCCUGUCAUUUUAUGGCAGGGUGUUUUAGCAGCUUCAGUCCCUUUCUCGUCGAUGGUCAGCAC | |
| | ED4-_G_ | AGCC | |
| | 20FE_ | | |
| | PB15 | | |
| 293 | A1AT_ | AAGGCUGUGCUGACCAUCGAGUCUUUGUACUCUGGUACCAGAAGCUACAAAGAUAAGGCUUCAUGCCGAA | 25172 |
| | St1_ | AUCAACACCCUGUCAUUUUAUGGCAGGGUGUUUUAGCAGCUUCAGUCCCUUUCUCGUCGAUGGUCAGCAC | |
| | ED4-_G_ | AGC | |
| | 20FE_ | | |
| | PB14 | | |
| 294 | A1AT_ | AAGGCUGUGCUGACCAUCGAGUCUUUGUACUCUGGUACCAGAAGCUACAAAGAUAAGGCUUCAUGCCGAA | 25173 |
| | St1_ | AUCAACACCCUGUCAUUUUAUGGCAGGGUGUUUUAGCAGCUUCAGUCCCUUUCUCGUCGAUGGUCAGCAC | |
| | ED4-_G_ | AG | |
| | 20FE_ | | |
| | PB13 | | |
| 295 | A1AT_ | AAGGCUGUGCUGACCAUCGAGUCUUUGUACUCUGGUACCAGAAGCUACAAAGAUAAGGCUUCAUGCCGAA | 25174 |
| | St1_ | AUCAACACCCUGUCAUUUUAUGGCAGGGUGUUUUAGCAGCUUCAGUCCCUUUCUCGUCGAUGGUCAGCAC | |
| | ED4-_G_ | A | |
| | 20FE_ | | |
| | PB12 | | |
| 296 | A1AT_ | AAGGCUGUGCUGACCAUCGAGUCUUUGUACUCUGGUACCAGAAGCUACAAAGAUAAGGCUUCAUGCCGAA | 25175 |
| | St1_ | AUCAACACCCUGUCAUUUUAUGGCAGGGUGUUUUAGCAGCUUCAGUCCCUUUCUCGUCGAUGGUCAGCAC | |
| | ED4-_G_ | | |
| | 20FE_ | | |
| | PB11 | | |
| 297 | A1AT_ | AAGGCUGUGCUGACCAUCGAGUCUUUGUACUCUGGUACCAGAAGCUACAAAGAUAAGGCUUCAUGCCGAA | 25176 |
| | St1_ | AUCAACACCCUGUCAUUUUAUGGCAGGGUGUUUUAGCAGCUUCAGUCCCUUUCUCGUCGAUGGUCAGCA | |
| | ED4-_G_ | | |
| | 20FE_ | | |
| | PB10 | | |
| 298 | A1AT_ | AAGGCUGUGCUGACCAUCGAGUCUUUGUACUCUGGUACCAGAAGCUACAAAGAUAAGGCUUCAUGCCGAA | 25177 |
| | St1_ | AUCAACACCCUGUCAUUUUAUGGCAGGGUGUUUUAGCAGCUUCAGUCCCUUUCUCGUCGAUGGUCAGC | |
| | ED4-_G_ | | |
| | 20FE_ | | |
| | PB9 | | |
| 299 | A1AT_ | AAGGCUGUGCUGACCAUCGAGUCUUUGUACUCUGGUACCAGAAGCUACAAAGAUAAGGCUUCAUGCCGAA | 25178 |
| | St1_ | AUCAACACCCUGUCAUUUUAUGGCAGGGUGUUUUAGCAGCUUCAGUCCCUUUCUCGUCGAUGGUCAG | |
| | ED4-_G_ | | |
| | 20FE_ | | |
| | PB8 | | |
| 300 | A1AT_ | AAGGCUGUGCUGACCAUCGAGUCUUUGUACUCUGGUACCAGAAGCUACAAAGAUAAGGCUUCAUGCCGAA | 25179 |
| | St1_ | AUCAACACCCUGUCAUUUUAUGGCAGGGUGUUUUUUCAGUCCCUUUCUCGUCGAUGGUCAGCACAGCCUU | |
| | ED4-_G_ | | |
| | 14FE_ | | |
| | PB17 | | |
| 301 | A1AT_ | AAGGCUGUGCUGACCAUCGAGUCUUUGUACUCUGGUACCAGAAGCUACAAAGAUAAGGCUUCAUGCCGAA | 25180 |
| | St1_ | AUCAACACCCUGUCAUUUUAUGGCAGGGUGUUUUUUCAGUCCCUUUCUCGUCGAUGGUCAGCACAGCCU | |
| | ED4-_G_ | | |
| | 14FE_ | | |
| | PB16 | | |
| 302 | A1AT_ | AAGGCUGUGCUGACCAUCGAGUCUUUGUACUCUGGUACCAGAAGCUACAAAGAUAAGGCUUCAUGCCGAA | 25181 |
| | St1_ | AUCAACACCCUGUCAUUUUAUGGCAGGGUGUUUUUUCAGUCCCUUUCUCGUCGAUGGUCAGCACAGCC | |
| | ED4-_G_ | | |
| | 14FE_ | | |
| | PB15 | | |
| 303 | A1AT_ | AAGGCUGUGCUGACCAUCGAGUCUUUGUACUCUGGUACCAGAAGCUACAAAGAUAAGGCUUCAUGCCGAA | 25182 |
| | St1_ | AUCAACACCCUGUCAUUUUAUGGCAGGGUGUUUUUUCAGUCCCUUUCUCGUCGAUGGUCAGCACAGC | |
| | ED4-_G_ | | |
| | 14FE_ | | |
| | PB14 | | |
| 304 | A1AT_ | AAGGCUGUGCUGACCAUCGAGUCUUUGUACUCUGGUACCAGAAGCUACAAAGAUAAGGCUUCAUGCCGAA | 25183 |
| | St1_ | AUCAACACCCUGUCAUUUUAUGGCAGGGUGUUUUUUCAGUCCCUUUCUCGUCGAUGGUCAGCACAG | |
| | ED4-_G_ | | |
| | 14FE_ | | |
| | PB13 | | |
| 305 | A1AT_ | AAGGCUGUGCUGACCAUCGAGUCUUUGUACUCUGGUACCAGAAGCUACAAAGAUAAGGCUUCAUGCCGAA | 25184 |
| | St1_ | AUCAACACCCUGUCAUUUUAUGGCAGGGUGUUUUUUCAGUCCCUUUCUCGUCGAUGGUCAGCACA | |
| | ED4-_G_ | | |
| | 14FE_ | | |
| | PB12 | | |
| 306 | A1AT_ | AAGGCUGUGCUGACCAUCGAGUCUUUGUACUCUGGUACCAGAAGCUACAAAGAUAAGGCUUCAUGCCGAA | 25185 |
| | St1_ | AUCAACACCCUGUCAUUUUAUGGCAGGGUGUUUUUUCAGUCCCUUUCUCGUCGAUGGUCAGCAC | |
| | ED4-_G_ | | |
| | 14FE_ | | |
| | PB11 | | |
| 307 | A1AT_ | AAGGCUGUGCUGACCAUCGAGUCUUUGUACUCUGGUACCAGAAGCUACAAAGAUAAGGCUUCAUGCCGAA | 25186 |
| | St1_ | AUCAACACCCUGUCAUUUUAUGGCAGGGUGUUUUUUCAGUCCCUUUCUCGUCGAUGGUCAGCA | |
| | ED4-_G_ | | |
| | 14FE_ | | |
| | PB10 | | |
| 308 | A1AT_ | AAGGCUGUGCUGACCAUCGAGUCUUUGUACUCUGGUACCAGAAGCUACAAAGAUAAGGCUUCAUGCCGAA | 25187 |
| | St1_ | AUCAACACCCUGUCAUUUUAUGGCAGGGUGUUUUUUCAGUCCCUUUCUCGUCGAUGGUCAGC | |
| | ED4-_G_ | | |
| | 14FE_ | | |
| | PB9 | | |
| 309 | A1AT_ | AAGGCUGUGCUGACCAUCGAGUCUUUGUACUCUGGUACCAGAAGCUACAAAGAUAAGGCUUCAUGCCGAA | 25188 |
| | St1_ | AUCAACACCCUGUCAUUUUAUGGCAGGGUGUUUUUUCAGUCCCUUUCUCGUCGAUGGUCAG | |
| | ED4-_G_ | | |
| | 14FE_ | | |
| | PB8 | | |
| 310 | A1AT_ | AAGGCUGUGCUGACCAUCGAGUCUUUGUACUCUGGUACCAGAAGCUACAAAGAUAAGGCUUCAUGCCGAA | 25189 |
| | St1_ | AUCAACACCCUGUCAUUUUAUGGCAGGGUGUUUUAGUCCCUUUCUCGUCGAUGGUCAGCACAGCCUU | |
| | ED4-_G_ | | |
| | 11FE_ | | |
| | PB17 | | |
| 311 | A1AT_ | AAGGCUGUGCUGACCAUCGAGUCUUUGUACUCUGGUACCAGAAGCUACAAAGAUAAGGCUUCAUGCCGAA | 25190 |
| | St1_ | AUCAACACCCUGUCAUUUUAUGGCAGGGUGUUUUAGUCCCUUUCUCGUCGAUGGUCAGCACAGCCU | |
| | ED4-_G_ | | |
| | 11FE_ | | |
| | PB16 | | |
| 312 | A1AT_ | AAGGCUGUGCUGACCAUCGAGUCUUUGUACUCUGGUACCAGAAGCUACAAAGAUAAGGCUUCAUGCCGAA | 25191 |
| | St1_ | AUCAACACCCUGUCAUUUUAUGGCAGGGUGUUUUAGUCCCUUUCUCGUCGAUGGUCAGCACAGCC | |
| | ED4-_G_ | | |
| | 11FE_ | | |
| | PB15 | | |
| 313 | A1AT_ | AAGGCUGUGCUGACCAUCGAGUCUUUGUACUCUGGUACCAGAAGCUACAAAGAUAAGGCUUCAUGCCGAA | 25192 |
| | St1_ | AUCAACACCCUGUCAUUUUAUGGCAGGGUGUUUUAGUCCCUUUCUCGUCGAUGGUCAGCACAGC | |
| | ED4-_G_ | | |
| | 11FE_ | | |
| | PB14 | | |
| 314 | A1AT_ | AAGGCUGUGCUGACCAUCGAGUCUUUGUACUCUGGUACCAGAAGCUACAAAGAUAAGGCUUCAUGCCGAA | 25193 |
| | St1_ | AUCAACACCCUGUCAUUUUAUGGCAGGGUGUUUUAGUCCCUUUCUCGUCGAUGGUCAGCACAG | |
| | ED4-_G_ | | |
| | 11FE_ | | |
| | PB13 | | |
| 315 | A1AT_ | AAGGCUGUGCUGACCAUCGAGUCUUUGUACUCUGGUACCAGAAGCUACAAAGAUAAGGCUUCAUGCCGAA | 25194 |
| | St1_ | AUCAACACCCUGUCAUUUUAUGGCAGGGUGUUUUAGUCCCUUUCUCGUCGAUGGUCAGCACA | |
| | ED4-_G_ | | |
| | 11FE_ | | |
| | PB12 | | |
| 316 | A1AT_ | AAGGCUGUGCUGACCAUCGAGUCUUUGUACUCUGGUACCAGAAGCUACAAAGAUAAGGCUUCAUGCCGAA | 25195 |
| | St1_ | AUCAACACCCUGUCAUUUUAUGGCAGGGUGUUUUAGUCCCUUUCUCGUCGAUGGUCAGCAC | |
| | ED4-_G_ | | |
| | 11FE_ | | |
| | PB11 | | |
| 317 | A1AT_ | AAGGCUGUGCUGACCAUCGAGUCUUUGUACUCUGGUACCAGAAGCUACAAAGAUAAGGCUUCAUGCCGAA | 25196 |
| | St1_ | AUCAACACCCUGUCAUUUUAUGGCAGGGUGUUUUAGUCCCUUUCUCGUCGAUGGUCAGCA | |
| | ED4-_G_ | | |
| | 11FE_ | | |
| | PB10 | | |
| 318 | A1AT_ | AAGGCUGUGCUGACCAUCGAGUCUUUGUACUCUGGUACCAGAAGCUACAAAGAUAAGGCUUCAUGCCGAA | 25197 |
| | St1_ | AUCAACACCCUGUCAUUUUAUGGCAGGGUGUUUUAGUCCCUUUCUCGUCGAUGGUCAGC | |
| | ED4-_G_ | | |
| | 11FE_ | | |
| | PB9 | | |
| 319 | A1AT_ | AAGGCUGUGCUGACCAUCGAGUCUUUGUACUCUGGUACCAGAAGCUACAAAGAUAAGGCUUCAUGCCGAA | 25198 |
| | St1_ | AUCAACACCCUGUCAUUUUAUGGCAGGGUGUUUUAGUCCCUUUCUCGUCGAUGGUCAG | |
| | ED4-_G_ | | |
| | 11FE_ | | |
| | PB8 | | |
| 320 | A1AT_ | AAGGCUGUGCUGACCAUCGAGUCUUUGUACUCUGGUACCAGAAGCUACAAAGAUAAGGCUUCAUGCCGAA | 25199 |
| | St1_ | AUCAACACCCUGUCAUUUUAUGGCAGGGUGUUUUUCCCUUUCUCGUCGAUGGUCAGCACAGCCUU | |
| | ED4-_G_ | | |
| | 9FE_ | | |
| | PB17 | | |
| 321 | A1AT_ | AAGGCUGUGCUGACCAUCGAGUCUUUGUACUCUGGUACCAGAAGCUACAAAGAUAAGGCUUCAUGCCGAA | 25200 |
| | St1_ | AUCAACACCCUGUCAUUUUAUGGCAGGGUGUUUUUCCCUUUCUCGUCGAUGGUCAGCACAGCCU | |
| | ED4-_G_ | | |
| | 9FE_ | | |
| | PB16 | | |
| 322 | A1AT_ | AAGGCUGUGCUGACCAUCGAGUCUUUGUACUCUGGUACCAGAAGCUACAAAGAUAAGGCUUCAUGCCGAA | 25201 |
| | St1_ | AUCAACACCCUGUCAUUUUAUGGCAGGGUGUUUUUCCCUUUCUCGUCGAUGGUCAGCACAGCC | |
| | ED4-_G_ | | |
| | 9FE_ | | |
| | PB15 | | |
| 323 | A1AT_ | AAGGCUGUGCUGACCAUCGAGUCUUUGUACUCUGGUACCAGAAGCUACAAAGAUAAGGCUUCAUGCCGAA | 25202 |
| | St1_ | AUCAACACCCUGUCAUUUUAUGGCAGGGUGUUUUUCCCUUUCUCGUCGAUGGUCAGCACAGC | |
| | ED4-_G_ | | |
| | 9FE_ | | |
| | PB14 | | |
| 324 | A1AT_ | AAGGCUGUGCUGACCAUCGAGUCUUUGUACUCUGGUACCAGAAGCUACAAAGAUAAGGCUUCAUGCCGAA | 25203 |
| | St1_ | AUCAACACCCUGUCAUUUUAUGGCAGGGUGUUUUUCCCUUUCUCGUCGAUGGUCAGCACAG | |
| | ED4-_G_ | | |
| | 9FE_ | | |
| | PB13 | | |
| 325 | A1AT_ | AAGGCUGUGCUGACCAUCGAGUCUUUGUACUCUGGUACCAGAAGCUACAAAGAUAAGGCUUCAUGCCGAA | 25204 |
| | St1_ | AUCAACACCCUGUCAUUUUAUGGCAGGGUGUUUUUCCCUUUCUCGUCGAUGGUCAGCACA | |
| | ED4-_G_ | | |
| | 9FE_ | | |
| | PB12 | | |
| 326 | A1AT_ | AAGGCUGUGCUGACCAUCGAGUCUUUGUACUCUGGUACCAGAAGCUACAAAGAUAAGGCUUCAUGCCGAA | 25205 |
| | St1_ | AUCAACACCCUGUCAUUUUAUGGCAGGGUGUUUUUCCCUUUCUCGUCGAUGGUCAGCAC | |
| | ED4-_G_ | | |
| | 9FE_ | | |
| | PB11 | | |
| 327 | A1AT_ | AAGGCUGUGCUGACCAUCGAGUCUUUGUACUCUGGUACCAGAAGCUACAAAGAUAAGGCUUCAUGCCGAA | 25206 |
| | St1_ | AUCAACACCCUGUCAUUUUAUGGCAGGGUGUUUUUCCCUUUCUCGUCGAUGGUCAGCA | |
| | ED4-_G_ | | |
| | 9FE_ | | |
| | PB10 | | |
| 328 | A1AT_ | AAGGCUGUGCUGACCAUCGAGUCUUUGUACUCUGGUACCAGAAGCUACAAAGAUAAGGCUUCAUGCCGAA | 25207 |
| | St1_ | AUCAACACCCUGUCAUUUUAUGGCAGGGUGUUUUUCCCUUUCUCGUCGAUGGUCAGC | |
| | ED4-_G_ | | |
| | 9FE_ | | |
| | PB9 | | |
| 329 | A1AT_ | AAGGCUGUGCUGACCAUCGAGUCUUUGUACUCUGGUACCAGAAGCUACAAAGAUAAGGCUUCAUGCCGAA | 25208 |
| | St1_ | AUCAACACCCUGUCAUUUUAUGGCAGGGUGUUUUUCCCUUUCUCGUCGAUGGUCAG | |
| | ED4-_G_ | | |
| | 9FE_ | | |
| | PB8 | | |
| 330 | A1AT_ | AAGGCUGUGCUGACCAUCGAGUCUUUGUACUCUGGUACCAGAAGCUACAAAGAUAAGGCUUCAUGCCGAA | 25209 |
| | St1_ | AUCAACACCCUGUCAUUUUAUGGCAGGGUGUUUUCCUUUCUCGUCGAUGGUCAGCACAGCCUU | |
| | ED4-_G_ | | |
| | 7FE_ | | |
| | PB17 | | |
| 331 | A1AT_ | AAGGCUGUGCUGACCAUCGAGUCUUUGUACUCUGGUACCAGAAGCUACAAAGAUAAGGCUUCAUGCCGAA | 25210 |
| | St1_ | AUCAACACCCUGUCAUUUUAUGGCAGGGUGUUUUCCUUUCUCGUCGAUGGUCAGCACAGCCU | |
| | ED4-_G_ | | |
| | 7FE_ | | |
| | PB16 | | |
| 332 | A1AT_ | AAGGCUGUGCUGACCAUCGAGUCUUUGUACUCUGGUACCAGAAGCUACAAAGAUAAGGCUUCAUGCCGAA | 25211 |
| | St1_ | AUCAACACCCUGUCAUUUUAUGGCAGGGUGUUUUCCUUUCUCGUCGAUGGUCAGCACAGCC | |
| | ED4-_G_ | | |
| | 7FE_ | | |
| | PB15 | | |
| 333 | A1AT_ | AAGGCUGUGCUGACCAUCGAGUCUUUGUACUCUGGUACCAGAAGCUACAAAGAUAAGGCUUCAUGCCGAA | 25212 |
| | St1_ | AUCAACACCCUGUCAUUUUAUGGCAGGGUGUUUUCCUUUCUCGUCGAUGGUCAGCACAGC | |
| | ED4-_G_ | | |
| | 7FE_ | | |
| | PB14 | | |
| 334 | A1AT_ | AAGGCUGUGCUGACCAUCGAGUCUUUGUACUCUGGUACCAGAAGCUACAAAGAUAAGGCUUCAUGCCGAA | 25213 |
| | St1_ | AUCAACACCCUGUCAUUUUAUGGCAGGGUGUUUUCCUUUCUCGUCGAUGGUCAGCACAG | |
| | ED4-_G_ | | |
| | 7FE_ | | |
| | PB13 | | |
| 335 | A1AT_ | AAGGCUGUGCUGACCAUCGAGUCUUUGUACUCUGGUACCAGAAGCUACAAAGAUAAGGCUUCAUGCCGAA | 25214 |
| | St1_ | AUCAACACCCUGUCAUUUUAUGGCAGGGUGUUUUCCUUUCUCGUCGAUGGUCAGCACA | |
| | ED4-_G_ | | |
| | 7FE_ | | |
| | PB12 | | |
| 336 | A1AT_ | AAGGCUGUGCUGACCAUCGAGUCUUUGUACUCUGGUACCAGAAGCUACAAAGAUAAGGCUUCAUGCCGAA | 25215 |
| | St1_ | AUCAACACCCUGUCAUUUUAUGGCAGGGUGUUUUCCUUUCUCGUCGAUGGUCAGCAC | |
| | ED4-_G_ | | |
| | 7FE_ | | |
| | PB11 | | |
| 337 | A1AT_ | AAGGCUGUGCUGACCAUCGAGUCUUUGUACUCUGGUACCAGAAGCUACAAAGAUAAGGCUUCAUGCCGAA | 25216 |
| | St1_ | AUCAACACCCUGUCAUUUUAUGGCAGGGUGUUUUCCUUUCUCGUCGAUGGUCAGCA | |
| | ED4-_G_ | | |
| | 7FE_ | | |
| | PB10 | | |
| 338 | A1AT_ | AAGGCUGUGCUGACCAUCGAGUCUUUGUACUCUGGUACCAGAAGCUACAAAGAUAAGGCUUCAUGCCGAA | 25217 |
| | St1_ | AUCAACACCCUGUCAUUUUAUGGCAGGGUGUUUUCCUUUCUCGUCGAUGGUCAGC | |
| | ED4-_G_ | | |
| | 7FE_ | | |
| | PB9 | | |
| 339 | A1AT_ | AAGGCUGUGCUGACCAUCGAGUCUUUGUACUCUGGUACCAGAAGCUACAAAGAUAAGGCUUCAUGCCGAA | 25218 |
| | St1_ | AUCAACACCCUGUCAUUUUAUGGCAGGGUGUUUUCCUUUCUCGUCGAUGGUCAG | |
| | ED4-_G_ | | |
| | 7FE_ | | |
| | PB8 | | |
| 340 | A1AT_ | AAGGCUGUGCUGACCAUCGAGUCUUUGUACUCUGGUACCAGAAGCUACAAAGAUAAGGCUUCAUGCCGAA | 25219 |
| | St1_ | AUCAACACCCUGUCAUUUUAUGGCAGGGUGUUUUUUUCUCGUCGAUGGUCAGCACAGCCUU | |
| | ED4-_G_ | | |
| | 5FE_ | | |
| | PB17 | | |
| 341 | A1AT_ | AAGGCUGUGCUGACCAUCGAGUCUUUGUACUCUGGUACCAGAAGCUACAAAGAUAAGGCUUCAUGCCGAA | 25220 |
| | St1_ | AUCAACACCCUGUCAUUUUAUGGCAGGGUGUUUUUUUCUCGUCGAUGGUCAGCACAGCCU | |
| | ED4-_G_ | | |
| | 5FE_ | | |
| | PB16 | | |
| 342 | A1AT_ | AAGGCUGUGCUGACCAUCGAGUCUUUGUACUCUGGUACCAGAAGCUACAAAGAUAAGGCUUCAUGCCGAA | 25221 |
| | St1_ | AUCAACACCCUGUCAUUUUAUGGCAGGGUGUUUUUUUCUCGUCGAUGGUCAGCACAGCC | |
| | ED4-_G_ | | |
| | 5FE_ | | |
| | PB15 | | |
| 343 | A1AT_ | AAGGCUGUGCUGACCAUCGAGUCUUUGUACUCUGGUACCAGAAGCUACAAAGAUAAGGCUUCAUGCCGAA | 25222 |
| | St1_ | AUCAACACCCUGUCAUUUUAUGGCAGGGUGUUUUUUUCUCGUCGAUGGUCAGCACAGC | |
| | ED4-_G_ | | |
| | 5FE_ | | |
| | PB14 | | |
| 344 | A1AT_ | AAGGCUGUGCUGACCAUCGAGUCUUUGUACUCUGGUACCAGAAGCUACAAAGAUAAGGCUUCAUGCCGAA | 25223 |
| | St1_ | AUCAACACCCUGUCAUUUUAUGGCAGGGUGUUUUUUUCUCGUCGAUGGUCAGCACAG | |
| | ED4-_G_ | | |
| | 5FE_ | | |
| | PB13 | | |
| 345 | A1AT_ | AAGGCUGUGCUGACCAUCGAGUCUUUGUACUCUGGUACCAGAAGCUACAAAGAUAAGGCUUCAUGCCGAA | 25224 |
| | St1_ | AUCAACACCCUGUCAUUUUAUGGCAGGGUGUUUUUUUCUCGUCGAUGGUCAGCACA | |
| | ED4-_G_ | | |
| | 5FE_ | | |
| | PB12 | | |
| 346 | A1AT_ | AAGGCUGUGCUGACCAUCGAGUCUUUGUACUCUGGUACCAGAAGCUACAAAGAUAAGGCUUCAUGCCGAA | 25225 |
| | St1_ | AUCAACACCCUGUCAUUUUAUGGCAGGGUGUUUUUUUCUCGUCGAUGGUCAGCAC | |
| | ED4-_G_ | | |
| | 5FE_ | | |
| | PB11 | | |
| 347 | A1AT_ | AAGGCUGUGCUGACCAUCGAGUCUUUGUACUCUGGUACCAGAAGCUACAAAGAUAAGGCUUCAUGCCGAA | 25226 |
| | St1_ | AUCAACACCCUGUCAUUUUAUGGCAGGGUGUUUUUUUCUCGUCGAUGGUCAGCA | |
| | ED4-_G_ | | |
| | 5FE_ | | |
| | PB10 | | |
| 348 | A1AT_ | AAGGCUGUGCUGACCAUCGAGUCUUUGUACUCUGGUACCAGAAGCUACAAAGAUAAGGCUUCAUGCCGAA | 25227 |
| | St1_ | AUCAACACCCUGUCAUUUUAUGGCAGGGUGUUUUUUUCUCGUCGAUGGUCAGC | |
| | ED4-_G_ | | |
| | 5FE_ | | |
| | PB9 | | |
| 349 | A1AT_ | AAGGCUGUGCUGACCAUCGAGUCUUUGUACUCUGGUACCAGAAGCUACAAAGAUAAGGCUUCAUGCCGAA | 25228 |
| | St1_ | AUCAACACCCUGUCAUUUUAUGGCAGGGUGUUUUUUUCUCGUCGAUGGUCAG | |
| | ED4-_G_ | | |
| | 5FE_ | | |
| | PB8 | | |
| 350 | A1AT_ | AAGGCUGUGCUGACCAUCGAGUCUUUGUACUCUGGUACCAGAAGCUACAAAGAUAAGGCUUCAUGCCGAA | 25229 |
| | St1_ | AUCAACACCCUGUCAUUUUAUGGCAGGGUGUUUUUCUCGUCGAUGGUCAGCACAGCCUU | |
| | ED4-_G_ | | |
| | 3FE_ | | |
| | PB17 | | |
| 351 | A1AT_ | AAGGCUGUGCUGACCAUCGAGUCUUUGUACUCUGGUACCAGAAGCUACAAAGAUAAGGCUUCAUGCCGAA | 25230 |
| | St1_ | AUCAACACCCUGUCAUUUUAUGGCAGGGUGUUUUUCUCGUCGAUGGUCAGCACAGCCU | |
| | ED4-_G_ | | |
| | 3FE_ | | |
| | PB16 | | |
| 352 | A1AT_ | AAGGCUGUGCUGACCAUCGAGUCUUUGUACUCUGGUACCAGAAGCUACAAAGAUAAGGCUUCAUGCCGAA | 25231 |
| | St1_ | AUCAACACCCUGUCAUUUUAUGGCAGGGUGUUUUUCUCGUCGAUGGUCAGCACAGCC | |
| | ED4-_G_ | | |
| | 3FE_ | | |
| | PB15 | | |
| 353 | A1AT_ | AAGGCUGUGCUGACCAUCGAGUCUUUGUACUCUGGUACCAGAAGCUACAAAGAUAAGGCUUCAUGCCGAA | 25232 |
| | St1_ | AUCAACACCCUGUCAUUUUAUGGCAGGGUGUUUUUCUCGUCGAUGGUCAGCACAGC | |
| | ED4-_G_ | | |
| | 3FE_ | | |
| | PB14 | | |
| 354 | A1AT_ | AAGGCUGUGCUGACCAUCGAGUCUUUGUACUCUGGUACCAGAAGCUACAAAGAUAAGGCUUCAUGCCGAA | 25233 |
| | St1_ | AUCAACACCCUGUCAUUUUAUGGCAGGGUGUUUUUCUCGUCGAUGGUCAGCACAG | |
| | ED4-_G_ | | |
| | 3FE_ | | |
| | PB13 | | |
| 355 | A1AT_ | AAGGCUGUGCUGACCAUCGAGUCUUUGUACUCUGGUACCAGAAGCUACAAAGAUAAGGCUUCAUGCCGAA | 25234 |
| | St1_ | AUCAACACCCUGUCAUUUUAUGGCAGGGUGUUUUUCUCGUCGAUGGUCAGCACA | |
| | ED4-_G_ | | |
| | 3FE_ | | |
| | PB12 | | |
| 356 | A1AT_ | AAGGCUGUGCUGACCAUCGAGUCUUUGUACUCUGGUACCAGAAGCUACAAAGAUAAGGCUUCAUGCCGAA | 25235 |
| | St1_ | AUCAACACCCUGUCAUUUUAUGGCAGGGUGUUUUUCUCGUCGAUGGUCAGCAC | |
| | ED4-_G_ | | |
| | 3FE_ | | |
| | PB11 | | |
| 357 | A1AT_ | AAGGCUGUGCUGACCAUCGAGUCUUUGUACUCUGGUACCAGAAGCUACAAAGAUAAGGCUUCAUGCCGAA | 25236 |
| | St1_ | AUCAACACCCUGUCAUUUUAUGGCAGGGUGUUUUUCUCGUCGAUGGUCAGCA | |
| | ED4-_G_ | | |
| | 3FE_ | | |
| | PB10 | | |
| 358 | A1AT_ | AAGGCUGUGCUGACCAUCGAGUCUUUGUACUCUGGUACCAGAAGCUACAAAGAUAAGGCUUCAUGCCGAA | 25237 |
| | St1_ | AUCAACACCCUGUCAUUUUAUGGCAGGGUGUUUUUCUCGUCGAUGGUCAGC | |
| | ED4-_G_ | | |
| | 3FE_ | | |
| | PB9 | | |
| 359 | A1AT_ | AAGGCUGUGCUGACCAUCGAGUCUUUGUACUCUGGUACCAGAAGCUACAAAGAUAAGGCUUCAUGCCGAA | 25238 |
| | St1_ | AUCAACACCCUGUCAUUUUAUGGCAGGGUGUUUUUCUCGUCGAUGGUCAG | |
| | ED4-_G_ | | |
| | 3FE_ | | |
| | PB8 | | |
| 360 | A1AT_ | UAAAAACAUGGCCCCAGCAGCUUGUUGUAGCUCCCGAAACGUUGCUACAAUAAGGCCGUCUGAAAAGAUG | 25239 |
| | Nme2_ED15+_ | UGCCGCAACGCUCUGCCCCUUAAAGCUUCUGCUUUAAGGGGCAUCGUUGCCGUGCAUAAGGCUGUGCUGA | |
| | G_ | CCAUCGACGAGAAAGGGACUGAAGCUGCUGGGGCCAUGUUU | |
| | 30FE_ | | |
| | PB17 | | |
| 361 | A1AT_ | UAAAAACAUGGCCCCAGCAGCUUGUUGUAGCUCCCGAAACGUUGCUACAAUAAGGCCGUCUGAAAAGAUG | 25240 |
| | Nme2_ED15+_ | UGCCGCAACGCUCUGCCCCUUAAAGCUUCUGCUUUAAGGGGCAUCGUUGCCGUGCAUAAGGCUGUGCUGA | |
| | G_ | CCAUCGACGAGAAAGGGACUGAAGCUGCUGGGGCCAUGUU | |
| | 30FE_ | | |
| | PB16 | | |
| 362 | A1AT_ | UAAAAACAUGGCCCCAGCAGCUUGUUGUAGCUCCCGAAACGUUGCUACAAUAAGGCCGUCUGAAAAGAUG | 25241 |
| | Nme2_ED15+_ | UGCCGCAACGCUCUGCCCCUUAAAGCUUCUGCUUUAAGGGGCAUCGUUGCCGUGCAUAAGGCUGUGCUGA | |
| | G_ | CCAUCGACGAGAAAGGGACUGAAGCUGCUGGGGCCAUGU | |
| | 30FE_ | | |
| | PB15 | | |
| 363 | A1AT_ | UAAAAACAUGGCCCCAGCAGCUUGUUGUAGCUCCCGAAACGUUGCUACAAUAAGGCCGUCUGAAAAGAUG | 25242 |
| | Nme2_ED15+_ | UGCCGCAACGCUCUGCCCCUUAAAGCUUCUGCUUUAAGGGGCAUCGUUGCCGUGCAUAAGGCUGUGCUGA | |
| | G_ | CCAUCGACGAGAAAGGGACUGAAGCUGCUGGGGCCAUG | |
| | 30FE_ | | |
| | PB14 | | |
| 364 | A1AT_ | UAAAAACAUGGCCCCAGCAGCUUGUUGUAGCUCCCGAAACGUUGCUACAAUAAGGCCGUCUGAAAAGAUG | 25243 |
| | Nme2_ED15+_ | UGCCGCAACGCUCUGCCCCUUAAAGCUUCUGCUUUAAGGGGCAUCGUUGCCGUGCAUAAGGCUGUGCUGA | |
| | G_ | CCAUCGACGAGAAAGGGACUGAAGCUGCUGGGGCCAU | |
| | 30FE_ | | |
| | PB13 | | |
| 365 | A1AT_ | UAAAAACAUGGCCCCAGCAGCUUGUUGUAGCUCCCGAAACGUUGCUACAAUAAGGCCGUCUGAAAAGAUG | 25244 |
| | Nme2_ED15+_ | UGCCGCAACGCUCUGCCCCUUAAAGCUUCUGCUUUAAGGGGCAUCGUUGCCGUGCAUAAGGCUGUGCUGA | |
| | G_ | CCAUCGACGAGAAAGGGACUGAAGCUGCUGGGGCCA | |
| | 30FE_ | | |
| | PB12 | | |
| 366 | A1AT_ | UAAAAACAUGGCCCCAGCAGCUUGUUGUAGCUCCCGAAACGUUGCUACAAUAAGGCCGUCUGAAAAGAUG | 25245 |
| | Nme2_ED15+_ | UGCCGCAACGCUCUGCCCCUUAAAGCUUCUGCUUUAAGGGGCAUCGUUGCCGUGCAUAAGGCUGUGCUGA | |
| | G_ | CCAUCGACGAGAAAGGGACUGAAGCUGCUGGGGCC | |
| | 30FE_ | | |
| | PB11 | | |
| 367 | A1AT_ | UAAAAACAUGGCCCCAGCAGCUUGUUGUAGCUCCCGAAACGUUGCUACAAUAAGGCCGUCUGAAAAGAUG | 25246 |
| | Nme2_ED15+_ | UGCCGCAACGCUCUGCCCCUUAAAGCUUCUGCUUUAAGGGGCAUCGUUGCCGUGCAUAAGGCUGUGCUGA | |
| | G_ | CCAUCGACGAGAAAGGGACUGAAGCUGCUGGGGC | |
| | 30FE_ | | |
| | PB10 | | |
| 368 | A1AT_ | UAAAAACAUGGCCCCAGCAGCUUGUUGUAGCUCCCGAAACGUUGCUACAAUAAGGCCGUCUGAAAAGAUG | 25247 |
| | Nme2_ED15+_ | UGCCGCAACGCUCUGCCCCUUAAAGCUUCUGCUUUAAGGGGCAUCGUUGCCGUGCAUAAGGCUGUGCUGA | |
| | G_ | CCAUCGACGAGAAAGGGACUGAAGCUGCUGGGG | |
| | 30FE_ | | |
| | PB9 | | |
| 369 | A1AT_ | UAAAAACAUGGCCCCAGCAGCUUGUUGUAGCUCCCGAAACGUUGCUACAAUAAGGCCGUCUGAAAAGAUG | 25248 |
| | Nme2_ED15+_ | UGCCGCAACGCUCUGCCCCUUAAAGCUUCUGCUUUAAGGGGCAUCGUUGCCGUGCAUAAGGCUGUGCUGA | |
| | G_ | CCAUCGACGAGAAAGGGACUGAAGCUGCUGGG | |
| | 30FE_ | | |
| | PB8 | | |
| 370 | A1AT_ | UAAAAACAUGGCCCCAGCAGCUUGUUGUAGCUCCCGAAACGUUGCUACAAUAAGGCCGUCUGAAAAGAUG | 25249 |
| | Nme2_ED15+_ | UGCCGCAACGCUCUGCCCCUUAAAGCUUCUGCUUUAAGGGGCAUCGUUGCAUAAGGCUGUGCUGACCAUC | |
| | G_ | GACGAGAAAGGGACUGAAGCUGCUGGGGCCAUGUUU | |
| | 25FE_ | | |
| | PB17 | | |
| 371 | A1AT_ | UAAAAACAUGGCCCCAGCAGCUUGUUGUAGCUCCCGAAACGUUGCUACAAUAAGGCCGUCUGAAAAGAUG | 25250 |
| | Nme2_ED15+_ | UGCCGCAACGCUCUGCCCCUUAAAGCUUCUGCUUUAAGGGGCAUCGUUGCAUAAGGCUGUGCUGACCAUC | |
| | G_ | GACGAGAAAGGGACUGAAGCUGCUGGGGCCAUGUU | |
| | 25FE_ | | |
| | PB16 | | |
| 372 | A1AT_ | UAAAAACAUGGCCCCAGCAGCUUGUUGUAGCUCCCGAAACGUUGCUACAAUAAGGCCGUCUGAAAAGAUG | 25251 |
| | Nme2_ED15+_ | UGCCGCAACGCUCUGCCCCUUAAAGCUUCUGCUUUAAGGGGCAUCGUUGCAUAAGGCUGUGCUGACCAUC | |
| | G_ | GACGAGAAAGGGACUGAAGCUGCUGGGGCCAUGU | |
| | 25FE_ | | |
| | PB15 | | |
| 373 | A1AT_ | UAAAAACAUGGCCCCAGCAGCUUGUUGUAGCUCCCGAAACGUUGCUACAAUAAGGCCGUCUGAAAAGAUG | 25252 |
| | Nme2_ED15+_ | UGCCGCAACGCUCUGCCCCUUAAAGCUUCUGCUUUAAGGGGCAUCGUUGCAUAAGGCUGUGCUGACCAUC | |
| | G_ | GACGAGAAAGGGACUGAAGCUGCUGGGGCCAUG | |
| | 25FE_ | | |
| | PB14 | | |
| 374 | A1AT_ | UAAAAACAUGGCCCCAGCAGCUUGUUGUAGCUCCCGAAACGUUGCUACAAUAAGGCCGUCUGAAAAGAUG | 25253 |
| | Nme2_ED15+_ | UGCCGCAACGCUCUGCCCCUUAAAGCUUCUGCUUUAAGGGGCAUCGUUGCAUAAGGCUGUGCUGACCAUC | |
| | G_ | GACGAGAAAGGGACUGAAGCUGCUGGGGCCAU | |
| | 25FE_ | | |
| | PB13 | | |
| 375 | A1AT_ | UAAAAACAUGGCCCCAGCAGCUUGUUGUAGCUCCCGAAACGUUGCUACAAUAAGGCCGUCUGAAAAGAUG | 25254 |
| | Nme2_ED15+_ | UGCCGCAACGCUCUGCCCCUUAAAGCUUCUGCUUUAAGGGGCAUCGUUGCAUAAGGCUGUGCUGACCAUC | |
| | G_ | GACGAGAAAGGGACUGAAGCUGCUGGGGCCA | |
| | 25FE_ | | |
| | PB12 | | |
| 376 | A1AT_ | UAAAAACAUGGCCCCAGCAGCUUGUUGUAGCUCCCGAAACGUUGCUACAAUAAGGCCGUCUGAAAAGAUG | 25255 |
| | Nme2_ED15+_ | UGCCGCAACGCUCUGCCCCUUAAAGCUUCUGCUUUAAGGGGCAUCGUUGCAUAAGGCUGUGCUGACCAUC | |
| | G_ | GACGAGAAAGGGACUGAAGCUGCUGGGGCC | |
| | 25FE_ | | |
| | PB11 | | |
| 377 | A1AT_ | UAAAAACAUGGCCCCAGCAGCUUGUUGUAGCUCCCGAAACGUUGCUACAAUAAGGCCGUCUGAAAAGAUG | 25256 |
| | Nme2_ED15+_ | UGCCGCAACGCUCUGCCCCUUAAAGCUUCUGCUUUAAGGGGCAUCGUUGCAUAAGGCUGUGCUGACCAUC | |
| | G_ | GACGAGAAAGGGACUGAAGCUGCUGGGGC | |
| | 25FE_ | | |
| | PB10 | | |
| 378 | A1AT_ | UAAAAACAUGGCCCCAGCAGCUUGUUGUAGCUCCCGAAACGUUGCUACAAUAAGGCCGUCUGAAAAGAUG | 25257 |
| | Nme2_ED15+_ | UGCCGCAACGCUCUGCCCCUUAAAGCUUCUGCUUUAAGGGGCAUCGUUGCAUAAGGCUGUGCUGACCAUC | |
| | G_ | GACGAGAAAGGGACUGAAGCUGCUGGGG | |
| | 25FE_ | | |
| | PB9 | | |
| 379 | A1AT_ | UAAAAACAUGGCCCCAGCAGCUUGUUGUAGCUCCCGAAACGUUGCUACAAUAAGGCCGUCUGAAAAGAUG | 25258 |
| | Nme2_ED15+_ | UGCCGCAACGCUCUGCCCCUUAAAGCUUCUGCUUUAAGGGGCAUCGUUGCAUAAGGCUGUGCUGACCAUC | |
| | G_ | GACGAGAAAGGGACUGAAGCUGCUGGG | |
| | 25FE_ | | |
| | PB8 | | |
| 380 | A1AT_ | UAAAAACAUGGCCCCAGCAGCUUGUUGUAGCUCCCGAAACGUUGCUACAAUAAGGCCGUCUGAAAAGAUG | 25259 |
| | Nme2_ED15+_ | UGCCGCAACGCUCUGCCCCUUAAAGCUUCUGCUUUAAGGGGCAUCGUUAGGCUGUGCUGACCAUCGACGA | |
| | G_ | GAAAGGGACUGAAGCUGCUGGGGCCAUGUUU | |
| | 20FE_ | | |
| | PB17 | | |
| 381 | A1AT_ | UAAAAACAUGGCCCCAGCAGCUUGUUGUAGCUCCCGAAACGUUGCUACAAUAAGGCCGUCUGAAAAGAUG | 25260 |
| | Nme2_ED15+_ | UGCCGCAACGCUCUGCCCCUUAAAGCUUCUGCUUUAAGGGGCAUCGUUAGGCUGUGCUGACCAUCGACGA | |
| | G_ | GAAAGGGACUGAAGCUGCUGGGGCCAUGUU | |
| | 20FE_ | | |
| | PB16 | | |
| 382 | A1AT_ | UAAAAACAUGGCCCCAGCAGCUUGUUGUAGCUCCCGAAACGUUGCUACAAUAAGGCCGUCUGAAAAGAUG | 25261 |
| | Nme2_ED15+_ | UGCCGCAACGCUCUGCCCCUUAAAGCUUCUGCUUUAAGGGGCAUCGUUAGGCUGUGCUGACCAUCGACGA | |
| | G_ | GAAAGGGACUGAAGCUGCUGGGGCCAUGU | |
| | 20FE_ | | |
| | PB15 | | |
| 383 | A1AT_ | UAAAAACAUGGCCCCAGCAGCUUGUUGUAGCUCCCGAAACGUUGCUACAAUAAGGCCGUCUGAAAAGAUG | 25262 |
| | Nme2_ED15+_ | UGCCGCAACGCUCUGCCCCUUAAAGCUUCUGCUUUAAGGGGCAUCGUUAGGCUGUGCUGACCAUCGACGA | |
| | G_ | GAAAGGGACUGAAGCUGCUGGGGCCAUG | |
| | 20FE_ | | |
| | PB14 | | |
| 384 | A1AT_ | UAAAAACAUGGCCCCAGCAGCUUGUUGUAGCUCCCGAAACGUUGCUACAAUAAGGCCGUCUGAAAAGAUG | 25263 |
| | Nme2_ED15+_ | UGCCGCAACGCUCUGCCCCUUAAAGCUUCUGCUUUAAGGGGCAUCGUUAGGCUGUGCUGACCAUCGACGA | |
| | G_ | GAAAGGGACUGAAGCUGCUGGGGCCAU | |
| | 20FE_ | | |
| | PB13 | | |
| 385 | A1AT_ | UAAAAACAUGGCCCCAGCAGCUUGUUGUAGCUCCCGAAACGUUGCUACAAUAAGGCCGUCUGAAAAGAUG | 25264 |
| | Nme2_ED15+_ | UGCCGCAACGCUCUGCCCCUUAAAGCUUCUGCUUUAAGGGGCAUCGUUAGGCUGUGCUGACCAUCGACGA | |
| | G_ | GAAAGGGACUGAAGCUGCUGGGGCCA | |
| | 20FE_ | | |
| | PB12 | | |
| 386 | A1AT_ | UAAAAACAUGGCCCCAGCAGCUUGUUGUAGCUCCCGAAACGUUGCUACAAUAAGGCCGUCUGAAAAGAUG | 25265 |
| | Nme2_ED15+_ | UGCCGCAACGCUCUGCCCCUUAAAGCUUCUGCUUUAAGGGGCAUCGUUAGGCUGUGCUGACCAUCGACGA | |
| | G_ | GAAAGGGACUGAAGCUGCUGGGGCC | |
| | 20FE_ | | |
| | PB11 | | |
| 387 | A1AT_ | UAAAAACAUGGCCCCAGCAGCUUGUUGUAGCUCCCGAAACGUUGCUACAAUAAGGCCGUCUGAAAAGAUG | 25266 |
| | Nme2_ED15+_ | UGCCGCAACGCUCUGCCCCUUAAAGCUUCUGCUUUAAGGGGCAUCGUUAGGCUGUGCUGACCAUCGACGA | |
| | G_ | GAAAGGGACUGAAGCUGCUGGGGC | |
| | 20FE_ | | |
| | PB10 | | |
| 388 | A1AT_ | UAAAAACAUGGCCCCAGCAGCUUGUUGUAGCUCCCGAAACGUUGCUACAAUAAGGCCGUCUGAAAAGAUG | 25267 |
| | Nme2_ED15+_ | UGCCGCAACGCUCUGCCCCUUAAAGCUUCUGCUUUAAGGGGCAUCGUUAGGCUGUGCUGACCAUCGACGA | |
| | G_ | GAAAGGGACUGAAGCUGCUGGGG | |
| | 20FE_ | | |
| | PB9 | | |
| 389 | A1AT_ | UAAAAACAUGGCCCCAGCAGCUUGUUGUAGCUCCCGAAACGUUGCUACAAUAAGGCCGUCUGAAAAGAUG | 25268 |
| | Nme2_ED15+_ | UGCCGCAACGCUCUGCCCCUUAAAGCUUCUGCUUUAAGGGGCAUCGUUAGGCUGUGCUGACCAUCGACGA | |
| | G_ | GAAAGGGACUGAAGCUGCUGGG | |
| | 20FE_ | | |
| | PB8 | | |
| 390 | A1AT_ | UAAAAACAUGGCCCCAGCAGCUUGUUGUAGCUCCCGAAACGUUGCUACAAUAAGGCCGUCUGAAAAGAUG | 25269 |
| | Nme2_ED15+_ | UGCCGCAACGCUCUGCCCCUUAAAGCUUCUGCUUUAAGGGGCAUCGUUUGCUGACCAUCGACGAGAAAGG | |
| | G_ | GACUGAAGCUGCUGGGGCCAUGUUU | |
| | 14FE_ | | |
| | PB17 | | |
| 391 | A1AT_ | UAAAAACAUGGCCCCAGCAGCUUGUUGUAGCUCCCGAAACGUUGCUACAAUAAGGCCGUCUGAAAAGAUG | 25270 |
| | Nme2_ED15+_ | UGCCGCAACGCUCUGCCCCUUAAAGCUUCUGCUUUAAGGGGCAUCGUUUGCUGACCAUCGACGAGAAAGG | |
| | G_ | GACUGAAGCUGCUGGGGCCAUGUU | |
| | 14FE_ | | |
| | PB16 | | |
| 392 | A1AT_ | UAAAAACAUGGCCCCAGCAGCUUGUUGUAGCUCCCGAAACGUUGCUACAAUAAGGCCGUCUGAAAAGAUG | 25271 |
| | Nme2_ED15+_ | UGCCGCAACGCUCUGCCCCUUAAAGCUUCUGCUUUAAGGGGCAUCGUUUGCUGACCAUCGACGAGAAAGG | |
| | G_ | GACUGAAGCUGCUGGGGCCAUGU | |
| | 14FE_ | | |
| | PB15 | | |
| 393 | A1AT_ | UAAAAACAUGGCCCCAGCAGCUUGUUGUAGCUCCCGAAACGUUGCUACAAUAAGGCCGUCUGAAAAGAUG | 25272 |
| | Nme2_ED15+_ | UGCCGCAACGCUCUGCCCCUUAAAGCUUCUGCUUUAAGGGGCAUCGUUUGCUGACCAUCGACGAGAAAGG | |
| | G_ | GACUGAAGCUGCUGGGGCCAUG | |
| | 14FE_ | | |
| | PB14 | | |
| 394 | A1AT_ | UAAAAACAUGGCCCCAGCAGCUUGUUGUAGCUCCCGAAACGUUGCUACAAUAAGGCCGUCUGAAAAGAUG | 25273 |
| | Nme2_ED15+_ | UGCCGCAACGCUCUGCCCCUUAAAGCUUCUGCUUUAAGGGGCAUCGUUUGCUGACCAUCGACGAGAAAGG | |
| | G_ | GACUGAAGCUGCUGGGGCCAU | |
| | 14FE_ | | |
| | PB13 | | |
| 395 | A1AT_ | UAAAAACAUGGCCCCAGCAGCUUGUUGUAGCUCCCGAAACGUUGCUACAAUAAGGCCGUCUGAAAAGAUG | 25274 |
| | Nme2_ED15+_ | UGCCGCAACGCUCUGCCCCUUAAAGCUUCUGCUUUAAGGGGCAUCGUUUGCUGACCAUCGACGAGAAAGG | |
| | G_ | GACUGAAGCUGCUGGGGCCA | |
| | 14FE_ | | |
| | PB12 | | |
| 396 | A1AT_ | UAAAAACAUGGCCCCAGCAGCUUGUUGUAGCUCCCGAAACGUUGCUACAAUAAGGCCGUCUGAAAAGAUG | 25275 |
| | Nme2_ED15+_ | UGCCGCAACGCUCUGCCCCUUAAAGCUUCUGCUUUAAGGGGCAUCGUUUGCUGACCAUCGACGAGAAAGG | |
| | G_ | GACUGAAGCUGCUGGGGCC | |
| | 14FE_ | | |
| | PB11 | | |
| 397 | A1AT_ | UAAAAACAUGGCCCCAGCAGCUUGUUGUAGCUCCCGAAACGUUGCUACAAUAAGGCCGUCUGAAAAGAUG | 25276 |
| | Nme2_ED15+_ | UGCCGCAACGCUCUGCCCCUUAAAGCUUCUGCUUUAAGGGGCAUCGUUUGCUGACCAUCGACGAGAAAGG | |
| | G_ | GACUGAAGCUGCUGGGGC | |
| | 14FE_ | | |
| | PB10 | | |
| 398 | A1AT_ | UAAAAACAUGGCCCCAGCAGCUUGUUGUAGCUCCCGAAACGUUGCUACAAUAAGGCCGUCUGAAAAGAUG | 25277 |
| | Nme2_ED15+_ | UGCCGCAACGCUCUGCCCCUUAAAGCUUCUGCUUUAAGGGGCAUCGUUUGCUGACCAUCGACGAGAAAGG | |
| | G_ | GACUGAAGCUGCUGGGG | |
| | 14FE_ | | |
| | PB9 | | |
| 399 | A1AT_ | UAAAAACAUGGCCCCAGCAGCUUGUUGUAGCUCCCGAAACGUUGCUACAAUAAGGCCGUCUGAAAAGAUG | 25278 |
| | Nme2_ED15+_ | UGCCGCAACGCUCUGCCCCUUAAAGCUUCUGCUUUAAGGGGCAUCGUUUGCUGACCAUCGACGAGAAAGG | |
| | G_ | GACUGAAGCUGCUGGG | |
| | 14FE_ | | |
| | PB8 | | |
| 400 | A1AT_ | UAAAAACAUGGCCCCAGCAGCUUGUUGUAGCUCCCGAAACGUUGCUACAAUAAGGCCGUCUGAAAAGAUG | 25279 |
| | Nme2_ED15+_ | UGCCGCAACGCUCUGCCCCUUAAAGCUUCUGCUUUAAGGGGCAUCGUUUGACCAUCGACGAGAAAGGGAC | |
| | G_ | UGAAGCUGCUGGGGCCAUGUUU | |
| | 11FE_ | | |
| | PB17 | | |
| 401 | A1AT_ | UAAAAACAUGGCCCCAGCAGCUUGUUGUAGCUCCCGAAACGUUGCUACAAUAAGGCCGUCUGAAAAGAUG | 25280 |
| | Nme2_ED15+_ | UGCCGCAACGCUCUGCCCCUUAAAGCUUCUGCUUUAAGGGGCAUCGUUUGACCAUCGACGAGAAAGGGAC | |
| | G_ | UGAAGCUGCUGGGGCCAUGUU | |
| | 11FE_ | | |
| | PB16 | | |
| 402 | A1AT_ | UAAAAACAUGGCCCCAGCAGCUUGUUGUAGCUCCCGAAACGUUGCUACAAUAAGGCCGUCUGAAAAGAUG | 25281 |
| | Nme2_ED15+_ | UGCCGCAACGCUCUGCCCCUUAAAGCUUCUGCUUUAAGGGGCAUCGUUUGACCAUCGACGAGAAAGGGAC | |
| | G_ | UGAAGCUGCUGGGGCCAUGU | |
| | 11FE_ | | |
| | PB15 | | |
| 403 | A1AT_ | UAAAAACAUGGCCCCAGCAGCUUGUUGUAGCUCCCGAAACGUUGCUACAAUAAGGCCGUCUGAAAAGAUG | 25282 |
| | Nme2_ED15+_ | UGCCGCAACGCUCUGCCCCUUAAAGCUUCUGCUUUAAGGGGCAUCGUUUGACCAUCGACGAGAAAGGGAC | |
| | G_ | UGAAGCUGCUGGGGCCAUG | |
| | 11FE_ | | |
| | PB14 | | |
| 404 | A1AT_ | UAAAAACAUGGCCCCAGCAGCUUGUUGUAGCUCCCGAAACGUUGCUACAAUAAGGCCGUCUGAAAAGAUG | 25283 |
| | Nme2_ED15+_ | UGCCGCAACGCUCUGCCCCUUAAAGCUUCUGCUUUAAGGGGCAUCGUUUGACCAUCGACGAGAAAGGGAC | |
| | G_ | UGAAGCUGCUGGGGCCAU | |
| | 11FE_ | | |
| | PB13 | | |
| 405 | A1AT_ | UAAAAACAUGGCCCCAGCAGCUUGUUGUAGCUCCCGAAACGUUGCUACAAUAAGGCCGUCUGAAAAGAUG | 25284 |
| | Nme2_ED15+_ | UGCCGCAACGCUCUGCCCCUUAAAGCUUCUGCUUUAAGGGGCAUCGUUUGACCAUCGACGAGAAAGGGAC | |
| | G_ | UGAAGCUGCUGGGGCCA | |
| | 11FE_ | | |
| | PB12 | | |
| 406 | A1AT_ | UAAAAACAUGGCCCCAGCAGCUUGUUGUAGCUCCCGAAACGUUGCUACAAUAAGGCCGUCUGAAAAGAUG | 25285 |
| | Nme2_ED15+_ | UGCCGCAACGCUCUGCCCCUUAAAGCUUCUGCUUUAAGGGGCAUCGUUUGACCAUCGACGAGAAAGGGAC | |
| | G_ | UGAAGCUGCUGGGGCC | |
| | 11FE_ | | |
| | PB11 | | |
| 407 | A1AT_ | UAAAAACAUGGCCCCAGCAGCUUGUUGUAGCUCCCGAAACGUUGCUACAAUAAGGCCGUCUGAAAAGAUG | 25286 |
| | Nme2_ED15+_ | UGCCGCAACGCUCUGCCCCUUAAAGCUUCUGCUUUAAGGGGCAUCGUUUGACCAUCGACGAGAAAGGGAC | |
| | G_ | UGAAGCUGCUGGGGC | |
| | 11FE_ | | |
| | PB10 | | |
| 408 | A1AT_ | UAAAAACAUGGCCCCAGCAGCUUGUUGUAGCUCCCGAAACGUUGCUACAAUAAGGCCGUCUGAAAAGAUG | 25287 |
| | Nme2_ED15+_ | UGCCGCAACGCUCUGCCCCUUAAAGCUUCUGCUUUAAGGGGCAUCGUUUGACCAUCGACGAGAAAGGGAC | |
| | G_ | UGAAGCUGCUGGGG | |
| | 11FE_ | | |
| | PB9 | | |
| 409 | A1AT_ | UAAAAACAUGGCCCCAGCAGCUUGUUGUAGCUCCCGAAACGUUGCUACAAUAAGGCCGUCUGAAAAGAUG | 25288 |
| | Nme2_ED15+_ | UGCCGCAACGCUCUGCCCCUUAAAGCUUCUGCUUUAAGGGGCAUCGUUUGACCAUCGACGAGAAAGGGAC | |
| | G_ | UGAAGCUGCUGGG | |
| | 11FE_ | | |
| | PB8 | | |
| 410 | A1AT_ | UAAAAACAUGGCCCCAGCAGCUUGUUGUAGCUCCCGAAACGUUGCUACAAUAAGGCCGUCUGAAAAGAUG | 25289 |
| | Nme2_ED15+_ | UGCCGCAACGCUCUGCCCCUUAAAGCUUCUGCUUUAAGGGGCAUCGUUACCAUCGACGAGAAAGGGACUG | |
| | G_ | AAGCUGCUGGGGCCAUGUUU | |
| | 9FE_ | | |
| | PB17 | | |
| 411 | A1AT_ | UAAAAACAUGGCCCCAGCAGCUUGUUGUAGCUCCCGAAACGUUGCUACAAUAAGGCCGUCUGAAAAGAUG | 25290 |
| | Nme2_ED15+_ | UGCCGCAACGCUCUGCCCCUUAAAGCUUCUGCUUUAAGGGGCAUCGUUACCAUCGACGAGAAAGGGACUG | |
| | G_ | AAGCUGCUGGGGCCAUGUU | |
| | 9FE_ | | |
| | PB16 | | |
| 412 | A1AT_ | UAAAAACAUGGCCCCAGCAGCUUGUUGUAGCUCCCGAAACGUUGCUACAAUAAGGCCGUCUGAAAAGAUG | 25291 |
| | Nme2_ED15+_ | UGCCGCAACGCUCUGCCCCUUAAAGCUUCUGCUUUAAGGGGCAUCGUUACCAUCGACGAGAAAGGGACUG | |
| | G_ | AAGCUGCUGGGGCCAUGU | |
| | 9FE_ | | |
| | PB15 | | |
| 413 | A1AT_ | UAAAAACAUGGCCCCAGCAGCUUGUUGUAGCUCCCGAAACGUUGCUACAAUAAGGCCGUCUGAAAAGAUG | 25292 |
| | Nme2_ED15+_ | UGCCGCAACGCUCUGCCCCUUAAAGCUUCUGCUUUAAGGGGCAUCGUUACCAUCGACGAGAAAGGGACUG | |
| | G_ | AAGCUGCUGGGGCCAUG | |
| | 9FE_ | | |
| | PB14 | | |
| 414 | A1AT_ | UAAAAACAUGGCCCCAGCAGCUUGUUGUAGCUCCCGAAACGUUGCUACAAUAAGGCCGUCUGAAAAGAUG | 25293 |
| | Nme2_ED15+_ | UGCCGCAACGCUCUGCCCCUUAAAGCUUCUGCUUUAAGGGGCAUCGUUACCAUCGACGAGAAAGGGACUG | |
| | G_ | AAGCUGCUGGGGCCAU | |
| | 9FE_ | | |
| | PB13 | | |
| 415 | A1AT_ | UAAAAACAUGGCCCCAGCAGCUUGUUGUAGCUCCCGAAACGUUGCUACAAUAAGGCCGUCUGAAAAGAUG | 25294 |
| | Nme2_ED15+_ | UGCCGCAACGCUCUGCCCCUUAAAGCUUCUGCUUUAAGGGGCAUCGUUACCAUCGACGAGAAAGGGACUG | |
| | G_ | AAGCUGCUGGGGCCA | |
| | 9FE_ | | |
| | PB12 | | |
| 416 | A1AT_ | UAAAAACAUGGCCCCAGCAGCUUGUUGUAGCUCCCGAAACGUUGCUACAAUAAGGCCGUCUGAAAAGAUG | 25295 |
| | Nme2_ED15+_ | UGCCGCAACGCUCUGCCCCUUAAAGCUUCUGCUUUAAGGGGCAUCGUUACCAUCGACGAGAAAGGGACUG | |
| | G_ | AAGCUGCUGGGGCC | |
| | 9FE_ | | |
| | PB11 | | |
| 417 | A1AT_ | UAAAAACAUGGCCCCAGCAGCUUGUUGUAGCUCCCGAAACGUUGCUACAAUAAGGCCGUCUGAAAAGAUG | 25296 |
| | Nme2_ED15+_ | UGCCGCAACGCUCUGCCCCUUAAAGCUUCUGCUUUAAGGGGCAUCGUUACCAUCGACGAGAAAGGGACUG | |
| | G_ | AAGCUGCUGGGGC | |
| | 9FE_ | | |
| | PB10 | | |
| 418 | A1AT_ | UAAAAACAUGGCCCCAGCAGCUUGUUGUAGCUCCCGAAACGUUGCUACAAUAAGGCCGUCUGAAAAGAUG | 25297 |
| | Nme2_ED15+_ | UGCCGCAACGCUCUGCCCCUUAAAGCUUCUGCUUUAAGGGGCAUCGUUACCAUCGACGAGAAAGGGACUG | |
| | G_ | AAGCUGCUGGGG | |
| | 9FE_ | | |
| | PB9 | | |
| 419 | A1AT_ | UAAAAACAUGGCCCCAGCAGCUUGUUGUAGCUCCCGAAACGUUGCUACAAUAAGGCCGUCUGAAAAGAUG | 25298 |
| | Nme2_ED15+_ | UGCCGCAACGCUCUGCCCCUUAAAGCUUCUGCUUUAAGGGGCAUCGUUACCAUCGACGAGAAAGGGACUG | |
| | G_ | AAGCUGCUGGG | |
| | 9FE_ | | |
| | PB8 | | |
| 420 | A1AT_ | UAAAAACAUGGCCCCAGCAGCUUGUUGUAGCUCCCGAAACGUUGCUACAAUAAGGCCGUCUGAAAAGAUG | 25299 |
| | Nme2_ED15+_ | UGCCGCAACGCUCUGCCCCUUAAAGCUUCUGCUUUAAGGGGCAUCGUUAUCGACGAGAAAGGGACUGAAG | |
| | G_ | CUGCUGGGGCCAUGUUU | |
| | 6FE_ | | |
| | PB17 | | |
| 421 | A1AT_ | UAAAAACAUGGCCCCAGCAGCUUGUUGUAGCUCCCGAAACGUUGCUACAAUAAGGCCGUCUGAAAAGAUG | 25300 |
| | Nme2_ED15+_ | UGCCGCAACGCUCUGCCCCUUAAAGCUUCUGCUUUAAGGGGCAUCGUUAUCGACGAGAAAGGGACUGAAG | |
| | G_ | CUGCUGGGGCCAUGUU | |
| | 6FE_ | | |
| | PB16 | | |
| 422 | A1AT_ | UAAAAACAUGGCCCCAGCAGCUUGUUGUAGCUCCCGAAACGUUGCUACAAUAAGGCCGUCUGAAAAGAUG | 25301 |
| | Nme2_ED15+_ | UGCCGCAACGCUCUGCCCCUUAAAGCUUCUGCUUUAAGGGGCAUCGUUAUCGACGAGAAAGGGACUGAAG | |
| | G_ | CUGCUGGGGCCAUGU | |
| | 6FE_ | | |
| | PB15 | | |
| 423 | A1AT_ | UAAAAACAUGGCCCCAGCAGCUUGUUGUAGCUCCCGAAACGUUGCUACAAUAAGGCCGUCUGAAAAGAUG | 25302 |
| | Nme2_ED15+_ | UGCCGCAACGCUCUGCCCCUUAAAGCUUCUGCUUUAAGGGGCAUCGUUAUCGACGAGAAAGGGACUGAAG | |
| | G_ | CUGCUGGGGCCAUG | |
| | 6FE_ | | |
| | PB14 | | |
| 424 | A1AT_ | UAAAAACAUGGCCCCAGCAGCUUGUUGUAGCUCCCGAAACGUUGCUACAAUAAGGCCGUCUGAAAAGAUG | 25303 |
| | Nme2_ED15+_ | UGCCGCAACGCUCUGCCCCUUAAAGCUUCUGCUUUAAGGGGCAUCGUUAUCGACGAGAAAGGGACUGAAG | |
| | G_ | CUGCUGGGGCCAU | |
| | 6FE_ | | |
| | PB13 | | |
| 425 | A1AT_ | UAAAAACAUGGCCCCAGCAGCUUGUUGUAGCUCCCGAAACGUUGCUACAAUAAGGCCGUCUGAAAAGAUG | 25304 |
| | Nme2_ED15+_ | UGCCGCAACGCUCUGCCCCUUAAAGCUUCUGCUUUAAGGGGCAUCGUUAUCGACGAGAAAGGGACUGAAG | |
| | G_ | CUGCUGGGGCCA | |
| | 6FE_ | | |
| | PB12 | | |
| 426 | A1AT_ | UAAAAACAUGGCCCCAGCAGCUUGUUGUAGCUCCCGAAACGUUGCUACAAUAAGGCCGUCUGAAAAGAUG | 25305 |
| | Nme2_ED15+_ | UGCCGCAACGCUCUGCCCCUUAAAGCUUCUGCUUUAAGGGGCAUCGUUAUCGACGAGAAAGGGACUGAAG | |
| | G_ | CUGCUGGGGCC | |
| | 6FE_ | | |
| | PB11 | | |
| 427 | A1AT_ | UAAAAACAUGGCCCCAGCAGCUUGUUGUAGCUCCCGAAACGUUGCUACAAUAAGGCCGUCUGAAAAGAUG | 25306 |
| | Nme2_ED15+_ | UGCCGCAACGCUCUGCCCCUUAAAGCUUCUGCUUUAAGGGGCAUCGUUAUCGACGAGAAAGGGACUGAAG | |
| | G_ | CUGCUGGGGC | |
| | 6FE_ | | |
| | PB10 | | |
| 428 | A1AT_ | UAAAAACAUGGCCCCAGCAGCUUGUUGUAGCUCCCGAAACGUUGCUACAAUAAGGCCGUCUGAAAAGAUG | 25307 |
| | Nme2_ED15+_ | UGCCGCAACGCUCUGCCCCUUAAAGCUUCUGCUUUAAGGGGCAUCGUUAUCGACGAGAAAGGGACUGAAG | |
| | G_ | CUGCUGGGG | |
| | 6FE_ | | |
| | PB9 | | |
| 429 | A1AT_ | UAAAAACAUGGCCCCAGCAGCUUGUUGUAGCUCCCGAAACGUUGCUACAAUAAGGCCGUCUGAAAAGAUG | 25308 |
| | Nme2_ED15+_ | UGCCGCAACGCUCUGCCCCUUAAAGCUUCUGCUUUAAGGGGCAUCGUUAUCGACGAGAAAGGGACUGAAG | |
| | G_ | CUGCUGGG | |
| | 6FE_ | | |
| | PB8 | | |
| 430 | A1AT_ | UAAAAACAUGGCCCCAGCAGCUUGUUGUAGCUCCCGAAACGUUGCUACAAUAAGGCCGUCUGAAAAGAUG | 25309 |
| | Nme2_ED15+_ | UGCCGCAACGCUCUGCCCCUUAAAGCUUCUGCUUUAAGGGGCAUCGUUUCGACGAGAAAGGGACUGAAGC | |
| | G_ | UGCUGGGGCCAUGUUU | |
| | 5FE_ | | |
| | PB17 | | |
| 431 | A1AT_ | UAAAAACAUGGCCCCAGCAGCUUGUUGUAGCUCCCGAAACGUUGCUACAAUAAGGCCGUCUGAAAAGAUG | 25310 |
| | Nme2_ED15+_ | UGCCGCAACGCUCUGCCCCUUAAAGCUUCUGCUUUAAGGGGCAUCGUUUCGACGAGAAAGGGACUGAAGC | |
| | G_ | UGCUGGGGCCAUGUU | |
| | 5FE_ | | |
| | PB16 | | |
| 432 | A1AT_ | UAAAAACAUGGCCCCAGCAGCUUGUUGUAGCUCCCGAAACGUUGCUACAAUAAGGCCGUCUGAAAAGAUG | 25311 |
| | Nme2_ED15+_ | UGCCGCAACGCUCUGCCCCUUAAAGCUUCUGCUUUAAGGGGCAUCGUUUCGACGAGAAAGGGACUGAAGC | |
| | G_ | UGCUGGGGCCAUGU | |
| | 5FE_ | | |
| | PB15 | | |
| 433 | A1AT_ | UAAAAACAUGGCCCCAGCAGCUUGUUGUAGCUCCCGAAACGUUGCUACAAUAAGGCCGUCUGAAAAGAUG | 25312 |
| | Nme2_ED15+_ | UGCCGCAACGCUCUGCCCCUUAAAGCUUCUGCUUUAAGGGGCAUCGUUUCGACGAGAAAGGGACUGAAGC | |
| | G_ | UGCUGGGGCCAUG | |
| | 5FE_ | | |
| | PB14 | | |
| 434 | A1AT_ | UAAAAACAUGGCCCCAGCAGCUUGUUGUAGCUCCCGAAACGUUGCUACAAUAAGGCCGUCUGAAAAGAUG | 25313 |
| | Nme2_ED15+_ | UGCCGCAACGCUCUGCCCCUUAAAGCUUCUGCUUUAAGGGGCAUCGUUUCGACGAGAAAGGGACUGAAGC | |
| | G_ | UGCUGGGGCCAU | |
| | 5FE_ | | |
| | PB13 | | |
| 435 | A1AT_ | UAAAAACAUGGCCCCAGCAGCUUGUUGUAGCUCCCGAAACGUUGCUACAAUAAGGCCGUCUGAAAAGAUG | 25314 |
| | Nme2_ED15+_ | UGCCGCAACGCUCUGCCCCUUAAAGCUUCUGCUUUAAGGGGCAUCGUUUCGACGAGAAAGGGACUGAAGC | |
| | G_ | UGCUGGGGCCA | |
| | 5FE_ | | |
| | PB12 | | |
| 436 | A1AT_ | UAAAAACAUGGCCCCAGCAGCUUGUUGUAGCUCCCGAAACGUUGCUACAAUAAGGCCGUCUGAAAAGAUG | 25315 |
| | Nme2_ED15+_ | UGCCGCAACGCUCUGCCCCUUAAAGCUUCUGCUUUAAGGGGCAUCGUUUCGACGAGAAAGGGACUGAAGC | |
| | G_ | UGCUGGGGCC | |
| | 5FE_ | | |
| | PB11 | | |
| 437 | A1AT_ | UAAAAACAUGGCCCCAGCAGCUUGUUGUAGCUCCCGAAACGUUGCUACAAUAAGGCCGUCUGAAAAGAUG | 25316 |
| | Nme2_ED15+_ | UGCCGCAACGCUCUGCCCCUUAAAGCUUCUGCUUUAAGGGGCAUCGUUUCGACGAGAAAGGGACUGAAGC | |
| | G_ | UGCUGGGGC | |
| | 5FE_ | | |
| | PB10 | | |
| 438 | A1AT_ | UAAAAACAUGGCCCCAGCAGCUUGUUGUAGCUCCCGAAACGUUGCUACAAUAAGGCCGUCUGAAAAGAUG | 25317 |
| | Nme2_ED15+_ | UGCCGCAACGCUCUGCCCCUUAAAGCUUCUGCUUUAAGGGGCAUCGUUUCGACGAGAAAGGGACUGAAGC | |
| | G_ | UGCUGGGG | |
| | 5FE_ | | |
| | PB9 | | |
| 439 | A1AT_ | UAAAAACAUGGCCCCAGCAGCUUGUUGUAGCUCCCGAAACGUUGCUACAAUAAGGCCGUCUGAAAAGAUG | 25318 |
| | Nme2_ED15+_ | UGCCGCAACGCUCUGCCCCUUAAAGCUUCUGCUUUAAGGGGCAUCGUUUCGACGAGAAAGGGACUGAAGC | |
| | G_ | UGCUGGG | |
| | 5FE_ | | |
| | PB8 | | |
| 440 | A1AT_ | UAAAAACAUGGCCCCAGCAGCUUGUUGUAGCUCCCGAAACGUUGCUACAAUAAGGCCGUCUGAAAAGAUG | 25319 |
| | Nme2_ED15+_ | UGCCGCAACGCUCUGCCCCUUAAAGCUUCUGCUUUAAGGGGCAUCGUUGACGAGAAAGGGACUGAAGCUG | |
| | G_ | CUGGGGCCAUGUUU | |
| | 3FE_ | | |
| | PB17 | | |
| 441 | A1AT_ | UAAAAACAUGGCCCCAGCAGCUUGUUGUAGCUCCCGAAACGUUGCUACAAUAAGGCCGUCUGAAAAGAUG | 25320 |
| | Nme2_ED15+_ | UGCCGCAACGCUCUGCCCCUUAAAGCUUCUGCUUUAAGGGGCAUCGUUGACGAGAAAGGGACUGAAGCUG | |
| | G_ | CUGGGGCCAUGUU | |
| | 3FE_ | | |
| | PB16 | | |
| 442 | A1AT_ | UAAAAACAUGGCCCCAGCAGCUUGUUGUAGCUCCCGAAACGUUGCUACAAUAAGGCCGUCUGAAAAGAUG | 25321 |
| | Nme2_ED15+_ | UGCCGCAACGCUCUGCCCCUUAAAGCUUCUGCUUUAAGGGGCAUCGUUGACGAGAAAGGGACUGAAGCUG | |
| | G_ | CUGGGGCCAUGU | |
| | 3FE_ | | |
| | PB15 | | |
| 443 | A1AT_ | UAAAAACAUGGCCCCAGCAGCUUGUUGUAGCUCCCGAAACGUUGCUACAAUAAGGCCGUCUGAAAAGAUG | 25322 |
| | Nme2_ED15+_ | UGCCGCAACGCUCUGCCCCUUAAAGCUUCUGCUUUAAGGGGCAUCGUUGACGAGAAAGGGACUGAAGCUG | |
| | G_ | CUGGGGCCAUG | |
| | 3FE_ | | |
| | PB14 | | |
| 444 | A1AT_ | UAAAAACAUGGCCCCAGCAGCUUGUUGUAGCUCCCGAAACGUUGCUACAAUAAGGCCGUCUGAAAAGAUG | 25323 |
| | Nme2_ED15+_ | UGCCGCAACGCUCUGCCCCUUAAAGCUUCUGCUUUAAGGGGCAUCGUUGACGAGAAAGGGACUGAAGCUG | |
| | G_ | CUGGGGCCAU | |
| | 3FE_ | | |
| | PB13 | | |
| 445 | A1AT_ | UAAAAACAUGGCCCCAGCAGCUUGUUGUAGCUCCCGAAACGUUGCUACAAUAAGGCCGUCUGAAAAGAUG | 25324 |
| | Nme2_ED15+_ | UGCCGCAACGCUCUGCCCCUUAAAGCUUCUGCUUUAAGGGGCAUCGUUGACGAGAAAGGGACUGAAGCUG | |
| | G_ | CUGGGGCCA | |
| | 3FE_ | | |
| | PB12 | | |
| 446 | A1AT_ | UAAAAACAUGGCCCCAGCAGCUUGUUGUAGCUCCCGAAACGUUGCUACAAUAAGGCCGUCUGAAAAGAUG | 25325 |
| | Nme2_ED15+_ | UGCCGCAACGCUCUGCCCCUUAAAGCUUCUGCUUUAAGGGGCAUCGUUGACGAGAAAGGGACUGAAGCUG | |
| | G_ | CUGGGGCC | |
| | 3FE_ | | |
| | PB11 | | |
| 447 | A1AT_ | UAAAAACAUGGCCCCAGCAGCUUGUUGUAGCUCCCGAAACGUUGCUACAAUAAGGCCGUCUGAAAAGAUG | 25326 |
| | Nme2_ED15+_ | UGCCGCAACGCUCUGCCCCUUAAAGCUUCUGCUUUAAGGGGCAUCGUUGACGAGAAAGGGACUGAAGCUG | |
| | G_ | CUGGGGC | |
| | 3FE_ | | |
| | PB10 | | |
| 448 | A1AT_ | UAAAAACAUGGCCCCAGCAGCUUGUUGUAGCUCCCGAAACGUUGCUACAAUAAGGCCGUCUGAAAAGAUG | 25327 |
| | Nme2_ED15+_ | UGCCGCAACGCUCUGCCCCUUAAAGCUUCUGCUUUAAGGGGCAUCGUUGACGAGAAAGGGACUGAAGCUG | |
| | G_ | CUGGGG | |
| | 3FE_ | | |
| | PB9 | | |
| 449 | A1AT_ | UAAAAACAUGGCCCCAGCAGCUUGUUGUAGCUCCCGAAACGUUGCUACAAUAAGGCCGUCUGAAAAGAUG | 25328 |
| | Nme2_ED15+_ | UGCCGCAACGCUCUGCCCCUUAAAGCUUCUGCUUUAAGGGGCAUCGUUGACGAGAAAGGGACUGAAGCUG | |
| | G_ | CUGGG | |
| | 3FE_ | | |
| | PB8 | | |
| 450 | A1AT_ | AGGCCGUGCAUAAGGCUGUGGUUUUAGAGCUAGAAAUAGCAAGUUAAAAUAAGGCUAGUCCGUUAUCAA | 25329 |
| | SpCas9-_NG_ | CUUGAAAAAGUGGCACCGAGUCGGUGCACAUGGCCCCAGCAGCUUCAGUCCCUUUCUCGUCGAUGGUCAG | |
| | SpRY_ | CACAGCCUUAUGCACGGCCU | |
| | ED15-_30FE_ | | |
| | PB17 | | |
| 451 | A1AT_ | AGGCCGUGCAUAAGGCUGUGGUUUUAGAGCUAGAAAUAGCAAGUUAAAAUAAGGCUAGUCCGUUAUCAA | 25330 |
| | SpCas9-_NG_ | CUUGAAAAAGUGGCACCGAGUCGGUGCACAUGGCCCCAGCAGCUUCAGUCCCUUUCUCGUCGAUGGUCAG | |
| | SpRY_ | CACAGCCUUAUGCACGGCC | |
| | ED15-_30FE_ | | |
| | PB16 | | |
| 452 | A1AT_ | AGGCCGUGCAUAAGGCUGUGGUUUUAGAGCUAGAAAUAGCAAGUUAAAAUAAGGCUAGUCCGUUAUCAA | 25331 |
| | SpCas9-_NG_ | CUUGAAAAAGUGGCACCGAGUCGGUGCACAUGGCCCCAGCAGCUUCAGUCCCUUUCUCGUCGAUGGUCAG | |
| | SpRY_ | CACAGCCUUAUGCACGGC | |
| | ED15-_30FE_ | | |
| | PB15 | | |
| 453 | A1AT_ | AGGCCGUGCAUAAGGCUGUGGUUUUAGAGCUAGAAAUAGCAAGUUAAAAUAAGGCUAGUCCGUUAUCAA | 25332 |
| | SpCas9-_NG_ | CUUGAAAAAGUGGCACCGAGUCGGUGCACAUGGCCCCAGCAGCUUCAGUCCCUUUCUCGUCGAUGGUCAG | |
| | SpRY_ | CACAGCCUUAUGCACGG | |
| | ED15-_30FE_ | | |
| | PB14 | | |
| 454 | A1AT_ | AGGCCGUGCAUAAGGCUGUGGUUUUAGAGCUAGAAAUAGCAAGUUAAAAUAAGGCUAGUCCGUUAUCAA | 25333 |
| | SpCas9-_NG_ | CUUGAAAAAGUGGCACCGAGUCGGUGCACAUGGCCCCAGCAGCUUCAGUCCCUUUCUCGUCGAUGGUCAG | |
| | SpRY_ | CACAGCCUUAUGCACG | |
| | ED15-_30FE_ | | |
| | PB13 | | |
| 455 | A1AT_ | AGGCCGUGCAUAAGGCUGUGGUUUUAGAGCUAGAAAUAGCAAGUUAAAAUAAGGCUAGUCCGUUAUCAA | 25334 |
| | SpCas9-_NG_ | CUUGAAAAAGUGGCACCGAGUCGGUGCACAUGGCCCCAGCAGCUUCAGUCCCUUUCUCGUCGAUGGUCAG | |
| | SpRY_ | CACAGCCUUAUGCAC | |
| | ED15-_30FE_ | | |
| | PB12 | | |
| 456 | A1AT_ | AGGCCGUGCAUAAGGCUGUGGUUUUAGAGCUAGAAAUAGCAAGUUAAAAUAAGGCUAGUCCGUUAUCAA | 25335 |
| | SpCas9-_NG_ | CUUGAAAAAGUGGCACCGAGUCGGUGCACAUGGCCCCAGCAGCUUCAGUCCCUUUCUCGUCGAUGGUCAG | |
| | SpRY_ | CACAGCCUUAUGCA | |
| | ED15-_30FE_ | | |
| | PB11 | | |
| 457 | A1AT_ | AGGCCGUGCAUAAGGCUGUGGUUUUAGAGCUAGAAAUAGCAAGUUAAAAUAAGGCUAGUCCGUUAUCAA | 25336 |
| | SpCas9-_NG_ | CUUGAAAAAGUGGCACCGAGUCGGUGCACAUGGCCCCAGCAGCUUCAGUCCCUUUCUCGUCGAUGGUCAG | |
| | SpRY_ | CACAGCCUUAUGC | |
| | ED15-_30FE_ | | |
| | PB10 | | |
| 458 | A1AT_ | AGGCCGUGCAUAAGGCUGUGGUUUUAGAGCUAGAAAUAGCAAGUUAAAAUAAGGCUAGUCCGUUAUCAA | 25337 |
| | SpCas9-_NG_ | CUUGAAAAAGUGGCACCGAGUCGGUGCACAUGGCCCCAGCAGCUUCAGUCCCUUUCUCGUCGAUGGUCAG | |
| | SpRY_ | CACAGCCUUAUG | |
| | ED15-_30FE_ | | |
| | PB9 | | |
| 459 | A1AT_ | AGGCCGUGCAUAAGGCUGUGGUUUUAGAGCUAGAAAUAGCAAGUUAAAAUAAGGCUAGUCCGUUAUCAA | 25338 |
| | SpCas9-_NG_ | CUUGAAAAAGUGGCACCGAGUCGGUGCACAUGGCCCCAGCAGCUUCAGUCCCUUUCUCGUCGAUGGUCAG | |
| | SpRY_ | CACAGCCUUAU | |
| | ED15-_30FE_ | | |
| | PB8 | | |
| 460 | A1AT_ | AGGCCGUGCAUAAGGCUGUGGUUUUAGAGCUAGAAAUAGCAAGUUAAAAUAAGGCUAGUCCGUUAUCAA | 25339 |
| | SpCas9-_NG_ | CUUGAAAAAGUGGCACCGAGUCGGUGCGCCCCAGCAGCUUCAGUCCCUUUCUCGUCGAUGGUCAGCACAG | |
| | SpRY_ | CCUUAUGCACGGCCU | |
| | ED15-_25FE_ | | |
| | PB17 | | |
| 461 | A1AT_ | AGGCCGUGCAUAAGGCUGUGGUUUUAGAGCUAGAAAUAGCAAGUUAAAAUAAGGCUAGUCCGUUAUCAA | 25340 |
| | SpCas9-_NG_ | CUUGAAAAAGUGGCACCGAGUCGGUGCGCCCCAGCAGCUUCAGUCCCUUUCUCGUCGAUGGUCAGCACAG | |
| | SpRY_ | CCUUAUGCACGGCC | |
| | ED15-_25FE_ | | |
| | PB16 | | |
| 462 | A1AT_ | AGGCCGUGCAUAAGGCUGUGGUUUUAGAGCUAGAAAUAGCAAGUUAAAAUAAGGCUAGUCCGUUAUCAA | 25341 |
| | SpCas9-_NG_ | CUUGAAAAAGUGGCACCGAGUCGGUGCGCCCCAGCAGCUUCAGUCCCUUUCUCGUCGAUGGUCAGCACAG | |
| | SpRY_ | CCUUAUGCACGGC | |
| | ED15-_25FE_ | | |
| | PB15 | | |
| 463 | A1AT_ | AGGCCGUGCAUAAGGCUGUGGUUUUAGAGCUAGAAAUAGCAAGUUAAAAUAAGGCUAGUCCGUUAUCAA | 25342 |
| | SpCas9-_NG_ | CUUGAAAAAGUGGCACCGAGUCGGUGCGCCCCAGCAGCUUCAGUCCCUUUCUCGUCGAUGGUCAGCACAG | |
| | SpRY_ | CCUUAUGCACGG | |
| | ED15-_25FE_ | | |
| | PB14 | | |
| 464 | A1AT_ | AGGCCGUGCAUAAGGCUGUGGUUUUAGAGCUAGAAAUAGCAAGUUAAAAUAAGGCUAGUCCGUUAUCAA | 25343 |
| | SpCas9-_NG_ | CUUGAAAAAGUGGCACCGAGUCGGUGCGCCCCAGCAGCUUCAGUCCCUUUCUCGUCGAUGGUCAGCACAG | |
| | SpRY_ | CCUUAUGCACG | |
| | ED15-_25FE_ | | |
| | PB13 | | |
| 465 | A1AT_ | AGGCCGUGCAUAAGGCUGUGGUUUUAGAGCUAGAAAUAGCAAGUUAAAAUAAGGCUAGUCCGUUAUCAA | 25344 |
| | SpCas9-_NG_ | CUUGAAAAAGUGGCACCGAGUCGGUGCGCCCCAGCAGCUUCAGUCCCUUUCUCGUCGAUGGUCAGCACAG | |
| | SpRY_ | CCUUAUGCAC | |
| | ED15-_25FE_ | | |
| | PB12 | | |
| 466 | A1AT_ | AGGCCGUGCAUAAGGCUGUGGUUUUAGAGCUAGAAAUAGCAAGUUAAAAUAAGGCUAGUCCGUUAUCAA | 25345 |
| | SpCas9-_NG_ | CUUGAAAAAGUGGCACCGAGUCGGUGCGCCCCAGCAGCUUCAGUCCCUUUCUCGUCGAUGGUCAGCACAG | |
| | SpRY_ | CCUUAUGCA | |
| | ED15-_25FE_ | | |
| | PB11 | | |
| 467 | A1AT_ | AGGCCGUGCAUAAGGCUGUGGUUUUAGAGCUAGAAAUAGCAAGUUAAAAUAAGGCUAGUCCGUUAUCAA | 25346 |
| | SpCas9-_NG_ | CUUGAAAAAGUGGCACCGAGUCGGUGCGCCCCAGCAGCUUCAGUCCCUUUCUCGUCGAUGGUCAGCACAG | |
| | SpRY_ | CCUUAUGC | |
| | ED15-_25FE_ | | |
| | PB10 | | |
| 468 | A1AT_ | AGGCCGUGCAUAAGGCUGUGGUUUUAGAGCUAGAAAUAGCAAGUUAAAAUAAGGCUAGUCCGUUAUCAA | 25347 |
| | SpCas9-_NG_ | CUUGAAAAAGUGGCACCGAGUCGGUGCGCCCCAGCAGCUUCAGUCCCUUUCUCGUCGAUGGUCAGCACAG | |
| | SpRY_ | CCUUAUG | |
| | ED15-_25FE_ | | |
| | PB9 | | |
| 469 | A1AT_ | AGGCCGUGCAUAAGGCUGUGGUUUUAGAGCUAGAAAUAGCAAGUUAAAAUAAGGCUAGUCCGUUAUCAA | 25348 |
| | SpCas9-_NG_ | CUUGAAAAAGUGGCACCGAGUCGGUGCGCCCCAGCAGCUUCAGUCCCUUUCUCGUCGAUGGUCAGCACAG | |
| | SpRY_ | CCUUAU | |
| | ED15-_25FE_ | | |
| | PB8 | | |
| 470 | A1AT_ | AGGCCGUGCAUAAGGCUGUGGUUUUAGAGCUAGAAAUAGCAAGUUAAAAUAAGGCUAGUCCGUUAUCAA | 25349 |
| | SpCas9-_NG_ | CUUGAAAAAGUGGCACCGAGUCGGUGCAGCAGCUUCAGUCCCUUUCUCGUCGAUGGUCAGCACAGCCUUA | |
| | SpRY_ | UGCACGGCCU | |
| | ED15-_20FE_ | | |
| | PB17 | | |
| 471 | A1AT_ | AGGCCGUGCAUAAGGCUGUGGUUUUAGAGCUAGAAAUAGCAAGUUAAAAUAAGGCUAGUCCGUUAUCAA | 25350 |
| | SpCas9-_NG_ | CUUGAAAAAGUGGCACCGAGUCGGUGCAGCAGCUUCAGUCCCUUUCUCGUCGAUGGUCAGCACAGCCUUA | |
| | SpRY_ | UGCACGGCC | |
| | ED15-_20FE_ | | |
| | PB16 | | |
| 472 | A1AT_ | AGGCCGUGCAUAAGGCUGUGGUUUUAGAGCUAGAAAUAGCAAGUUAAAAUAAGGCUAGUCCGUUAUCAA | 25351 |
| | SpCas9-_NG_ | CUUGAAAAAGUGGCACCGAGUCGGUGCAGCAGCUUCAGUCCCUUUCUCGUCGAUGGUCAGCACAGCCUUA | |
| | SpRY_ | UGCACGGC | |
| | ED15-_20FE_ | | |
| | PB15 | | |
| 473 | A1AT_ | AGGCCGUGCAUAAGGCUGUGGUUUUAGAGCUAGAAAUAGCAAGUUAAAAUAAGGCUAGUCCGUUAUCAA | 25352 |
| | SpCas9-_NG_ | CUUGAAAAAGUGGCACCGAGUCGGUGCAGCAGCUUCAGUCCCUUUCUCGUCGAUGGUCAGCACAGCCUUA | |
| | SpRY_ | UGCACGG | |
| | ED15-_20FE_ | | |
| | PB14 | | |
| 474 | A1AT_ | AGGCCGUGCAUAAGGCUGUGGUUUUAGAGCUAGAAAUAGCAAGUUAAAAUAAGGCUAGUCCGUUAUCAA | 25353 |
| | SpCas9-_NG_ | CUUGAAAAAGUGGCACCGAGUCGGUGCAGCAGCUUCAGUCCCUUUCUCGUCGAUGGUCAGCACAGCCUUA | |
| | SpRY_ | UGCACG | |
| | ED15-_20FE_ | | |
| | PB13 | | |
| 475 | A1AT_ | AGGCCGUGCAUAAGGCUGUGGUUUUAGAGCUAGAAAUAGCAAGUUAAAAUAAGGCUAGUCCGUUAUCAA | 25354 |
| | SpCas9-_NG_ | CUUGAAAAAGUGGCACCGAGUCGGUGCAGCAGCUUCAGUCCCUUUCUCGUCGAUGGUCAGCACAGCCUUA | |
| | SpRY_ | UGCAC | |
| | ED15-_20FE_ | | |
| | PB12 | | |
| 476 | A1AT_ | AGGCCGUGCAUAAGGCUGUGGUUUUAGAGCUAGAAAUAGCAAGUUAAAAUAAGGCUAGUCCGUUAUCAA | 25355 |
| | SpCas9-_NG_ | CUUGAAAAAGUGGCACCGAGUCGGUGCAGCAGCUUCAGUCCCUUUCUCGUCGAUGGUCAGCACAGCCUUA | |
| | SpRY_ | UGCA | |
| | ED15-_20FE_ | | |
| | PB11 | | |
| 477 | A1AT_ | AGGCCGUGCAUAAGGCUGUGGUUUUAGAGCUAGAAAUAGCAAGUUAAAAUAAGGCUAGUCCGUUAUCAA | 25356 |
| | SpCas9-_NG_ | CUUGAAAAAGUGGCACCGAGUCGGUGCAGCAGCUUCAGUCCCUUUCUCGUCGAUGGUCAGCACAGCCUUA | |
| | SpRY_ | UGC | |
| | ED15-_20FE_ | | |
| | PB10 | | |
| 478 | A1AT_ | AGGCCGUGCAUAAGGCUGUGGUUUUAGAGCUAGAAAUAGCAAGUUAAAAUAAGGCUAGUCCGUUAUCAA | 25357 |
| | SpCas9-_NG_ | CUUGAAAAAGUGGCACCGAGUCGGUGCAGCAGCUUCAGUCCCUUUCUCGUCGAUGGUCAGCACAGCCUUA | |
| | SpRY_ | UG | |
| | ED15-_20FE_ | | |
| | PB9 | | |
| 479 | A1AT_ | AGGCCGUGCAUAAGGCUGUGGUUUUAGAGCUAGAAAUAGCAAGUUAAAAUAAGGCUAGUCCGUUAUCAA | 25358 |
| | SpCas9-_NG_ | CUUGAAAAAGUGGCACCGAGUCGGUGCAGCAGCUUCAGUCCCUUUCUCGUCGAUGGUCAGCACAGCCUUA | |
| | SpRY_ | U | |
| | ED15-_20FE_ | | |
| | PB8 | | |
| 480 | A1AT_ | AGGCCGUGCAUAAGGCUGUGGUUUUAGAGCUAGAAAUAGCAAGUUAAAAUAAGGCUAGUCCGUUAUCAA | 25359 |
| | SpCas9-_NG_ | CUUGAAAAAGUGGCACCGAGUCGGUGCUUCAGUCCCUUUCUCGUCGAUGGUCAGCACAGCCUUAUGCACG | |
| | SpRY_ | GCCU | |
| | ED15-_14FE_ | | |
| | PB17 | | |
| 481 | A1AT_ | AGGCCGUGCAUAAGGCUGUGGUUUUAGAGCUAGAAAUAGCAAGUUAAAAUAAGGCUAGUCCGUUAUCAA | 25360 |
| | SpCas9-_NG_ | CUUGAAAAAGUGGCACCGAGUCGGUGCUUCAGUCCCUUUCUCGUCGAUGGUCAGCACAGCCUUAUGCACG | |
| | SpRY_ | GCC | |
| | ED15-_14FE_ | | |
| | PB16 | | |
| 482 | A1AT_ | AGGCCGUGCAUAAGGCUGUGGUUUUAGAGCUAGAAAUAGCAAGUUAAAAUAAGGCUAGUCCGUUAUCAA | 25361 |
| | SpCas9-_NG_ | CUUGAAAAAGUGGCACCGAGUCGGUGCUUCAGUCCCUUUCUCGUCGAUGGUCAGCACAGCCUUAUGCACG | |
| | SpRY_ | GC | |
| | ED15-_14FE_ | | |
| | PB15 | | |
| 483 | A1AT_ | AGGCCGUGCAUAAGGCUGUGGUUUUAGAGCUAGAAAUAGCAAGUUAAAAUAAGGCUAGUCCGUUAUCAA | 25362 |
| | SpCas9-_NG_ | CUUGAAAAAGUGGCACCGAGUCGGUGCUUCAGUCCCUUUCUCGUCGAUGGUCAGCACAGCCUUAUGCACG | |
| | SpRY_ | G | |
| | ED15-_14FE_ | | |
| | PB14 | | |
| 484 | A1AT_ | AGGCCGUGCAUAAGGCUGUGGUUUUAGAGCUAGAAAUAGCAAGUUAAAAUAAGGCUAGUCCGUUAUCAA | 25363 |
| | SpCas9-_NG_ | CUUGAAAAAGUGGCACCGAGUCGGUGCUUCAGUCCCUUUCUCGUCGAUGGUCAGCACAGCCUUAUGCACG | |
| | SpRY_ | | |
| | ED15-_14FE_ | | |
| | PB13 | | |
| 485 | A1AT_ | AGGCCGUGCAUAAGGCUGUGGUUUUAGAGCUAGAAAUAGCAAGUUAAAAUAAGGCUAGUCCGUUAUCAA | 25364 |
| | SpCas9-_NG_ | CUUGAAAAAGUGGCACCGAGUCGGUGCUUCAGUCCCUUUCUCGUCGAUGGUCAGCACAGCCUUAUGCAC | |
| | SpRY_ | | |
| | ED15-_14FE_ | | |
| | PB12 | | |
| 486 | A1AT_ | AGGCCGUGCAUAAGGCUGUGGUUUUAGAGCUAGAAAUAGCAAGUUAAAAUAAGGCUAGUCCGUUAUCAA | 25365 |
| | SpCas9-_NG_ | CUUGAAAAAGUGGCACCGAGUCGGUGCUUCAGUCCCUUUCUCGUCGAUGGUCAGCACAGCCUUAUGCA | |
| | SpRY_ | | |
| | ED15-_14FE_ | | |
| | PB11 | | |
| 487 | A1AT_ | AGGCCGUGCAUAAGGCUGUGGUUUUAGAGCUAGAAAUAGCAAGUUAAAAUAAGGCUAGUCCGUUAUCAA | 25366 |
| | SpCas9-_NG_ | CUUGAAAAAGUGGCACCGAGUCGGUGCUUCAGUCCCUUUCUCGUCGAUGGUCAGCACAGCCUUAUGC | |
| | SpRY_ | | |
| | ED15-_14FE_ | | |
| | PB10 | | |
| 488 | A1AT_ | AGGCCGUGCAUAAGGCUGUGGUUUUAGAGCUAGAAAUAGCAAGUUAAAAUAAGGCUAGUCCGUUAUCAA | 25367 |
| | SpCas9-_NG_ | CUUGAAAAAGUGGCACCGAGUCGGUGCUUCAGUCCCUUUCUCGUCGAUGGUCAGCACAGCCUUAUG | |
| | SpRY_ | | |
| | ED15-_14FE_ | | |
| | PB9 | | |
| 489 | A1AT_ | AGGCCGUGCAUAAGGCUGUGGUUUUAGAGCUAGAAAUAGCAAGUUAAAAUAAGGCUAGUCCGUUAUCAA | 25368 |
| | SpCas9-_NG_ | CUUGAAAAAGUGGCACCGAGUCGGUGCUUCAGUCCCUUUCUCGUCGAUGGUCAGCACAGCCUUAU | |
| | SpRY_ | | |
| | ED15-_14FE_ | | |
| | PB8 | | |
| 490 | A1AT_ | AGGCCGUGCAUAAGGCUGUGGUUUUAGAGCUAGAAAUAGCAAGUUAAAAUAAGGCUAGUCCGUUAUCAA | 25369 |
| | SpCas9-_NG_ | CUUGAAAAAGUGGCACCGAGUCGGUGCAGUCCCUUUCUCGUCGAUGGUCAGCACAGCCUUAUGCACGGCC | |
| | SpRY_ | U | |
| | ED15-_11FE_ | | |
| | PB17 | | |
| 491 | A1AT_ | AGGCCGUGCAUAAGGCUGUGGUUUUAGAGCUAGAAAUAGCAAGUUAAAAUAAGGCUAGUCCGUUAUCAA | 25370 |
| | SpCas9-_NG_ | CUUGAAAAAGUGGCACCGAGUCGGUGCAGUCCCUUUCUCGUCGAUGGUCAGCACAGCCUUAUGCACGGCC | |
| | SpRY_ | | |
| | ED15-_11FE_ | | |
| | PB16 | | |
| 492 | A1AT_ | AGGCCGUGCAUAAGGCUGUGGUUUUAGAGCUAGAAAUAGCAAGUUAAAAUAAGGCUAGUCCGUUAUCAA | 25371 |
| | SpCas9-_NG_ | CUUGAAAAAGUGGCACCGAGUCGGUGCAGUCCCUUUCUCGUCGAUGGUCAGCACAGCCUUAUGCACGGC | |
| | SpRY_ | | |
| | ED15-_11FE_ | | |
| | PB15 | | |
| 493 | A1AT_ | AGGCCGUGCAUAAGGCUGUGGUUUUAGAGCUAGAAAUAGCAAGUUAAAAUAAGGCUAGUCCGUUAUCAA | 25372 |
| | SpCas9-_NG_ | CUUGAAAAAGUGGCACCGAGUCGGUGCAGUCCCUUUCUCGUCGAUGGUCAGCACAGCCUUAUGCACGG | |
| | SpRY_ | | |
| | ED15-_11FE_ | | |
| | PB14 | | |
| 494 | A1AT_ | AGGCCGUGCAUAAGGCUGUGGUUUUAGAGCUAGAAAUAGCAAGUUAAAAUAAGGCUAGUCCGUUAUCAA | 25373 |
| | SpCas9-_NG_ | CUUGAAAAAGUGGCACCGAGUCGGUGCAGUCCCUUUCUCGUCGAUGGUCAGCACAGCCUUAUGCACG | |
| | SpRY_ | | |
| | ED15-_11FE_ | | |
| | PB13 | | |
| 495 | A1AT_ | AGGCCGUGCAUAAGGCUGUGGUUUUAGAGCUAGAAAUAGCAAGUUAAAAUAAGGCUAGUCCGUUAUCAA | 25374 |
| | SpCas9-_NG_ | CUUGAAAAAGUGGCACCGAGUCGGUGCAGUCCCUUUCUCGUCGAUGGUCAGCACAGCCUUAUGCAC | |
| | SpRY_ | | |
| | ED15-_11FE_ | | |
| | PB12 | | |
| 496 | A1AT_ | AGGCCGUGCAUAAGGCUGUGGUUUUAGAGCUAGAAAUAGCAAGUUAAAAUAAGGCUAGUCCGUUAUCAA | 25375 |
| | SpCas9-_NG_ | CUUGAAAAAGUGGCACCGAGUCGGUGCAGUCCCUUUCUCGUCGAUGGUCAGCACAGCCUUAUGCA | |
| | SpRY_ | | |
| | ED15-_11FE_ | | |
| | PB11 | | |
| 497 | A1AT_ | AGGCCGUGCAUAAGGCUGUGGUUUUAGAGCUAGAAAUAGCAAGUUAAAAUAAGGCUAGUCCGUUAUCAA | 25376 |
| | SpCas9-_NG_ | CUUGAAAAAGUGGCACCGAGUCGGUGCAGUCCCUUUCUCGUCGAUGGUCAGCACAGCCUUAUGC | |
| | SpRY_ | | |
| | ED15-_11FE_ | | |
| | PB10 | | |
| 498 | A1AT_ | AGGCCGUGCAUAAGGCUGUGGUUUUAGAGCUAGAAAUAGCAAGUUAAAAUAAGGCUAGUCCGUUAUCAA | 25377 |
| | SpCas9-_NG_ | CUUGAAAAAGUGGCACCGAGUCGGUGCAGUCCCUUUCUCGUCGAUGGUCAGCACAGCCUUAUG | |
| | SpRY_ | | |
| | ED15-_11FE_ | | |
| | PB9 | | |
| 499 | A1AT_ | AGGCCGUGCAUAAGGCUGUGGUUUUAGAGCUAGAAAUAGCAAGUUAAAAUAAGGCUAGUCCGUUAUCAA | 25378 |
| | SpCas9-_NG_ | CUUGAAAAAGUGGCACCGAGUCGGUGCAGUCCCUUUCUCGUCGAUGGUCAGCACAGCCUUAU | |
| | SpRY_ | | |
| | ED15-_11FE_ | | |
| | PB8 | | |
| 500 | A1AT_ | AGGCCGUGCAUAAGGCUGUGGUUUUAGAGCUAGAAAUAGCAAGUUAAAAUAAGGCUAGUCCGUUAUCAA | 25379 |
| | SpCas9-_NG_ | CUUGAAAAAGUGGCACCGAGUCGGUGCUCCCUUUCUCGUCGAUGGUCAGCACAGCCUUAUGCACGGCCU | |
| | SpRY_ | | |
| | ED15-_9FE_ | | |
| | PB17 | | |
| 501 | A1AT_ | AGGCCGUGCAUAAGGCUGUGGUUUUAGAGCUAGAAAUAGCAAGUUAAAAUAAGGCUAGUCCGUUAUCAA | 25380 |
| | SpCas9-_NG_ | CUUGAAAAAGUGGCACCGAGUCGGUGCUCCCUUUCUCGUCGAUGGUCAGCACAGCCUUAUGCACGGCC | |
| | SpRY_ | | |
| | ED15-_9FE_ | | |
| | PB16 | | |
| 502 | A1AT_ | AGGCCGUGCAUAAGGCUGUGGUUUUAGAGCUAGAAAUAGCAAGUUAAAAUAAGGCUAGUCCGUUAUCAA | 25381 |
| | SpCas9-_NG_ | CUUGAAAAAGUGGCACCGAGUCGGUGCUCCCUUUCUCGUCGAUGGUCAGCACAGCCUUAUGCACGGC | |
| | SpRY_ | | |
| | ED15-_9FE_ | | |
| | PB15 | | |
| 503 | A1AT_ | AGGCCGUGCAUAAGGCUGUGGUUUUAGAGCUAGAAAUAGCAAGUUAAAAUAAGGCUAGUCCGUUAUCAA | 25382 |
| | SpCas9-_NG_ | CUUGAAAAAGUGGCACCGAGUCGGUGCUCCCUUUCUCGUCGAUGGUCAGCACAGCCUUAUGCACGG | |
| | SpRY_ | | |
| | ED15-_9FE_ | | |
| | PB14 | | |
| 504 | A1AT_ | AGGCCGUGCAUAAGGCUGUGGUUUUAGAGCUAGAAAUAGCAAGUUAAAAUAAGGCUAGUCCGUUAUCAA | 25383 |
| | SpCas9-_NG_ | CUUGAAAAAGUGGCACCGAGUCGGUGCUCCCUUUCUCGUCGAUGGUCAGCACAGCCUUAUGCACG | |
| | SpRY_ | | |
| | ED15-_9FE_ | | |
| | PB13 | | |
| 505 | A1AT_ | AGGCCGUGCAUAAGGCUGUGGUUUUAGAGCUAGAAAUAGCAAGUUAAAAUAAGGCUAGUCCGUUAUCAA | 25384 |
| | SpCas9-_NG_ | CUUGAAAAAGUGGCACCGAGUCGGUGCUCCCUUUCUCGUCGAUGGUCAGCACAGCCUUAUGCAC | |
| | SpRY_ | | |
| | ED15-_9FE_ | | |
| | PB12 | | |
| 506 | A1AT_ | AGGCCGUGCAUAAGGCUGUGGUUUUAGAGCUAGAAAUAGCAAGUUAAAAUAAGGCUAGUCCGUUAUCAA | 25385 |
| | SpCas9-_NG_ | CUUGAAAAAGUGGCACCGAGUCGGUGCUCCCUUUCUCGUCGAUGGUCAGCACAGCCUUAUGCA | |
| | SpRY_ | | |
| | ED15-_9FE_ | | |
| | PB11 | | |
| 507 | A1AT_ | AGGCCGUGCAUAAGGCUGUGGUUUUAGAGCUAGAAAUAGCAAGUUAAAAUAAGGCUAGUCCGUUAUCAA | 25386 |
| | SpCas9-_NG_ | CUUGAAAAAGUGGCACCGAGUCGGUGCUCCCUUUCUCGUCGAUGGUCAGCACAGCCUUAUGC | |
| | SpRY_ | | |
| | ED15-_9FE_ | | |
| | PB10 | | |
| 508 | A1AT_ | AGGCCGUGCAUAAGGCUGUGGUUUUAGAGCUAGAAAUAGCAAGUUAAAAUAAGGCUAGUCCGUUAUCAA | 25387 |
| | SpCas9-_NG_ | CUUGAAAAAGUGGCACCGAGUCGGUGCUCCCUUUCUCGUCGAUGGUCAGCACAGCCUUAUG | |
| | SpRY_ | | |
| | ED15-_9FE_ | | |
| | PB9 | | |
| 509 | A1AT_ | AGGCCGUGCAUAAGGCUGUGGUUUUAGAGCUAGAAAUAGCAAGUUAAAAUAAGGCUAGUCCGUUAUCAA | 25388 |
| | SpCas9-_NG_ | CUUGAAAAAGUGGCACCGAGUCGGUGCUCCCUUUCUCGUCGAUGGUCAGCACAGCCUUAU | |
| | SpRY_ | | |
| | ED15-_9FE_ | | |
| | PB8 | | |
| 510 | A1AT_ | AGGCCGUGCAUAAGGCUGUGGUUUUAGAGCUAGAAAUAGCAAGUUAAAAUAAGGCUAGUCCGUUAUCAA | 25389 |
| | SpCas9-_NG_ | CUUGAAAAAGUGGCACCGAGUCGGUGCCCUUUCUCGUCGAUGGUCAGCACAGCCUUAUGCACGGCCU | |
| | SpRY_ | | |
| | ED15-_7FE_ | | |
| | PB17 | | |
| 511 | A1AT_ | AGGCCGUGCAUAAGGCUGUGGUUUUAGAGCUAGAAAUAGCAAGUUAAAAUAAGGCUAGUCCGUUAUCAA | 25390 |
| | SpCas9-_NG_ | CUUGAAAAAGUGGCACCGAGUCGGUGCCCUUUCUCGUCGAUGGUCAGCACAGCCUUAUGCACGGCC | |
| | SpRY_ | | |
| | ED15-_7FE_ | | |
| | PB16 | | |
| 512 | A1AT_ | AGGCCGUGCAUAAGGCUGUGGUUUUAGAGCUAGAAAUAGCAAGUUAAAAUAAGGCUAGUCCGUUAUCAA | 25391 |
| | SpCas9-_NG_ | CUUGAAAAAGUGGCACCGAGUCGGUGCCCUUUCUCGUCGAUGGUCAGCACAGCCUUAUGCACGGC | |
| | SpRY_ | | |
| | ED15-_7FE_ | | |
| | PB15 | | |
| 513 | A1AT_ | AGGCCGUGCAUAAGGCUGUGGUUUUAGAGCUAGAAAUAGCAAGUUAAAAUAAGGCUAGUCCGUUAUCAA | 25392 |
| | SpCas9-_NG_ | CUUGAAAAAGUGGCACCGAGUCGGUGCCCUUUCUCGUCGAUGGUCAGCACAGCCUUAUGCACGG | |
| | SpRY_ | | |
| | ED15-_7FE_ | | |
| | PB14 | | |
| 514 | A1AT_ | AGGCCGUGCAUAAGGCUGUGGUUUUAGAGCUAGAAAUAGCAAGUUAAAAUAAGGCUAGUCCGUUAUCAA | 25393 |
| | SpCas9-_NG_ | CUUGAAAAAGUGGCACCGAGUCGGUGCCCUUUCUCGUCGAUGGUCAGCACAGCCUUAUGCACG | |
| | SpRY_ | | |
| | ED15-_7FE_ | | |
| | PB13 | | |
| 515 | A1AT_ | AGGCCGUGCAUAAGGCUGUGGUUUUAGAGCUAGAAAUAGCAAGUUAAAAUAAGGCUAGUCCGUUAUCAA | 25394 |
| | SpCas9-_NG_ | CUUGAAAAAGUGGCACCGAGUCGGUGCCCUUUCUCGUCGAUGGUCAGCACAGCCUUAUGCAC | |
| | SpRY_ | | |
| | ED15-_7FE_ | | |
| | PB12 | | |
| 516 | A1AT_ | AGGCCGUGCAUAAGGCUGUGGUUUUAGAGCUAGAAAUAGCAAGUUAAAAUAAGGCUAGUCCGUUAUCAA | 25395 |
| | SpCas9-_NG_ | CUUGAAAAAGUGGCACCGAGUCGGUGCCCUUUCUCGUCGAUGGUCAGCACAGCCUUAUGCA | |
| | SpRY_ | | |
| | ED15-_7FE_ | | |
| | PB11 | | |
| 517 | A1AT_ | AGGCCGUGCAUAAGGCUGUGGUUUUAGAGCUAGAAAUAGCAAGUUAAAAUAAGGCUAGUCCGUUAUCAA | 25396 |
| | SpCas9-_NG_ | CUUGAAAAAGUGGCACCGAGUCGGUGCCCUUUCUCGUCGAUGGUCAGCACAGCCUUAUGC | |
| | SpRY_ | | |
| | ED15-_7FE_ | | |
| | PB10 | | |
| 518 | A1AT_ | AGGCCGUGCAUAAGGCUGUGGUUUUAGAGCUAGAAAUAGCAAGUUAAAAUAAGGCUAGUCCGUUAUCAA | 25397 |
| | SpCas9-_NG_ | CUUGAAAAAGUGGCACCGAGUCGGUGCCCUUUCUCGUCGAUGGUCAGCACAGCCUUAUG | |
| | SpRY_ | | |
| | ED15-_7FE_ | | |
| | PB9 | | |
| 519 | A1AT_ | AGGCCGUGCAUAAGGCUGUGGUUUUAGAGCUAGAAAUAGCAAGUUAAAAUAAGGCUAGUCCGUUAUCAA | 25398 |
| | SpCas9-_NG_ | CUUGAAAAAGUGGCACCGAGUCGGUGCCCUUUCUCGUCGAUGGUCAGCACAGCCUUAU | |
| | SpRY_ | | |
| | ED15-_7FE_ | | |
| | PB8 | | |
| 520 | A1AT_ | AGGCCGUGCAUAAGGCUGUGGUUUUAGAGCUAGAAAUAGCAAGUUAAAAUAAGGCUAGUCCGUUAUCAA | 25399 |
| | SpCas9-_NG_ | CUUGAAAAAGUGGCACCGAGUCGGUGCUUUCUCGUCGAUGGUCAGCACAGCCUUAUGCACGGCCU | |
| | SpRY_ | | |
| | ED15-_5FE_ | | |
| | PB17 | | |
| 521 | A1AT_ | AGGCCGUGCAUAAGGCUGUGGUUUUAGAGCUAGAAAUAGCAAGUUAAAAUAAGGCUAGUCCGUUAUCAA | 25400 |
| | SpCas9-_NG_ | CUUGAAAAAGUGGCACCGAGUCGGUGCUUUCUCGUCGAUGGUCAGCACAGCCUUAUGCACGGCC | |
| | SpRY_ | | |
| | ED15-_5FE_ | | |
| | PB16 | | |
| 522 | A1AT_ | AGGCCGUGCAUAAGGCUGUGGUUUUAGAGCUAGAAAUAGCAAGUUAAAAUAAGGCUAGUCCGUUAUCAA | 25401 |
| | SpCas9-_NG_ | CUUGAAAAAGUGGCACCGAGUCGGUGCUUUCUCGUCGAUGGUCAGCACAGCCUUAUGCACGGC | |
| | SpRY_ | | |
| | ED15-_5FE_ | | |
| | PB15 | | |
| 523 | A1AT_ | AGGCCGUGCAUAAGGCUGUGGUUUUAGAGCUAGAAAUAGCAAGUUAAAAUAAGGCUAGUCCGUUAUCAA | 25402 |
| | SpCas9-_NG_ | CUUGAAAAAGUGGCACCGAGUCGGUGCUUUCUCGUCGAUGGUCAGCACAGCCUUAUGCACGG | |
| | SpRY_ | | |
| | ED15-_5FE_ | | |
| | PB14 | | |
| 524 | A1AT_ | AGGCCGUGCAUAAGGCUGUGGUUUUAGAGCUAGAAAUAGCAAGUUAAAAUAAGGCUAGUCCGUUAUCAA | 25403 |
| | SpCas9-_NG_ | CUUGAAAAAGUGGCACCGAGUCGGUGCUUUCUCGUCGAUGGUCAGCACAGCCUUAUGCACG | |
| | SpRY_ | | |
| | ED15-_5FE_ | | |
| | PB13 | | |
| 525 | A1AT_ | AGGCCGUGCAUAAGGCUGUGGUUUUAGAGCUAGAAAUAGCAAGUUAAAAUAAGGCUAGUCCGUUAUCAA | 25404 |
| | SpCas9-_NG_ | CUUGAAAAAGUGGCACCGAGUCGGUGCUUUCUCGUCGAUGGUCAGCACAGCCUUAUGCAC | |
| | SpRY_ | | |
| | ED15-_5FE_ | | |
| | PB12 | | |
| 526 | A1AT_ | AGGCCGUGCAUAAGGCUGUGGUUUUAGAGCUAGAAAUAGCAAGUUAAAAUAAGGCUAGUCCGUUAUCAA | 25405 |
| | SpCas9-_NG_ | CUUGAAAAAGUGGCACCGAGUCGGUGCUUUCUCGUCGAUGGUCAGCACAGCCUUAUGCA | |
| | SpRY_ | | |
| | ED15-_5FE_ | | |
| | PB11 | | |
| 527 | A1AT_ | AGGCCGUGCAUAAGGCUGUGGUUUUAGAGCUAGAAAUAGCAAGUUAAAAUAAGGCUAGUCCGUUAUCAA | 25406 |
| | SpCas9-_NG_ | CUUGAAAAAGUGGCACCGAGUCGGUGCUUUCUCGUCGAUGGUCAGCACAGCCUUAUGC | |
| | SpRY_ | | |
| | ED15-_5FE_ | | |
| | PB10 | | |
| 528 | A1AT_ | AGGCCGUGCAUAAGGCUGUGGUUUUAGAGCUAGAAAUAGCAAGUUAAAAUAAGGCUAGUCCGUUAUCAA | 25407 |
| | SpCas9-_NG_ | CUUGAAAAAGUGGCACCGAGUCGGUGCUUUCUCGUCGAUGGUCAGCACAGCCUUAUG | |
| | SpRY_ | | |
| | ED15-_5FE_ | | |
| | PB9 | | |
| 529 | A1AT_ | AGGCCGUGCAUAAGGCUGUGGUUUUAGAGCUAGAAAUAGCAAGUUAAAAUAAGGCUAGUCCGUUAUCAA | 25408 |
| | SpCas9-_NG_ | CUUGAAAAAGUGGCACCGAGUCGGUGCUUUCUCGUCGAUGGUCAGCACAGCCUUAU | |
| | SpRY_ | | |
| | ED15-_5FE_ | | |
| | PB8 | | |
| 530 | A1AT_ | AGGCCGUGCAUAAGGCUGUGGUUUUAGAGCUAGAAAUAGCAAGUUAAAAUAAGGCUAGUCCGUUAUCAA | 25409 |
| | SpCas9-_NG_ | CUUGAAAAAGUGGCACCGAGUCGGUGCUCUCGUCGAUGGUCAGCACAGCCUUAUGCACGGCCU | |
| | SpRY_ | | |
| | ED15-_3FE_ | | |
| | PB17 | | |
| 531 | A1AT_ | AGGCCGUGCAUAAGGCUGUGGUUUUAGAGCUAGAAAUAGCAAGUUAAAAUAAGGCUAGUCCGUUAUCAA | 25410 |
| | SpCas9-_NG_ | CUUGAAAAAGUGGCACCGAGUCGGUGCUCUCGUCGAUGGUCAGCACAGCCUUAUGCACGGCC | |
| | SpRY_ | | |
| | ED15-_3FE_ | | |
| | PB16 | | |
| 532 | A1AT_ | AGGCCGUGCAUAAGGCUGUGGUUUUAGAGCUAGAAAUAGCAAGUUAAAAUAAGGCUAGUCCGUUAUCAA | 25411 |
| | SpCas9-_NG_ | CUUGAAAAAGUGGCACCGAGUCGGUGCUCUCGUCGAUGGUCAGCACAGCCUUAUGCACGGC | |
| | SpRY_ | | |
| | ED15-_3FE_ | | |
| | PB15 | | |
| 533 | A1AT_ | AGGCCGUGCAUAAGGCUGUGGUUUUAGAGCUAGAAAUAGCAAGUUAAAAUAAGGCUAGUCCGUUAUCAA | 25412 |
| | SpCas9-_NG_ | CUUGAAAAAGUGGCACCGAGUCGGUGCUCUCGUCGAUGGUCAGCACAGCCUUAUGCACGG | |
| | SpRY_ | | |
| | ED15-_3FE_ | | |
| | PB14 | | |
| 534 | A1AT_ | AGGCCGUGCAUAAGGCUGUGGUUUUAGAGCUAGAAAUAGCAAGUUAAAAUAAGGCUAGUCCGUUAUCAA | 25413 |
| | SpCas9-_NG_ | CUUGAAAAAGUGGCACCGAGUCGGUGCUCUCGUCGAUGGUCAGCACAGCCUUAUGCACG | |
| | SpRY_ | | |
| | ED15-_3FE_ | | |
| | PB13 | | |
| 535 | A1AT_ | AGGCCGUGCAUAAGGCUGUGGUUUUAGAGCUAGAAAUAGCAAGUUAAAAUAAGGCUAGUCCGUUAUCAA | 25414 |
| | SpCas9-_NG_ | CUUGAAAAAGUGGCACCGAGUCGGUGCUCUCGUCGAUGGUCAGCACAGCCUUAUGCAC | |
| | SpRY_ | | |
| | ED15-_3FE_ | | |
| | PB12 | | |
| 536 | A1AT_ | AGGCCGUGCAUAAGGCUGUGGUUUUAGAGCUAGAAAUAGCAAGUUAAAAUAAGGCUAGUCCGUUAUCAA | 25415 |
| | SpCas9-_NG_ | CUUGAAAAAGUGGCACCGAGUCGGUGCUCUCGUCGAUGGUCAGCACAGCCUUAUGCA | |
| | SpRY_ | | |
| | ED15-_ | | |
| | 3FE_ | | |
| | PB11 | | |
| 537 | A1AT_ | AGGCCGUGCAUAAGGCUGUGGUUUUAGAGCUAGAAAUAGCAAGUUAAAAUAAGGCUAGUCCGUUAUCAA | 25416 |
| | SpCas9-_NG_ | CUUGAAAAAGUGGCACCGAGUCGGUGCUCUCGUCGAUGGUCAGCACAGCCUUAUGC | |
| | SpRY_ | | |
| | ED15-_3FE_ | | |
| | PB10 | | |
| 538 | A1AT_ | AGGCCGUGCAUAAGGCUGUGGUUUUAGAGCUAGAAAUAGCAAGUUAAAAUAAGGCUAGUCCGUUAUCAA | 25417 |
| | SpCas9-_NG_ | CUUGAAAAAGUGGCACCGAGUCGGUGCUCUCGUCGAUGGUCAGCACAGCCUUAUG | |
| | SpRY_ | | |
| | ED15-_3FE_ | | |
| | PB9 | | |
| 539 | A1AT_ | AGGCCGUGCAUAAGGCUGUGGUUUUAGAGCUAGAAAUAGCAAGUUAAAAUAAGGCUAGUCCGUUAUCAA | 25418 |
| | SpCas9-_NG_ | CUUGAAAAAGUGGCACCGAGUCGGUGCUCUCGUCGAUGGUCAGCACAGCCUUAU | |
| | SpRY_ | | |
| | ED15-_3FE_ | | |
| | PB8 | | |
| 540 | A1AT_ | UCCAGGCCGUGCAUAAGGCUGUGGUUGUAGCUCCCGAAACGUUGCUACAAUAAGGCCGUCUGAAAAGAUG | 25419 |
| | Nme2_ED15-_G_ | UGCCGCAACGCUCUGCCCCUUAAAGCUUCUGCUUUAAGGGGCAUCGUUACAUGGCCCCAGCAGCUUCAGU | |
| | 30FE_ | CCCUUUCUCGUCGAUGGUCAGCACAGCCUUAUGCACGGCCU | |
| | PB17 | | |
| 541 | A1AT_ | UCCAGGCCGUGCAUAAGGCUGUGGUUGUAGCUCCCGAAACGUUGCUACAAUAAGGCCGUCUGAAAAGAUG | 25420 |
| | Nme2_ED15-_G_ | UGCCGCAACGCUCUGCCCCUUAAAGCUUCUGCUUUAAGGGGCAUCGUUACAUGGCCCCAGCAGCUUCAGU | |
| | 30FE_ | CCCUUUCUCGUCGAUGGUCAGCACAGCCUUAUGCACGGCC | |
| | PB16 | | |
| 542 | A1AT_ | UCCAGGCCGUGCAUAAGGCUGUGGUUGUAGCUCCCGAAACGUUGCUACAAUAAGGCCGUCUGAAAAGAUG | 25421 |
| | Nme2_ED15-_G_ | UGCCGCAACGCUCUGCCCCUUAAAGCUUCUGCUUUAAGGGGCAUCGUUACAUGGCCCCAGCAGCUUCAGU | |
| | 30FE_ | CCCUUUCUCGUCGAUGGUCAGCACAGCCUUAUGCACGGC | |
| | PB15 | | |
| 543 | A1AT_ | UCCAGGCCGUGCAUAAGGCUGUGGUUGUAGCUCCCGAAACGUUGCUACAAUAAGGCCGUCUGAAAAGAUG | 25422 |
| | Nme2_ED15-_G_ | UGCCGCAACGCUCUGCCCCUUAAAGCUUCUGCUUUAAGGGGCAUCGUUACAUGGCCCCAGCAGCUUCAGU | |
| | 30FE_ | CCCUUUCUCGUCGAUGGUCAGCACAGCCUUAUGCACGG | |
| | PB14 | | |
| 544 | A1AT_ | UCCAGGCCGUGCAUAAGGCUGUGGUUGUAGCUCCCGAAACGUUGCUACAAUAAGGCCGUCUGAAAAGAUG | 25423 |
| | Nme2_ED15-_G_ | UGCCGCAACGCUCUGCCCCUUAAAGCUUCUGCUUUAAGGGGCAUCGUUACAUGGCCCCAGCAGCUUCAGU | |
| | 30FE_ | CCCUUUCUCGUCGAUGGUCAGCACAGCCUUAUGCACG | |
| | PB13 | | |
| 545 | A1AT_ | UCCAGGCCGUGCAUAAGGCUGUGGUUGUAGCUCCCGAAACGUUGCUACAAUAAGGCCGUCUGAAAAGAUG | 25424 |
| | Nme2_ED15-_G_ | UGCCGCAACGCUCUGCCCCUUAAAGCUUCUGCUUUAAGGGGCAUCGUUACAUGGCCCCAGCAGCUUCAGU | |
| | 30FE_ | CCCUUUCUCGUCGAUGGUCAGCACAGCCUUAUGCAC | |
| | PB12 | | |
| 546 | A1AT_ | UCCAGGCCGUGCAUAAGGCUGUGGUUGUAGCUCCCGAAACGUUGCUACAAUAAGGCCGUCUGAAAAGAUG | 25425 |
| | Nme2_ED15-_G_ | UGCCGCAACGCUCUGCCCCUUAAAGCUUCUGCUUUAAGGGGCAUCGUUACAUGGCCCCAGCAGCUUCAGU | |
| | 30FE_ | CCCUUUCUCGUCGAUGGUCAGCACAGCCUUAUGCA | |
| | PB11 | | |
| 547 | A1AT_ | UCCAGGCCGUGCAUAAGGCUGUGGUUGUAGCUCCCGAAACGUUGCUACAAUAAGGCCGUCUGAAAAGAUG | 25426 |
| | Nme2_ED15-_G_ | UGCCGCAACGCUCUGCCCCUUAAAGCUUCUGCUUUAAGGGGCAUCGUUACAUGGCCCCAGCAGCUUCAGU | |
| | 30FE_ | CCCUUUCUCGUCGAUGGUCAGCACAGCCUUAUGC | |
| | PB10 | | |
| 548 | A1AT_ | UCCAGGCCGUGCAUAAGGCUGUGGUUGUAGCUCCCGAAACGUUGCUACAAUAAGGCCGUCUGAAAAGAUG | 25427 |
| | Nme2_ED15-_G_ | UGCCGCAACGCUCUGCCCCUUAAAGCUUCUGCUUUAAGGGGCAUCGUUACAUGGCCCCAGCAGCUUCAGU | |
| | 30FE_ | CCCUUUCUCGUCGAUGGUCAGCACAGCCUUAUG | |
| | PB9 | | |
| 549 | A1AT_ | UCCAGGCCGUGCAUAAGGCUGUGGUUGUAGCUCCCGAAACGUUGCUACAAUAAGGCCGUCUGAAAAGAUG | 25428 |
| | Nme2_ED15-_G_ | UGCCGCAACGCUCUGCCCCUUAAAGCUUCUGCUUUAAGGGGCAUCGUUACAUGGCCCCAGCAGCUUCAGU | |
| | 30FE_ | CCCUUUCUCGUCGAUGGUCAGCACAGCCUUAU | |
| | PB8 | | |
| 550 | A1AT_ | UCCAGGCCGUGCAUAAGGCUGUGGUUGUAGCUCCCGAAACGUUGCUACAAUAAGGCCGUCUGAAAAGAUG | 25429 |
| | Nme2_ED15-_G_ | UGCCGCAACGCUCUGCCCCUUAAAGCUUCUGCUUUAAGGGGCAUCGUUGCCCCAGCAGCUUCAGUCCCUU | |
| | 25FE_ | UCUCGUCGAUGGUCAGCACAGCCUUAUGCACGGCCU | |
| | PB17 | | |
| 551 | A1AT_ | UCCAGGCCGUGCAUAAGGCUGUGGUUGUAGCUCCCGAAACGUUGCUACAAUAAGGCCGUCUGAAAAGAUG | 25430 |
| | Nme2_ED15-_G_ | UGCCGCAACGCUCUGCCCCUUAAAGCUUCUGCUUUAAGGGGCAUCGUUGCCCCAGCAGCUUCAGUCCCUU | |
| | 25FE_ | UCUCGUCGAUGGUCAGCACAGCCUUAUGCACGGCC | |
| | PB16 | | |
| 552 | A1AT_ | UCCAGGCCGUGCAUAAGGCUGUGGUUGUAGCUCCCGAAACGUUGCUACAAUAAGGCCGUCUGAAAAGAUG | 25431 |
| | Nme2_ED15-_G_ | UGCCGCAACGCUCUGCCCCUUAAAGCUUCUGCUUUAAGGGGCAUCGUUGCCCCAGCAGCUUCAGUCCCUU | |
| | 25FE_ | UCUCGUCGAUGGUCAGCACAGCCUUAUGCACGGC | |
| | PB15 | | |
| 553 | A1AT_ | UCCAGGCCGUGCAUAAGGCUGUGGUUGUAGCUCCCGAAACGUUGCUACAAUAAGGCCGUCUGAAAAGAUG | 25432 |
| | Nme2_ED15-_G_ | UGCCGCAACGCUCUGCCCCUUAAAGCUUCUGCUUUAAGGGGCAUCGUUGCCCCAGCAGCUUCAGUCCCUU | |
| | 25FE_ | UCUCGUCGAUGGUCAGCACAGCCUUAUGCACGG | |
| | PB14 | | |
| 554 | A1AT_ | UCCAGGCCGUGCAUAAGGCUGUGGUUGUAGCUCCCGAAACGUUGCUACAAUAAGGCCGUCUGAAAAGAUG | 25433 |
| | Nme2_ED15-_G_ | UGCCGCAACGCUCUGCCCCUUAAAGCUUCUGCUUUAAGGGGCAUCGUUGCCCCAGCAGCUUCAGUCCCUU | |
| | 25FE_ | UCUCGUCGAUGGUCAGCACAGCCUUAUGCACG | |
| | PB13 | | |
| 555 | A1AT_ | UCCAGGCCGUGCAUAAGGCUGUGGUUGUAGCUCCCGAAACGUUGCUACAAUAAGGCCGUCUGAAAAGAUG | 25434 |
| | Nme2_ED15-_G_ | UGCCGCAACGCUCUGCCCCUUAAAGCUUCUGCUUUAAGGGGCAUCGUUGCCCCAGCAGCUUCAGUCCCUU | |
| | 25FE_ | UCUCGUCGAUGGUCAGCACAGCCUUAUGCAC | |
| | PB12 | | |
| 556 | A1AT_ | UCCAGGCCGUGCAUAAGGCUGUGGUUGUAGCUCCCGAAACGUUGCUACAAUAAGGCCGUCUGAAAAGAUG | 25435 |
| | Nme2_ED15-_G_ | UGCCGCAACGCUCUGCCCCUUAAAGCUUCUGCUUUAAGGGGCAUCGUUGCCCCAGCAGCUUCAGUCCCUU | |
| | 25FE_ | UCUCGUCGAUGGUCAGCACAGCCUUAUGCA | |
| | PB11 | | |
| 557 | A1AT_ | UCCAGGCCGUGCAUAAGGCUGUGGUUGUAGCUCCCGAAACGUUGCUACAAUAAGGCCGUCUGAAAAGAUG | 25436 |
| | Nme2_ED15-_G_ | UGCCGCAACGCUCUGCCCCUUAAAGCUUCUGCUUUAAGGGGCAUCGUUGCCCCAGCAGCUUCAGUCCCUU | |
| | 25FE_ | UCUCGUCGAUGGUCAGCACAGCCUUAUGC | |
| | PB10 | | |
| 558 | A1AT_ | UCCAGGCCGUGCAUAAGGCUGUGGUUGUAGCUCCCGAAACGUUGCUACAAUAAGGCCGUCUGAAAAGAUG | 25437 |
| | Nme2_ED15-_G_ | UGCCGCAACGCUCUGCCCCUUAAAGCUUCUGCUUUAAGGGGCAUCGUUGCCCCAGCAGCUUCAGUCCCUU | |
| | 25FE_ | UCUCGUCGAUGGUCAGCACAGCCUUAUG | |
| | PB9 | | |
| 559 | A1AT_ | UCCAGGCCGUGCAUAAGGCUGUGGUUGUAGCUCCCGAAACGUUGCUACAAUAAGGCCGUCUGAAAAGAUG | 25438 |
| | Nme2_ED15-_G_ | UGCCGCAACGCUCUGCCCCUUAAAGCUUCUGCUUUAAGGGGCAUCGUUGCCCCAGCAGCUUCAGUCCCUU | |
| | 25FE_ | UCUCGUCGAUGGUCAGCACAGCCUUAU | |
| | PB8 | | |
| 560 | A1AT_ | UCCAGGCCGUGCAUAAGGCUGUGGUUGUAGCUCCCGAAACGUUGCUACAAUAAGGCCGUCUGAAAAGAUG | 25439 |
| | Nme2_ED15-_G_ | UGCCGCAACGCUCUGCCCCUUAAAGCUUCUGCUUUAAGGGGCAUCGUUAGCAGCUUCAGUCCCUUUCUCG | |
| | 20FE_ | UCGAUGGUCAGCACAGCCUUAUGCACGGCCU | |
| | PB17 | | |
| 561 | A1AT_ | UCCAGGCCGUGCAUAAGGCUGUGGUUGUAGCUCCCGAAACGUUGCUACAAUAAGGCCGUCUGAAAAGAUG | 25440 |
| | Nme2_ED15-_G_ | UGCCGCAACGCUCUGCCCCUUAAAGCUUCUGCUUUAAGGGGCAUCGUUAGCAGCUUCAGUCCCUUUCUCG | |
| | 20FE_ | UCGAUGGUCAGCACAGCCUUAUGCACGGCC | |
| | PB16 | | |
| 562 | A1AT_ | UCCAGGCCGUGCAUAAGGCUGUGGUUGUAGCUCCCGAAACGUUGCUACAAUAAGGCCGUCUGAAAAGAUG | 25441 |
| | Nme2_ED15-_G_ | UGCCGCAACGCUCUGCCCCUUAAAGCUUCUGCUUUAAGGGGCAUCGUUAGCAGCUUCAGUCCCUUUCUCG | |
| | 20FE_ | UCGAUGGUCAGCACAGCCUUAUGCACGGC | |
| | PB15 | | |
| 563 | A1AT_ | UCCAGGCCGUGCAUAAGGCUGUGGUUGUAGCUCCCGAAACGUUGCUACAAUAAGGCCGUCUGAAAAGAUG | 25442 |
| | Nme2_ED15-_G_ | UGCCGCAACGCUCUGCCCCUUAAAGCUUCUGCUUUAAGGGGCAUCGUUAGCAGCUUCAGUCCCUUUCUCG | |
| | 20FE_ | UCGAUGGUCAGCACAGCCUUAUGCACGG | |
| | PB14 | | |
| 564 | A1AT_ | UCCAGGCCGUGCAUAAGGCUGUGGUUGUAGCUCCCGAAACGUUGCUACAAUAAGGCCGUCUGAAAAGAUG | 25443 |
| | Nme2_ED15-_G_ | UGCCGCAACGCUCUGCCCCUUAAAGCUUCUGCUUUAAGGGGCAUCGUUAGCAGCUUCAGUCCCUUUCUCG | |
| | 20FE_ | UCGAUGGUCAGCACAGCCUUAUGCACG | |
| | PB13 | | |
| 565 | A1AT_ | UCCAGGCCGUGCAUAAGGCUGUGGUUGUAGCUCCCGAAACGUUGCUACAAUAAGGCCGUCUGAAAAGAUG | 25444 |
| | Nme2_ED15-_G_ | UGCCGCAACGCUCUGCCCCUUAAAGCUUCUGCUUUAAGGGGCAUCGUUAGCAGCUUCAGUCCCUUUCUCG | |
| | 20FE_ | UCGAUGGUCAGCACAGCCUUAUGCAC | |
| | PB12 | | |
| 566 | A1AT_ | UCCAGGCCGUGCAUAAGGCUGUGGUUGUAGCUCCCGAAACGUUGCUACAAUAAGGCCGUCUGAAAAGAUG | 25445 |
| | Nme2_ED15-_G_ | UGCCGCAACGCUCUGCCCCUUAAAGCUUCUGCUUUAAGGGGCAUCGUUAGCAGCUUCAGUCCCUUUCUCG | |
| | 20FE_ | UCGAUGGUCAGCACAGCCUUAUGCA | |
| | PB11 | | |
| 567 | A1AT_ | UCCAGGCCGUGCAUAAGGCUGUGGUUGUAGCUCCCGAAACGUUGCUACAAUAAGGCCGUCUGAAAAGAUG | 25446 |
| | Nme2_ED15-_G_ | UGCCGCAACGCUCUGCCCCUUAAAGCUUCUGCUUUAAGGGGCAUCGUUAGCAGCUUCAGUCCCUUUCUCG | |
| | 20FE_ | UCGAUGGUCAGCACAGCCUUAUGC | |
| | PB10 | | |
| 568 | A1AT_ | UCCAGGCCGUGCAUAAGGCUGUGGUUGUAGCUCCCGAAACGUUGCUACAAUAAGGCCGUCUGAAAAGAUG | 25447 |
| | Nme2_ED15-_G_ | UGCCGCAACGCUCUGCCCCUUAAAGCUUCUGCUUUAAGGGGCAUCGUUAGCAGCUUCAGUCCCUUUCUCG | |
| | 20FE_ | UCGAUGGUCAGCACAGCCUUAUG | |
| | PB9 | | |
| 569 | A1AT_ | UCCAGGCCGUGCAUAAGGCUGUGGUUGUAGCUCCCGAAACGUUGCUACAAUAAGGCCGUCUGAAAAGAUG | 25448 |
| | Nme2_ED15-_G_ | UGCCGCAACGCUCUGCCCCUUAAAGCUUCUGCUUUAAGGGGCAUCGUUAGCAGCUUCAGUCCCUUUCUCG | |
| | 20FE_ | UCGAUGGUCAGCACAGCCUUAU | |
| | PB8 | | |
| 570 | A1AT_ | UCCAGGCCGUGCAUAAGGCUGUGGUUGUAGCUCCCGAAACGUUGCUACAAUAAGGCCGUCUGAAAAGAUG | 25449 |
| | Nme2_ED15-_G_ | UGCCGCAACGCUCUGCCCCUUAAAGCUUCUGCUUUAAGGGGCAUCGUUUUCAGUCCCUUUCUCGUCGAUG | |
| | 14FE_ | GUCAGCACAGCCUUAUGCACGGCCU | |
| | PB17 | | |
| 571 | A1AT_ | UCCAGGCCGUGCAUAAGGCUGUGGUUGUAGCUCCCGAAACGUUGCUACAAUAAGGCCGUCUGAAAAGAUG | 25450 |
| | Nme2_ED15-_G_ | UGCCGCAACGCUCUGCCCCUUAAAGCUUCUGCUUUAAGGGGCAUCGUUUUCAGUCCCUUUCUCGUCGAUG | |
| | 14FE_ | GUCAGCACAGCCUUAUGCACGGCC | |
| | PB16 | | |
| 572 | A1AT_ | UCCAGGCCGUGCAUAAGGCUGUGGUUGUAGCUCCCGAAACGUUGCUACAAUAAGGCCGUCUGAAAAGAUG | 25451 |
| | Nme2_ED15-_G_ | UGCCGCAACGCUCUGCCCCUUAAAGCUUCUGCUUUAAGGGGCAUCGUUUUCAGUCCCUUUCUCGUCGAUG | |
| | 14FE_ | GUCAGCACAGCCUUAUGCACGGC | |
| | PB15 | | |
| 573 | A1AT_ | UCCAGGCCGUGCAUAAGGCUGUGGUUGUAGCUCCCGAAACGUUGCUACAAUAAGGCCGUCUGAAAAGAUG | 25452 |
| | Nme2_ED15-_G_ | UGCCGCAACGCUCUGCCCCUUAAAGCUUCUGCUUUAAGGGGCAUCGUUUUCAGUCCCUUUCUCGUCGAUG | |
| | 14FE_ | GUCAGCACAGCCUUAUGCACGG | |
| | PB14 | | |
| 574 | A1AT_ | UCCAGGCCGUGCAUAAGGCUGUGGUUGUAGCUCCCGAAACGUUGCUACAAUAAGGCCGUCUGAAAAGAUG | 25453 |
| | Nme2_ED15-_G_ | UGCCGCAACGCUCUGCCCCUUAAAGCUUCUGCUUUAAGGGGCAUCGUUUUCAGUCCCUUUCUCGUCGAUG | |
| | 14FE_ | GUCAGCACAGCCUUAUGCACG | |
| | PB13 | | |
| 575 | A1AT_ | UCCAGGCCGUGCAUAAGGCUGUGGUUGUAGCUCCCGAAACGUUGCUACAAUAAGGCCGUCUGAAAAGAUG | 25454 |
| | Nme2_ED15-_G_ | UGCCGCAACGCUCUGCCCCUUAAAGCUUCUGCUUUAAGGGGCAUCGUUUUCAGUCCCUUUCUCGUCGAUG | |
| | 14FE_ | GUCAGCACAGCCUUAUGCAC | |
| | PB12 | | |
| 576 | A1AT_ | UCCAGGCCGUGCAUAAGGCUGUGGUUGUAGCUCCCGAAACGUUGCUACAAUAAGGCCGUCUGAAAAGAUG | 25455 |
| | Nme2_ED15-_G_ | UGCCGCAACGCUCUGCCCCUUAAAGCUUCUGCUUUAAGGGGCAUCGUUUUCAGUCCCUUUCUCGUCGAUG | |
| | 14FE_ | GUCAGCACAGCCUUAUGCA | |
| | PB11 | | |
| 577 | A1AT_ | UCCAGGCCGUGCAUAAGGCUGUGGUUGUAGCUCCCGAAACGUUGCUACAAUAAGGCCGUCUGAAAAGAUG | 25456 |
| | Nme2_ED_ | UGCCGCAACGCUCUGCCCCUUAAAGCUUCUGCUUUAAGGGGCAUCGUUUUCAGUCCCUUUCUCGUCGAUG | |
| | 15-_G_ | GUCAGCACAGCCUUAUGC | |
| | 14FE_ | | |
| | PB10 | | |
| 578 | A1AT_ | UCCAGGCCGUGCAUAAGGCUGUGGUUGUAGCUCCCGAAACGUUGCUACAAUAAGGCCGUCUGAAAAGAUG | 25457 |
| | Nme2_ED15-_G_ | UGCCGCAACGCUCUGCCCCUUAAAGCUUCUGCUUUAAGGGGCAUCGUUUUCAGUCCCUUUCUCGUCGAUG | |
| | 14FE_ | GUCAGCACAGCCUUAUG | |
| | PB9 | | |
| 579 | A1AT_ | UCCAGGCCGUGCAUAAGGCUGUGGUUGUAGCUCCCGAAACGUUGCUACAAUAAGGCCGUCUGAAAAGAUG | 25458 |
| | Nme2_ED15-_G_ | UGCCGCAACGCUCUGCCCCUUAAAGCUUCUGCUUUAAGGGGCAUCGUUUUCAGUCCCUUUCUCGUCGAUG | |
| | 14FE_ | GUCAGCACAGCCUUAU | |
| | PB8 | | |
| 580 | A1AT_ | UCCAGGCCGUGCAUAAGGCUGUGGUUGUAGCUCCCGAAACGUUGCUACAAUAAGGCCGUCUGAAAAGAUG | 25459 |
| | Nme2_ED15-_G_ | UGCCGCAACGCUCUGCCCCUUAAAGCUUCUGCUUUAAGGGGCAUCGUUAGUCCCUUUCUCGUCGAUGGUC | |
| | 11FE_ | AGCACAGCCUUAUGCACGGCCU | |
| | PB17 | | |
| 581 | A1AT_ | UCCAGGCCGUGCAUAAGGCUGUGGUUGUAGCUCCCGAAACGUUGCUACAAUAAGGCCGUCUGAAAAGAUG | 25460 |
| | Nme2_ED15-_G_ | UGCCGCAACGCUCUGCCCCUUAAAGCUUCUGCUUUAAGGGGCAUCGUUAGUCCCUUUCUCGUCGAUGGUC | |
| | 11FE_ | AGCACAGCCUUAUGCACGGCC | |
| | PB16 | | |
| 582 | A1AT_ | UCCAGGCCGUGCAUAAGGCUGUGGUUGUAGCUCCCGAAACGUUGCUACAAUAAGGCCGUCUGAAAAGAUG | 25461 |
| | Nme2_ED15-_G_ | UGCCGCAACGCUCUGCCCCUUAAAGCUUCUGCUUUAAGGGGCAUCGUUAGUCCCUUUCUCGUCGAUGGUC | |
| | 11FE_ | AGCACAGCCUUAUGCACGGC | |
| | PB15 | | |
| 583 | A1AT_ | UCCAGGCCGUGCAUAAGGCUGUGGUUGUAGCUCCCGAAACGUUGCUACAAUAAGGCCGUCUGAAAAGAUG | 25462 |
| | Nme2_ED15-_G_ | UGCCGCAACGCUCUGCCCCUUAAAGCUUCUGCUUUAAGGGGCAUCGUUAGUCCCUUUCUCGUCGAUGGUC | |
| | 11FE_ | AGCACAGCCUUAUGCACGG | |
| | PB14 | | |
| 584 | A1AT_ | UCCAGGCCGUGCAUAAGGCUGUGGUUGUAGCUCCCGAAACGUUGCUACAAUAAGGCCGUCUGAAAAGAUG | 25463 |
| | Nme2_ED15-_G_ | UGCCGCAACGCUCUGCCCCUUAAAGCUUCUGCUUUAAGGGGCAUCGUUAGUCCCUUUCUCGUCGAUGGUC | |
| | 11FE_ | AGCACAGCCUUAUGCACG | |
| | PB13 | | |
| 585 | A1AT_ | UCCAGGCCGUGCAUAAGGCUGUGGUUGUAGCUCCCGAAACGUUGCUACAAUAAGGCCGUCUGAAAAGAUG | 25464 |
| | Nme2_ED15-_G_ | UGCCGCAACGCUCUGCCCCUUAAAGCUUCUGCUUUAAGGGGCAUCGUUAGUCCCUUUCUCGUCGAUGGUC | |
| | 11FE_ | AGCACAGCCUUAUGCAC | |
| | PB12 | | |
| 586 | A1AT_ | UCCAGGCCGUGCAUAAGGCUGUGGUUGUAGCUCCCGAAACGUUGCUACAAUAAGGCCGUCUGAAAAGAUG | 25465 |
| | Nme2_ED15-_G_ | UGCCGCAACGCUCUGCCCCUUAAAGCUUCUGCUUUAAGGGGCAUCGUUAGUCCCUUUCUCGUCGAUGGUC | |
| | 11FE_ | AGCACAGCCUUAUGCA | |
| | PB11 | | |
| 587 | A1AT_ | UCCAGGCCGUGCAUAAGGCUGUGGUUGUAGCUCCCGAAACGUUGCUACAAUAAGGCCGUCUGAAAAGAUG | 25466 |
| | Nme2_ED15-_G_ | UGCCGCAACGCUCUGCCCCUUAAAGCUUCUGCUUUAAGGGGCAUCGUUAGUCCCUUUCUCGUCGAUGGUC | |
| | 11FE_ | AGCACAGCCUUAUGC | |
| | PB10 | | |
| 588 | A1AT_ | UCCAGGCCGUGCAUAAGGCUGUGGUUGUAGCUCCCGAAACGUUGCUACAAUAAGGCCGUCUGAAAAGAUG | 25467 |
| | Nme2_ED15-_G_ | UGCCGCAACGCUCUGCCCCUUAAAGCUUCUGCUUUAAGGGGCAUCGUUAGUCCCUUUCUCGUCGAUGGUC | |
| | 11FE_ | AGCACAGCCUUAUG | |
| | PB9 | | |
| 589 | A1AT_ | UCCAGGCCGUGCAUAAGGCUGUGGUUGUAGCUCCCGAAACGUUGCUACAAUAAGGCCGUCUGAAAAGAUG | 25468 |
| | Nme2_ED15-_G_ | UGCCGCAACGCUCUGCCCCUUAAAGCUUCUGCUUUAAGGGGCAUCGUUAGUCCCUUUCUCGUCGAUGGUC | |
| | 11FE_ | AGCACAGCCUUAU | |
| | PB8 | | |
| 590 | A1AT_ | UCCAGGCCGUGCAUAAGGCUGUGGUUGUAGCUCCCGAAACGUUGCUACAAUAAGGCCGUCUGAAAAGAUG | 25469 |
| | Nme2_ED15-_G_ | UGCCGCAACGCUCUGCCCCUUAAAGCUUCUGCUUUAAGGGGCAUCGUUUCCCUUUCUCGUCGAUGGUCAG | |
| | 9FE_ | CACAGCCUUAUGCACGGCCU | |
| | PB17 | | |
| 591 | A1AT_ | UCCAGGCCGUGCAUAAGGCUGUGGUUGUAGCUCCCGAAACGUUGCUACAAUAAGGCCGUCUGAAAAGAUG | 25470 |
| | Nme2_ED15-_G_ | UGCCGCAACGCUCUGCCCCUUAAAGCUUCUGCUUUAAGGGGCAUCGUUUCCCUUUCUCGUCGAUGGUCAG | |
| | 9FE_ | CACAGCCUUAUGCACGGCC | |
| | PB16 | | |
| 592 | A1AT_ | UCCAGGCCGUGCAUAAGGCUGUGGUUGUAGCUCCCGAAACGUUGCUACAAUAAGGCCGUCUGAAAAGAUG | 25471 |
| | Nme2_ED15-_G_ | UGCCGCAACGCUCUGCCCCUUAAAGCUUCUGCUUUAAGGGGCAUCGUUUCCCUUUCUCGUCGAUGGUCAG | |
| | 9FE_ | CACAGCCUUAUGCACGGC | |
| | PB15 | | |
| 593 | A1AT_ | UCCAGGCCGUGCAUAAGGCUGUGGUUGUAGCUCCCGAAACGUUGCUACAAUAAGGCCGUCUGAAAAGAUG | 25472 |
| | Nme2_ED_ | UGCCGCAACGCUCUGCCCCUUAAAGCUUCUGCUUUAAGGGGCAUCGUUUCCCUUUCUCGUCGAUGGUCAG | |
| | 15-_G_ | CACAGCCUUAUGCACGG | |
| | 9FE_ | | |
| | PB14 | | |
| 594 | A1AT_ | UCCAGGCCGUGCAUAAGGCUGUGGUUGUAGCUCCCGAAACGUUGCUACAAUAAGGCCGUCUGAAAAGAUG | 25473 |
| | Nme2_ED15-_G_ | UGCCGCAACGCUCUGCCCCUUAAAGCUUCUGCUUUAAGGGGCAUCGUUUCCCUUUCUCGUCGAUGGUCAG | |
| | 9FE_ | CACAGCCUUAUGCACG | |
| | PB13 | | |
| 595 | A1AT_ | UCCAGGCCGUGCAUAAGGCUGUGGUUGUAGCUCCCGAAACGUUGCUACAAUAAGGCCGUCUGAAAAGAUG | 25474 |
| | Nme2_ED15-_G_ | UGCCGCAACGCUCUGCCCCUUAAAGCUUCUGCUUUAAGGGGCAUCGUUUCCCUUUCUCGUCGAUGGUCAG | |
| | 9FE_ | CACAGCCUUAUGCAC | |
| | PB12 | | |
| 596 | A1AT_ | UCCAGGCCGUGCAUAAGGCUGUGGUUGUAGCUCCCGAAACGUUGCUACAAUAAGGCCGUCUGAAAAGAUG | 25475 |
| | Nme2_ED15-_G_ | UGCCGCAACGCUCUGCCCCUUAAAGCUUCUGCUUUAAGGGGCAUCGUUUCCCUUUCUCGUCGAUGGUCAG | |
| | 9FE_ | CACAGCCUUAUGCA | |
| | PB11 | | |
| 597 | A1AT_ | UCCAGGCCGUGCAUAAGGCUGUGGUUGUAGCUCCCGAAACGUUGCUACAAUAAGGCCGUCUGAAAAGAUG | 25476 |
| | Nme2_ED15-_G_ | UGCCGCAACGCUCUGCCCCUUAAAGCUUCUGCUUUAAGGGGCAUCGUUUCCCUUUCUCGUCGAUGGUCAG | |
| | 9FE_ | CACAGCCUUAUGC | |
| | PB10 | | |
| 598 | A1AT_ | UCCAGGCCGUGCAUAAGGCUGUGGUUGUAGCUCCCGAAACGUUGCUACAAUAAGGCCGUCUGAAAAGAUG | 25477 |
| | Nme2_ED15-_G_ | UGCCGCAACGCUCUGCCCCUUAAAGCUUCUGCUUUAAGGGGCAUCGUUUCCCUUUCUCGUCGAUGGUCAG | |
| | 9FE_ | CACAGCCUUAUG | |
| | PB9 | | |
| 599 | A1AT_ | UCCAGGCCGUGCAUAAGGCUGUGGUUGUAGCUCCCGAAACGUUGCUACAAUAAGGCCGUCUGAAAAGAUG | 25478 |
| | Nme2_ED15-_G_ | UGCCGCAACGCUCUGCCCCUUAAAGCUUCUGCUUUAAGGGGCAUCGUUUCCCUUUCUCGUCGAUGGUCAG | |
| | 9FE_ | CACAGCCUUAU | |
| | PB8 | | |
| 600 | A1AT_ | UCCAGGCCGUGCAUAAGGCUGUGGUUGUAGCUCCCGAAACGUUGCUACAAUAAGGCCGUCUGAAAAGAUG | 25479 |
| | Nme2_ED15-_G_ | UGCCGCAACGCUCUGCCCCUUAAAGCUUCUGCUUUAAGGGGCAUCGUUCCUUUCUCGUCGAUGGUCAGCA | |
| | 7FE_ | CAGCCUUAUGCACGGCCU | |
| | PB17 | | |
| 601 | A1AT_ | UCCAGGCCGUGCAUAAGGCUGUGGUUGUAGCUCCCGAAACGUUGCUACAAUAAGGCCGUCUGAAAAGAUG | 25480 |
| | Nme2_ED15-_G_ | UGCCGCAACGCUCUGCCCCUUAAAGCUUCUGCUUUAAGGGGCAUCGUUCCUUUCUCGUCGAUGGUCAGCA | |
| | 7FE_ | CAGCCUUAUGCACGGCC | |
| | PB16 | | |
| 602 | A1AT_ | UCCAGGCCGUGCAUAAGGCUGUGGUUGUAGCUCCCGAAACGUUGCUACAAUAAGGCCGUCUGAAAAGAUG | 25481 |
| | Nme2_ED15-_G_ | UGCCGCAACGCUCUGCCCCUUAAAGCUUCUGCUUUAAGGGGCAUCGUUCCUUUCUCGUCGAUGGUCAGCA | |
| | 7FE_ | CAGCCUUAUGCACGGC | |
| | PB15 | | |
| 603 | A1AT_ | UCCAGGCCGUGCAUAAGGCUGUGGUUGUAGCUCCCGAAACGUUGCUACAAUAAGGCCGUCUGAAAAGAUG | 25482 |
| | Nme2_ED15-_G_ | UGCCGCAACGCUCUGCCCCUUAAAGCUUCUGCUUUAAGGGGCAUCGUUCCUUUCUCGUCGAUGGUCAGCA | |
| | 7FE_ | CAGCCUUAUGCACGG | |
| | PB14 | | |
| 604 | A1AT_ | UCCAGGCCGUGCAUAAGGCUGUGGUUGUAGCUCCCGAAACGUUGCUACAAUAAGGCCGUCUGAAAAGAUG | 25483 |
| | Nme2_ED15-_G_ | UGCCGCAACGCUCUGCCCCUUAAAGCUUCUGCUUUAAGGGGCAUCGUUCCUUUCUCGUCGAUGGUCAGCA | |
| | 7FE_ | CAGCCUUAUGCACG | |
| | PB13 | | |
| 605 | A1AT_ | UCCAGGCCGUGCAUAAGGCUGUGGUUGUAGCUCCCGAAACGUUGCUACAAUAAGGCCGUCUGAAAAGAUG | 25484 |
| | Nme2_ED15-_G_ | UGCCGCAACGCUCUGCCCCUUAAAGCUUCUGCUUUAAGGGGCAUCGUUCCUUUCUCGUCGAUGGUCAGCA | |
| | 7FE_ | CAGCCUUAUGCAC | |
| | PB12 | | |
| 606 | A1AT_ | UCCAGGCCGUGCAUAAGGCUGUGGUUGUAGCUCCCGAAACGUUGCUACAAUAAGGCCGUCUGAAAAGAUG | 25485 |
| | Nme2_ED15-_G_ | UGCCGCAACGCUCUGCCCCUUAAAGCUUCUGCUUUAAGGGGCAUCGUUCCUUUCUCGUCGAUGGUCAGCA | |
| | 7FE_ | CAGCCUUAUGCA | |
| | PB11 | | |
| 607 | A1AT_ | UCCAGGCCGUGCAUAAGGCUGUGGUUGUAGCUCCCGAAACGUUGCUACAAUAAGGCCGUCUGAAAAGAUG | 25486 |
| | Nme2_ED15-_G_ | UGCCGCAACGCUCUGCCCCUUAAAGCUUCUGCUUUAAGGGGCAUCGUUCCUUUCUCGUCGAUGGUCAGCA | |
| | 7FE_ | CAGCCUUAUGC | |
| | PB10 | | |
| 608 | A1AT_ | UCCAGGCCGUGCAUAAGGCUGUGGUUGUAGCUCCCGAAACGUUGCUACAAUAAGGCCGUCUGAAAAGAUG | 25487 |
| | Nme2_ED15-_G_ | UGCCGCAACGCUCUGCCCCUUAAAGCUUCUGCUUUAAGGGGCAUCGUUCCUUUCUCGUCGAUGGUCAGCA | |
| | 7FE_ | CAGCCUUAUG | |
| | PB9 | | |
| 609 | A1AT_ | UCCAGGCCGUGCAUAAGGCUGUGGUUGUAGCUCCCGAAACGUUGCUACAAUAAGGCCGUCUGAAAAGAUG | 25488 |
| | Nme2_ED15-_G_ | UGCCGCAACGCUCUGCCCCUUAAAGCUUCUGCUUUAAGGGGCAUCGUUCCUUUCUCGUCGAUGGUCAGCA | |
| | 7FE_ | CAGCCUUAU | |
| | PB8 | | |
| 610 | A1AT_ | UCCAGGCCGUGCAUAAGGCUGUGGUUGUAGCUCCCGAAACGUUGCUACAAUAAGGCCGUCUGAAAAGAUG | 25489 |
| | Nme2_ED15-_G_ | UGCCGCAACGCUCUGCCCCUUAAAGCUUCUGCUUUAAGGGGCAUCGUUUUUCUCGUCGAUGGUCAGCACA | |
| | 5FE_ | GCCUUAUGCACGGCCU | |
| | PB17 | | |
| 611 | A1AT_ | UCCAGGCCGUGCAUAAGGCUGUGGUUGUAGCUCCCGAAACGUUGCUACAAUAAGGCCGUCUGAAAAGAUG | 25490 |
| | Nme2_ED15-_G_ | UGCCGCAACGCUCUGCCCCUUAAAGCUUCUGCUUUAAGGGGCAUCGUUUUUCUCGUCGAUGGUCAGCACA | |
| | 5FE_ | GCCUUAUGCACGGCC | |
| | PB16 | | |
| 612 | A1AT_ | UCCAGGCCGUGCAUAAGGCUGUGGUUGUAGCUCCCGAAACGUUGCUACAAUAAGGCCGUCUGAAAAGAUG | 25491 |
| | Nme2_ED15-_G_ | UGCCGCAACGCUCUGCCCCUUAAAGCUUCUGCUUUAAGGGGCAUCGUUUUUCUCGUCGAUGGUCAGCACA | |
| | 5FE_ | GCCUUAUGCACGGC | |
| | PB15 | | |
| 613 | A1AT_ | UCCAGGCCGUGCAUAAGGCUGUGGUUGUAGCUCCCGAAACGUUGCUACAAUAAGGCCGUCUGAAAAGAUG | 25492 |
| | Nme2_ED15-_G_ | UGCCGCAACGCUCUGCCCCUUAAAGCUUCUGCUUUAAGGGGCAUCGUUUUUCUCGUCGAUGGUCAGCACA | |
| | 5FE_ | GCCUUAUGCACGG | |
| | PB14 | | |
| 614 | A1AT_ | UCCAGGCCGUGCAUAAGGCUGUGGUUGUAGCUCCCGAAACGUUGCUACAAUAAGGCCGUCUGAAAAGAUG | 25493 |
| | Nme2_ED15-_G_ | UGCCGCAACGCUCUGCCCCUUAAAGCUUCUGCUUUAAGGGGCAUCGUUUUUCUCGUCGAUGGUCAGCACA | |
| | 5FE_ | GCCUUAUGCACG | |
| | PB13 | | |
| 615 | A1AT_ | UCCAGGCCGUGCAUAAGGCUGUGGUUGUAGCUCCCGAAACGUUGCUACAAUAAGGCCGUCUGAAAAGAUG | 25494 |
| | Nme2_ED15-_G_ | UGCCGCAACGCUCUGCCCCUUAAAGCUUCUGCUUUAAGGGGCAUCGUUUUUCUCGUCGAUGGUCAGCACA | |
| | 5FE_ | GCCUUAUGCAC | |
| | PB12 | | |
| 616 | A1AT_ | UCCAGGCCGUGCAUAAGGCUGUGGUUGUAGCUCCCGAAACGUUGCUACAAUAAGGCCGUCUGAAAAGAUG | 25495 |
| | Nme2_ED15-_G_ | UGCCGCAACGCUCUGCCCCUUAAAGCUUCUGCUUUAAGGGGCAUCGUUUUUCUCGUCGAUGGUCAGCACA | |
| | 5FE_ | GCCUUAUGCA | |
| | PB11 | | |
| 617 | A1AT_ | UCCAGGCCGUGCAUAAGGCUGUGGUUGUAGCUCCCGAAACGUUGCUACAAUAAGGCCGUCUGAAAAGAUG | 25496 |
| | Nme2_ED15-_G_ | UGCCGCAACGCUCUGCCCCUUAAAGCUUCUGCUUUAAGGGGCAUCGUUUUUCUCGUCGAUGGUCAGCACA | |
| | 5FE_ | GCCUUAUGC | |
| | PB10 | | |
| 618 | A1AT_ | UCCAGGCCGUGCAUAAGGCUGUGGUUGUAGCUCCCGAAACGUUGCUACAAUAAGGCCGUCUGAAAAGAUG | 25497 |
| | Nme2_ED15-_G_ | UGCCGCAACGCUCUGCCCCUUAAAGCUUCUGCUUUAAGGGGCAUCGUUUUUCUCGUCGAUGGUCAGCACA | |
| | 5FE_ | GCCUUAUG | |
| | PB9 | | |
| 619 | A1AT_ | UCCAGGCCGUGCAUAAGGCUGUGGUUGUAGCUCCCGAAACGUUGCUACAAUAAGGCCGUCUGAAAAGAUG | 25498 |
| | Nme2_ED15-_G_ | UGCCGCAACGCUCUGCCCCUUAAAGCUUCUGCUUUAAGGGGCAUCGUUUUUCUCGUCGAUGGUCAGCACA | |
| | 5FE_ | GCCUUAU | |
| | PB8 | | |
| 620 | A1AT_ | UCCAGGCCGUGCAUAAGGCUGUGGUUGUAGCUCCCGAAACGUUGCUACAAUAAGGCCGUCUGAAAAGAUG | 25499 |
| | Nme2_ED15-_G_ | UGCCGCAACGCUCUGCCCCUUAAAGCUUCUGCUUUAAGGGGCAUCGUUUCUCGUCGAUGGUCAGCACAGC | |
| | 3FE_ | CUUAUGCACGGCCU | |
| | PB17 | | |
| 621 | A1AT_ | UCCAGGCCGUGCAUAAGGCUGUGGUUGUAGCUCCCGAAACGUUGCUACAAUAAGGCCGUCUGAAAAGAUG | 25500 |
| | Nme2_ED15-_G_ | UGCCGCAACGCUCUGCCCCUUAAAGCUUCUGCUUUAAGGGGCAUCGUUUCUCGUCGAUGGUCAGCACAGC | |
| | 3FE_ | CUUAUGCACGGCC | |
| | PB16 | | |
| 622 | A1AT_ | UCCAGGCCGUGCAUAAGGCUGUGGUUGUAGCUCCCGAAACGUUGCUACAAUAAGGCCGUCUGAAAAGAUG | 25501 |
| | Nme2_ED15-_G_ | UGCCGCAACGCUCUGCCCCUUAAAGCUUCUGCUUUAAGGGGCAUCGUUUCUCGUCGAUGGUCAGCACAGC | |
| | 3FE_ | CUUAUGCACGGC | |
| | PB15 | | |
| 623 | A1AT_ | UCCAGGCCGUGCAUAAGGCUGUGGUUGUAGCUCCCGAAACGUUGCUACAAUAAGGCCGUCUGAAAAGAUG | 25502 |
| | Nme2_ED15-_G_ | UGCCGCAACGCUCUGCCCCUUAAAGCUUCUGCUUUAAGGGGCAUCGUUUCUCGUCGAUGGUCAGCACAGC | |
| | 3FE_ | CUUAUGCACGG | |
| | PB14 | | |
| 624 | A1AT_ | UCCAGGCCGUGCAUAAGGCUGUGGUUGUAGCUCCCGAAACGUUGCUACAAUAAGGCCGUCUGAAAAGAUG | 25503 |
| | Nme2_ED15-_G_ | UGCCGCAACGCUCUGCCCCUUAAAGCUUCUGCUUUAAGGGGCAUCGUUUCUCGUCGAUGGUCAGCACAGC | |
| | 3FE_ | CUUAUGCACG | |
| | PB13 | | |
| 625 | A1AT_ | UCCAGGCCGUGCAUAAGGCUGUGGUUGUAGCUCCCGAAACGUUGCUACAAUAAGGCCGUCUGAAAAGAUG | 25504 |
| | Nme2_ED15-_G_ | UGCCGCAACGCUCUGCCCCUUAAAGCUUCUGCUUUAAGGGGCAUCGUUUCUCGUCGAUGGUCAGCACAGC | |
| | 3FE_ | CUUAUGCAC | |
| | PB12 | | |
| 626 | A1AT_ | UCCAGGCCGUGCAUAAGGCUGUGGUUGUAGCUCCCGAAACGUUGCUACAAUAAGGCCGUCUGAAAAGAUG | 25505 |
| | Nme2_ED15-_G_ | UGCCGCAACGCUCUGCCCCUUAAAGCUUCUGCUUUAAGGGGCAUCGUUUCUCGUCGAUGGUCAGCACAGC | |
| | 3FE_ | CUUAUGCA | |
| | PB11 | | |
| 627 | A1AT_ | UCCAGGCCGUGCAUAAGGCUGUGGUUGUAGCUCCCGAAACGUUGCUACAAUAAGGCCGUCUGAAAAGAUG | 25506 |
| | Nme2_ED15-_G_ | UGCCGCAACGCUCUGCCCCUUAAAGCUUCUGCUUUAAGGGGCAUCGUUUCUCGUCGAUGGUCAGCACAGC | |
| | 3FE_ | CUUAUGC | |
| | PB10 | | |
| 628 | A1AT_ | UCCAGGCCGUGCAUAAGGCUGUGGUUGUAGCUCCCGAAACGUUGCUACAAUAAGGCCGUCUGAAAAGAUG | 25507 |
| | Nme2_ED15-_G_ | UGCCGCAACGCUCUGCCCCUUAAAGCUUCUGCUUUAAGGGGCAUCGUUUCUCGUCGAUGGUCAGCACAGC | |
| | 3FE_ | CUUAUG | |
| | PB9 | | |
| 629 | A1AT_ | UCCAGGCCGUGCAUAAGGCUGUGGUUGUAGCUCCCGAAACGUUGCUACAAUAAGGCCGUCUGAAAAGAUG | 25508 |
| | Nme2_ED15-_G_ | UGCCGCAACGCUCUGCCCCUUAAAGCUUCUGCUUUAAGGGGCAUCGUUUCUCGUCGAUGGUCAGCACAGC | |
| | 3FE_ | CUUAU | |
| | PB8 | | |
| 630 | A1AT_ | CCAGGCCGUGCAUAAGGCUGGUUUUAGAGCUAGAAAUAGCAAGUUAAAAUAAGGCUAGUCCGUUAUCAA | 25509 |
| | SpCas9-_NG_ | CUUGAAAAAGUGGCACCGAGUCGGUGCACAUGGCCCCAGCAGCUUCAGUCCCUUUCUCGUCGAUGGUCAG | |
| | ED17-_30FE_ | CACAGCCUUAUGCACGGCCUGG | |
| | PB17 | | |
| 631 | A1AT_ | CCAGGCCGUGCAUAAGGCUGGUUUUAGAGCUAGAAAUAGCAAGUUAAAAUAAGGCUAGUCCGUUAUCAA | 25510 |
| | SpCas9-_NG_ | CUUGAAAAAGUGGCACCGAGUCGGUGCACAUGGCCCCAGCAGCUUCAGUCCCUUUCUCGUCGAUGGUCAG | |
| | ED17-_30FE_ | CACAGCCUUAUGCACGGCCUG | |
| | PB16 | | |
| 632 | A1AT_ | CCAGGCCGUGCAUAAGGCUGGUUUUAGAGCUAGAAAUAGCAAGUUAAAAUAAGGCUAGUCCGUUAUCAA | 25511 |
| | SpCas9-_NG_ | CUUGAAAAAGUGGCACCGAGUCGGUGCACAUGGCCCCAGCAGCUUCAGUCCCUUUCUCGUCGAUGGUCAG | |
| | ED17-_30FE_ | CACAGCCUUAUGCACGGCCU | |
| | PB15 | | |
| 633 | A1AT_ | CCAGGCCGUGCAUAAGGCUGGUUUUAGAGCUAGAAAUAGCAAGUUAAAAUAAGGCUAGUCCGUUAUCAA | 25512 |
| | SpCas9-_NG_ | CUUGAAAAAGUGGCACCGAGUCGGUGCACAUGGCCCCAGCAGCUUCAGUCCCUUUCUCGUCGAUGGUCAG | |
| | ED17-_30FE_ | CACAGCCUUAUGCACGGCC | |
| | PB14 | | |
| 634 | A1AT_ | CCAGGCCGUGCAUAAGGCUGGUUUUAGAGCUAGAAAUAGCAAGUUAAAAUAAGGCUAGUCCGUUAUCAA | 25513 |
| | SpCas9-_NG_ | CUUGAAAAAGUGGCACCGAGUCGGUGCACAUGGCCCCAGCAGCUUCAGUCCCUUUCUCGUCGAUGGUCAG | |
| | ED17-_30FE_ | CACAGCCUUAUGCACGGC | |
| | PB13 | | |
| 635 | A1AT_ | CCAGGCCGUGCAUAAGGCUGGUUUUAGAGCUAGAAAUAGCAAGUUAAAAUAAGGCUAGUCCGUUAUCAA | 25514 |
| | SpCas9-_NG_ | CUUGAAAAAGUGGCACCGAGUCGGUGCACAUGGCCCCAGCAGCUUCAGUCCCUUUCUCGUCGAUGGUCAG | |
| | ED17-_30FE_ | CACAGCCUUAUGCACGG | |
| | PB12 | | |
| 636 | A1AT_ | CCAGGCCGUGCAUAAGGCUGGUUUUAGAGCUAGAAAUAGCAAGUUAAAAUAAGGCUAGUCCGUUAUCAA | 25515 |
| | SpCas9-_NG_ | CUUGAAAAAGUGGCACCGAGUCGGUGCACAUGGCCCCAGCAGCUUCAGUCCCUUUCUCGUCGAUGGUCAG | |
| | ED17-_30FE_ | CACAGCCUUAUGCACG | |
| | PB11 | | |
| 637 | A1AT_ | CCAGGCCGUGCAUAAGGCUGGUUUUAGAGCUAGAAAUAGCAAGUUAAAAUAAGGCUAGUCCGUUAUCAA | 25516 |
| | SpCas9-_NG_ | CUUGAAAAAGUGGCACCGAGUCGGUGCACAUGGCCCCAGCAGCUUCAGUCCCUUUCUCGUCGAUGGUCAG | |
| | ED17-_30FE_ | CACAGCCUUAUGCAC | |
| | PB10 | | |
| 638 | A1AT_ | CCAGGCCGUGCAUAAGGCUGGUUUUAGAGCUAGAAAUAGCAAGUUAAAAUAAGGCUAGUCCGUUAUCAA | 25517 |
| | SpCas9-_NG_ | CUUGAAAAAGUGGCACCGAGUCGGUGCACAUGGCCCCAGCAGCUUCAGUCCCUUUCUCGUCGAUGGUCAG | |
| | ED17-_30FE_ | CACAGCCUUAUGCA | |
| | PB9 | | |
| 639 | A1AT_ | CCAGGCCGUGCAUAAGGCUGGUUUUAGAGCUAGAAAUAGCAAGUUAAAAUAAGGCUAGUCCGUUAUCAA | 25518 |
| | SpCas9-_NG_ | CUUGAAAAAGUGGCACCGAGUCGGUGCACAUGGCCCCAGCAGCUUCAGUCCCUUUCUCGUCGAUGGUCAG | |
| | ED17-_30FE_ | CACAGCCUUAUGC | |
| | PB8 | | |
| 640 | A1AT_ | CCAGGCCGUGCAUAAGGCUGGUUUUAGAGCUAGAAAUAGCAAGUUAAAAUAAGGCUAGUCCGUUAUCAA | 25519 |
| | SpCas9-_NG_ | CUUGAAAAAGUGGCACCGAGUCGGUGCGCCCCAGCAGCUUCAGUCCCUUUCUCGUCGAUGGUCAGCACAG | |
| | ED17-_25FE_ | CCUUAUGCACGGCCUGG | |
| | PB17 | | |
| 641 | A1AT_ | CCAGGCCGUGCAUAAGGCUGGUUUUAGAGCUAGAAAUAGCAAGUUAAAAUAAGGCUAGUCCGUUAUCAA | 25520 |
| | SpCas9-_NG_ | CUUGAAAAAGUGGCACCGAGUCGGUGCGCCCCAGCAGCUUCAGUCCCUUUCUCGUCGAUGGUCAGCACAG | |
| | ED17-_25FE_ | CCUUAUGCACGGCCUG | |
| | PB16 | | |
| 642 | A1AT_ | CCAGGCCGUGCAUAAGGCUGGUUUUAGAGCUAGAAAUAGCAAGUUAAAAUAAGGCUAGUCCGUUAUCAA | 25521 |
| | SpCas9-_NG_ | CUUGAAAAAGUGGCACCGAGUCGGUGCGCCCCAGCAGCUUCAGUCCCUUUCUCGUCGAUGGUCAGCACAG | |
| | ED17-_25FE_ | CCUUAUGCACGGCCU | |
| | PB15 | | |
| 643 | A1AT_ | CCAGGCCGUGCAUAAGGCUGGUUUUAGAGCUAGAAAUAGCAAGUUAAAAUAAGGCUAGUCCGUUAUCAA | 25522 |
| | SpCas9-_NG_ | CUUGAAAAAGUGGCACCGAGUCGGUGCGCCCCAGCAGCUUCAGUCCCUUUCUCGUCGAUGGUCAGCACAG | |
| | ED17-_25FE_ | CCUUAUGCACGGCC | |
| | PB14 | | |
| 644 | A1AT_ | CCAGGCCGUGCAUAAGGCUGGUUUUAGAGCUAGAAAUAGCAAGUUAAAAUAAGGCUAGUCCGUUAUCAA | 25523 |
| | SpCas9-_NG_ | CUUGAAAAAGUGGCACCGAGUCGGUGCGCCCCAGCAGCUUCAGUCCCUUUCUCGUCGAUGGUCAGCACAG | |
| | ED17-_25FE_ | CCUUAUGCACGGC | |
| | PB13 | | |
| 645 | A1AT_ | CCAGGCCGUGCAUAAGGCUGGUUUUAGAGCUAGAAAUAGCAAGUUAAAAUAAGGCUAGUCCGUUAUCAA | 25524 |
| | SpCas9-_NG_ | CUUGAAAAAGUGGCACCGAGUCGGUGCGCCCCAGCAGCUUCAGUCCCUUUCUCGUCGAUGGUCAGCACAG | |
| | ED17-_25FE_ | CCUUAUGCACGG | |
| | PB12 | | |
| 646 | A1AT_ | CCAGGCCGUGCAUAAGGCUGGUUUUAGAGCUAGAAAUAGCAAGUUAAAAUAAGGCUAGUCCGUUAUCAA | 25525 |
| | SpCas9-_NG_ | CUUGAAAAAGUGGCACCGAGUCGGUGCGCCCCAGCAGCUUCAGUCCCUUUCUCGUCGAUGGUCAGCACAG | |
| | ED17-_25FE_ | CCUUAUGCACG | |
| | PB11 | | |
| 647 | A1AT_ | CCAGGCCGUGCAUAAGGCUGGUUUUAGAGCUAGAAAUAGCAAGUUAAAAUAAGGCUAGUCCGUUAUCAA | 25526 |
| | SpCas9-_NG_ | CUUGAAAAAGUGGCACCGAGUCGGUGCGCCCCAGCAGCUUCAGUCCCUUUCUCGUCGAUGGUCAGCACAG | |
| | ED17-_25FE_ | CCUUAUGCAC | |
| | PB10 | | |
| 648 | A1AT_ | CCAGGCCGUGCAUAAGGCUGGUUUUAGAGCUAGAAAUAGCAAGUUAAAAUAAGGCUAGUCCGUUAUCAA | 25527 |
| | SpCas9-_NG_ | CUUGAAAAAGUGGCACCGAGUCGGUGCGCCCCAGCAGCUUCAGUCCCUUUCUCGUCGAUGGUCAGCACAG | |
| | ED17-_25FE_ | CCUUAUGCA | |
| | PB9 | | |
| 649 | A1AT_ | CCAGGCCGUGCAUAAGGCUGGUUUUAGAGCUAGAAAUAGCAAGUUAAAAUAAGGCUAGUCCGUUAUCAA | 25528 |
| | SpCas9-_NG_ | CUUGAAAAAGUGGCACCGAGUCGGUGCGCCCCAGCAGCUUCAGUCCCUUUCUCGUCGAUGGUCAGCACAG | |
| | ED17-_25FE_ | CCUUAUGC | |
| | PB8 | | |
| 650 | A1AT_ | CCAGGCCGUGCAUAAGGCUGGUUUUAGAGCUAGAAAUAGCAAGUUAAAAUAAGGCUAGUCCGUUAUCAA | 25529 |
| | SpCas9-_NG_ | CUUGAAAAAGUGGCACCGAGUCGGUGCAGCAGCUUCAGUCCCUUUCUCGUCGAUGGUCAGCACAGCCUUA | |
| | ED17-_20FE_ | UGCACGGCCUGG | |
| | PB17 | | |
| 651 | A1AT_ | CCAGGCCGUGCAUAAGGCUGGUUUUAGAGCUAGAAAUAGCAAGUUAAAAUAAGGCUAGUCCGUUAUCAA | 25530 |
| | SpCas9-_NG_ | CUUGAAAAAGUGGCACCGAGUCGGUGCAGCAGCUUCAGUCCCUUUCUCGUCGAUGGUCAGCACAGCCUUA | |
| | ED17-_20FE_ | UGCACGGCCUG | |
| | PB16 | | |
| 652 | A1AT_ | CCAGGCCGUGCAUAAGGCUGGUUUUAGAGCUAGAAAUAGCAAGUUAAAAUAAGGCUAGUCCGUUAUCAA | 25531 |
| | SpCas9-_NG_ | CUUGAAAAAGUGGCACCGAGUCGGUGCAGCAGCUUCAGUCCCUUUCUCGUCGAUGGUCAGCACAGCCUUA | |
| | ED17-_20FE_ | UGCACGGCCU | |
| | PB15 | | |
| 653 | A1AT_ | CCAGGCCGUGCAUAAGGCUGGUUUUAGAGCUAGAAAUAGCAAGUUAAAAUAAGGCUAGUCCGUUAUCAA | 25532 |
| | SpCas9-_NG_ | CUUGAAAAAGUGGCACCGAGUCGGUGCAGCAGCUUCAGUCCCUUUCUCGUCGAUGGUCAGCACAGCCUUA | |
| | ED17-_20FE_ | UGCACGGCC | |
| | PB14 | | |
| 654 | A1AT_ | CCAGGCCGUGCAUAAGGCUGGUUUUAGAGCUAGAAAUAGCAAGUUAAAAUAAGGCUAGUCCGUUAUCAA | 25533 |
| | SpCas9-_NG_ | CUUGAAAAAGUGGCACCGAGUCGGUGCAGCAGCUUCAGUCCCUUUCUCGUCGAUGGUCAGCACAGCCUUA | |
| | ED17-_20FE_ | UGCACGGC | |
| | PB13 | | |
| 655 | A1AT_ | CCAGGCCGUGCAUAAGGCUGGUUUUAGAGCUAGAAAUAGCAAGUUAAAAUAAGGCUAGUCCGUUAUCAA | 25534 |
| | SpCas9-_NG_ | CUUGAAAAAGUGGCACCGAGUCGGUGCAGCAGCUUCAGUCCCUUUCUCGUCGAUGGUCAGCACAGCCUUA | |
| | ED17-_20FE_ | UGCACGG | |
| | PB12 | | |
| 656 | A1AT_ | CCAGGCCGUGCAUAAGGCUGGUUUUAGAGCUAGAAAUAGCAAGUUAAAAUAAGGCUAGUCCGUUAUCAA | 25535 |
| | SpCas9-_NG_ | CUUGAAAAAGUGGCACCGAGUCGGUGCAGCAGCUUCAGUCCCUUUCUCGUCGAUGGUCAGCACAGCCUUA | |
| | ED17-_20FE_ | UGCACG | |
| | PB11 | | |
| 657 | A1AT_ | CCAGGCCGUGCAUAAGGCUGGUUUUAGAGCUAGAAAUAGCAAGUUAAAAUAAGGCUAGUCCGUUAUCAA | 25536 |
| | SpCas9-_NG_ | CUUGAAAAAGUGGCACCGAGUCGGUGCAGCAGCUUCAGUCCCUUUCUCGUCGAUGGUCAGCACAGCCUUA | |
| | ED17-_20FE_ | UGCAC | |
| | PB10 | | |
| 658 | A1AT_ | CCAGGCCGUGCAUAAGGCUGGUUUUAGAGCUAGAAAUAGCAAGUUAAAAUAAGGCUAGUCCGUUAUCAA | 25537 |
| | SpCas9-_NG_ | CUUGAAAAAGUGGCACCGAGUCGGUGCAGCAGCUUCAGUCCCUUUCUCGUCGAUGGUCAGCACAGCCUUA | |
| | ED17-_20FE_ | UGCA | |
| | PB9 | | |
| 659 | A1AT_ | CCAGGCCGUGCAUAAGGCUGGUUUUAGAGCUAGAAAUAGCAAGUUAAAAUAAGGCUAGUCCGUUAUCAA | 25538 |
| | SpCas9-_NG_ | CUUGAAAAAGUGGCACCGAGUCGGUGCAGCAGCUUCAGUCCCUUUCUCGUCGAUGGUCAGCACAGCCUUA | |
| | ED17-_20FE_ | UGC | |
| | PB8 | | |
| 660 | A1AT_ | CCAGGCCGUGCAUAAGGCUGGUUUUAGAGCUAGAAAUAGCAAGUUAAAAUAAGGCUAGUCCGUUAUCAA | 25539 |
| | SpCas9-_NG_ | CUUGAAAAAGUGGCACCGAGUCGGUGCUUCAGUCCCUUUCUCGUCGAUGGUCAGCACAGCCUUAUGCACG | |
| | ED17-_14FE_ | GCCUGG | |
| | PB17 | | |
| 661 | A1AT_ | CCAGGCCGUGCAUAAGGCUGGUUUUAGAGCUAGAAAUAGCAAGUUAAAAUAAGGCUAGUCCGUUAUCAA | 25540 |
| | SpCas9-_NG_ | CUUGAAAAAGUGGCACCGAGUCGGUGCUUCAGUCCCUUUCUCGUCGAUGGUCAGCACAGCCUUAUGCACG | |
| | ED17-_14FE_ | GCCUG | |
| | PB16 | | |
| 662 | A1AT_ | CCAGGCCGUGCAUAAGGCUGGUUUUAGAGCUAGAAAUAGCAAGUUAAAAUAAGGCUAGUCCGUUAUCAA | 25541 |
| | SpCas9-_NG_ | CUUGAAAAAGUGGCACCGAGUCGGUGCUUCAGUCCCUUUCUCGUCGAUGGUCAGCACAGCCUUAUGCACG | |
| | ED17-_14FE_ | GCCU | |
| | PB15 | | |
| 663 | A1AT_ | CCAGGCCGUGCAUAAGGCUGGUUUUAGAGCUAGAAAUAGCAAGUUAAAAUAAGGCUAGUCCGUUAUCAA | 25542 |
| | SpCas9-_NG_ | CUUGAAAAAGUGGCACCGAGUCGGUGCUUCAGUCCCUUUCUCGUCGAUGGUCAGCACAGCCUUAUGCACG | |
| | ED17-_14FE_ | GCC | |
| | PB14 | | |
| 664 | A1AT_ | CCAGGCCGUGCAUAAGGCUGGUUUUAGAGCUAGAAAUAGCAAGUUAAAAUAAGGCUAGUCCGUUAUCAA | 25543 |
| | SpCas9-_NG_ | CUUGAAAAAGUGGCACCGAGUCGGUGCUUCAGUCCCUUUCUCGUCGAUGGUCAGCACAGCCUUAUGCACG | |
| | ED17-_14FE_ | GC | |
| | PB13 | | |
| 665 | A1AT_ | CCAGGCCGUGCAUAAGGCUGGUUUUAGAGCUAGAAAUAGCAAGUUAAAAUAAGGCUAGUCCGUUAUCAA | 25544 |
| | SpCas9-_NG_ | CUUGAAAAAGUGGCACCGAGUCGGUGCUUCAGUCCCUUUCUCGUCGAUGGUCAGCACAGCCUUAUGCACG | |
| | ED17-_14FE_ | G | |
| | PB12 | | |
| 666 | A1AT_ | CCAGGCCGUGCAUAAGGCUGGUUUUAGAGCUAGAAAUAGCAAGUUAAAAUAAGGCUAGUCCGUUAUCAA | 25545 |
| | SpCas9-_NG_ | CUUGAAAAAGUGGCACCGAGUCGGUGCUUCAGUCCCUUUCUCGUCGAUGGUCAGCACAGCCUUAUGCACG | |
| | ED17-_14FE_ | | |
| | PB11 | | |
| 667 | A1AT_ | CCAGGCCGUGCAUAAGGCUGGUUUUAGAGCUAGAAAUAGCAAGUUAAAAUAAGGCUAGUCCGUUAUCAA | 25546 |
| | SpCas9-_NG_ | CUUGAAAAAGUGGCACCGAGUCGGUGCUUCAGUCCCUUUCUCGUCGAUGGUCAGCACAGCCUUAUGCAC | |
| | ED17-_14FE_ | | |
| | PB10 | | |
| 668 | A1AT_ | CCAGGCCGUGCAUAAGGCUGGUUUUAGAGCUAGAAAUAGCAAGUUAAAAUAAGGCUAGUCCGUUAUCAA | 25547 |
| | SpCas9-_NG_ | CUUGAAAAAGUGGCACCGAGUCGGUGCUUCAGUCCCUUUCUCGUCGAUGGUCAGCACAGCCUUAUGCA | |
| | ED17-_14FE_ | | |
| | PB9 | | |
| 669 | A1AT_ | CCAGGCCGUGCAUAAGGCUGGUUUUAGAGCUAGAAAUAGCAAGUUAAAAUAAGGCUAGUCCGUUAUCAA | 25548 |
| | SpCas9-_NG_ | CUUGAAAAAGUGGCACCGAGUCGGUGCUUCAGUCCCUUUCUCGUCGAUGGUCAGCACAGCCUUAUGC | |
| | ED17-_14FE_ | | |
| | PB8 | | |
| 670 | A1AT_ | CCAGGCCGUGCAUAAGGCUGGUUUUAGAGCUAGAAAUAGCAAGUUAAAAUAAGGCUAGUCCGUUAUCAA | 25549 |
| | SpCas9-_NG_ | CUUGAAAAAGUGGCACCGAGUCGGUGCAGUCCCUUUCUCGUCGAUGGUCAGCACAGCCUUAUGCACGGCC | |
| | ED17-_11FE_ | UGG | |
| | PB17 | | |
| 671 | A1AT_ | CCAGGCCGUGCAUAAGGCUGGUUUUAGAGCUAGAAAUAGCAAGUUAAAAUAAGGCUAGUCCGUUAUCAA | 25550 |
| | SpCas9-_NG_ | CUUGAAAAAGUGGCACCGAGUCGGUGCAGUCCCUUUCUCGUCGAUGGUCAGCACAGCCUUAUGCACGGCC | |
| | ED17-_11FE_ | UG | |
| | PB16 | | |
| 672 | A1AT_ | CCAGGCCGUGCAUAAGGCUGGUUUUAGAGCUAGAAAUAGCAAGUUAAAAUAAGGCUAGUCCGUUAUCAA | 25551 |
| | SpCas9-_NG_ | CUUGAAAAAGUGGCACCGAGUCGGUGCAGUCCCUUUCUCGUCGAUGGUCAGCACAGCCUUAUGCACGGCC | |
| | ED17-_11FE_ | U | |
| | PB15 | | |
| 673 | A1AT_ | CCAGGCCGUGCAUAAGGCUGGUUUUAGAGCUAGAAAUAGCAAGUUAAAAUAAGGCUAGUCCGUUAUCAA | 25552 |
| | SpCas9-_NG_ | CUUGAAAAAGUGGCACCGAGUCGGUGCAGUCCCUUUCUCGUCGAUGGUCAGCACAGCCUUAUGCACGGCC | |
| | ED17-_11FE_ | | |
| | PB14 | | |
| 674 | A1AT_ | CCAGGCCGUGCAUAAGGCUGGUUUUAGAGCUAGAAAUAGCAAGUUAAAAUAAGGCUAGUCCGUUAUCAA | 25553 |
| | SpCas9-_NG_ | CUUGAAAAAGUGGCACCGAGUCGGUGCAGUCCCUUUCUCGUCGAUGGUCAGCACAGCCUUAUGCACGGC | |
| | ED17-_11FE_ | | |
| | PB13 | | |
| 675 | A1AT_ | CCAGGCCGUGCAUAAGGCUGGUUUUAGAGCUAGAAAUAGCAAGUUAAAAUAAGGCUAGUCCGUUAUCAA | 25554 |
| | SpCas9-_NG_ | CUUGAAAAAGUGGCACCGAGUCGGUGCAGUCCCUUUCUCGUCGAUGGUCAGCACAGCCUUAUGCACGG | |
| | ED17-_11FE_ | | |
| | PB12 | | |
| 676 | A1AT_ | CCAGGCCGUGCAUAAGGCUGGUUUUAGAGCUAGAAAUAGCAAGUUAAAAUAAGGCUAGUCCGUUAUCAA | 25555 |
| | SpCas9-_NG_ | CUUGAAAAAGUGGCACCGAGUCGGUGCAGUCCCUUUCUCGUCGAUGGUCAGCACAGCCUUAUGCACG | |
| | ED17-_11FE_ | | |
| | PB11 | | |
| 677 | A1AT_ | CCAGGCCGUGCAUAAGGCUGGUUUUAGAGCUAGAAAUAGCAAGUUAAAAUAAGGCUAGUCCGUUAUCAA | 25556 |
| | SpCas9-_NG_ | CUUGAAAAAGUGGCACCGAGUCGGUGCAGUCCCUUUCUCGUCGAUGGUCAGCACAGCCUUAUGCAC | |
| | ED17-_11FE_ | | |
| | PB10 | | |
| 678 | A1AT_ | CCAGGCCGUGCAUAAGGCUGGUUUUAGAGCUAGAAAUAGCAAGUUAAAAUAAGGCUAGUCCGUUAUCAA | 25557 |
| | SpCas9-_NG_ | CUUGAAAAAGUGGCACCGAGUCGGUGCAGUCCCUUUCUCGUCGAUGGUCAGCACAGCCUUAUGCA | |
| | ED17-_11FE_ | | |
| | PB9 | | |
| 679 | A1AT_ | CCAGGCCGUGCAUAAGGCUGGUUUUAGAGCUAGAAAUAGCAAGUUAAAAUAAGGCUAGUCCGUUAUCAA | 25558 |
| | SpCas9-_NG_ | CUUGAAAAAGUGGCACCGAGUCGGUGCAGUCCCUUUCUCGUCGAUGGUCAGCACAGCCUUAUGC | |
| | ED17-_11FE_ | | |
| | PB8 | | |
| 680 | A1AT_ | CCAGGCCGUGCAUAAGGCUGGUUUUAGAGCUAGAAAUAGCAAGUUAAAAUAAGGCUAGUCCGUUAUCAA | 25559 |
| | SpCas9-_NG_ | CUUGAAAAAGUGGCACCGAGUCGGUGCUCCCUUUCUCGUCGAUGGUCAGCACAGCCUUAUGCACGGCCUG | |
| | ED17-_9FE_ | G | |
| | PB17 | | |
| 681 | A1AT_ | CCAGGCCGUGCAUAAGGCUGGUUUUAGAGCUAGAAAUAGCAAGUUAAAAUAAGGCUAGUCCGUUAUCAA | 25560 |
| | SpCas9-_NG_ | CUUGAAAAAGUGGCACCGAGUCGGUGCUCCCUUUCUCGUCGAUGGUCAGCACAGCCUUAUGCACGGCCUG | |
| | ED17-_9FE_ | | |
| | PB16 | | |
| 682 | A1AT_ | CCAGGCCGUGCAUAAGGCUGGUUUUAGAGCUAGAAAUAGCAAGUUAAAAUAAGGCUAGUCCGUUAUCAA | 25561 |
| | SpCas9-_NG_ | CUUGAAAAAGUGGCACCGAGUCGGUGCUCCCUUUCUCGUCGAUGGUCAGCACAGCCUUAUGCACGGCCU | |
| | ED17-_9FE_ | | |
| | PB15 | | |
| 683 | A1AT_ | CCAGGCCGUGCAUAAGGCUGGUUUUAGAGCUAGAAAUAGCAAGUUAAAAUAAGGCUAGUCCGUUAUCAA | 25562 |
| | SpCas9-_NG_ | CUUGAAAAAGUGGCACCGAGUCGGUGCUCCCUUUCUCGUCGAUGGUCAGCACAGCCUUAUGCACGGCC | |
| | ED17-_9FE_ | | |
| | PB14 | | |
| 684 | A1AT_ | CCAGGCCGUGCAUAAGGCUGGUUUUAGAGCUAGAAAUAGCAAGUUAAAAUAAGGCUAGUCCGUUAUCAA | 25563 |
| | SpCas9-_NG_ | CUUGAAAAAGUGGCACCGAGUCGGUGCUCCCUUUCUCGUCGAUGGUCAGCACAGCCUUAUGCACGGC | |
| | ED17-_9FE_ | | |
| | PB13 | | |
| 685 | A1AT_ | CCAGGCCGUGCAUAAGGCUGGUUUUAGAGCUAGAAAUAGCAAGUUAAAAUAAGGCUAGUCCGUUAUCAA | 25564 |
| | SpCas9-_NG_ | CUUGAAAAAGUGGCACCGAGUCGGUGCUCCCUUUCUCGUCGAUGGUCAGCACAGCCUUAUGCACGG | |
| | ED17-_9FE_ | | |
| | PB12 | | |
| 686 | A1AT_ | CCAGGCCGUGCAUAAGGCUGGUUUUAGAGCUAGAAAUAGCAAGUUAAAAUAAGGCUAGUCCGUUAUCAA | 25565 |
| | SpCas9-_NG_ | CUUGAAAAAGUGGCACCGAGUCGGUGCUCCCUUUCUCGUCGAUGGUCAGCACAGCCUUAUGCACG | |
| | ED17-_9FE_ | | |
| | PB11 | | |
| 687 | A1AT_ | CCAGGCCGUGCAUAAGGCUGGUUUUAGAGCUAGAAAUAGCAAGUUAAAAUAAGGCUAGUCCGUUAUCAA | 25566 |
| | SpCas9-_NG_ | CUUGAAAAAGUGGCACCGAGUCGGUGCUCCCUUUCUCGUCGAUGGUCAGCACAGCCUUAUGCAC | |
| | ED17-_9FE_ | | |
| | PB10 | | |
| 688 | A1AT_ | CCAGGCCGUGCAUAAGGCUGGUUUUAGAGCUAGAAAUAGCAAGUUAAAAUAAGGCUAGUCCGUUAUCAA | 25567 |
| | SpCas9-_NG_ | CUUGAAAAAGUGGCACCGAGUCGGUGCUCCCUUUCUCGUCGAUGGUCAGCACAGCCUUAUGCA | |
| | ED17-_9FE_ | | |
| | PB9 | | |
| 689 | A1AT_ | CCAGGCCGUGCAUAAGGCUGGUUUUAGAGCUAGAAAUAGCAAGUUAAAAUAAGGCUAGUCCGUUAUCAA | 25568 |
| | SpCas9-_NG_ | CUUGAAAAAGUGGCACCGAGUCGGUGCUCCCUUUCUCGUCGAUGGUCAGCACAGCCUUAUGC | |
| | ED17-_9FE_ | | |
| | PB8 | | |
| 690 | A1AT_ | CCAGGCCGUGCAUAAGGCUGGUUUUAGAGCUAGAAAUAGCAAGUUAAAAUAAGGCUAGUCCGUUAUCAA | 25569 |
| | SpCas9-_NG_ | CUUGAAAAAGUGGCACCGAGUCGGUGCCCUUUCUCGUCGAUGGUCAGCACAGCCUUAUGCACGGCCUGG | |
| | ED17-_7FE_ | | |
| | PB17 | | |
| 691 | A1AT_ | CCAGGCCGUGCAUAAGGCUGGUUUUAGAGCUAGAAAUAGCAAGUUAAAAUAAGGCUAGUCCGUUAUCAA | 25570 |
| | SpCas9-_NG_ | CUUGAAAAAGUGGCACCGAGUCGGUGCCCUUUCUCGUCGAUGGUCAGCACAGCCUUAUGCACGGCCUG | |
| | ED17-_7FE_ | | |
| | PB16 | | |
| 692 | A1AT_ | CCAGGCCGUGCAUAAGGCUGGUUUUAGAGCUAGAAAUAGCAAGUUAAAAUAAGGCUAGUCCGUUAUCAA | 25571 |
| | SpCas9-_NG_ | CUUGAAAAAGUGGCACCGAGUCGGUGCCCUUUCUCGUCGAUGGUCAGCACAGCCUUAUGCACGGCCU | |
| | ED17-_7FE_ | | |
| | PB15 | | |
| 693 | A1AT_ | CCAGGCCGUGCAUAAGGCUGGUUUUAGAGCUAGAAAUAGCAAGUUAAAAUAAGGCUAGUCCGUUAUCAA | 25572 |
| | SpCas9-_NG_ | CUUGAAAAAGUGGCACCGAGUCGGUGCCCUUUCUCGUCGAUGGUCAGCACAGCCUUAUGCACGGCC | |
| | ED17-_7FE_ | | |
| | PB14 | | |
| 694 | A1AT_ | CCAGGCCGUGCAUAAGGCUGGUUUUAGAGCUAGAAAUAGCAAGUUAAAAUAAGGCUAGUCCGUUAUCAA | 25573 |
| | SpCas9-_NG_ | CUUGAAAAAGUGGCACCGAGUCGGUGCCCUUUCUCGUCGAUGGUCAGCACAGCCUUAUGCACGGC | |
| | ED17-_7FE_ | | |
| | PB13 | | |
| 695 | A1AT_ | CCAGGCCGUGCAUAAGGCUGGUUUUAGAGCUAGAAAUAGCAAGUUAAAAUAAGGCUAGUCCGUUAUCAA | 25574 |
| | SpCas9-_NG_ | CUUGAAAAAGUGGCACCGAGUCGGUGCCCUUUCUCGUCGAUGGUCAGCACAGCCUUAUGCACGG | |
| | ED17-_7FE_ | | |
| | PB12 | | |
| 696 | A1AT_ | CCAGGCCGUGCAUAAGGCUGGUUUUAGAGCUAGAAAUAGCAAGUUAAAAUAAGGCUAGUCCGUUAUCAA | 25575 |
| | SpCas9-_NG_ | CUUGAAAAAGUGGCACCGAGUCGGUGCCCUUUCUCGUCGAUGGUCAGCACAGCCUUAUGCACG | |
| | ED17-_7FE_ | | |
| | PB11 | | |
| 697 | A1AT_ | CCAGGCCGUGCAUAAGGCUGGUUUUAGAGCUAGAAAUAGCAAGUUAAAAUAAGGCUAGUCCGUUAUCAA | 25576 |
| | SpCas9-_NG_ | CUUGAAAAAGUGGCACCGAGUCGGUGCCCUUUCUCGUCGAUGGUCAGCACAGCCUUAUGCAC | |
| | ED17-_7FE_ | | |
| | PB10 | | |
| 698 | A1AT_ | CCAGGCCGUGCAUAAGGCUGGUUUUAGAGCUAGAAAUAGCAAGUUAAAAUAAGGCUAGUCCGUUAUCAA | 25577 |
| | SpCas9-_NG_ | CUUGAAAAAGUGGCACCGAGUCGGUGCCCUUUCUCGUCGAUGGUCAGCACAGCCUUAUGCA | |
| | ED17-_7FE_ | | |
| | PB9 | | |
| 699 | A1AT_ | CCAGGCCGUGCAUAAGGCUGGUUUUAGAGCUAGAAAUAGCAAGUUAAAAUAAGGCUAGUCCGUUAUCAA | 25578 |
| | SpCas9-_NG_ | CUUGAAAAAGUGGCACCGAGUCGGUGCCCUUUCUCGUCGAUGGUCAGCACAGCCUUAUGC | |
| | ED17-_7FE_ | | |
| | PB8 | | |
| 700 | A1AT_ | CCAGGCCGUGCAUAAGGCUGGUUUUAGAGCUAGAAAUAGCAAGUUAAAAUAAGGCUAGUCCGUUAUCAA | 25579 |
| | SpCas9-_NG_ | CUUGAAAAAGUGGCACCGAGUCGGUGCUUUCUCGUCGAUGGUCAGCACAGCCUUAUGCACGGCCUGG | |
| | ED17-_5FE_ | | |
| | PB17 | | |
| 701 | A1AT_ | CCAGGCCGUGCAUAAGGCUGGUUUUAGAGCUAGAAAUAGCAAGUUAAAAUAAGGCUAGUCCGUUAUCAA | 25580 |
| | SpCas9-_NG_ | CUUGAAAAAGUGGCACCGAGUCGGUGCUUUCUCGUCGAUGGUCAGCACAGCCUUAUGCACGGCCUG | |
| | ED17-_5FE_ | | |
| | PB16 | | |
| 702 | A1AT_ | CCAGGCCGUGCAUAAGGCUGGUUUUAGAGCUAGAAAUAGCAAGUUAAAAUAAGGCUAGUCCGUUAUCAA | 25581 |
| | SpCas9-_NG_ | CUUGAAAAAGUGGCACCGAGUCGGUGCUUUCUCGUCGAUGGUCAGCACAGCCUUAUGCACGGCCU | |
| | ED17-_5FE_ | | |
| | PB15 | | |
| 703 | A1AT_ | CCAGGCCGUGCAUAAGGCUGGUUUUAGAGCUAGAAAUAGCAAGUUAAAAUAAGGCUAGUCCGUUAUCAA | 25582 |
| | SpCas9-_NG_ | CUUGAAAAAGUGGCACCGAGUCGGUGCUUUCUCGUCGAUGGUCAGCACAGCCUUAUGCACGGCC | |
| | ED17-_5FE_ | | |
| | PB14 | | |
| 704 | A1AT_ | CCAGGCCGUGCAUAAGGCUGGUUUUAGAGCUAGAAAUAGCAAGUUAAAAUAAGGCUAGUCCGUUAUCAA | 25583 |
| | SpCas9-_NG_ | CUUGAAAAAGUGGCACCGAGUCGGUGCUUUCUCGUCGAUGGUCAGCACAGCCUUAUGCACGGC | |
| | ED17-_5FE_ | | |
| | PB13 | | |
| 705 | A1AT_ | CCAGGCCGUGCAUAAGGCUGGUUUUAGAGCUAGAAAUAGCAAGUUAAAAUAAGGCUAGUCCGUUAUCAA | 25584 |
| | SpCas9-_NG_ | CUUGAAAAAGUGGCACCGAGUCGGUGCUUUCUCGUCGAUGGUCAGCACAGCCUUAUGCACGG | |
| | ED17-_5FE_ | | |
| | PB12 | | |
| 706 | A1AT_ | CCAGGCCGUGCAUAAGGCUGGUUUUAGAGCUAGAAAUAGCAAGUUAAAAUAAGGCUAGUCCGUUAUCAA | 25585 |
| | SpCas9-_NG_ | CUUGAAAAAGUGGCACCGAGUCGGUGCUUUCUCGUCGAUGGUCAGCACAGCCUUAUGCACG | |
| | ED17-_5FE_ | | |
| | PB11 | | |
| 707 | A1AT_ | CCAGGCCGUGCAUAAGGCUGGUUUUAGAGCUAGAAAUAGCAAGUUAAAAUAAGGCUAGUCCGUUAUCAA | 25586 |
| | SpCas9-_NG_ | CUUGAAAAAGUGGCACCGAGUCGGUGCUUUCUCGUCGAUGGUCAGCACAGCCUUAUGCAC | |
| | ED17-_5FE_ | | |
| | PB10 | | |
| 708 | A1AT_ | CCAGGCCGUGCAUAAGGCUGGUUUUAGAGCUAGAAAUAGCAAGUUAAAAUAAGGCUAGUCCGUUAUCAA | 25587 |
| | SpCas9-_NG_ | CUUGAAAAAGUGGCACCGAGUCGGUGCUUUCUCGUCGAUGGUCAGCACAGCCUUAUGCA | |
| | ED17-_5FE_ | | |
| | PB9 | | |
| 709 | A1AT_ | CCAGGCCGUGCAUAAGGCUGGUUUUAGAGCUAGAAAUAGCAAGUUAAAAUAAGGCUAGUCCGUUAUCAA | 25588 |
| | SpCas9-_NG_ | CUUGAAAAAGUGGCACCGAGUCGGUGCUUUCUCGUCGAUGGUCAGCACAGCCUUAUGC | |
| | ED17-_5FE_ | | |
| | PB8 | | |
| 710 | A1AT_ | CCAGGCCGUGCAUAAGGCUGGUUUUAGAGCUAGAAAUAGCAAGUUAAAAUAAGGCUAGUCCGUUAUCAA | 25589 |
| | SpCas9-_NG_ | CUUGAAAAAGUGGCACCGAGUCGGUGCUCUCGUCGAUGGUCAGCACAGCCUUAUGCACGGCCUGG | |
| | ED17-_3FE_ | | |
| | PB17 | | |
| 711 | A1AT_ | CCAGGCCGUGCAUAAGGCUGGUUUUAGAGCUAGAAAUAGCAAGUUAAAAUAAGGCUAGUCCGUUAUCAA | 25590 |
| | SpCas9-_NG_ | CUUGAAAAAGUGGCACCGAGUCGGUGCUCUCGUCGAUGGUCAGCACAGCCUUAUGCACGGCCUG | |
| | ED17-_3FE_ | | |
| | PB16 | | |
| 712 | A1AT_ | CCAGGCCGUGCAUAAGGCUGGUUUUAGAGCUAGAAAUAGCAAGUUAAAAUAAGGCUAGUCCGUUAUCAA | 25591 |
| | SpCas9-_NG_ | CUUGAAAAAGUGGCACCGAGUCGGUGCUCUCGUCGAUGGUCAGCACAGCCUUAUGCACGGCCU | |
| | ED17-_3FE_ | | |
| | PB15 | | |
| 713 | A1AT_ | CCAGGCCGUGCAUAAGGCUGGUUUUAGAGCUAGAAAUAGCAAGUUAAAAUAAGGCUAGUCCGUUAUCAA | 25592 |
| | SpCas9-_NG_ | CUUGAAAAAGUGGCACCGAGUCGGUGCUCUCGUCGAUGGUCAGCACAGCCUUAUGCACGGCC | |
| | ED17-_3FE_ | | |
| | PB14 | | |
| 714 | A1AT_ | CCAGGCCGUGCAUAAGGCUGGUUUUAGAGCUAGAAAUAGCAAGUUAAAAUAAGGCUAGUCCGUUAUCAA | 25593 |
| | SpCas9-_NG_ | CUUGAAAAAGUGGCACCGAGUCGGUGCUCUCGUCGAUGGUCAGCACAGCCUUAUGCACGGC | |
| | ED17-_3FE_ | | |
| | PB13 | | |
| 715 | A1AT_ | CCAGGCCGUGCAUAAGGCUGGUUUUAGAGCUAGAAAUAGCAAGUUAAAAUAAGGCUAGUCCGUUAUCAA | 25594 |
| | SpCas9-_NG_ | CUUGAAAAAGUGGCACCGAGUCGGUGCUCUCGUCGAUGGUCAGCACAGCCUUAUGCACGG | |
| | ED17-_3FE_ | | |
| | PB12 | | |
| 716 | A1AT_ | CCAGGCCGUGCAUAAGGCUGGUUUUAGAGCUAGAAAUAGCAAGUUAAAAUAAGGCUAGUCCGUUAUCAA | 25595 |
| | SpCas9-_NG_ | CUUGAAAAAGUGGCACCGAGUCGGUGCUCUCGUCGAUGGUCAGCACAGCCUUAUGCACG | |
| | ED17-_3FE_ | | |
| | PB11 | | |
| 717 | A1AT_ | CCAGGCCGUGCAUAAGGCUGGUUUUAGAGCUAGAAAUAGCAAGUUAAAAUAAGGCUAGUCCGUUAUCAA | 25596 |
| | SpCas9-_NG_ | CUUGAAAAAGUGGCACCGAGUCGGUGCUCUCGUCGAUGGUCAGCACAGCCUUAUGCAC | |
| | ED17-_3FE_ | | |
| | PB10 | | |
| 718 | A1AT_ | CCAGGCCGUGCAUAAGGCUGGUUUUAGAGCUAGAAAUAGCAAGUUAAAAUAAGGCUAGUCCGUUAUCAA | 25597 |
| | SpCas9-_NG_ | CUUGAAAAAGUGGCACCGAGUCGGUGCUCUCGUCGAUGGUCAGCACAGCCUUAUGCA | |
| | ED17-_3FE_ | | |
| | PB9 | | |
| 719 | A1AT_ | CCAGGCCGUGCAUAAGGCUGGUUUUAGAGCUAGAAAUAGCAAGUUAAAAUAAGGCUAGUCCGUUAUCAA | 25598 |
| | SpCas9-_NG_ | CUUGAAAAAGUGGCACCGAGUCGGUGCUCUCGUCGAUGGUCAGCACAGCCUUAUGC | |
| | ED17-_3FE_ | | |
| | PB8 | | |
| 720 | A1AT_ | UCCAGGCCGUGCAUAAGGCUGUUUUAGAGCUAGAAAUAGCAAGUUAAAAUAAGGCUAGUCCGUUAUCAA | 25599 |
| | SpRY_ED18-_G_ | CUUGAAAAAGUGGCACCGAGUCGGUGCACAUGGCCCCAGCAGCUUCAGUCCCUUUCUCGUCGAUGGUCAG | |
| | 30FE_ | CACAGCCUUAUGCACGGCCUGGA | |
| | PB17 | | |
| 721 | A1AT_ | UCCAGGCCGUGCAUAAGGCUGUUUUAGAGCUAGAAAUAGCAAGUUAAAAUAAGGCUAGUCCGUUAUCAA | 25600 |
| | SpRY_ED18-_G_ | CUUGAAAAAGUGGCACCGAGUCGGUGCACAUGGCCCCAGCAGCUUCAGUCCCUUUCUCGUCGAUGGUCAG | |
| | 30FE_ | CACAGCCUUAUGCACGGCCUGG | |
| | PB16 | | |
| 722 | A1AT_ | UCCAGGCCGUGCAUAAGGCUGUUUUAGAGCUAGAAAUAGCAAGUUAAAAUAAGGCUAGUCCGUUAUCAA | 25601 |
| | SpRY_ED18-_G_ | CUUGAAAAAGUGGCACCGAGUCGGUGCACAUGGCCCCAGCAGCUUCAGUCCCUUUCUCGUCGAUGGUCAG | |
| | 30FE_ | CACAGCCUUAUGCACGGCCUG | |
| | PB15 | | |
| 723 | A1AT_ | UCCAGGCCGUGCAUAAGGCUGUUUUAGAGCUAGAAAUAGCAAGUUAAAAUAAGGCUAGUCCGUUAUCAA | 25602 |
| | SpRY_ED18-_G_ | CUUGAAAAAGUGGCACCGAGUCGGUGCACAUGGCCCCAGCAGCUUCAGUCCCUUUCUCGUCGAUGGUCAG | |
| | 30FE_ | CACAGCCUUAUGCACGGCCU | |
| | PB14 | | |
| 724 | A1AT_ | UCCAGGCCGUGCAUAAGGCUGUUUUAGAGCUAGAAAUAGCAAGUUAAAAUAAGGCUAGUCCGUUAUCAA | 25603 |
| | SpRY_ED18-_G_ | CUUGAAAAAGUGGCACCGAGUCGGUGCACAUGGCCCCAGCAGCUUCAGUCCCUUUCUCGUCGAUGGUCAG | |
| | 30FE_ | CACAGCCUUAUGCACGGCC | |
| | PB13 | | |
| 725 | A1AT_ | UCCAGGCCGUGCAUAAGGCUGUUUUAGAGCUAGAAAUAGCAAGUUAAAAUAAGGCUAGUCCGUUAUCAA | 25604 |
| | SpRY_ED18-_G_ | CUUGAAAAAGUGGCACCGAGUCGGUGCACAUGGCCCCAGCAGCUUCAGUCCCUUUCUCGUCGAUGGUCAG | |
| | 30FE_ | CACAGCCUUAUGCACGGC | |
| | PB12 | | |
| 726 | A1AT_ | UCCAGGCCGUGCAUAAGGCUGUUUUAGAGCUAGAAAUAGCAAGUUAAAAUAAGGCUAGUCCGUUAUCAA | 25605 |
| | SpRY_ | CUUGAAAAAGUGGCACCGAGUCGGUGCACAUGGCCCCAGCAGCUUCAGUCCCUUUCUCGUCGAUGGUCAG | |
| | ED18-_G_ | CACAGCCUUAUGCACGG | |
| | 30FE_ | | |
| | PB11 | | |
| 727 | A1AT_ | UCCAGGCCGUGCAUAAGGCUGUUUUAGAGCUAGAAAUAGCAAGUUAAAAUAAGGCUAGUCCGUUAUCAA | 25606 |
| | SpRY_ED18-_G_ | CUUGAAAAAGUGGCACCGAGUCGGUGCACAUGGCCCCAGCAGCUUCAGUCCCUUUCUCGUCGAUGGUCAG | |
| | 30FE_ | CACAGCCUUAUGCACG | |
| | PB10 | | |
| 728 | A1AT_ | UCCAGGCCGUGCAUAAGGCUGUUUUAGAGCUAGAAAUAGCAAGUUAAAAUAAGGCUAGUCCGUUAUCAA | 25607 |
| | SpRY_ED18-_G_ | CUUGAAAAAGUGGCACCGAGUCGGUGCACAUGGCCCCAGCAGCUUCAGUCCCUUUCUCGUCGAUGGUCAG | |
| | 30FE_ | CACAGCCUUAUGCAC | |
| | PB9 | | |
| 729 | A1AT_ | UCCAGGCCGUGCAUAAGGCUGUUUUAGAGCUAGAAAUAGCAAGUUAAAAUAAGGCUAGUCCGUUAUCAA | 25608 |
| | SpRY_ED18-_G_ | CUUGAAAAAGUGGCACCGAGUCGGUGCACAUGGCCCCAGCAGCUUCAGUCCCUUUCUCGUCGAUGGUCAG | |
| | 30FE_ | CACAGCCUUAUGCA | |
| | PB8 | | |
| 730 | A1AT_ | UCCAGGCCGUGCAUAAGGCUGUUUUAGAGCUAGAAAUAGCAAGUUAAAAUAAGGCUAGUCCGUUAUCAA | 25609 |
| | SpRY_ED18-_G_ | CUUGAAAAAGUGGCACCGAGUCGGUGCGCCCCAGCAGCUUCAGUCCCUUUCUCGUCGAUGGUCAGCACAG | |
| | 25FE_ | CCUUAUGCACGGCCUGGA | |
| | PB17 | | |
| 731 | A1AT_ | UCCAGGCCGUGCAUAAGGCUGUUUUAGAGCUAGAAAUAGCAAGUUAAAAUAAGGCUAGUCCGUUAUCAA | 25610 |
| | SpRY_ED18-_G_ | CUUGAAAAAGUGGCACCGAGUCGGUGCGCCCCAGCAGCUUCAGUCCCUUUCUCGUCGAUGGUCAGCACAG | |
| | 25FE_ | CCUUAUGCACGGCCUGG | |
| | PB16 | | |
| 732 | A1AT_ | UCCAGGCCGUGCAUAAGGCUGUUUUAGAGCUAGAAAUAGCAAGUUAAAAUAAGGCUAGUCCGUUAUCAA | 25611 |
| | SpRY_ED18-_G_ | CUUGAAAAAGUGGCACCGAGUCGGUGCGCCCCAGCAGCUUCAGUCCCUUUCUCGUCGAUGGUCAGCACAG | |
| | 25FE_ | CCUUAUGCACGGCCUG | |
| | PB15 | | |
| 733 | A1AT_ | UCCAGGCCGUGCAUAAGGCUGUUUUAGAGCUAGAAAUAGCAAGUUAAAAUAAGGCUAGUCCGUUAUCAA | 25612 |
| | SpRY_ED18-_G_ | CUUGAAAAAGUGGCACCGAGUCGGUGCGCCCCAGCAGCUUCAGUCCCUUUCUCGUCGAUGGUCAGCACAG | |
| | 25FE_ | CCUUAUGCACGGCCU | |
| | PB14 | | |
| 734 | A1AT_ | UCCAGGCCGUGCAUAAGGCUGUUUUAGAGCUAGAAAUAGCAAGUUAAAAUAAGGCUAGUCCGUUAUCAA | 25613 |
| | SpRY_ED18-_G_ | CUUGAAAAAGUGGCACCGAGUCGGUGCGCCCCAGCAGCUUCAGUCCCUUUCUCGUCGAUGGUCAGCACAG | |
| | 25FE_ | CCUUAUGCACGGCC | |
| | PB13 | | |
| 735 | A1AT_ | UCCAGGCCGUGCAUAAGGCUGUUUUAGAGCUAGAAAUAGCAAGUUAAAAUAAGGCUAGUCCGUUAUCAA | 25614 |
| | SpRY_ED18-_G_ | CUUGAAAAAGUGGCACCGAGUCGGUGCGCCCCAGCAGCUUCAGUCCCUUUCUCGUCGAUGGUCAGCACAG | |
| | 25FE_ | CCUUAUGCACGGC | |
| | PB12 | | |
| 736 | A1AT_ | UCCAGGCCGUGCAUAAGGCUGUUUUAGAGCUAGAAAUAGCAAGUUAAAAUAAGGCUAGUCCGUUAUCAA | 25615 |
| | SpRY_ED18-_G_ | CUUGAAAAAGUGGCACCGAGUCGGUGCGCCCCAGCAGCUUCAGUCCCUUUCUCGUCGAUGGUCAGCACAG | |
| | 25FE_ | CCUUAUGCACGG | |
| | PB11 | | |
| 737 | A1AT_ | UCCAGGCCGUGCAUAAGGCUGUUUUAGAGCUAGAAAUAGCAAGUUAAAAUAAGGCUAGUCCGUUAUCAA | 25616 |
| | SpRY_ | CUUGAAAAAGUGGCACCGAGUCGGUGCGCCCCAGCAGCUUCAGUCCCUUUCUCGUCGAUGGUCAGCACAG | |
| | ED18-_G_ | CCUUAUGCACG | |
| | 25FE_ | | |
| | PB10 | | |
| 738 | A1AT_ | UCCAGGCCGUGCAUAAGGCUGUUUUAGAGCUAGAAAUAGCAAGUUAAAAUAAGGCUAGUCCGUUAUCAA | 25617 |
| | SpRY_ED18-_G_ | CUUGAAAAAGUGGCACCGAGUCGGUGCGCCCCAGCAGCUUCAGUCCCUUUCUCGUCGAUGGUCAGCACAG | |
| | 25FE_ | CCUUAUGCAC | |
| | PB9 | | |
| 739 | A1AT_ | UCCAGGCCGUGCAUAAGGCUGUUUUAGAGCUAGAAAUAGCAAGUUAAAAUAAGGCUAGUCCGUUAUCAA | 25618 |
| | SpRY_ED18-_G_ | CUUGAAAAAGUGGCACCGAGUCGGUGCGCCCCAGCAGCUUCAGUCCCUUUCUCGUCGAUGGUCAGCACAG | |
| | 25FE_ | CCUUAUGCA | |
| | PB8 | | |
| 740 | A1AT_ | UCCAGGCCGUGCAUAAGGCUGUUUUAGAGCUAGAAAUAGCAAGUUAAAAUAAGGCUAGUCCGUUAUCAA | 25619 |
| | SpRY_ED18-_G_ | CUUGAAAAAGUGGCACCGAGUCGGUGCAGCAGCUUCAGUCCCUUUCUCGUCGAUGGUCAGCACAGCCUUA | |
| | 20FE_ | UGCACGGCCUGGA | |
| | PB17 | | |
| 741 | A1AT_ | UCCAGGCCGUGCAUAAGGCUGUUUUAGAGCUAGAAAUAGCAAGUUAAAAUAAGGCUAGUCCGUUAUCAA | 25620 |
| | SpRY_ED18-_G_ | CUUGAAAAAGUGGCACCGAGUCGGUGCAGCAGCUUCAGUCCCUUUCUCGUCGAUGGUCAGCACAGCCUUA | |
| | 20FE_ | UGCACGGCCUGG | |
| | PB16 | | |
| 742 | A1AT_ | UCCAGGCCGUGCAUAAGGCUGUUUUAGAGCUAGAAAUAGCAAGUUAAAAUAAGGCUAGUCCGUUAUCAA | 25621 |
| | SpRY_ED18-_G_ | CUUGAAAAAGUGGCACCGAGUCGGUGCAGCAGCUUCAGUCCCUUUCUCGUCGAUGGUCAGCACAGCCUUA | |
| | 20FE_ | UGCACGGCCUG | |
| | PB15 | | |
| 743 | A1AT_ | UCCAGGCCGUGCAUAAGGCUGUUUUAGAGCUAGAAAUAGCAAGUUAAAAUAAGGCUAGUCCGUUAUCAA | 25622 |
| | SpRY_ED18-_G_ | CUUGAAAAAGUGGCACCGAGUCGGUGCAGCAGCUUCAGUCCCUUUCUCGUCGAUGGUCAGCACAGCCUUA | |
| | 20FE_ | UGCACGGCCU | |
| | PB14 | | |
| 744 | A1AT_ | UCCAGGCCGUGCAUAAGGCUGUUUUAGAGCUAGAAAUAGCAAGUUAAAAUAAGGCUAGUCCGUUAUCAA | 25623 |
| | SpRY_ED18-_G_ | CUUGAAAAAGUGGCACCGAGUCGGUGCAGCAGCUUCAGUCCCUUUCUCGUCGAUGGUCAGCACAGCCUUA | |
| | 20FE_ | UGCACGGCC | |
| | PB13 | | |
| 745 | A1AT_ | UCCAGGCCGUGCAUAAGGCUGUUUUAGAGCUAGAAAUAGCAAGUUAAAAUAAGGCUAGUCCGUUAUCAA | 25624 |
| | SpRY_ | CUUGAAAAAGUGGCACCGAGUCGGUGCAGCAGCUUCAGUCCCUUUCUCGUCGAUGGUCAGCACAGCCUUA | |
| | ED18-_G_ | UGCACGGC | |
| | 20FE_ | | |
| | PB12 | | |
| 746 | A1AT_ | UCCAGGCCGUGCAUAAGGCUGUUUUAGAGCUAGAAAUAGCAAGUUAAAAUAAGGCUAGUCCGUUAUCAA | 25625 |
| | SpRY_ED18-_G_ | CUUGAAAAAGUGGCACCGAGUCGGUGCAGCAGCUUCAGUCCCUUUCUCGUCGAUGGUCAGCACAGCCUUA | |
| | 20FE_ | UGCACGG | |
| | PB11 | | |
| 747 | A1AT_ | UCCAGGCCGUGCAUAAGGCUGUUUUAGAGCUAGAAAUAGCAAGUUAAAAUAAGGCUAGUCCGUUAUCAA | 25626 |
| | SpRY_ED18-_G_ | CUUGAAAAAGUGGCACCGAGUCGGUGCAGCAGCUUCAGUCCCUUUCUCGUCGAUGGUCAGCACAGCCUUA | |
| | 20FE_ | UGCACG | |
| | PB10 | | |
| 748 | A1AT_ | UCCAGGCCGUGCAUAAGGCUGUUUUAGAGCUAGAAAUAGCAAGUUAAAAUAAGGCUAGUCCGUUAUCAA | 25627 |
| | SpRY_ED18-_G_ | CUUGAAAAAGUGGCACCGAGUCGGUGCAGCAGCUUCAGUCCCUUUCUCGUCGAUGGUCAGCACAGCCUUA | |
| | 20FE_ | UGCAC | |
| | PB9 | | |
| 749 | A1AT_ | UCCAGGCCGUGCAUAAGGCUGUUUUAGAGCUAGAAAUAGCAAGUUAAAAUAAGGCUAGUCCGUUAUCAA | 25628 |
| | SpRY_ED18-_G_ | CUUGAAAAAGUGGCACCGAGUCGGUGCAGCAGCUUCAGUCCCUUUCUCGUCGAUGGUCAGCACAGCCUUA | |
| | 20FE_ | UGCA | |
| | PB8 | | |
| 750 | A1AT_ | UCCAGGCCGUGCAUAAGGCUGUUUUAGAGCUAGAAAUAGCAAGUUAAAAUAAGGCUAGUCCGUUAUCAA | 25629 |
| | SpRY_ED18-_G_ | CUUGAAAAAGUGGCACCGAGUCGGUGCUUCAGUCCCUUUCUCGUCGAUGGUCAGCACAGCCUUAUGCACG | |
| | 14FE_ | GCCUGGA | |
| | PB17 | | |
| 751 | A1AT_ | UCCAGGCCGUGCAUAAGGCUGUUUUAGAGCUAGAAAUAGCAAGUUAAAAUAAGGCUAGUCCGUUAUCAA | 25630 |
| | SpRY_ED18-_G_ | CUUGAAAAAGUGGCACCGAGUCGGUGCUUCAGUCCCUUUCUCGUCGAUGGUCAGCACAGCCUUAUGCACG | |
| | 14FE_ | GCCUGG | |
| | PB16 | | |
| 752 | A1AT_ | UCCAGGCCGUGCAUAAGGCUGUUUUAGAGCUAGAAAUAGCAAGUUAAAAUAAGGCUAGUCCGUUAUCAA | 25631 |
| | SpRY_ED18-_G_ | CUUGAAAAAGUGGCACCGAGUCGGUGCUUCAGUCCCUUUCUCGUCGAUGGUCAGCACAGCCUUAUGCACG | |
| | 14FE_ | GCCUG | |
| | PB15 | | |
| 753 | A1AT_ | UCCAGGCCGUGCAUAAGGCUGUUUUAGAGCUAGAAAUAGCAAGUUAAAAUAAGGCUAGUCCGUUAUCAA | 25632 |
| | SpRY_ED18-_G_ | CUUGAAAAAGUGGCACCGAGUCGGUGCUUCAGUCCCUUUCUCGUCGAUGGUCAGCACAGCCUUAUGCACG | |
| | 14FE_ | GCCU | |
| | PB14 | | |
| 754 | A1AT_ | UCCAGGCCGUGCAUAAGGCUGUUUUAGAGCUAGAAAUAGCAAGUUAAAAUAAGGCUAGUCCGUUAUCAA | 25633 |
| | SpRY_ED18-_G_ | CUUGAAAAAGUGGCACCGAGUCGGUGCUUCAGUCCCUUUCUCGUCGAUGGUCAGCACAGCCUUAUGCACG | |
| | 14FE_ | GCC | |
| | PB13 | | |
| 755 | A1AT_ | UCCAGGCCGUGCAUAAGGCUGUUUUAGAGCUAGAAAUAGCAAGUUAAAAUAAGGCUAGUCCGUUAUCAA | 25634 |
| | SpRY_ED18-_G_ | CUUGAAAAAGUGGCACCGAGUCGGUGCUUCAGUCCCUUUCUCGUCGAUGGUCAGCACAGCCUUAUGCACG | |
| | 14FE_ | GC | |
| | PB12 | | |
| 756 | A1AT_ | UCCAGGCCGUGCAUAAGGCUGUUUUAGAGCUAGAAAUAGCAAGUUAAAAUAAGGCUAGUCCGUUAUCAA | 25635 |
| | SpRY_ED18-_G_ | CUUGAAAAAGUGGCACCGAGUCGGUGCUUCAGUCCCUUUCUCGUCGAUGGUCAGCACAGCCUUAUGCACG | |
| | 14FE_ | G | |
| | PB11 | | |
| 757 | A1AT_ | UCCAGGCCGUGCAUAAGGCUGUUUUAGAGCUAGAAAUAGCAAGUUAAAAUAAGGCUAGUCCGUUAUCAA | 25636 |
| | SpRY_ED18-_G_ | CUUGAAAAAGUGGCACCGAGUCGGUGCUUCAGUCCCUUUCUCGUCGAUGGUCAGCACAGCCUUAUGCACG | |
| | 14FE_ | | |
| | PB10 | | |
| 758 | A1AT_ | UCCAGGCCGUGCAUAAGGCUGUUUUAGAGCUAGAAAUAGCAAGUUAAAAUAAGGCUAGUCCGUUAUCAA | 25637 |
| | SpRY_ED18-_G_ | CUUGAAAAAGUGGCACCGAGUCGGUGCUUCAGUCCCUUUCUCGUCGAUGGUCAGCACAGCCUUAUGCAC | |
| | 14FE_ | | |
| | PB9 | | |
| 759 | A1AT_ | UCCAGGCCGUGCAUAAGGCUGUUUUAGAGCUAGAAAUAGCAAGUUAAAAUAAGGCUAGUCCGUUAUCAA | 25638 |
| | SpRY_ED18-_G_ | CUUGAAAAAGUGGCACCGAGUCGGUGCUUCAGUCCCUUUCUCGUCGAUGGUCAGCACAGCCUUAUGCA | |
| | 14FE_ | | |
| | PB8 | | |
| 760 | A1AT_ | UCCAGGCCGUGCAUAAGGCUGUUUUAGAGCUAGAAAUAGCAAGUUAAAAUAAGGCUAGUCCGUUAUCAA | 25639 |
| | SpRY_ED18-_G_ | CUUGAAAAAGUGGCACCGAGUCGGUGCAGUCCCUUUCUCGUCGAUGGUCAGCACAGCCUUAUGCACGGCC | |
| | 11FE_ | UGGA | |
| | PB17 | | |
| 761 | A1AT_ | UCCAGGCCGUGCAUAAGGCUGUUUUAGAGCUAGAAAUAGCAAGUUAAAAUAAGGCUAGUCCGUUAUCAA | 25640 |
| | SpRY_ED18-_G_ | CUUGAAAAAGUGGCACCGAGUCGGUGCAGUCCCUUUCUCGUCGAUGGUCAGCACAGCCUUAUGCACGGCC | |
| | 11FE_ | UGG | |
| | PB16 | | |
| 762 | A1AT_ | UCCAGGCCGUGCAUAAGGCUGUUUUAGAGCUAGAAAUAGCAAGUUAAAAUAAGGCUAGUCCGUUAUCAA | 25641 |
| | SpRY_ED18-_G_ | CUUGAAAAAGUGGCACCGAGUCGGUGCAGUCCCUUUCUCGUCGAUGGUCAGCACAGCCUUAUGCACGGCC | |
| | 11FE_ | UG | |
| | PB15 | | |
| 763 | A1AT_ | UCCAGGCCGUGCAUAAGGCUGUUUUAGAGCUAGAAAUAGCAAGUUAAAAUAAGGCUAGUCCGUUAUCAA | 25642 |
| | SpRY_ED18-_G_ | CUUGAAAAAGUGGCACCGAGUCGGUGCAGUCCCUUUCUCGUCGAUGGUCAGCACAGCCUUAUGCACGGCC | |
| | 11FE_ | U | |
| | PB14 | | |
| 764 | A1AT_ | UCCAGGCCGUGCAUAAGGCUGUUUUAGAGCUAGAAAUAGCAAGUUAAAAUAAGGCUAGUCCGUUAUCAA | 25643 |
| | SpRY_ED18-_G_ | CUUGAAAAAGUGGCACCGAGUCGGUGCAGUCCCUUUCUCGUCGAUGGUCAGCACAGCCUUAUGCACGGCC | |
| | 11FE_ | | |
| | PB13 | | |
| 765 | A1AT_ | UCCAGGCCGUGCAUAAGGCUGUUUUAGAGCUAGAAAUAGCAAGUUAAAAUAAGGCUAGUCCGUUAUCAA | 25644 |
| | SpRY_ED18-_G_ | CUUGAAAAAGUGGCACCGAGUCGGUGCAGUCCCUUUCUCGUCGAUGGUCAGCACAGCCUUAUGCACGGC | |
| | 11FE_ | | |
| | PB12 | | |
| 766 | A1AT_ | UCCAGGCCGUGCAUAAGGCUGUUUUAGAGCUAGAAAUAGCAAGUUAAAAUAAGGCUAGUCCGUUAUCAA | 25645 |
| | SpRY_ED18-_G_ | CUUGAAAAAGUGGCACCGAGUCGGUGCAGUCCCUUUCUCGUCGAUGGUCAGCACAGCCUUAUGCACGG | |
| | 11FE_ | | |
| | PB11 | | |
| 767 | A1AT_ | UCCAGGCCGUGCAUAAGGCUGUUUUAGAGCUAGAAAUAGCAAGUUAAAAUAAGGCUAGUCCGUUAUCAA | 25646 |
| | SpRY_ED18-_G_ | CUUGAAAAAGUGGCACCGAGUCGGUGCAGUCCCUUUCUCGUCGAUGGUCAGCACAGCCUUAUGCACG | |
| | 11FE_ | | |
| | PB10 | | |
| 768 | A1AT_ | UCCAGGCCGUGCAUAAGGCUGUUUUAGAGCUAGAAAUAGCAAGUUAAAAUAAGGCUAGUCCGUUAUCAA | 25647 |
| | SpRY_ | CUUGAAAAAGUGGCACCGAGUCGGUGCAGUCCCUUUCUCGUCGAUGGUCAGCACAGCCUUAUGCAC | |
| | ED18-_G_ | | |
| | 11FE_ | | |
| | PB9 | | |
| 769 | A1AT_ | UCCAGGCCGUGCAUAAGGCUGUUUUAGAGCUAGAAAUAGCAAGUUAAAAUAAGGCUAGUCCGUUAUCAA | 25648 |
| | SpRY_ED18-_G_ | CUUGAAAAAGUGGCACCGAGUCGGUGCAGUCCCUUUCUCGUCGAUGGUCAGCACAGCCUUAUGCA | |
| | 11FE_ | | |
| | PB8 | | |
| 770 | A1AT_ | UCCAGGCCGUGCAUAAGGCUGUUUUAGAGCUAGAAAUAGCAAGUUAAAAUAAGGCUAGUCCGUUAUCAA | 25649 |
| | SpRY_ED18-_G_ | CUUGAAAAAGUGGCACCGAGUCGGUGCUCCCUUUCUCGUCGAUGGUCAGCACAGCCUUAUGCACGGCCUG | |
| | 9FE_ | GA | |
| | PB17 | | |
| 771 | A1AT_ | UCCAGGCCGUGCAUAAGGCUGUUUUAGAGCUAGAAAUAGCAAGUUAAAAUAAGGCUAGUCCGUUAUCAA | 25650 |
| | SpRY_ED18-_G_ | CUUGAAAAAGUGGCACCGAGUCGGUGCUCCCUUUCUCGUCGAUGGUCAGCACAGCCUUAUGCACGGCCUG | |
| | 9FE_ | G | |
| | PB16 | | |
| 772 | A1AT_ | UCCAGGCCGUGCAUAAGGCUGUUUUAGAGCUAGAAAUAGCAAGUUAAAAUAAGGCUAGUCCGUUAUCAA | 25651 |
| | SpRY_ED18-_G_ | CUUGAAAAAGUGGCACCGAGUCGGUGCUCCCUUUCUCGUCGAUGGUCAGCACAGCCUUAUGCACGGCCUG | |
| | 9FE_ | | |
| | PB15 | | |
| 773 | A1AT_ | UCCAGGCCGUGCAUAAGGCUGUUUUAGAGCUAGAAAUAGCAAGUUAAAAUAAGGCUAGUCCGUUAUCAA | 25652 |
| | SpRY_ED18-_G_ | CUUGAAAAAGUGGCACCGAGUCGGUGCUCCCUUUCUCGUCGAUGGUCAGCACAGCCUUAUGCACGGCCU | |
| | 9FE_ | | |
| | PB14 | | |
| 774 | A1AT_ | UCCAGGCCGUGCAUAAGGCUGUUUUAGAGCUAGAAAUAGCAAGUUAAAAUAAGGCUAGUCCGUUAUCAA | 25653 |
| | SpRY_ED18-_G_ | CUUGAAAAAGUGGCACCGAGUCGGUGCUCCCUUUCUCGUCGAUGGUCAGCACAGCCUUAUGCACGGCC | |
| | 9FE_ | | |
| | PB13 | | |
| 775 | A1AT_ | UCCAGGCCGUGCAUAAGGCUGUUUUAGAGCUAGAAAUAGCAAGUUAAAAUAAGGCUAGUCCGUUAUCAA | 25654 |
| | SpRY_ED18-_G_ | CUUGAAAAAGUGGCACCGAGUCGGUGCUCCCUUUCUCGUCGAUGGUCAGCACAGCCUUAUGCACGGC | |
| | 9FE_ | | |
| | PB12 | | |
| 776 | A1AT_ | UCCAGGCCGUGCAUAAGGCUGUUUUAGAGCUAGAAAUAGCAAGUUAAAAUAAGGCUAGUCCGUUAUCAA | 25655 |
| | SpRY_ED18-_G_ | CUUGAAAAAGUGGCACCGAGUCGGUGCUCCCUUUCUCGUCGAUGGUCAGCACAGCCUUAUGCACGG | |
| | 9FE_ | | |
| | PB11 | | |
| 777 | A1AT_ | UCCAGGCCGUGCAUAAGGCUGUUUUAGAGCUAGAAAUAGCAAGUUAAAAUAAGGCUAGUCCGUUAUCAA | 25656 |
| | SpRY_ED18-_G_ | CUUGAAAAAGUGGCACCGAGUCGGUGCUCCCUUUCUCGUCGAUGGUCAGCACAGCCUUAUGCACG | |
| | 9FE_ | | |
| | PB10 | | |
| 778 | A1AT_ | UCCAGGCCGUGCAUAAGGCUGUUUUAGAGCUAGAAAUAGCAAGUUAAAAUAAGGCUAGUCCGUUAUCAA | 25657 |
| | SpRY_ED18-_G_ | CUUGAAAAAGUGGCACCGAGUCGGUGCUCCCUUUCUCGUCGAUGGUCAGCACAGCCUUAUGCAC | |
| | 9FE_ | | |
| | PB9 | | |
| 779 | A1AT_ | UCCAGGCCGUGCAUAAGGCUGUUUUAGAGCUAGAAAUAGCAAGUUAAAAUAAGGCUAGUCCGUUAUCAA | 25658 |
| | SpRY_ED18-_G_ | CUUGAAAAAGUGGCACCGAGUCGGUGCUCCCUUUCUCGUCGAUGGUCAGCACAGCCUUAUGCA | |
| | 9FE_ | | |
| | PB8 | | |
| 780 | A1AT_ | UCCAGGCCGUGCAUAAGGCUGUUUUAGAGCUAGAAAUAGCAAGUUAAAAUAAGGCUAGUCCGUUAUCAA | 25659 |
| | SpRY_ED18-_G_ | CUUGAAAAAGUGGCACCGAGUCGGUGCCCUUUCUCGUCGAUGGUCAGCACAGCCUUAUGCACGGCCUGGA | |
| | 7FE_ | | |
| | PB17 | | |
| 781 | A1AT_ | UCCAGGCCGUGCAUAAGGCUGUUUUAGAGCUAGAAAUAGCAAGUUAAAAUAAGGCUAGUCCGUUAUCAA | 25660 |
| | SpRY_ED18-_G_ | CUUGAAAAAGUGGCACCGAGUCGGUGCCCUUUCUCGUCGAUGGUCAGCACAGCCUUAUGCACGGCCUGG | |
| | 7FE_ | | |
| | PB16 | | |
| 782 | A1AT_ | UCCAGGCCGUGCAUAAGGCUGUUUUAGAGCUAGAAAUAGCAAGUUAAAAUAAGGCUAGUCCGUUAUCAA | 25661 |
| | SpRY_ED18-_G_ | CUUGAAAAAGUGGCACCGAGUCGGUGCCCUUUCUCGUCGAUGGUCAGCACAGCCUUAUGCACGGCCUG | |
| | 7FE_ | | |
| | PB15 | | |
| 783 | A1AT_ | UCCAGGCCGUGCAUAAGGCUGUUUUAGAGCUAGAAAUAGCAAGUUAAAAUAAGGCUAGUCCGUUAUCAA | 25662 |
| | SpRY_ED18-_G_ | CUUGAAAAAGUGGCACCGAGUCGGUGCCCUUUCUCGUCGAUGGUCAGCACAGCCUUAUGCACGGCCU | |
| | 7FE_ | | |
| | PB14 | | |
| 784 | A1AT_ | UCCAGGCCGUGCAUAAGGCUGUUUUAGAGCUAGAAAUAGCAAGUUAAAAUAAGGCUAGUCCGUUAUCAA | 25663 |
| | SpRY_ED18-_G_ | CUUGAAAAAGUGGCACCGAGUCGGUGCCCUUUCUCGUCGAUGGUCAGCACAGCCUUAUGCACGGCC | |
| | 7FE_ | | |
| | PB13 | | |
| 785 | A1AT_ | UCCAGGCCGUGCAUAAGGCUGUUUUAGAGCUAGAAAUAGCAAGUUAAAAUAAGGCUAGUCCGUUAUCAA | 25664 |
| | SpRY_ED18-_G_ | CUUGAAAAAGUGGCACCGAGUCGGUGCCCUUUCUCGUCGAUGGUCAGCACAGCCUUAUGCACGGC | |
| | 7FE_ | | |
| | PB12 | | |
| 786 | A1AT_ | UCCAGGCCGUGCAUAAGGCUGUUUUAGAGCUAGAAAUAGCAAGUUAAAAUAAGGCUAGUCCGUUAUCAA | 25665 |
| | SpRY_ED18-_G_ | CUUGAAAAAGUGGCACCGAGUCGGUGCCCUUUCUCGUCGAUGGUCAGCACAGCCUUAUGCACGG | |
| | 7FE_ | | |
| | PB11 | | |
| 787 | A1AT_ | UCCAGGCCGUGCAUAAGGCUGUUUUAGAGCUAGAAAUAGCAAGUUAAAAUAAGGCUAGUCCGUUAUCAA | 25666 |
| | SpRY_ED18-_G_ | CUUGAAAAAGUGGCACCGAGUCGGUGCCCUUUCUCGUCGAUGGUCAGCACAGCCUUAUGCACG | |
| | 7FE_ | | |
| | PB10 | | |
| 788 | A1AT_ | UCCAGGCCGUGCAUAAGGCUGUUUUAGAGCUAGAAAUAGCAAGUUAAAAUAAGGCUAGUCCGUUAUCAA | 25667 |
| | SpRY_ED18-_G_ | CUUGAAAAAGUGGCACCGAGUCGGUGCCCUUUCUCGUCGAUGGUCAGCACAGCCUUAUGCAC | |
| | 7FE_ | | |
| | PB9 | | |
| 789 | A1AT_ | UCCAGGCCGUGCAUAAGGCUGUUUUAGAGCUAGAAAUAGCAAGUUAAAAUAAGGCUAGUCCGUUAUCAA | 25668 |
| | SpRY_ED18-_G_ | CUUGAAAAAGUGGCACCGAGUCGGUGCCCUUUCUCGUCGAUGGUCAGCACAGCCUUAUGCA | |
| | 7FE_ | | |
| | PB8 | | |
| 790 | A1AT_ | UCCAGGCCGUGCAUAAGGCUGUUUUAGAGCUAGAAAUAGCAAGUUAAAAUAAGGCUAGUCCGUUAUCAA | 25669 |
| | SpRY_ED18-_G_ | CUUGAAAAAGUGGCACCGAGUCGGUGCUUUCUCGUCGAUGGUCAGCACAGCCUUAUGCACGGCCUGGA | |
| | 5FE_ | | |
| | PB17 | | |
| 791 | A1AT_ | UCCAGGCCGUGCAUAAGGCUGUUUUAGAGCUAGAAAUAGCAAGUUAAAAUAAGGCUAGUCCGUUAUCAA | 25670 |
| | SpRY_ED18-_G_ | CUUGAAAAAGUGGCACCGAGUCGGUGCUUUCUCGUCGAUGGUCAGCACAGCCUUAUGCACGGCCUGG | |
| | 5FE_ | | |
| | PB16 | | |
| 792 | A1AT_ | UCCAGGCCGUGCAUAAGGCUGUUUUAGAGCUAGAAAUAGCAAGUUAAAAUAAGGCUAGUCCGUUAUCAA | 25671 |
| | SpRY_ED18-_G_ | CUUGAAAAAGUGGCACCGAGUCGGUGCUUUCUCGUCGAUGGUCAGCACAGCCUUAUGCACGGCCUG | |
| | 5FE_ | | |
| | PB15 | | |
| 793 | A1AT_ | UCCAGGCCGUGCAUAAGGCUGUUUUAGAGCUAGAAAUAGCAAGUUAAAAUAAGGCUAGUCCGUUAUCAA | 25672 |
| | SpRY_ED18-_G_ | CUUGAAAAAGUGGCACCGAGUCGGUGCUUUCUCGUCGAUGGUCAGCACAGCCUUAUGCACGGCCU | |
| | 5FE_ | | |
| | PB14 | | |
| 794 | A1AT_ | UCCAGGCCGUGCAUAAGGCUGUUUUAGAGCUAGAAAUAGCAAGUUAAAAUAAGGCUAGUCCGUUAUCAA | 25673 |
| | SpRY_ED18-_G_ | CUUGAAAAAGUGGCACCGAGUCGGUGCUUUCUCGUCGAUGGUCAGCACAGCCUUAUGCACGGCC | |
| | 5FE_ | | |
| | PB13 | | |
| 795 | A1AT_ | UCCAGGCCGUGCAUAAGGCUGUUUUAGAGCUAGAAAUAGCAAGUUAAAAUAAGGCUAGUCCGUUAUCAA | 25674 |
| | SpRY_ED18-_G_ | CUUGAAAAAGUGGCACCGAGUCGGUGCUUUCUCGUCGAUGGUCAGCACAGCCUUAUGCACGGC | |
| | 5FE_ | | |
| | PB12 | | |
| 796 | A1AT_ | UCCAGGCCGUGCAUAAGGCUGUUUUAGAGCUAGAAAUAGCAAGUUAAAAUAAGGCUAGUCCGUUAUCAA | 25675 |
| | SpRY_ED18-_G_ | CUUGAAAAAGUGGCACCGAGUCGGUGCUUUCUCGUCGAUGGUCAGCACAGCCUUAUGCACGG | |
| | 5FE_ | | |
| | PB11 | | |
| 797 | A1AT_ | UCCAGGCCGUGCAUAAGGCUGUUUUAGAGCUAGAAAUAGCAAGUUAAAAUAAGGCUAGUCCGUUAUCAA | 25676 |
| | SpRY_ED18-_G_ | CUUGAAAAAGUGGCACCGAGUCGGUGCUUUCUCGUCGAUGGUCAGCACAGCCUUAUGCACG | |
| | 5FE_ | | |
| | PB10 | | |
| 798 | A1AT_ | UCCAGGCCGUGCAUAAGGCUGUUUUAGAGCUAGAAAUAGCAAGUUAAAAUAAGGCUAGUCCGUUAUCAA | 25677 |
| | SpRY_ED18-_G_ | CUUGAAAAAGUGGCACCGAGUCGGUGCUUUCUCGUCGAUGGUCAGCACAGCCUUAUGCAC | |
| | 5FE_ | | |
| | PB9 | | |
| 799 | A1AT_ | UCCAGGCCGUGCAUAAGGCUGUUUUAGAGCUAGAAAUAGCAAGUUAAAAUAAGGCUAGUCCGUUAUCAA | 25678 |
| | SpRY_ED18-_G_ | CUUGAAAAAGUGGCACCGAGUCGGUGCUUUCUCGUCGAUGGUCAGCACAGCCUUAUGCA | |
| | 5FE_ | | |
| | PB8 | | |
| 800 | A1AT_ | UCCAGGCCGUGCAUAAGGCUGUUUUAGAGCUAGAAAUAGCAAGUUAAAAUAAGGCUAGUCCGUUAUCAA | 25679 |
| | SpRY_ED18-_G_ | CUUGAAAAAGUGGCACCGAGUCGGUGCUCUCGUCGAUGGUCAGCACAGCCUUAUGCACGGCCUGGA | |
| | 3FE_ | | |
| | PB17 | | |
| 801 | A1AT_ | UCCAGGCCGUGCAUAAGGCUGUUUUAGAGCUAGAAAUAGCAAGUUAAAAUAAGGCUAGUCCGUUAUCAA | 25680 |
| | SpRY_ED18-_G_ | CUUGAAAAAGUGGCACCGAGUCGGUGCUCUCGUCGAUGGUCAGCACAGCCUUAUGCACGGCCUGG | |
| | 3FE_ | | |
| | PB16 | | |
| 802 | A1AT_ | UCCAGGCCGUGCAUAAGGCUGUUUUAGAGCUAGAAAUAGCAAGUUAAAAUAAGGCUAGUCCGUUAUCAA | 25681 |
| | SpRY_ED18-_G_ | CUUGAAAAAGUGGCACCGAGUCGGUGCUCUCGUCGAUGGUCAGCACAGCCUUAUGCACGGCCUG | |
| | 3FE_ | | |
| | PB15 | | |
| 803 | A1AT_ | UCCAGGCCGUGCAUAAGGCUGUUUUAGAGCUAGAAAUAGCAAGUUAAAAUAAGGCUAGUCCGUUAUCAA | 25682 |
| | SpRY_ED18-_G_ | CUUGAAAAAGUGGCACCGAGUCGGUGCUCUCGUCGAUGGUCAGCACAGCCUUAUGCACGGCCU | |
| | 3FE_ | | |
| | PB14 | | |
| 804 | A1AT_ | UCCAGGCCGUGCAUAAGGCUGUUUUAGAGCUAGAAAUAGCAAGUUAAAAUAAGGCUAGUCCGUUAUCAA | 25683 |
| | SpRY_ED18-_G_ | CUUGAAAAAGUGGCACCGAGUCGGUGCUCUCGUCGAUGGUCAGCACAGCCUUAUGCACGGCC | |
| | 3FE_ | | |
| | PB13 | | |
| 805 | A1AT_ | UCCAGGCCGUGCAUAAGGCUGUUUUAGAGCUAGAAAUAGCAAGUUAAAAUAAGGCUAGUCCGUUAUCAA | 25684 |
| | SpRY_ED18-_G_ | CUUGAAAAAGUGGCACCGAGUCGGUGCUCUCGUCGAUGGUCAGCACAGCCUUAUGCACGGC | |
| | 3FE_ | | |
| | PB12 | | |
| 806 | A1AT_ | UCCAGGCCGUGCAUAAGGCUGUUUUAGAGCUAGAAAUAGCAAGUUAAAAUAAGGCUAGUCCGUUAUCAA | 25685 |
| | SpRY_ED18-_G_ | CUUGAAAAAGUGGCACCGAGUCGGUGCUCUCGUCGAUGGUCAGCACAGCCUUAUGCACGG | |
| | 3FE_ | | |
| | PB11 | | |
| 807 | A1AT_ | UCCAGGCCGUGCAUAAGGCUGUUUUAGAGCUAGAAAUAGCAAGUUAAAAUAAGGCUAGUCCGUUAUCAA | 25686 |
| | SpRY_ED18-_G_ | CUUGAAAAAGUGGCACCGAGUCGGUGCUCUCGUCGAUGGUCAGCACAGCCUUAUGCACG | |
| | 3FE_ | | |
| | PB10 | | |
| 808 | A1AT_ | UCCAGGCCGUGCAUAAGGCUGUUUUAGAGCUAGAAAUAGCAAGUUAAAAUAAGGCUAGUCCGUUAUCAA | 25687 |
| | SpRY_ED18-_G_ | CUUGAAAAAGUGGCACCGAGUCGGUGCUCUCGUCGAUGGUCAGCACAGCCUUAUGCAC | |
| | 3FE_ | | |
| | PB9 | | |
| 809 | A1AT_ | UCCAGGCCGUGCAUAAGGCUGUUUUAGAGCUAGAAAUAGCAAGUUAAAAUAAGGCUAGUCCGUUAUCAA | 25688 |
| | SpRY_ED18-_G_ | CUUGAAAAAGUGGCACCGAGUCGGUGCUCUCGUCGAUGGUCAGCACAGCCUUAUGCA | |
| | 3FE_ | | |
| | PB8 | | |

[0899] It should be understood that for all numerical bounds describing some parameter in this application, such as “about,” “at least,” “less than,” and “more than,” the description also necessarily encompasses any range bounded by the recited values. Accordingly, for example, the description “at least 1, 2, 3, 4, or 5” also describes, inter alia, the ranges 1-2, 1-3, 1-4, 1-5, 2-3, 2-4, 2-5, 3-4, 3-5, and 4-5, et cetera.

[0900] For all patents, applications, or other reference cited herein, such as non-patent literature and reference sequence information, it should be understood that they are incorporated by reference in their entirety for all purposes as well as for the proposition that is recited. Where any conflict exists between a document incorporated by reference and the present application, this application will control. All information associated with reference gene sequences disclosed in this application, such as GeneIDs or accession numbers (typically referencing NCBI accession numbers), including, for example, genomic loci, genomic sequences, functional annotations, allelic variants, and reference mRNA (including, e.g., exon boundaries or response elements) and protein sequences (such as conserved domain structures), as well as chemical references (e.g., PubChem compound, PubChem substance, or PubChem Bioassay entries, including the annotations therein, such as structures and assays, et cetera), are hereby incorporated by reference in their entirety.

[0901] Headings used in this application are for convenience only and do not affect the interpretation of this application.

LENGTHY TABLES
The patent application contains a lengthy table section. A copy of the table is available in electronic form from the USPTO web site (https://seqdata.uspto.gov/?pageRequest=docDetail&DocID=US20240084334A1). An electronic copy of the table will also be available from the USPTO upon request and payment of the fee set forth in 37 CFR 1.19(b)(3).

1. A template RNA comprising, from 5′ to 3′:
a) a gRNA spacer that is complementary to a first portion of the human SERPINA1 gene, wherein the gRNA spacer comprises an RNA sequence according to SEQ ID NO: 20,623;
b) a gRNA scaffold that binds a SpyCas9-SpRY domain;
c) a heterologous object sequence comprising a mutation region to correct a mutation in a second portion of the human SERPINA1 gene; and
d) a primer binding site (PBS) sequence comprising at least 3 bases with 100% identity to a third portion of the human SERPINA1 gene.

2. The template RNA of claim 1, wherein the mutation to be corrected in the human SERPINA1 gene is E342K.

3. The template RNA of claim 1, wherein the gRNA spacer has a length of 20 nucleotides.

4. The template RNA of claim 1, wherein the heterologous object sequence has a length of 6-16 nucleotides.

5. The template RNA of claim 1, wherein the heterologous object sequence has a length of 6 nucleotides.

6. The template RNA of claim 1, wherein the heterologous object sequence comprises, from 5′ to 3′, a post-edit homology region, a mutation region, and a pre-edit homology region.

7. The template RNA of claim 1, wherein the heterologous object sequence has an RNA sequence of TTTCTC.

8. The template RNA of claim 1, wherein the PBS sequence has a length of 8-12 nucleotides.

9. The template RNA of claim 1, wherein the PBS sequence has a length of 10 nucleotides.

10. The template RNA of claim 1, wherein the PBS sequence has an RNA sequence according to SEQ ID NO: 21433.

11. The template RNA of claim 1, wherein the gRNA scaffold comprises an RNA sequence having at least 90% identity to SEQ ID NO: 20427.

12. The template RNA of claim 1, wherein the gRNA scaffold comprises an RNA sequence according to SEQ ID NO: 20427.

13. The template RNA of claim 1, which comprises an RNA sequence having at least 90% identity to SEQ ID NO: 24956.

14. The template RNA of claim 1, which comprises an RNA sequence according to SEQ ID NO: 24956.

15. The template RNA of claim 1, which comprises one or more chemically modified nucleotides.

16. The template RNA of claim 15, which comprises the RNA sequence and chemical modifications set out in SEQ ID NO: 24146.

17. A gene modifying system comprising:
a template RNA of claim 1, and
a gene modifying polypeptide, or a nucleic acid encoding the gene modifying polypeptide.

18. The gene modifying system of claim 17, which comprises the nucleic acid encoding the gene modifying polypeptide, wherein the nucleic acid comprises RNA.

19. The gene modifying system of claim 17, wherein the gene modifying polypeptide comprises:
a reverse transcriptase (RT) domain;
a Cas domain; and
a linker disposed between the RT domain and the Cas domain.

20. The gene modifying system of claim 19, wherein the Cas domain is a SpyCas9-SpRY domain.

21. The gene modifying system of claim 19, wherein the RT domain is an RT domain from a murine leukemia virus (MMLV), a porcine endogenous retrovirus (PERV); Avian reticuloendotheliosis virus (AVIRE), a feline leukemia virus (FLV), simian foamy virus (SFV) (e.g., SFV3L), bovine leukemia virus (BLV), Mason-Pfizer monkey virus (MPMV), human foamy virus (HFV), or bovine foamy/syncytial virus (BFV/BSV).

22. A pharmaceutical composition, comprising the gene modifying system of claim 17 and a pharmaceutically acceptable excipient or carrier.

23. The pharmaceutical composition of claim 22, wherein the pharmaceutically acceptable excipient or carrier is selected from the group consisting of a plasmid vector, a viral vector, a vesicle, and a lipid nanoparticle.

24. A method of making the template RNA of claim 1, the method comprising synthesizing the template RNA by in vitro transcription, solid-phase synthesis, or by introducing a DNA encoding the template RNA into a host cell under conditions that allow for production of the template RNA.

25. A method for modifying a target site in the human SERPINA1 gene in a cell, the method comprising contacting the cell with the gene modifying system of claim 17, or DNA encoding the same, thereby modifying the target site in the human SERPINA1 gene in a cell.

26. A method for treating a subject having a disease or condition associated with a mutation in the human SERPINA1 gene, the method comprising administering to the subject the gene modifying system of claim 17, or DNA encoding the same, thereby treating the subject having a disease or condition associated with a mutation in the human SERPINA1 gene.

27. A template RNA comprising, from 5′ to 3′:
(i) a gRNA spacer that is complementary to a first portion of the human SERPINA1 gene, wherein the gRNA spacer has a sequence comprising the core nucleotides of a gRNA spacer sequence of Table 1, or wherein the gRNA spacer has a sequence of a spacer chosen from Tables 6A, 6B, X2, X3, X3a, X5, or XX, wherein the gRNA spacer has a sequence other than SEQ ID NO: 20,623;
(ii) a gRNA scaffold that binds a gene modifying polypeptide,
(iii) a heterologous object sequence comprising a mutation region to correct a mutation in a second portion of the human SERPINA1 gene, and
(iv) a primer binding site (PBS) sequence comprising at least 5, 6, 7, or 8 bases with 100% identity to a third portion of the human SERPINA1 gene.

28. A gene modifying system comprising:
a template RNA of claim 27, and
a gene modifying polypeptide, or a nucleic acid encoding the gene modifying polypeptide.

29. A method for modifying a target site in the human SERPINA1 gene in a cell, the method comprising contacting the cell with the gene modifying system of claim 28, or DNA encoding the same, thereby modifying the target site in the human SERPINA1 gene in a cell.

30. A method for treating a subject having a disease or condition associated with a mutation in the human SERPINA1 gene, the method comprising administering to the subject the gene modifying system of claim 28, or DNA encoding the same, thereby treating the subject having a disease or condition associated with a mutation in the human SERPINA1 gene.

The application's sequence listing, which the Patent Office published only in electronic form, follows.

SEQUENCE LISTING (25697 sequences)

SEQ ID NO: 1 - protein, 2133 aa, synthetic construct
MPAAKRVKLDGGDKKYSIGLDIGTNSVGWAVITDEYKVPSKKFKVLGNTDRHSIKKNLIGALLFDSGETAEATRLKRTARRRYTRRKNRICYLQEIFSNEMAKVDDSFFHRLEESFLVEEDKKHERHPIFGNIVDEVAYHEKYPTIYHLRKKLVDSTDKADLRLIYLALAHMIKFRGHFLIEGDLNPDNSDVDKLFIQLVQTYNQLFEENPINASGVDAKAILSARLSKSRRLENLIAQLPGEKKNGLFGNLIALSLGLTPNFKSNFDLAEDAKLQLSKDTYDDDLDNLLAQIGDQYADLFLAAKNLSDAILLSDILRVNTEITKAPLSASMIKRYDEHHQDLTLLKALVRQQLPEKYKEIFFDQSKNGYAGYIDGGASQEEFYKFIKPILEKMDGTEELLVKLNREDLLRKQRTFDNGSIPHQIHLGELHAILRRQEDFYPFLKDNREKIEKILTFRIPYYVGPLARGNSRFAWMTRKSEETITPWNFEEVVDKGASAQSFIERMTNFDKNLPNEKVLPKHSLLYEYFTVYNELTKVKYVTEGMRKPAFLSGEQKKAIVDLLFKTNRKVTVKQLKEDYFKKIECFDSVEISGVEDRFNASLGTYHDLLKIIKDKDFLDNEENEDILEDIVLTLTLFEDREMIEERLKTYAHLFDDKVMKQLKRRRYTGWGRLSRKLINGIRDKQSGKTILDFLKSDGFANRNFMQLIHDDSLTFKEDIQKAQVSGQGDSLHEHIANLAGSPAIKKGILQTVKVVDELVKVMGRHKPENIVIEMARENQTTQKGQKNSRERMKRIEEGIKELGSQILKEHPVENTQLQNEKLYLYYLQNGRDMYVDQELDINRLSDYDVDHIVPQSFLKDDSIDNKVLTRSDKARGKSDNVPSEEVVKKMKNYWRQLLNAKLITQRKFDNLTKAERGGLSELDKAGFIKRQLVETRQITKHVAQILDSRMNTKYDENDKLIREVKVITLKSKLVSDFRKDFQFYKVREINNYHHAHDAYLNAVVGTALIKKYPKLESEFVYGDYKVYDVRKMIAKSEQEIGKATAKYFFYSNIMNFFKTEITLANGEIRKRPLIETNGETGEIVWDKGRDFATVRKVLSMPQVNIVKKTEVQTGGFSKESILPKRNSDKLIARKKDWDPKKYGGFDSPTVAYSVLVVAKVEKGKSKKLKSVKELLGITIMERSSFEKNPIDFLEAKGYKEVKKDLIIKLPKYSLFELENGRKRMLASAGELQKGNELALPSKYVNFLYLASHYEKLKGSPEDNEQKQLFVEQHKHYLDEIIEQISEFSKRVILADANLDKVLSAYNKHRDKPIREQAENIIHLFTLTNLGAPAAFKYFDTTIDRKRYTSTKEVLDATLIHQSITGLYETRIDLSQLGGDGGAEAAAKEAAAKEAAAKEAAAKALEAEAAAKEAAAKEAAAKEAAAKAGGTAPLEEEYRLFLEAPIQNVTLLEQWKREIPKVWAEINPPGLASTQAPIHVQLLSTALPVRVRQYPITLEAKRSLRETIRKFRAAGILRPVHSPWNTPLLPVRKSGTSEYRMVQDLREVNKRVETIHPTVPNPYTLLSLLPPDRIWYSVLDLKDAFFCIPLAPESQLIFAFEWADAEEGESGQLTWTRLPQGFKNSPTLFDEALNRDLQGFRLDHPSVSLLQYVDDLLIAADTQAACLSATRDLLMTLAELGYRVSGKKAQLCQEEVTYLGFKIHKGSRSLSNSRTQAILQIPVPKTKRQVREFLGTIGYCRLWIPGFAELAQPLYAATRGGNDPLVWGEKEEEAFQSLKLALTQPPALALPSLDKPFQLFVEETSGAAKGVLTQALGPWKRPVAYLSKRLDPVAAGWPRCLRAIAAAALLTREASKLTFGQDIEITSSHNLESLLRSPPDKWLTNARITQYQVLLLDPPRVRFKQTAALNPATLLPETDDTLPIHHCLDTLDSLTSTRPDLTDQPLAQAEATLFTDGSSYIRDGKRYAGAAVVTLDSVIWAEPLPIGTSAQKAELIALTKALEWSKDKSVNIYTDSRYAFATLHVHGMIYRERGLLTAGGKAIKNAPEILALLTAVWLPKRVAVMHCKGHQKDDAPTSTGNRRADEVAREVAIRPLSTQATISAGKRTADGSEFEKRTADGSEFESPKKKAKVE

SEQ ID NO: 2 - protein, 2112 aa, synthetic construct
MPAAKRVKLDGGDKKYSIGLDIGTNSVGWAVITDEYKVPSKKFKVLGNTDRHSIKKNLIGALLFDSGETAEATRLKRTARRRYTRRKNRICYLQEIFSNEMAKVDDSFFHRLEESFLVEEDKKHERHPIFGNIVDEVAYHEKYPTIYHLRKKLVDSTDKADLRLIYLALAHMIKFRGHFLIEGDLNPDNSDVDKLFIQLVQTYNQLFEENPINASGVDAKAILSARLSKSRRLENLIAQLPGEKKNGLFGNLIALSLGLTPNFKSNFDLAEDAKLQLSKDTYDDDLDNLLAQIGDQYADLFLAAKNLSDAILLSDILRVNTEITKAPLSASMIKRYDEHHQDLTLLKALVRQQLPEKYKEIFFDQSKNGYAGYIDGGASQEEFYKFIKPILEKMDGTEELLVKLNREDLLRKQRTFDNGSIPHQIHLGELHAILRRQEDFYPFLKDNREKIEKILTFRIPYYVGPLARGNSRFAWMTRKSEETITPWNFEEVVDKGASAQSFIERMTNFDKNLPNEKVLPKHSLLYEYFTVYNELTKVKYVTEGMRKPAFLSGEQKKAIVDLLFKTNRKVTVKQLKEDYFKKIECFDSVEISGVEDRFNASLGTYHDLLKIIKDKDFLDNEENEDILEDIVLTLTLFEDREMIEERLKTYAHLFDDKVMKQLKRRRYTGWGRLSRKLINGIRDKQSGKTILDFLKSDGFANRNFMQLIHDDSLTFKEDIQKAQVSGQGDSLHEHIANLAGSPAIKKGILQTVKVVDELVKVMGRHKPENIVIEMARENQTTQKGQKNSRERMKRIEEGIKELGSQILKEHPVENTQLQNEKLYLYYLQNGRDMYVDQELDINRLSDYDVDHIVPQSFLKDDSIDNKVLTRSDKARGKSDNVPSEEVVKKMKNYWRQLLNAKLITQRKFDNLTKAERGGLSELDKAGFIKRQLVETRQITKHVAQILDSRMNTKYDENDKLIREVKVITLKSKLVSDFRKDFQFYKVREINNYHHAHDAYLNAVVGTALIKKYPKLESEFVYGDYKVYDVRKMIAKSEQEIGKATAKYFFYSNIMNFFKTEITLANGEIRKRPLIETNGETGEIVWDKGRDFATVRKVLSMPQVNIVKKTEVQTGGFSKESILPKRNSDKLIARKKDWDPKKYGGFDSPTVAYSVLVVAKVEKGKSKKLKSVKELLGITIMERSSFEKNPIDFLEAKGYKEVKKDLIIKLPKYSLFELENGRKRMLASAGELQKGNELALPSKYVNFLYLASHYEKLKGSPEDNEQKQLFVEQHKHYLDEIIEQISEFSKRVILADANLDKVLSAYNKHRDKPIREQAENIIHLFTLTNLGAPAAFKYFDTTIDRKRYTSTKEVLDATLIHQSITGLYETRIDLSQLGGDGGGGGGSGGGGSGGGGSGGGGSGGGGSGGTAPLEEEYRLFLEAPIQNVTLLEQWKREIPKVWAEINPPGLASTQAPIHVQLLSTALPVRVRQYPITLEAKRSLRETIRKFRAAGILRPVHSPWNTPLLPVRKSGTSEYRMVQDLREVNKRVETIHPTVPNPYTLLSLLPPDRIWYSVLDLKDAFFCIPLAPESQLIFAFEWADAEEGESGQLTWTRLPQGFKNSPTLFDEALNRDLQGFRLDHPSVSLLQYVDDLLIAADTQAACLSATRDLLMTLAELGYRVSGKKAQLCQEEVTYLGFKIHKGSRSLSNSRTQAILQIPVPKTKRQVREFLGTIGYCRLWIPGFAELAQPLYAATRGGNDPLVWGEKEEEAFQSLKLALTQPPALALPSLDKPFQLFVEETSGAAKGVLTQALGPWKRPVAYLSKRLDPVAAGWPRCLRAIAAAALLTREASKLTFGQDIEITSSHNLESLLRSPPDKWLTNARITQYQVLLLDPPRVRFKQTAALNPATLLPETDDTLPIHHCLDTLDSLTSTRPDLTDQPLAQAEATLFTDGSSYIRDGKRYAGAAVVTLDSVIWAEPLPIGTSAQKAELIALTKALEWSKDKSVNIYTDSRYAFATLHVHGMIYRERGLLTAGGKAIKNAPEILALLTAVWLPKRVAVMHCKGHQKDDAPTSTGNRRADEVAREVAIRPLSTQATISAGKRTADGSEFEKRTADGSEFESPKKKAKVE

SEQ ID NO: 3 - protein, 2098 aa, synthetic construct
MPAAKRVKLDGGDKKYSIGLDIGTNSVGWAVITDEYKVPSKKFKVLGNTDRHSIKKNLIGALLFDSGETAEATRLKRTARRRYTRRKNRICYLQEIFSNEMAKVDDSFFHRLEESFLVEEDKKHERHPIFGNIVDEVAYHEKYPTIYHLRKKLVDSTDKADLRLIYLALAHMIKFRGHFLIEGDLNPDNSDVDKLFIQLVQTYNQLFEENPINASGVDAKAILSARLSKSRRLENLIAQLPGEKKNGLFGNLIALSLGLTPNFKSNFDLAEDAKLQLSKDTYDDDLDNLLAQIGDQYADLFLAAKNLSDAILLSDILRVNTEITKAPLSASMIKRYDEHHQDLTLLKALVRQQLPEKYKEIFFDQSKNGYAGYIDGGASQEEFYKFIKPILEKMDGTEELLVKLNREDLLRKQRTFDNGSIPHQIHLGELHAILRRQEDFYPFLKDNREKIEKILTFRIPYYVGPLARGNSRFAWMTRKSEETITPWNFEEVVDKGASAQSFIERMTNFDKNLPNEKVLPKHSLLYEYFTVYNELTKVKYVTEGMRKPAFLSGEQKKAIVDLLFKTNRKVTVKQLKEDYFKKIECFDSVEISGVEDRFNASLGTYHDLLKIIKDKDFLDNEENEDILEDIVLTLTLFEDREMIEERLKTYAHLFDDKVMKQLKRRRYTGWGRLSRKLINGIRDKQSGKTILDFLKSDGFANRNFMQLIHDDSLTFKEDIQKAQVSGQGDSLHEHIANLAGSPAIKKGILQTVKVVDELVKVMGRHKPENIVIEMARENQTTQKGQKNSRERMKRIEEGIKELGSQILKEHPVENTQLQNEKLYLYYLQNGRDMYVDQELDINRLSDYDVDHIVPQSFLKDDSIDNKVLTRSDKARGKSDNVPSEEVVKKMKNYWRQLLNAKLITQRKFDNLTKAERGGLSELDKAGFIKRQLVETRQITKHVAQILDSRMNTKYDENDKLIREVKVITLKSKLVSDFRKDFQFYKVREINNYHHAHDAYLNAVVGTALIKKYPKLESEFVYGDYKVYDVRKMIAKSEQEIGKATAKYFFYSNIMNFFKTEITLANGEIRKRPLIETNGETGEIVWDKGRDFATVRKVLSMPQVNIVKKTEVQTGGFSKESILPKRNSDKLIARKKDWDPKKYGGFDSPTVAYSVLVVAKVEKGKSKKLKSVKELLGITIMERSSFEKNPIDFLEAKGYKEVKKDLIIKLPKYSLFELENGRKRMLASAGELQKGNELALPSKYVNFLYLASHYEKLKGSPEDNEQKQLFVEQHKHYLDEIIEQISEFSKRVILADANLDKVLSAYNKHRDKPIREQAENIIHLFTLTNLGAPAAFKYFDTTIDRKRYTSTKEVLDATLIHQSITGLYETRIDLSQLGGDGGPAPEAAAKGGGGGTAPLEEEYRLFLEAPIQNVTLLEQWKREIPKVWAEINPPGLASTQAPIHVQLLSTALPVRVRQYPITLEAKRSLRETIRKFRAAGILRPVHSPWNTPLLPVRKSGTSEYRMVQDLREVNKRVETIHPTVPNPYTLLSLLPPDRIWYSVLDLKDAFFCIPLAPESQLIFAFEWADAEEGESGQLTWTRLPQGFKNSPTLFDEALNRDLQGFRLDHPSVSLLQYVDDLLIAADTQAACLSATRDLLMTLAELGYRVSGKKAQLCQEEVTYLGFKIHKGSRSLSNSRTQAILQIPVPKTKRQVREFLGTIGYCRLWIPGFAELAQPLYAATRGGNDPLVWGEKEEEAFQSLKLALTQPPALALPSLDKPFQLFVEETSGAAKGVLTQALGPWKRPVAYLSKRLDPVAAGWPRCLRAIAAAALLTREASKLTFGQDIEITSSHNLESLLRSPPDKWLTNARITQYQVLLLDPPRVRFKQTAALNPATLLPETDDTLPIHHCLDTLDSLTSTRPDLTDQPLAQAEATLFTDGSSYIRDGKRYAGAAVVTLDSVIWAEPLPIGTSAQKAELIALTKALEWSKDKSVNIYTDSRYAFATLHVHGMIYRERGLLTAGGKAIKNAPEILALLTAVWLPKRVAVMHCKGHQKDDAPTSTGNRRADEVAREVAIRPLSTQATISAGKRTADGSEFEKRTADGSEFESPKKKAKVE

SEQ ID NO: 4 - protein, 2090 aa, synthetic construct
MPAAKRVKLDGGDKKYSIGLDIGTNSVGWAVITDEYKVPSKKFKVLGNTDRHSIKKNLIGALLFDSGETAEATRLKRTARRRYTRRKNRICYLQEIFSNEMAKVDDSFFHRLEESFLVEEDKKHERHPIFGNIVDEVAYHEKYPTIYHLRKKLVDSTDKADLRLIYLALAHMIKFRGHFLIEGDLNPDNSDVDKLFIQLVQTYNQLFEENPINASGVDAKAILSARLSKSRRLENLIAQLPGEKKNGLFGNLIALSLGLTPNFKSNFDLAEDAKLQLSKDTYDDDLDNLLAQIGDQYADLFLAAKNLSDAILLSDILRVNTEITKAPLSASMIKRYDEHHQDLTLLKALVRQQLPEKYKEIFFDQSKNGYAGYIDGGASQEEFYKFIKPILEKMDGTEELLVKLNREDLLRKQRTFDNGSIPHQIHLGELHAILRRQEDFYPFLKDNREKIEKILTFRIPYYVGPLARGNSRFAWMTRKSEETITPWNFEEVVDKGASAQSFIERMTNFDKNLPNEKVLPKHSLLYEYFTVYNELTKVKYVTEGMRKPAFLSGEQKKAIVDLLFKTNRKVTVKQLKEDYFKKIECFDSVEISGVEDRFNASLGTYHDLLKIIKDKDFLDNEENEDILEDIVLTLTLFEDREMIEERLKTYAHLFDDKVMKQLKRRRYTGWGRLSRKLINGIRDKQSGKTILDFLKSDGFANRNFMQLIHDDSLTFKEDIQKAQVSGQGDSLHEHIANLAGSPAIKKGILQTVKVVDELVKVMGRHKPENIVIEMARENQTTQKGQKNSRERMKRIEEGIKELGSQILKEHPVENTQLQNEKLYLYYLQNGRDMYVDQELDINRLSDYDVDHIVPQSFLKDDSIDNKVLTRSDKARGKSDNVPSEEVVKKMKNYWRQLLNAKLITQRKFDNLTKAERGGLSELDKAGFIKRQLVETRQITKHVAQILDSRMNTKYDENDKLIREVKVITLKSKLVSDFRKDFQFYKVREINNYHHAHDAYLNAVVGTALIKKYPKLESEFVYGDYKVYDVRKMIAKSEQEIGKATAKYFFYSNIMNFFKTEITLANGEIRKRPLIETNGETGEIVWDKGRDFATVRKVLSMPQVNIVKKTEVQTGGFSKESILPKRNSDKLIARKKDWDPKKYGGFDSPTVAYSVLVVAKVEKGKSKKLKSVKELLGITIMERSSFEKNPIDFLEAKGYKEVKKDLIIKLPKYSLFELENGRKRMLASAGELQKGNELALPSKYVNFLYLASHYEKLKGSPEDNEQKQLFVEQHKHYLDEIIEQISEFSKRVILADANLDKVLSAYNKHRDKPIREQAENIIHLFTLTNLGAPAAFKYFDTTIDRKRYTSTKEVLDATLIHQSITGLYETRIDLSQLGGDGGGGGGGTAPLEEEYRLFLEAPIQNVTLLEQWKREIPKVWAEINPPGLASTQAPIHVQLLSTALPVRVRQYPITLEAKRSLRETIRKFRAAGILRPVHSPWNTPLLPVRKSGTSEYRMVQDLREVNKRVETIHPTVPNPYTLLSLLPPDRIWYSVLDLKDAFFCIPLAPESQLIFAFEWADAEEGESGQLTWTRLPQGFKNSPTLFDEALNRDLQGFRLDHPSVSLLQYVDDLLIAADTQAACLSATRDLLMTLAELGYRVSGKKAQLCQEEVTYLGFKIHKGSRSLSNSRTQAILQIPVPKTKRQVREFLGTIGYCRLWIPGFAELAQPLYAATRGGNDPLVWGEKEEEAFQSLKLALTQPPALALPSLDKPFQLFVEETSGAAKGVLTQALGPWKRPVAYLSKRLDPVAAGWPRCLRAIAAAALLTREASKLTFGQDIEITSSHNLESLLRSPPDKWLTNARITQYQVLLLDPPRVRFKQTAALNPATLLPETDDTLPIHHCLDTLDSLTSTRPDLTDQPLAQAEATLFTDGSSYIRDGKRYAGAAVVTLDSVIWAEPLPIGTSAQKAELIALTKALEWSKDKSVNIYTDSRYAFATLHVHGMIYRERGLLTAGGKAIKNAPEILALLTAVWLPKRVAVMHCKGHQKDDAPTSTGNRRADEVAREVAIRPLSTQATISAGKRTADGSEFEKRTADGSEFESPKKKAKVE

SEQ ID NO: 5 - protein, 2098 aa, synthetic construct
MPAAKRVKLDGGDKKYSIGLDIGTNSVGWAVITDEYKVPSKKFKVLGNTDRHSIKKNLIGALLFDSGETAEATRLKRTARRRYTRRKNRICYLQEIFSNEMAKVDDSFFHRLEESFLVEEDKKHERHPIFGNIVDEVAYHEKYPTIYHLRKKLVDSTDKADLRLIYLALAHMIKFRGHFLIEGDLNPDNSDVDKLFIQLVQTYNQLFEENPINASGVDAKAILSARLSKSRRLENLIAQLPGEKKNGLFGNLIALSLGLTPNFKSNFDLAEDAKLQLSKDTYDDDLDNLLAQIGDQYADLFLAAKNLSDAILLSDILRVNTEITKAPLSASMIKRYDEHHQDLTLLKALVRQQLPEKYKEIFFDQSKNGYAGYIDGGASQEEFYKFIKPILEKMDGTEELLVKLNREDLLRKQRTFDNGSIPHQIHLGELHAILRRQEDFYPFLKDNREKIEKILTFRIPYYVGPLARGNSRFAWMTRKSEETITPWNFEEVVDKGASAQSFIERMTNFDKNLPNEKVLPKHSLLYEYFTVYNELTKVKYVTEGMRKPAFLSGEQKKAIVDLLFKTNRKVTVKQLKEDYFKKIECFDSVEISGVEDRFNASLGTYHDLLKIIKDKDFLDNEENEDILEDIVLTLTLFEDREMIEERLKTYAHLFDDKVMKQLKRRRYTGWGRLSRKLINGIRDKQSGKTILDFLKSDGFANRNFMQLIHDDSLTFKEDIQKAQVSGQGDSLHEHIANLAGSPAIKKGILQTVKVVDELVKVMGRHKPENIVIEMARENQTTQKGQKNSRERMKRIEEGIKELGSQILKEHPVENTQLQNEKLYLYYLQNGRDMYVDQELDINRLSDYDVDHIVPQSFLKDDSIDNKVLTRSDKARGKSDNVPSEEVVKKMKNYWRQLLNAKLITQRKFDNLTKAERGGLSELDKAGFIKRQLVETRQITKHVAQILDSRMNTKYDENDKLIREVKVITLKSKLVSDFRKDFQFYKVREINNYHHAHDAYLNAVVGTALIKKYPKLESEFVYGDYKVYDVRKMIAKSEQEIGKATAKYFFYSNIMNFFKTEITLANGEIRKRPLIETNGETGEIVWDKGRDFATVRKVLSMPQVNIVKKTEVQTGGFSKESILPKRNSDKLIARKKDWDPKKYGGFDSPTVAYSVLVVAKVEKGKSKKLKSVKELLGITIMERSSFEKNPIDFLEAKGYKEVKKDLIIKLPKYSLFELENGRKRMLASAGELQKGNELALPSKYVNFLYLASHYEKLKGSPEDNEQKQLFVEQHKHYLDEIIEQISEFSKRVILADANLDKVLSAYNKHRDKPIREQAENIIHLFTLTNLGAPAAFKYFDTTIDRKRYTSTKEVLDATLIHQSITGLYETRIDLSQLGGDGGGGGGSSEAAAKGGTAPLEEEYRLFLEAPIQNVTLLEQWKREIPKVWAEINPPGLASTQAPIHVQLLSTALPVRVRQYPITLEAKRSLRETIRKFRAAGILRPVHSPWNTPLLPVRKSGTSEYRMVQDLREVNKRVETIHPTVPNPYTLLSLLPPDRIWYSVLDLKDAFFCIPLAPESQLIFAFEWADAEEGESGQLTWTRLPQGFKNSPTLFDEALNRDLQGFRLDHPSVSLLQYVDDLLIAADTQAACLSATRDLLMTLAELGYRVSGKKAQLCQEEVTYLGFKIHKGSRSLSNSRTQAILQIPVPKTKRQVREFLGTIGYCRLWIPGFAELAQPLYAATRGGNDPLVWGEKEEEAFQSLKLALTQPPALALPSLDKPFQLFVEETSGAAKGVLTQALGPWKRPVAYLSKRLDPVAAGWPRCLRAIAAAALLTREASKLTFGQDIEITSSHNLESLLRSPPDKWLTNARITQYQVLLLDPPRVRFKQTAALNPATLLPETDDTLPIHHCLDTLDSLTSTRPDLTDQPLAQAEATLFTDGSSYIRDGKRYAGAAVVTLDSVIWAEPLPIGTSAQKAELIALTKALEWSKDKSVNIYTDSRYAFATLHVHGMIYRERGLLTAGGKAIKNAPEILALLTAVWLPKRVAVMHCKGHQKDDAPTSTGNRRADEVAREVAIRPLSTQATISAGKRTADGSEFEKRTADGSEFESPKKKAKVE

SEQ ID NO: 6 - protein, 2098 aa, synthetic construct
MPAAKRVKLDGGDKKYSIGLDIGTNSVGWAVITDEYKVPSKKFKVLGNTDRHSIKKNLIGALLFDSGETAEATRLKRTARRRYTRRKNRICYLQEIFSNEMAKVDDSFFHRLEESFLVEEDKKHERHPIFGNIVDEVAYHEKYPTIYHLRKKLVDSTDKADLRLIYLALAHMIKFRGHFLIEGDLNPDNSDVDKLFIQLVQTYNQLFEENPINASGVDAKAILSARLSKSRRLENLIAQLPGEKKNGLFGNLIALSLGLTPNFKSNFDLAEDAKLQLSKDTYDDDLDNLLAQIGDQYADLFLAAKNLSDAILLSDILRVNTEITKAPLSASMIKRYDEHHQDLTLLKALVRQQLPEKYKEIFFDQSKNGYAGYIDGGASQEEFYKFIKPILEKMDGTEELLVKLNREDLLRKQRTFDNGSIPHQIHLGELHAILRRQEDFYPFLKDNREKIEKILTFRIPYYVGPLARGNSRFAWMTRKSEETITPWNFEEVVDKGASAQSFIERMTNFDKNLPNEKVLPKHSLLYEYFTVYNELTKVKYVTEGMRKPAFLSGEQKKAIVDLLFKTNRKVTVKQLKEDYFKKIECFDSVEISGVEDRFNASLGTYHDLLKIIKDKDFLDNEENEDILEDIVLTLTLFEDREMIEERLKTYAHLFDDKVMKQLKRRRYTGWGRLSRKLINGIRDKQSGKTILDFLKSDGFANRNFMQLIHDDSLTFKEDIQKAQVSGQGDSLHEHIANLAGSPAIKKGILQTVKVVDELVKVMGRHKPENIVIEMARENQTTQKGQKNSRERMKRIEEGIKELGSQILKEHPVENTQLQNEKLYLYYLQNGRDMYVDQELDINRLSDYDVDHIVPQSFLKDDSIDNKVLTRSDKARGKSDNVPSEEVVKKMKNYWRQLLNAKLITQRKFDNLTKAERGGLSELDKAGFIKRQLVETRQITKHVAQILDSRMNTKYDENDKLIREVKVITLKSKLVSDFRKDFQFYKVREINNYHHAHDAYLNAVVGTALIKKYPKLESEFVYGDYKVYDVRKMIAKSEQEIGKATAKYFFYSNIMNFFKTEITLANGEIRKRPLIETNGETGEIVWDKGRDFATVRKVLSMPQVNIVKKTEVQTGGFSKESILPKRNSDKLIARKKDWDPKKYGGFDSPTVAYSVLVVAKVEKGKSKKLKSVKELLGITIMERSSFEKNPIDFLEAKGYKEVKKDLIIKLPKYSLFELENGRKRMLASAGELQKGNELALPSKYVNFLYLASHYEKLKGSPEDNEQKQLFVEQHKHYLDEIIEQISEFSKRVILADANLDKVLSAYNKHRDKPIREQAENIIHLFTLTNLGAPAAFKYFDTTIDRKRYTSTKEVLDATLIHQSITGLYETRIDLSQLGGDGGGGSEAAAKGGGGGTAPLEEEYRLFLEAPIQNVTLLEQWKREIPKVWAEINPPGLASTQAPIHVQLLSTALPVRVRQYPITLEAKRSLRETIRKFRAAGILRPVHSPWNTPLLPVRKSGTSEYRMVQDLREVNKRVETIHPTVPNPYTLLSLLPPDRIWYSVLDLKDAFFCIPLAPESQLIFAFEWADAEEGESGQLTWTRLPQGFKNSPTLFDEALNRDLQGFRLDHPSVSLLQYVDDLLIAADTQAACLSATRDLLMTLAELGYRVSGKKAQLCQEEVTYLGFKIHKGSRSLSNSRTQAILQIPVPKTKRQVREFLGTIGYCRLWIPGFAELAQPLYAATRGGNDPLVWGEKEEEAFQSLKLALTQPPALALPSLDKPFQLFVEETSGAAKGVLTQALGPWKRPVAYLSKRLDPVAAGWPRCLRAIAAAALLTREASKLTFGQDIEITSSHNLESLLRSPPDKWLTNARITQYQVLLLDPPRVRFKQTAALNPATLLPETDDTLPIHHCLDTLDSLTSTRPDLTDQPLAQAEATLFTDGSSYIRDGKRYAGAAVVTLDSVIWAEPLPIGTSAQKAELIALTKALEWSKDKSVNIYTDSRYAFATLHVHGMIYRERGLLTAGGKAIKNAPEILALLTAVWLPKRVAVMHCKGHQKDDAPTSTGNRRADEVAREVAIRPLSTQATISAGKRTADGSEFEKRTADGSEFESPKKKAKVE

SEQ ID NO: 7 - protein, 2093 aa, synthetic construct
MPAAKRVKLDGGDKKYSIGLDIGTNSVGWAVITDEYKVPSKKFKVLGNTDRHSIKKNLIGALLFDSGETAEATRLKRTARRRYTRRKNRICYLQEIFSNEMAKVDDSFFHRLEESFLVEEDKKHERHPIFGNIVDEVAYHEKYPTIYHLRKKLVDSTDKADLRLIYLALAHMIKFRGHFLIEGDLNPDNSDVDKLFIQLVQTYNQLFEENPINASGVDAKAILSARLSKSRRLENLIAQLPGEKKNGLFGNLIALSLGLTPNFKSNFDLAEDAKLQLSKDTYDDDLDNLLAQIGDQYADLFLAAKNLSDAILLSDILRVNTEITKAPLSASMIKRYDEHHQDLTLLKALVRQQLPEKYKEIFFDQSKNGYAGYIDGGASQEEFYKFIKPILEKMDGTEELLVKLNREDLLRKQRTFDNGSIPHQIHLGELHAILRRQEDFYPFLKDNREKIEKILTFRIPYYVGPLARGNSRFAWMTRKSEETITPWNFEEVVDKGASAQSFIERMTNFDKNLPNEKVLPKHSLLYEYFTVYNELTKVKYVTEGMRKPAFLSGEQKKAIVDLLFKTNRKVTVKQLKEDYFKKIECFDSVEISGVEDRFNASLGTYHDLLKIIKDKDFLDNEENEDILEDIVLTLTLFEDREMIEERLKTYAHLFDDKVMKQLKRRRYTGWGRLSRKLINGIRDKQSGKTILDFLKSDGFANRNFMQLIHDDSLTFKEDIQKAQVSGQGDSLHEHIANLAGSPAIKKGILQTVKVVDELVKVMGRHKPENIVIEMARENQTTQKGQKNSRERMKRIEEGIKELGSQILKEHPVENTQLQNEKLYLYYLQNGRDMYVDQELDINRLSDYDVDHIVPQSFLKDDSIDNKVLTRSDKARGKSDNVPSEEVVKKMKNYWRQLLNAKLITQRKFDNLTKAERGGLSELDKAGFIKRQLVETRQITKHVAQILDSRMNTKYDENDKLIREVKVITLKSKLVSDFRKDFQFYKVREINNYHHAHDAYLNAVVGTALIKKYPKLESEFVYGDYKVYDVRKMIAKSEQEIGKATAKYFFYSNIMNFFKTEITLANGEIRKRPLIETNGETGEIVWDKGRDFATVRKVLSMPQVNIVKKTEVQTGGFSKESILPKRNSDKLIARKKDWDPKKYGGFDSPTVAYSVLVVAKVEKGKSKKLKSVKELLGITIMERSSFEKNPIDFLEAKGYKEVKKDLIIKLPKYSLFELENGRKRMLASAGELQKGNELALPSKYVNFLYLASHYEKLKGSPEDNEQKQLFVEQHKHYLDEIIEQISEFSKRVILADANLDKVLSAYNKHRDKPIREQAENIIHLFTLTNLGAPAAFKYFDTTIDRKRYTSTKEVLDATLIHQSITGLYETRIDLSQLGGDGGGGSGSSGGTAPLEEEYRLFLEAPIQNVTLLEQWKREIPKVWAEINPPGLASTQAPIHVQLLSTALPVRVRQYPITLEAKRSLRETIRKFRAAGILRPVHSPWNTPLLPVRKSGTSEYRMVQDLREVNKRVETIHPTVPNPYTLLSLLPPDRIWYSVLDLKDAFFCIPLAPESQLIFAFEWADAEEGESGQLTWTRLPQGFKNSPTLFDEALNRDLQGFRLDHPSVSLLQYVDDLLIAADTQAACLSATRDLLMTLAELGYRVSGKKAQLCQEEVTYLGFKIHKGSRSLSNSRTQAILQIPVPKTKRQVREFLGTIGYCRLWIPGFAELAQPLYAATRGGNDPLVWGEKEEEAFQSLKLALTQPPALALPSLDKPFQLFVEETSGAAKGVLTQALGPWKRPVAYLSKRLDPVAAGWPRCLRAIAAAALLTREASKLTFGQDIEITSSHNLESLLRSPPDKWLTNARITQYQVLLLDPPRVRFKQTAALNPATLLPETDDTLPIHHCLDTLDSLTSTRPDLTDQPLAQAEATLFTDGSSYIRDGKRYAGAAVVTLDSVIWAEPLPIGTSAQKAELIALTKALEWSKDKSVNIYTDSRYAFATLHVHGMIYRERGLLTAGGKAIKNAPEILALLTAVWLPKRVAVMHCKGHQKDDAPTSTGNRRADEVAREVAIRPLSTQATISAGKRTADGSEFEKRTADGSEFESPKKKAKVE

SEQ ID NO: 8 - protein, 2093 aa, synthetic construct
MPAAKRVKLDGGDKKYSIGLDIGTNSVGWAVITDEYKVPSKKFKVLGNTDRHSIKKNLIGALLFDSGETAEATRLKRTARRRYTRRKNRICYLQEIFSNEMAKVDDSFFHRLEESFLVEEDKKHERHPIFGNIVDEVAYHEKYPTIYHLRKKLVDSTDKADLRLIYLALAHMIKFRGHFLIEGDLNPDNSDVDKLFIQLVQTYNQLFEENPINASGVDAKAILSARLSKSRRLENLIAQLPGEKKNGLFGNLIALSLGLTPNFKSNFDLAEDAKLQLSKDTYDDDLDNLLAQIGDQYADLFLAAKNLSDAILLSDILRVNTEITKAPLSASMIKRYDEHHQDLTLLKALVRQQLPEKYKEIFFDQSKNGYAGYIDGGASQEEFYKFIKPILEKMDGTEELLVKLNREDLLRKQRTFDNGSIPHQIHLGELHAILRRQEDFYPFLKDNREKIEKILTFRIPYYVGPLARGNSRFAWMTRKSEETITPWNFEEVVDKGASAQSFIERMTNFDKNLPNEKVLPKHSLLYEYFTVYNELTKVKYVTEGMRKPAFLSGEQKKAIVDLLFKTNRKVTVKQLKEDYFKKIECFDSVEISGVEDRFNASLGTYHDLLKIIKDKDFLDNEENEDILEDIVLTLTLFEDREMIEERLKTYAHLFDDKVMKQLKRRRYTGWGRLSRKLINGIRDKQSGKTILDFLKSDGFANRNFMQLIHDDSLTFKEDIQKAQVSGQGDSLHEHIANLAGSPAIKKGILQTVKVVDELVKVMGRHKPENIVIEMARENQTTQKGQKNSRERMKRIEEGIKELGSQILKEHPVENTQLQNEKLYLYYLQNGRDMYVDQELDINRLSDYDVDHIVPQSFLKDDSIDNKVLTRSDKARGKSDNVPSEEVVKKMKNYWRQLLNAKLITQRKFDNLTKAERGGLSELDKAGFIKRQLVETRQITKHVAQILDSRMNTKYDENDKLIREVKVITLKSKLVSDFRKDFQFYKVREINNYHHAHDAYLNAVVGTALIKKYPKLESEFVYGDYKVYDVRKMIAKSEQEIGKATAKYFFYSNIMNFFKTEITLANGEIRKRPLIETNGETGEIVWDKGRDFATVRKVLSMPQVNIVKKTEVQTGGFSKESILPKRNSDKLIARKKDWDPKKYGGFDSPTVAYSVLVVAKVEKGKSKKLKSVKELLGITIMERSSFEKNPIDFLEAKGYKEVKKDLIIKLPKYSLFELENGRKRMLASAGELQKGNELALPSKYVNFLYLASHYEKLKGSPEDNEQKQLFVEQHKHYLDEIIEQISEFSKRVILADANLDKVLSAYNKHRDKPIREQAENIIHLFTLTNLGAPAAFKYFDTTIDRKRYTSTKEVLDATLIHQSITGLYETRIDLSQLGGDGGGGSPAPGGTAPLEEEYRLFLEAPIQNVTLLEQWKREIPKVWAEINPPGLASTQAPIHVQLLSTALPVRVRQYPITLEAKRSLRETIRKFRAAGILRPVHSPWNTPLLPVRKSGTSEYRMVQDLREVNKRVETIHPTVPNPYTLLSLLPPDRIWYSVLDLKDAFFCIPLAPESQLIFAFEWADAEEGESGQLTWTRLPQGFKNSPTLFDEALNRDLQGFRLDHPSVSLLQYVDDLLIAADTQAACLSATRDLLMTLAELGYRVSGKKAQLCQEEVTYLGFKIHKGSRSLSNSRTQAILQIPVPKTKRQVREFLGTIGYCRLWIPGFAELAQPLYAATRGGNDPLVWGEKEEEAFQSLKLALTQPPALALPSLDKPFQLFVEETSGAAKGVLTQALGPWKRPVAYLSKRLDPVAAGWPRCLRAIAAAALLTREASKLTFGQDIEITSSHNLESLLRSPPDKWLTNARITQYQVLLLDPPRVRFKQTAALNPATLLPETDDTLPIHHCLDTLDSLTSTRPDLTDQPLAQAEATLFTDGSSYIRDGKRYAGAAVVTLDSVIWAEPLPIGTSAQKAELIALTKALEWSKDKSVNIYTDSRYAFATLHVHGMIYRERGLLTAGGKAIKNAPEILALLTAVWLPKRVAVMHCKGHQKDDAPTSTGNRRADEVAREVAIRPLSTQATISAGKRTADGSEFEKRTADGSEFESPKKKAKVE

SEQ ID NO: 9 - protein, 2097 aa, synthetic construct
MPAAKRVKLDGGDKKYSIGLDIGTNSVGWAVITDEYKVPSKKFKVLGNTDRHSIKKNLIGALLFDSGETAEATRLKRTARRRYTRRKNRICYLQEIFSNEMAKVDDSFFHRLEESFLVEEDKKHERHPIFGNIVDEVAYHEKYPTIYHLRKKLVDSTDKADLRLIYLALAHMIKFRGHFLIEGDLNPDNSDVDKLFIQLVQTYNQLFEENPINASGVDAKAILSARLSKSRRLENLIAQLPGEKKNGLFGNLIALSLGLTPNFKSNFDLAEDAKLQLSKDTYDDDLDNLLAQIGDQYADLFLAAKNLSDAILLSDILRVNTEITKAPLSASMIKRYDEHHQDLTLLKALVRQQLPEKYKEIFFDQSKNGYAGYIDGGASQEEFYKFIKPILEKMDGTEELLVKLNREDLLRKQRTFDNGSIPHQIHLGELHAILRRQEDFYPFLKDNREKIEKILTFRIPYYVGPLARGNSRFAWMTRKSEETITPWNFEEVVDKGASAQSFIERMTNFDKNLPNEKVLPKHSLLYEYFTVYNELTKVKYVTEGMRKPAFLSGEQKKAIVDLLFKTNRKVTVKQLKEDYFKKIECFDSVEISGVEDRFNASLGTYHDLLKIIKDKDFLDNEENEDILEDIVLTLTLFEDREMIEERLKTYAHLFDDKVMKQLKRRRYTGWGRLSRKLINGIRDKQSGKTILDFLKSDGFANRNFMQLIHDDSLTFKEDIQKAQVSGQGDSLHEHIANLAGSPAIKKGILQTVKVVDELVKVMGRHKPENIVIEMARENQTTQKGQKNSRERMKRIEEGIKELGSQILKEHPVENTQLQNEKLYLYYLQNGRDMYVDQELDINRLSDYDVDHIVPQSFLKDDSIDNKVLTRSDKARGKSDNVPSEEVVKKMKNYWRQLLNAKLITQRKFDNLTKAERGGLSELDKAGFIKRQLVETRQITKHVAQILDSRMNTKYDENDKLIREVKVITLKSKLVSDFRKDFQFYKVREINNYHHAHDAYLNAVVGTALIKKYPKLESEFVYGDYKVYDVRKMIAKSEQEIGKATAKYFFYSNIMNFFKTEITLANGEIRKRPLIETNGETGEIVWDKGRDFATVRKVLSMPQVNIVKKTEVQTGGFSKESILPKRNSDKLIARKKDWDPKKYGGFDSPTVAYSVLVVAKVEKGKSKKLKSVKELLGITIMERSSFEKNPIDFLEAKGYKEVKKDLIIKLPKYSLFELENGRKRMLASAGELQKGNELALPSKYVNFLYLASHYEKLKGSPEDNEQKQLFVEQHKHYLDEIIEQISEFSKRVILADANLDKVLSAYNKHRDKPIREQAENIIHLFTLTNLGAPAAFKYFDTTIDRKRYTSTKEVLDATLIHQSITGLYETRIDLSQLGGDGGGGGGSGGGGSGGTAPLEEEYRLFLEAPIQNVTLLEQWKREIPKVWAEINPPGLASTQAPIHVQLLSTALPVRVRQYPITLEAKRSLRETIRKFRAAGILRPVHSPWNTPLLPVRKSGTSEYRMVQDLREVNKRVETIHPTVPNPYTLLSLLPPDRIWYSVLDLKDAFFCIPLAPESQLIFAFEWADAEEGESGQLTWTRLPQGFKNSPTLFDEALNRDLQGFRLDHPSVSLLQYVDDLLIAADTQAACLSATRDLLMTLAELGYRVSGKKAQLCQEEVTYLGFKIHKGSRSLSNSRTQAILQIPVPKTKRQVREFLGTIGYCRLWIPGFAELAQPLYAATRGGNDPLVWGEKEEEAFQSLKLALTQPPALALPSLDKPFQLFVEETSGAAKGVLTQALGPWKRPVAYLSKRLDPVAAGWPRCLRAIAAAALLTREASKLTFGQDIEITSSHNLESLLRSPPDKWLTNARITQYQVLLLDPPRVRFKQTAALNPATLLPETDDTLPIHHCLDTLDSLTSTRPDLTDQPLAQAEATLFTDGSSYIRDGKRYAGAAVVTLDSVIWAEPLPIGTSAQKAELIALTKALEWSKDKSVNIYTDSRYAFATLHVHGMIYRERGLLTAGGKAIKNAPEILALLTAVWLPKRVAVMHCKGHQKDDAPTSTGNRRADEVAREVAIRPLSTQATISAGKRTADGSEFEKRTADGSEFESPKKKAKVE

SEQ ID NO: 10 - protein, 2097 aa, synthetic construct
MPAAKRVKLDGGDKKYSIGLDIGTNSVGWAVITDEYKVPSKKFKVLGNTDRHSIKKNLIGALLFDSGETAEATRLKRTARRRYTRRKNRICYLQEIFSNEMAKVDDSFFHRLEESFLVEEDKKHERHPIFGNIVDEVAYHEKYPTIYHLRKKLVDSTDKADLRLIYLALAHMIKFRGHFLIEGDLNPDNSDVDKLFIQLVQTYNQLFEENPINASGVDAKAILSARLSKSRRLENLIAQLPGEKKNGLFGNLIALSLGLTPNFKSNFDLAEDAKLQLSKDTYDDDLDNLLAQIGDQYADLFLAAKNLSDAILLSDILRVNTEITKAPLSASMIKRYDEHHQDLTLLKALVRQQLPEKYKEIFFDQSKNGYAGYIDGGASQEEFYKFIKPILEKMDGTEELLVKLNREDLLRKQRTFDNGSIPHQIHLGELHAILRRQEDFYPFLKDNREKIEKILTFRIPYYVGPLARGNSRFAWMTRKSEETITPWNFEEVVDKGASAQSFIERMTNFDKNLPNEKVLPKHSLLYEYFTVYNELTKVKYVTEGMRKPAFLSGEQKKAIVDLLFKTNRKVTVKQLKEDYFKKIECFDSVEISGVEDRFNASLGTYHDLLKIIKDKDFLDNEENEDILEDIVLTLTLFEDREMIEERLKTYAHLFDDKVMKQLKRRRYTGWGRLSRKLINGIRDKQSGKTILDFLKSDGFANRNFMQLIHDDSLTFKEDIQKAQVSGQGDSLHEHIANLAGSPAIKKGILQTVKVVDELVKVMGRHKPENIVIEMARENQTTQKGQKNSRERMKRIEEGIKELGSQILKEHPVENTQLQNEKLYLYYLQNGRDMYVDQELDINRLSDYDVDHIVPQSFLKDDSIDNKVLTRSDKARGKSDNVPSEEVVKKMKNYWRQLLNAKLITQRKFDNLTKAERGGLSELDKAGFIKRQLVETRQITKHVAQILDSRMNTKYDENDKLIREVKVITLKSKLVSDFRKDFQFYKVREINNYHHAHDAYLNAVVGTALIKKYPKLESEFVYGDYKVYDVRKMIAKSEQEIGKATAKYFFYSNIMNFFKTEITLANGEIRKRPLIETNGETGEIVWDKGRDFATVRKVLSMPQVNIVKKTEVQTGGFSKESILPKRNSDKLIARKKDWDPKKYGGFDSPTVAYSVLVVAKVEKGKSKKLKSVKELLGITIMERSSFEKNPIDFLEAKGYKEVKKDLIIKLPKYSLFELENGRKRMLASAGELQKGNELALPSKYVNFLYLASHYEKLKGSPEDNEQKQLFVEQHKHYLDEIIEQISEFSKRVILADANLDKVLSAYNKHRDKPIREQAENIIHLFTLTNLGAPAAFKYFDTTIDRKRYTSTKEVLDATLIHQSITGLYETRIDLSQLGGDGGEAAAKEAAAKGGTAPLEEEYRLFLEAPIQNVTLLEQWKREIPKVWAEINPPGLASTQAPIHVQLLSTALPVRVRQYPITLEAKRSLRETIRKFRAAGILRPVHSPWNTPLLPVRKSGTSEYRMVQDLREVNKRVETIHPTVPNPYTLLSLLPPDRIWYSVLDLKDAFFCIPLAPESQLIFAFEWADAEEGESGQLTWTRLPQGFKNSPTLFDEALNRDLQGFRLDHPSVSLLQYVDDLLIAADTQAACLSATRDLLMTLAELGYRVSGKKAQLCQEEVTYLGFKIHKGSRSLSNSRTQAILQIPVPKTKRQVREFLGTIGYCRLWIPGFAELAQPLYAATRGGNDPLVWGEKEEEAFQSLKLALTQPPALALPSLDKPFQLFVEETSGAAKGVLTQALGPWKRPVAYLSKRLDPVAAGWPRCLRAIAAAALLTREASKLTFGQDIEITSSHNLESLLRSPPDKWLTNARITQYQVLLLDPPRVRFKQTAALNPATLLPETDDTLPIHHCLDTLDSLTSTRPDLTDQPLAQAEATLFTDGSSYIRDGKRYAGAAVVTLDSVIWAEPLPIGTSAQKAELIALTKALEWSKDKSVNIYTDSRYAFATLHVHGMIYRERGLLTAGGKAIKNAPEILALLTAVWLPKRVAVMHCKGHQKDDAPTSTGNRRADEVAREVAIRPLSTQATISAGKRTADGSEFEKRTADGSEFESPKKKAKVE

SEQ ID NO: 11 - protein, 2098 aa, synthetic construct
MPAAKRVKLDGGDKKYSIGLDIGTNSVGWAVITDEYKVPSKKFKVLGNTDRHSIKKNLIGALLFDSGETAEATRLKRTARRRYTRRKNRICYLQEIFSNEMAKVDDSFFHRLEESFLVEEDKKHERHPIFGNIVDEVAYHEKYPTIYHLRKKLVDSTDKADLRLIYLALAHMIKFRGHFLIEGDLNPDNSDVDKLFIQLVQTYNQLFEENPINASGVDAKAILSARLSKSRRLENLIAQLPGEKKNGLFGNLIALSLGLTPNFKSNFDLAEDAKLQLSKDTYDDDLDNLLAQIGDQYADLFLAAKNLSDAILLSDILRVNTEITKAPLSASMIKRYDEHHQDLTLLKALVRQQLPEKYKEIFFDQSKNGYAGYIDGGASQEEFYKFIKPILEKMDGTEELLVKLNREDLLRKQRTFDNGSIPHQIHLGELHAILRRQEDFYPFLKDNREKIEKILTFRIPYYVGPLARGNSRFAWMTRKSEETITPWNFEEVVDKGASAQSFIERMTNFDKNLPNEKVLPKHSLLYEYFTVYNELTKVKYVTEGMRKPAFLSGEQKKAIVDLLFKTNRKVTVKQLKEDYFKKIECFDSVEISGVEDRFNASLGTYHDLLKIIKDKDFLDNEENEDILEDIVLTLTLFEDREMIEERLKTYAHLFDDKVMKQLKRRRYTGWGRLSRKLINGIRDKQSGKTILDFLKSDGFANRNFMQLIHDDSLTFKEDIQKAQVSGQGDSLHEHIANLAGSPAIKKGILQTVKVVDELVKVMGRHKPENIVIEMARENQTTQKGQKNSRERMKRIEEGIKELGSQILKEHPVENTQLQNEKLYLYYLQNGRDMYVDQELDINRLSDYDVDHIVPQSFLKDDSIDNKVLTRSDKARGKSDNVPSEEVVKKMKNYWRQLLNAKLITQRKFDNLTKAERGGLSELDKAGFIKRQLVETRQITKHVAQILDSRMNTKYDENDKLIREVKVITLKSKLVSDFRKDFQFYKVREINNYHHAHDAYLNAVVGTALIKKYPKLESEFVYGDYKVYDVRKMIAKSEQEIGKATAKYFFYSNIMNFFKTEITLANGEIRKRPLIETNGETGEIVWDKGRDFATVRKVLSMPQVNIVKKTEVQTGGFSKESILPKRNSDKLIARKKDWDPKKYGGFDSPTVAYSVLVVAKVEKGKSKKLKSVKELLGITIMERSSFEKNPIDFLEAKGYKEVKKDLIIKLPKYSLFELENGRKRMLASAGELQKGNELALPSKYVNFLYLASHYEKLKGSPEDNEQKQLFVEQHKHYLDEIIEQISEFSKRVILADANLDKVLSAYNKHRDKPIREQAENIIHLFTLTNLGAPAAFKYFDTTIDRKRYTSTKEVLDATLIHQSITGLYETRIDLSQLGGDGGGGSEAAAKPAPGGTAPLEEEYRLFLEAPIQNVTLLEQWKREIPKVWAEINPPGLASTQAPIHVQLLSTALPVRVRQYPITLEAKRSLRETIRKFRAAGILRPVHSPWNTPLLPVRKSGTSEYRMVQDLREVNKRVETIHPTVPNPYTLLSLLPPDRIWYSVLDLKDAFFCIPLAPESQLIFAFEWADAEEGESGQLTWTRLPQGFKNSPTLFDEALNRDLQGFRLDHPSVSLLQYVDDLLIAADTQAACLSATRDLLMTLAELGYRVSGKKAQLCQEEVTYLGFKIHKGSRSLSNSRTQAILQIPVPKTKRQVREFLGTIGYCRLWIPGFAELAQPLYAATRGGNDPLVWGEKEEEAFQSLKLALTQPPALALPSLDKPFQLFVEETSGAAKGVLTQALGPWKRPVAYLSKRLDPVAAGWPRCLRAIAAAALLTREASKLTFGQDIEITSSHNLESLLRSPPDKWLTNARITQYQVLLLDPPRVRFKQTAALNPATLLPETDDTLPIHHCLDTLDSLTSTRPDLTDQPLAQAEATLFTDGSSYIRDGKRYAGAAVVTLDSVIWAEPLPIGTSAQKAELIALTKALEWSKDKSVNIYTDSRYAFATLHVHGMIYRERGLLTAGGKAIKNAPEILALLTAVWLPKRVAVMHCKGHQKDDAPTSTGNRRADEVAREVAIRPLSTQATISAGKRTADGSEFEKRTADGSEFESPKKKAKVE

SEQ ID NO: 12 - protein, 2093 aa, synthetic construct
MPAAKRVKLDGGDKKYSIGLDIGTNSVGWAVITDEYKVPSKKFKVLGNTDRHSIKKNLIGALLFDSGETAEATRLKRTARRRYTRRKNRICYLQEIFSNEMAKVDDSFFHRLEESFLVEEDKKHERHPIFGNIVDEVAYHEKYPTIYHLRKKLVDSTDKADLRLIYLALAHMIKFRGHFLIEGDLNPDNSDVDKLFIQLVQTYNQLFEENPINASGVDAKAILSARLSKSRRLENLIAQLPGEKKNGLFGNLIALSLGLTPNFKSNFDLAEDAKLQLSKDTYDDDLDNLLAQIGDQYADLFLAAKNLSDAILLSDILRVNTEITKAPLSASMIKRYDEHHQDLTLLKALVRQQLPEKYKEIFFDQSKNGYAGYIDGGASQEEFYKFIKPILEKMDGTEELLVKLNREDLLRKQRTFDNGSIPHQIHLGELHAILRRQEDFYPFLKDNREKIEKILTFRIPYYVGPLARGNSRFAWMTRKSEETITPWNFEEVVDKGASAQSFIERMTNFDKNLPNEKVLPKHSLLYEYFTVYNELTKVKYVTEGMRKPAFLSGEQKKAIVDLLFKTNRKVTVKQLKEDYFKKIECFDSVEISGVEDRFNASLGTYHDLLKIIKDKDFLDNEENEDILEDIVLTLTLFEDREMIEERLKTYAHLFDDKVMKQLKRRRYTGWGRLSRKLINGIRDKQSGKTILDFLKSDGFANRNFMQLIHDDSLTFKEDIQKAQVSGQGDSLHEHIANLAGSPAIKKGILQTVKVVDELVKVMGRHKPENIVIEMARENQTTQKGQKNSRERMKRIEEGIKELGSQILKEHPVENTQLQNEKLYLYYLQNGRDMYVDQELDINRLSDYDVDHIVPQSFLKDDSIDNKVLTRSDKARGKSDNVPSEEVVKKMKNYWRQLLNAKLITQRKFDNLTKAERGGLSELDKAGFIKRQLVETRQITKHVAQILDSRMNTKYDENDKLIREVKVITLKSKLVSDFRKDFQFYKVREINNYHHAHDAYLNAVVGTALIKKYPKLESEFVYGDYKVYDVRKMIAKSEQEIGKATAKYFFYSNIMNFFKTEITLANGEIRKRPLIETNGETGEIVWDKGRDFATVRKVLSMPQVNIVKKTEVQTGGFSKESILPKRNSDKLIARKKDWDPKKYGGFDSPTVAYSVLVVAKVEKGKSKKLKSVKELLGITIMERSSFEKNPIDFLEAKGYKEVKKDLIIKLPKYSLFELENGRKRMLASAGELQKGNELALPSKYVNFLYLASHYEKLKGSPEDNEQKQLFVEQHKHYLDEIIEQISEFSKRVILADANLDKVLSAYNKHRDKPIREQAENIIHLFTLTNLGAPAAFKYFDTTIDRKRYTSTKEVLDATLIHQSITGLYETRIDLSQLGGDGGGGSGGGGGTAPLEEEYRLFLEAPIQNVTLLEQWKREIPKVWAEINPPGLASTQAPIHVQLLSTALPVRVRQYPITLEAKRSLRETIRKFRAAGILRPVHSPWNTPLLPVRKSGTSEYRMVQDLREVNKRVETIHPTVPNPYTLLSLLPPDRIWYSVLDLKDAFFCIPLAPESQLIFAFEWADAEEGESGQLTWTRLPQGFKNSPTLFDEALNRDLQGFRLDHPSVSLLQYVDDLLIAADTQAACLSATRDLLMTLAELGYRVSGKKAQLCQEEVTYLGFKIHKGSRSLSNSRTQAILQIPVPKTKRQVREFLGTIGYCRLWIPGFAELAQPLYAATRGGNDPLVWGEKEEEAFQSLKLALTQPPALALPSLDKPFQLFVEETSGAAKGVLTQALGPWKRPVAYLSKRLDPVAAGWPRCLRAIAAAALLTREASKLTFGQDIEITSSHNLESLLRSPPDKWLTNARITQYQVLLLDPPRVRFKQTAALNPATLLPETDDTLPIHHCLDTLDSLTSTRPDLTDQPLAQAEATLFTDGSSYIRDGKRYAGAAVVTLDSVIWAEPLPIGTSAQKAELIALTKALEWSKDKSVNIYTDSRYAFATLHVHGMIYRERGLLTAGGKAIKNAPEILALLTAVWLPKRVAVMHCKGHQKDDAPTSTGNRRADEVAREVAIRPLSTQATISAGKRTADGSEFEKRTADGSEFESPKKKAKVE

SEQ ID NO: 13 - protein, 2103 aa, synthetic construct
MPAAKRVKLDGGDKKYSIGLDIGTNSVGWAVITDEYKVPSKKFKVLGNTDRHSIKKNLIGALLFDSGETAEATRLKRTARRRYTRRKNRICYLQEIFSNEMAKVDDSFFHRLEESFLVEEDKKHERHPIFGNIVDEVAYHEKYPTIYHLRKKLVDSTDKADLRLIYLALAHMIKFRGHFLIEGDLNPDNSDVDKLFIQLVQTYNQLFEENPINASGVDAKAILSARLSKSRRLENLIAQLPGEKKNGLFGNLIALSLGLTPNFKSNFDLAEDAKLQLSKDTYDDDLDNLLAQIGDQYADLFLAAKNLSDAILLSDILRVNTEITKAPLSASMIKRYDEHHQDLTLLKALVRQQLPEKYKEIFFDQSKNGYAGYIDGGASQEEFYKFIKPILEKMDGTEELLVKLNREDLLRKQRTFDNGSIPHQIHLGELHAILRRQEDFYPFLKDNREKIEKILTFRIPYYVGPLARGNSRFAWMTRKSEETITPWNFEEVVDKGASAQSFIERMTNFDKNLPNEKVLPKHSLLYEYFTVYNELTKVKYVTEGMRKPAFLSGEQKKAIVDLLFKTNRKVTVKQLKEDYFKKIECFDSVEISGVEDRFNASLGTYHDLLKIIKDKDFLDNEENEDILEDIVLTLTLFEDREMIEERLKTYAHLFDDKVMKQLKRRRYTGWGRLSRKLINGIRDKQSGKTILDFLKSDGFANRNFMQLIHDDSLTFKEDIQKAQVSGQGDSLHEHIANLAGSPAIKKGILQTVKVVDELVKVMGRHKPENIVIEMARENQTTQKGQKNSRERMKRIEEGIKELGSQILKEHPVENTQLQNEKLYLYYLQNGRDMYVDQELDINRLSDYDVDHIVPQSFLKDDSIDNKVLTRSDKARGKSDNVPSEEVVKKMKNYWRQLLNAKLITQRKFDNLTKAERGGLSELDKAGFIKRQLVETRQITKHVAQILDSRMNTKYDENDKLIREVKVITLKSKLVSDFRKDFQFYKVREINNYHHAHDAYLNAVVGTALIKKYPKLESEFVYGDYKVYDVRKMIAKSEQEIGKATAKYFFYSNIMNFFKTEITLANGEIRKRPLIETNGETGEIVWDKGRDFATVRKVLSMPQVNIVKKTEVQTGGFSKESILPKRNSDKLIARKKDWDPKKYGGFDSPTVAYSVLVVAKVEKGKSKKLKSVKELLGITIMERSSFEKNPIDFLEAKGYKEVKKDLIIKLPKYSLFELENGRKRMLASAGELQKGNELALPSKYVNFLYLASHYEKLKGSPEDNEQKQLFVEQHKHYLDEIIEQISEFSKRVILADANLDKVLSAYNKHRDKPIREQAENIIHLFTLTNLGAPAAFKYFDTTIDRKRYTSTKEVLDATLIHQSITGLYETRIDLSQLGGDGGSGSETPGTSESATPESGGTAPLEEEYRLFLEAPIQNVTLLEQWKREIPKVWAEINPPGLASTQAPIHVQLLSTALPVRVRQYPITLEAKRSLRETIRKFRAAGILRPVHSPWNTPLLPVRKSGTSEYRMVQDLREVNKRVETIHPTVPNPYTLLSLLPPDRIWYSVLDLKDAFFCIPLAPESQLIFAFEWADAEEGESGQLTWTRLPQGFKNSPTLFDEALNRDLQGFRLDHPSVSLLQYVDDLLIAADTQAACLSATRDLLMTLAELGYRVSGKKAQLCQEEVTYLGFKIHKGSRSLSNSRTQAILQIPVPKTKRQVREFLGTIGYCRLWIPGFAELAQPLYAATRGGNDPLVWGEKEEEAFQSLKLALTQPPALALPSLDKPFQLFVEETSGAAKGVLTQALGPWKRPVAYLSKRLDPVAAGWPRCLRAIAAAALLTREASKLTFGQDIEITSSHNLESLLRSPPDKWLTNARITQYQVLLLDPPRVRFKQTAALNPATLLPETDDTLPIHHCLDTLDSLTSTRPDLTDQPLAQAEATLFTDGSSYIRDGKRYAGAAVVTLDSVIWAEPLPIGTSAQKAELIALTKALEWSKDKSVNIYTDSRYAFATLHVHGMIYRERGLLTAGGKAIKNAPEILALLTAVWLPKRVAVMHCKGHQKDDAPTSTGNRRADEVAREVAIRPLSTQATISAGKRTADGSEFEKRTADGSEFESPKKKAKVE

SEQ ID NO: 14 - protein, 2099 aa, synthetic construct
MPAAKRVKLDGGDKKYSIGLDIGTNSVGWAVITDEYKVPSKKFKVLGNTDRHSIKKNLIGALLFDSGETAEATRLKRTARRRYTRRKNRICYLQEIFSNEMAKVDDSFFHRLEESFLVEEDKKHERHPIFGNIVDEVAYHEKYPTIYHLRKKLVDSTDKADLRLIYLALAHMIKFRGHFLIEGDLNPDNSDVDKLFIQLVQTYNQLFEENPINASGVDAKAILSARLSKSRRLENLIAQLPGEKKNGLFGNLIALSLGLTPNFKSNFDLAEDAKLQLSKDTYDDDLDNLLAQIGDQYADLFLAAKNLSDAILLSDILRVNTEITKAPLSASMIKRYDEHHQDLTLLKALVRQQLPEKYKEIFFDQSKNGYAGYIDGGASQEEFYKFIKPILEKMDGTEELLVKLNREDLLRKQRTFDNGSIPHQIHLGELHAILRRQEDFYPFLKDNREKIEKILTFRIPYYVGPLARGNSRFAWMTRKSEETITPWNFEEVVDKGASAQSFIERMTNFDKNLPNEKVLPKHSLLYEYFTVYNELTKVKYVTEGMRKPAFLSGEQKKAIVDLLFKTNRKVTVKQLKEDYFKKIECFDSVEISGVEDRFNASLGTYHDLLKIIKDKDFLDNEENEDILEDIVLTLTLFEDREMIEERLKTYAHLFDDKVMKQLKRRRYTGWGRLSRKLINGIRDKQSGKTILDFLKSDGFANRNFMQLIHDDSLTFKEDIQKAQVSGQGDSLHEHIANLAGSPAIKKGILQTVKVVDELVKVMGRHKPENIVIEMARENQTTQKGQKNSRERMKRIEEGIKELGSQILKEHPVENTQLQNEKLYLYYLQNGRDMYVDQELDINRLSDYDVDHIVPQSFLKDDSIDNKVLTRSDKARGKSDNVPSEEVVKKMKNYWRQLLNAKLITQRKFDNLTKAERGGLSELDKAGFIKRQLVETRQITKHVAQILDSRMNTKYDENDKLIREVKVITLKSKLVSDFRKDFQFYKVREINNYHHAHDAYLNAVVGTALIKKYPKLESEFVYGDYKVYDVRKMIAKSEQEIGKATAKYFFYSNIMNFFKTEITLANGEIRKRPLIETNGETGEIVWDKGRDFATVRKVLSMPQVNIVKKTEVQTGGFSKESILPKRNSDKLIARKKDWDPKKYGGFDSPTVAYSVLVVAKVEKGKSKKLKSVKELLGITIMERSSFEKNPIDFLEAKGYKEVKKDLIIKLPKYSLFELENGRKRMLASAGELQKGNELALPSKYVNFLYLASHYEKLKGSPEDNEQKQLFVEQHKHYLDEIIEQISEFSKRVILADANLDKVLSAYNKHRDKPIREQAENIIHLFTLTNLGAPAAFKYFDTTIDRKRYTSTKEVLDATLIHQSITGLYETRIDLSQLGGDGGGSAGSAAGSGEFGGTAPLEEEYRLFLEAPIQNVTLLEQWKREIPKVWAEINPPGLASTQAPIHVQLLSTALPVRVRQYPITLEAKRSLRETIRKFRAAGILRPVHSPWNTPLLPVRKSGTSEYRMVQDLREVNKRVETIHPTVPNPYTLLSLLPPDRIWYSVLDLKDAFFCIPLAPESQLIFAFEWADAEEGESGQLTWTRLPQGFKNSPTLFDEALNRDLQGFRLDHPSVSLLQYVDDLLIAADTQAACLSATRDLLMTLAELGYRVSGKKAQLCQEEVTYLGFKIHKGSRSLSNSRTQAILQIPVPKTKRQVREFLGTIGYCRLWIPGFAELAQPLYAATRGGNDPLVWGEKEEEAFQSLKLALTQPPALALPSLDKPFQLFVEETSGAAKGVLTQALGPWKRPVAYLSKRLDPVAAGWPRCLRAIAAAALLTREASKLTFGQDIEITSSHNLESLLRSPPDKWLTNARITQYQVLLLDPPRVRFKQTAALNPATLLPETDDTLPIHHCLDTLDSLTSTRPDLTDQPLAQAEATLFTDGSSYIRDGKRYAGAAVVTLDSVIWAEPLPIGTSAQKAELIALTKALEWSKDKSVNIYTDSRYAFATLHVHGMIYRERGLLTAGGKAIKNAPEILALLTAVWLPKRVAVMHCKGHQKDDAPTSTGNRRADEVAREVAIRPLSTQATISAGKRTADGSEFEKRTADGSEFESPKKKAKVE

SEQ ID NO: 15 - protein, 2096 aa, synthetic construct
MPAAKRVKLDGGDKKYSIGLDIGTNSVGWAVITDEYKVPSKKFKVLGNTDRHSIKKNLIGALLFDSGETAEATRLKRTARRRYTRRKNRICYLQEIFSNEMAKVDDSFFHRLEESFLVEEDKKHERHPIFGNIVDEVAYHEKYPTIYHLRKKLVDSTDKADLRLIYLALAHMIKFRGHFLIEGDLNPDNSDVDKLFIQLVQTYNQLFEENPINASGVDAKAILSARLSKSRRLENLIAQLPGEKKNGLFGNLIALSLGLTPNFKSNFDLAEDAKLQLSKDTYDDDLDNLLAQIGDQYADLFLAAKNLSDAILLSDILRVNTEITKAPLSASMIKRYDEHHQDLTLLKALVRQQLPEKYKEIFFDQSKNGYAGYIDGGASQEEFYKFIKPILEKMDGTEELLVKLNREDLLRKQRTFDNGSIPHQIHLGELHAILRRQEDFYPFLKDNREKIEKILTFRIPYYVGPLARGNSRFAWMTRKSEETITPWNFEEVVDKGASAQSFIERMTNFDKNLPNEKVLPKHSLLYEYFTVYNELTKVKYVTEGMRKPAFLSGEQKKAIVDLLFKTNRKVTVKQLKEDYFKKIECFDSVEISGVEDRFNASLGTYHDLLKIIKDKDFLDNEENEDILEDIVLTLTLFEDREMIEERLKTYAHLFDDKVMKQLKRRRYTGWGRLSRKLINGIRDKQSGKTILDFLKSDGFANRNFMQLIHDDSLTFKEDIQKAQVSGQGDSLHEHIANLAGSPAIKKGILQTVKVVDELVKVMGRHKPENIVIEMARENQTTQKGQKNSRERMKRIEEGIKELGSQILKEHPVENTQLQNEKLYLYYLQNGRDMYVDQELDINRLSDYDVDHIVPQSFLKDDSIDNKVLTRSDKARGKSDNVPSEEVVKKMKNYWRQLLNAKLITQRKFDNLTKAERGGLSELDKAGFIKRQLVETRQITKHVAQILDSRMNTKYDENDKLIREVKVITLKSKLVSDFRKDFQFYKVREINNYHHAHDAYLNAVVGTALIKKYPKLESEFVYGDYKVYDVRKMIAKSEQEIGKATAKYFFYSNIMNFFKTEITLANGEIRKRPLIETNGETGEIVWDKGRDFATVRKVLSMPQVNIVKKTEVQTGGFSKESILPKRNSDKLIARKKDWDPKKYGGFDSPTVAYSVLVVAKVEKGKSKKLKSVKELLGITIMERSSFEKNPIDFLEAKGYKEVKKDLIIKLPKYSLFELENGRKRMLASAGELQKGNELALPSKYVNFLYLASHYEKLKGSPEDNEQKQLFVEQHKHYLDEIIEQISEFSKRVILADANLDKVLSAYNKHRDKPIREQAENIIHLFTLTNLGAPAAFKYFDTTIDRKRYTSTKEVLDATLIHQSITGLYETRIDLSQLGGDGGGGGPAPGGSGGTAPLEEEYRLFLEAPIQNVTLLEQWKREIPKVWAEINPPGLASTQAPIHVQLLSTALPVRVRQYPITLEAKRSLRETIRKFRAAGILRPVHSPWNTPLLPVRKSGTSEYRMVQDLREVNKRVETIHPTVPNPYTLLSLLPPDRIWYSVLDLKDAFFCIPLAPESQLIFAFEWADAEEGESGQLTWTRLPQGFKNSPTLFDEALNRDLQGFRLDHPSVSLLQYVDDLLIAADTQAACLSATRDLLMTLAELGYRVSGKKAQLCQEEVTYLGFKIHKGSRSLSNSRTQAILQIPVPKTKRQVREFLGTIGYCRLWIPGFAELAQPLYAATRGGNDPLVWGEKEEEAFQSLKLALTQPPALALPSLDKPFQLFVEETSGAAKGVLTQALGPWKRPVAYLSKRLDPVAAGWPRCLRAIAAAALLTREASKLTFGQDIEITSSHNLESLLRSPPDKWLTNARITQYQVLLLDPPRVRFKQTAALNPATLLPETDDTLPIHHCLDTLDSLTSTRPDLTDQPLAQAEATLFTDGSSYIRDGKRYAGAAVVTLDSVIWAEPLPIGTSAQKAELIALTKALEWSKDKSVNIYTDSRYAFATLHVHGMIYRERGLLTAGGKAIKNAPEILALLTAVWLPKRVAVMHCKGHQKDDAPTSTGNRRADEVAREVAIRPLSTQATISAGKRTADGSEFEKRTADGSEFESPKKKAKVE

SEQ ID NO: 16 - protein, 2098 aa, synthetic construct
MPAAKRVKLDGGDKKYSIGLDIGTNSVGWAVITDEYKVPSKKFKVLGNTDRHSIKKNLIGALLFDSGETAEATRLKRTARRRYTRRKNRICYLQEIFSNEMAKVDDSFFHRLEESFLVEEDKKHERHPIFGNIVDEVAYHEKYPTIYHLRKKLVDSTDKADLRLIYLALAHMIKFRGHFLIEGDLNPDNSDVDKLFIQLVQTYNQLFEENPINASGVDAKAILSARLSKSRRLENLIAQLPGEKKNGLFGNLIALSLGLTPNFKSNFDLAEDAKLQLSKDTYDDDLDNLLAQIGDQYADLFLAAKNLSDAILLSDILRVNTEITKAPLSASMIKRYDEHHQDLTLLKALVRQQLPEKYKEIFFDQSKNGYAGYIDGGASQEEFYKFIKPILEKMDGTEELLVKLNREDLLRKQRTFDNGSIPHQIHLGELHAILRRQEDFYPFLKDNREKIEKILTFRIPYYVGPLARGNSRFAWMTRKSEETITPWNFEEVVDKGASAQSFIERMTNFDKNLPNEKVLPKHSLLYEYFTVYNELTKVKYVTEGMRKPAFLSGEQKKAIVDLLFKTNRKVTVKQLKEDYFKKIECFDSVEISGVEDRFNASLGTYHDLLKIIKDKDFLDNEENEDILEDIVLTLTLFEDREMIEERLKTYAHLFDDKVMKQLKRRRYTGWGRLSRKLINGIRDKQSGKTILDFLKSDGFANRNFMQLIHDDSLTFKEDIQKAQVSGQGDSLHEHIANLAGSPAIKKGILQTVKVVDELVKVMGRHKPENIVIEMARENQTTQKGQKNSRERMKRIEEGIKELGSQILKEHPVENTQLQNEKLYLYYLQNGRDMYVDQELDINRLSDYDVDHIVPQSFLKDDSIDNKVLTRSDKARGKSDNVPSEEVVKKMKNYWRQLLNAKLITQRKFDNLTKAERGGLSELDKAGFIKRQLVETRQITKHVAQILDSRMNTKYDENDKLIREVKVITLKSKLVSDFRKDFQFYKVREINNYHHAHDAYLNAVVGTALIKKYPKLESEFVYGDYKVYDVRKMIAKSEQEIGKATAKYFFYSNIMNFFKTEITLANGEIRKRPLIETNGETGEIVWDKGRDFATVRKVLSMPQVNIVKKTEVQTGGFSKESILPKRNSDKLIARKKDWDPKKYGGFDSPTVAYSVLVVAKVEKGKSKKLKSVKELLGITIMERSSFEKNPIDFLEAKGYKEVKKDLIIKLPKYSLFELENGRKRMLASAGELQKGNELALPSKYVNFLYLASHYEKLKGSPEDNEQKQLFVEQHKHYLDEIIEQISEFSKRVILADANLDKVLSAYNKHRDKPIREQAENIIHLFTLTNLGAPAAFKYFDTTIDRKRYTSTKEVLDATLIHQSITGLYETRIDLSQLGGDGGGSSGGGEAAAKGGTAPLEEEYRLFLEAPIQNVTLLEQWKREIPKVWAEINPPGLASTQAPIHVQLLSTALPVRVRQYPITLEAKRSLRETIRKFRAAGILRPVHSPWNTPLLPVRKSGTSEYRMVQDLREVNKRVETIHPTVPNPYTLLSLLPPDRIWYSVLDLKDAFFCIPLAPESQLIFAFEWADAEEGESGQLTWTRLPQGFKNSPTLFDEALNRDLQGFRLDHPSVSLLQYVDDLLIAADTQAACLSATRDLLMTLAELGYRVSGKKAQLCQEEVTYLGFKIHKGSRSLSNSRTQAILQIPVPKTKRQVREFLGTIGYCRLWIPGFAELAQPLYAATRGGNDPLVWGEKEEEAFQSLKLALTQPPALALPSLDKPFQLFVEETSGAAKGVLTQALGPWKRPVAYLSKRLDPVAAGWPRCLRAIAAAALLTREASKLTFGQDIEITSSHNLESLLRSPPDKWLTNARITQYQVLLLDPPRVRFKQTAALNPATLLPETDDTLPIHHCLDTLDSLTSTRPDLTDQPLAQAEATLFTDGSSYIRDGKRYAGAAVVTLDSVIWAEPLPIGTSAQKAELIALTKALEWSKDKSVNIYTDSRYAFATLHVHGMIYRERGLLTAGGKAIKNAPEILALLTAVWLPKRVAVMHCKGHQKDDAPTSTGNRRADEVAREVAIRPLSTQATISAGKRTADGSEFEKRTADGSEFESPKKKAKVE

SEQ ID NO: 17 - protein, 1998 aa, synthetic construct
MPAAKRVKLDGGDKKYSIGLDIGTNSVGWAVITDEYKVPSKKFKVLGNTDRHSIKKNLIGALLFDSGETAEATRLKRTARRRYTRRKNRICYLQEIFSNEMAKVDDSFFHRLEESFLVEEDKKHERHPIFGNIVDEVAYHEKYPTIYHLRKKLVDSTDKADLRLIYLALAHMIKFRGHFLIEGDLNPDNSDVDKLFIQLVQTYNQLFEENPINASGVDAKAILSARLSKSRRLENLIAQLPGEKKNGLFGNLIALSLGLTPNFKSNFDLAEDAKLQLSKDTYDDDLDNLLAQIGDQYADLFLAAKNLSDAILLSDILRVNTEITKAPLSASMIKRYDEHHQDLTLLKALVRQQLPEKYKEIFFDQSKNGYAGYIDGGASQEEFYKFIKPILEKMDGTEELLVKLNREDLLRKQRTFDNGSIPHQIHLGELHAILRRQEDFYPFLKDNREKIEKILTFRIPYYVGPLARGNSRFAWMTRKSEETITPWNFEEVVDKGASAQSFIERMTNFDKNLPNEKVLPKHSLLYEYFTVYNELTKVKYVTEGMRKPAFLSGEQKKAIVDLLFKTNRKVTVKQLKEDYFKKIECFDSVEISGVEDRFNASLGTYHDLLKIIKDKDFLDNEENEDILEDIVLTLTLFEDREMIEERLKTYAHLFDDKVMKQLKRRRYTGWGRLSRKLINGIRDKQSGKTILDFLKSDGFANRNFMQLIHDDSLTFKEDIQKAQVSGQGDSLHEHIANLAGSPAIKKGILQTVKVVDELVKVMGRHKPENIVIEMARENQTTQKGQKNSRERMKRIEEGIKELGSQILKEHPVENTQLQNEKLYLYYLQNGRDMYVDQELDINRLSDYDVDHIVPQSFLKDDSIDNKVLTRSDKARGKSDNVPSEEVVKKMKNYWRQLLNAKLITQRKFDNLTKAERGGLSELDKAGFIKRQLVETRQITKHVAQILDSRMNTKYDENDKLIREVKVITLKSKLVSDFRKDFQFYKVREINNYHHAHDAYLNAVVGTALIKKYPKLESEFVYGDYKVYDVRKMIAKSEQEIGKATAKYFFYSNIMNFFKTEITLANGEIRKRPLIETNGETGEIVWDKGRDFATVRKVLSMPQVNIVKKTEVQTGGFSKESILPKRNSDKLIARKKDWDPKKYGGFDSPTVAYSVLVVAKVEKGKSKKLKSVKELLGITIMERSSFEKNPIDFLEAKGYKEVKKDLIIKLPKYSLFELENGRKRMLASAGELQKGNELALPSKYVNFLYLASHYEKLKGSPEDNEQKQLFVEQHKHYLDEIIEQISEFSKRVILADANLDKVLSAYNKHRDKPIREQAENIIHLFTLTNLGAPAAFKYFDTTIDRKRYTSTKEVLDATLIHQSITGLYETRIDLSQLGGDGGPAPEAAAKGGGVLDTPPSHIGLEHLPPPPEVPQFPLNLERLQALQDLVHRSLEAGYISPWDGPGNNPVFPVRKPNGAWRFVHDLRATNALTKPIPALSPGPPDLTAIPTHPPHIICLDLKDAFFQIPVEDRFRFYLSFTLPSPGGLQPHRRFAWRVLPQGFINSPALFERALQEPLRQVSAAFSQSLLVSYMDDILYASPTEEQRSQCYQALAARLRDLGFQVASEKTSQTPSPVPFLGQMVHEQIVTYQSLPTLQISSPISLHQLQAVLGDLQWVSRGTPTTRRPLQLLYSSLKRHHDPRAIIQLSPEQLQGIAELRQALSHNARSRYNEQEPLLAYVHLTRAGSTLVLFQKGAQFPLAYFQTPLTDNQASPWGLLLLLGCQYLQTQALSSYAKPILKYYHNLPKTSLDNWIQSSEDPRVQELLQLWPQISSQGIQPPGPWKTLITRAEVFLTPQFSPDPIPAALCLFSDGATGRGAYCLWKDHLLDFQAVPAPESAQKGELAGLLAGLAAAPPEPVNIWVDSKYLYSLLRTLVLGAWLQPDPVPSYALLYKSLLRHPAIVVGHVRSHSSASHPIASLNNYVDQLAGKRTADGSEFEKRTADGSEFESPKKKAKVE

SEQ ID NO: 18 - protein, 2116 aa, synthetic construct
MPAAKRVKLDGGDKKYSIGLDIGTNSVGWAVITDEYKVPSKKFKVLGNTDRHSIKKNLIGALLFDSGETAEATRLKRTARRRYTRRKNRICYLQEIFSNEMAKVDDSFFHRLEESFLVEEDKKHERHPIFGNIVDEVAYHEKYPTIYHLRKKLVDSTDKADLRLIYLALAHMIKFRGHFLIEGDLNPDNSDVDKLFIQLVQTYNQLFEENPINASGVDAKAILSARLSKSRRLENLIAQLPGEKKNGLFGNLIALSLGLTPNFKSNFDLAEDAKLQLSKDTYDDDLDNLLAQIGDQYADLFLAAKNLSDAILLSDILRVNTEITKAPLSASMIKRYDEHHQDLTLLKALVRQQLPEKYKEIFFDQSKNGYAGYIDGGASQEEFYKFIKPILEKMDGTEELLVKLNREDLLRKQRTFDNGSIPHQIHLGELHAILRRQEDFYPFLKDNREKIEKILTFRIPYYVGPLARGNSRFAWMTRKSEETITPWNFEEVVDKGASAQSFIERMTNFDKNLPNEKVLPKHSLLYEYFTVYNELTKVKYVTEGMRKPAFLSGEQKKAIVDLLFKTNRKVTVKQLKEDYFKKIECFDSVEISGVEDRFNASLGTYHDLLKIIKDKDFLDNEENEDILEDIVLTLTLFEDREMIEERLKTYAHLFDDKVMKQLKRRRYTGWGRLSRKLINGIRDKQSGKTILDFLKSDGFANRNFMQLIHDDSLTFKEDIQKAQVSGQGDSLHEHIANLAGSPAIKKGILQTVKVVDELVKVMGRHKPENIVIEMARENQTTQKGQKNSRERMKRIEEGIKELGSQILKEHPVENTQLQNEKLYLYYLQNGRDMYVDQELDINRLSDYDVDHIVPQSFLKDDSIDNKVLTRSDKARGKSDNVPSEEVVKKMKNYWRQLLNAKLITQRKFDNLTKAERGGLSELDKAGFIKRQLVETRQITKHVAQILDSRMNTKYDENDKLIREVKVITLKSKLVSDFRKDFQFYKVREINNYHHAHDAYLNAVVGTALIKKYPKLESEFVYGDYKVYDVRKMIAKSEQEIGKATAKYFFYSNIMNFFKTEITLANGEIRKRPLIETNGETGEIVWDKGRDFATVRKVLSMPQVNIVKKTEVQTGGFSKESILPKRNSDKLIARKKDWDPKKYGGFDSPTVAYSVLVVAKVEKGKSKKLKSVKELLGITIMERSSFEKNPIDFLEAKGYKEVKKDLIIKLPKYSLFELENGRKRMLASAGELQKGNELALPSKYVNFLYLASHYEKLKGSPEDNEQKQLFVEQHKHYLDEIIEQISEFSKRVILADANLDKVLSAYNKHRDKPIREQAENIIHLFTLTNLGAPAAFKYFDTTIDRKRYTSTKEVLDATLIHQSITGLYETRIDLSQLGGDGGEAAAKPAPGGGGGWVQEISDSRPMLHIYLNGRRFLGLLNTGADKTCIAGRDWPANWPIHQTESSLQGLGMACGVARSSQPLRWQHEDKSGIIHPFVIPTLPFTLWGRDIMKDIKVRLMTDSPDDSQDLMIGAIESNLFADQISWKSDQPVWLNQWPLKQEKLQALQQLVTEQLQLGHLEESNSPWNTPVFVIKKKSGKWRLLQDLRAVNATMHDMGALQPGLPSPVAPPKGWEIIIIDLQDCFFNIKLHPEDCKRFAFSVPSPNFKRPYQRFQWKVLPQGMKNSPTLCQKFVDKAILTVRDKYQDSYIVHYMDDILLAHPSRSIVDEILTSMIQALNKHGLVVSTEKIQKYDNLKYLGTHIQGDSVSYQKLQIRTDKLRTLNDFQKLLGNINWIRPFLKLTTGELKPLFEILNPDSNPISTRKLTPEACKALQLMNERLSTARVKRLDLSQPWSLCILKTEYTPTACLWQDGVVEWIHLPHISPKVITPYDIFCTQLIIKGRHRSKELFSKDPDYIVVPYTKVQFDLLLQEKEDWPISLLGFLGEVHFHLPKDPLLTFTLQTAIIFPHMTSTTPLEKGIVIFTDGSANGRSVTYIQGREPIIKENTQNTAQQAEIVAVITAFEEVSQPFNLYTDSKYVTGLFPEIETATLSPRTKIYTELKHLQRLIHKRQEKFYIGHIRGHTGLPGPLAQGNAYADSLTRILTAGKRTADGSEFEKRTADGSEFESPKKKAKVE

SEQ ID NO: 19 - protein, 2114 aa, synthetic construct
MPAAKRVKLDGGDKKYSIGLDIGTNSVGWAVITDEYKVPSKKFKVLGNTDRHSIKKNLIGALLFDSGETAEATRLKRTARRRYTRRKNRICYLQEIFSNEMAKVDDSFFHRLEESFLVEEDKKHERHPIFGNIVDEVAYHEKYPTIYHLRKKLVDSTDKADLRLIYLALAHMIKFRGHFLIEGDLNPDNSDVDKLFIQLVQTYNQLFEENPINASGVDAKAILSARLSKSRRLENLIAQLPGEKKNGLFGNLIALSLGLTPNFKSNFDLAEDAKLQLSKDTYDDDLDNLLAQIGDQYADLFLAAKNLSDAILLSDILRVNTEITKAPLSASMIKRYDEHHQDLTLLKALVRQQLPEKYKEIFFDQSKNGYAGYIDGGASQEEFYKFIKPILEKMDGTEELLVKLNREDLLRKQRTFDNGSIPHQIHLGELHAILRRQEDFYPFLKDNREKIEKILTFRIPYYVGPLARGNSRFAWMTRKSEETITPWNFEEVVDKGASAQSFIERMTNFDKNLPNEKVLPKHSLLYEYFTVYNELTKVKYVTEGMRKPAFLSGEQKKAIVDLLFKTNRKVTVKQLKEDYFKKIECFDSVEISGVEDRFNASLGTYHDLLKIIKDKDFLDNEENEDILEDIVLTLTLFEDREMIEERLKTYAHLFDDKVMKQLKRRRYTGWGRLSRKLINGIRDKQSGKTILDFLKSDGFANRNFMQLIHDDSLTFKEDIQKAQVSGQGDSLHEHIANLAGSPAIKKGILQTVKVVDELVKVMGRHKPENIVIEMARENQTTQKGQKNSRERMKRIEEGIKELGSQILKEHPVENTQLQNEKLYLYYLQNGRDMYVDQELDINRLSDYDVDHIVPQSFLKDDSIDNKVLTRSDKARGKSDNVPSEEVVKKMKNYWRQLLNAKLITQRKFDNLTKAERGGLSELDKAGFIKRQLVETRQITKHVAQILDSRMNTKYDENDKLIREVKVITLKSKLVSDFRKDFQFYKVREINNYHHAHDAYLNAVVGTALIKKYPKLESEFVYGDYKVYDVRKMIAKSEQEIGKATAKYFFYSNIMNFFKTEITLANGEIRKRPLIETNGETGEIVWDKGRDFATVRKVLSMPQVNIVKKTEVQTGGFSKESILPKRNSDKLIARKKDWDPKKYGGFDSPTVAYSVLVVAKVEKGKSKKLKSVKELLGITIMERSSFEKNPIDFLEAKGYKEVKKDLIIKLPKYSLFELENGRKRMLASAGELQKGNELALPSKYVNFLYLASHYEKLKGSPEDNEQKQLFVEQHKHYLDEIIEQISEFSKRVILADANLDKVLSAYNKHRDKPIREQAENIIHLFTLTNLGAPAAFKYFDTTIDRKRYTSTKEVLDATLIHQSITGLYETRIDLSQLGGDGGPAPGGGGGSGGWVQEISDSRPMLHIYLNGRRFLGLLNTGADKTCIAGRDWPANWPIHQTESSLQGLGMACGVARSSQPLRWQHEDKSGIIHPFVIPTLPFTLWGRDIMKDIKVRLMTDSPDDSQDLMIGAIESNLFADQISWKSDQPVWLNQWPLKQEKLQALQQLVTEQLQLGHLEESNSPWNTPVFVIKKKSGKWRLLQDLRAVNATMHDMGALQPGLPSPVAPPKGWEIIIIDLQDCFFNIKLHPEDCKRFAFSVPSPNFKRPYQRFQWKVLPQGMKNSPTLCQKFVDKAILTVRDKYQDSYIVHYMDDILLAHPSRSIVDEILTSMIQALNKHGLVVSTEKIQKYDNLKYLGTHIQGDSVSYQKLQIRTDKLRTLNDFQKLLGNINWIRPFLKLTTGELKPLFEILNPDSNPISTRKLTPEACKALQLMNERLSTARVKRLDLSQPWSLCILKTEYTPTACLWQDGVVEWIHLPHISPKVITPYDIFCTQLIIKGRHRSKELFSKDPDYIVVPYTKVQFDLLLQEKEDWPISLLGFLGEVHFHLPKDPLLTFTLQTAIIFPHMTSTTPLEKGIVIFTDGSANGRSVTYIQGREPIIKENTQNTAQQAEIVAVITAFEEVSQPFNLYTDSKYVTGLFPEIETATLSPRTKIYTELKHLQRLIHKRQEKFYIGHIRGHTGLPGPLAQGNAYADSLTRILTAGKRTADGSEFEKRTADGSEFESPKKKAKVE

SEQ ID NO: 20 - protein, 2114 aa, synthetic construct
MPAAKRVKLDGGDKKYSIGLDIGTNSVGWAVITDEYKVPSKKFKVLGNTDRHSIKKNLIGALLFDSGETAEATRLKRTARRRYTRRKNRICYLQEIFSNEMAKVDDSFFHRLEESFLVEEDKKHERHPIFGNIVDEVAYHEKYPTIYHLRKKLVDSTDKADLRLIYLALAHMIKFRGHFLIEGDLNPDNSDVDKLFIQLVQTYNQLFEENPINASGVDAKAILSARLSKSRRLENLIAQLPGEKKNGLFGNLIALSLGLTPNFKSNFDLAEDAKLQLSKDTYDDDLDNLLAQIGDQYADLFLAAKNLSDAILLSDILRVNTEITKAPLSASMIKRYDEHHQDLTLLKALVRQQLPEKYKEIFFDQSKNGYAGYIDGGASQEEFYKFIKPILEKMDGTEELLVKLNREDLLRKQRTFDNGSIPHQIHLGELHAILRRQEDFYPFLKDNREKIEKILTFRIPYYVGPLARGNSRFAWMTRKSEETITPWNFEEVVDKGASAQSFIERMTNFDKNLPNEKVLPKHSLLYEYFTVYNELTKVKYVTEGMRKPAFLSGEQKKAIVDLLFKTNRKVTVKQLKEDYFKKIECFDSVEISGVEDRFNASLGTYHDLLKIIKDKDFLDNEENEDILEDIVLTLTLFEDREMIEERLKTYAHLFDDKVMKQLKRRRYTGWGRLSRKLINGIRDKQSGKTILDFLKSDGFANRNFMQLIHDDSLTFKEDIQKAQVSGQGDSLHEHIANLAGSPAIKKGILQTVKVVDELVKVMGRHKPENIVIEMARENQTTQKGQKNSRERMKRIEEGIKELGSQILKEHPVENTQLQNEKLYLYYLQNGRDMYVDQELDINRLSDYDVDHIVPQSFLKDDSIDNKVLTRSDKARGKSDNVPSEEVVKKMKNYWRQLLNAKLITQRKFDNLTKAERGGLSELDKAGFIKRQLVETRQITKHVAQILDSRMNTKYDENDKLIREVKVITLKSKLVSDFRKDFQFYKVREINNYHHAHDAYLNAVVGTALIKKYPKLESEFVYGDYKVYDVRKMIAKSEQEIGKATAKYFFYSNIMNFFKTEITLANGEIRKRPLIETNGETGEIVWDKGRDFATVRKVLSMPQVNIVKKTEVQTGGFSKESILPKRNSDKLIARKKDWDPKKYGGFDSPTVAYSVLVVAKVEKGKSKKLKSVKELLGITIMERSSFEKNPIDFLEAKGYKEVKKDLIIKLPKYSLFELENGRKRMLASAGELQKGNELALPSKYVNFLYLASHYEKLKGSPEDNEQKQLFVEQHKHYLDEIIEQISEFSKRVILADANLDKVLSAYNKHRDKPIREQAENIIHLFTLTNLGAPAAFKYFDTTIDRKRYTSTKEVLDATLIHQSITGLYETRIDLSQLGGDGGGGSGSSGGGGGWVQEISDSRPMLHIYLNGRRFLGLLNTGADKTCIAGRDWPANWPIHQTESSLQGLGMACGVARSSQPLRWQHEDKSGIIHPFVIPTLPFTLWGRDIMKDIKVRLMTDSPDDSQDLMIGAIESNLFADQISWKSDQPVWLNQWPLKQEKLQALQQLVTEQLQLGHLEESNSPWNTPVFVIKKKSGKWRLLQDLRAVNATMHDMGALQPGLPSPVAPPKGWEIIIIDLQDCFFNIKLHPEDCKRFAFSVPSPNFKRPYQRFQWKVLPQGMKNSPTLCQKFVDKAILTVRDKYQDSYIVHYMDDILLAHPSRSIVDEILTSMIQALNKHGLVVSTEKIQKYDNLKYLGTHIQGDSVSYQKLQIRTDKLRTLNDFQKLLGNINWIRPFLKLTTGELKPLFEILNPDSNPISTRKLTPEACKALQLMNERLSTARVKRLDLSQPWSLCILKTEYTPTACLWQDGVVEWIHLPHISPKVITPYDIFCTQLIIKGRHRSKELFSKDPDYIVVPYTKVQFDLLLQEKEDWPISLLGFLGEVHFHLPKDPLLTFTLQTAIIFPHMTSTTPLEKGIVIFTDGSANGRSVTYIQGREPIIKENTQNTAQQAEIVAVITAFEEVSQPFNLYTDSKYVTGLFPEIETATLSPRTKIYTELKHLQRLIHKRQEKFYIGHIRGHTGLPGPLAQGNAYADSLTRILTAGKRTADGSEFEKRTADGSEFESPKKKAKVE

SEQ ID NO: 21 - protein, 2116 aa, synthetic construct
MPAAKRVKLDGGDKKYSIGLDIGTNSVGWAVITDEYKVPSKKFKVLGNTDRHSIKKNLIGALLFDSGETAEATRLKRTARRRYTRRKNRICYLQEIFSNEMAKVDDSFFHRLEESFLVEEDKKHERHPIFGNIVDEVAYHEKYPTIYHLRKKLVDSTDKADLRLIYLALAHMIKFRGHFLIEGDLNPDNSDVDKLFIQLVQTYNQLFEENPINASGVDAKAILSARLSKSRRLENLIAQLPGEKKNGLFGNLIALSLGLTPNFKSNFDLAEDAKLQLSKDTYDDDLDNLLAQIGDQYADLFLAAKNLSDAILLSDILRVNTEITKAPLSASMIKRYDEHHQDLTLLKALVRQQLPEKYKEIFFDQSKNGYAGYIDGGASQEEFYKFIKPILEKMDGTEELLVKLNREDLLRKQRTFDNGSIPHQIHLGELHAILRRQEDFYPFLKDNREKIEKILTFRIPYYVGPLARGNSRFAWMTRKSEETITPWNFEEVVDKGASAQSFIERMTNFDKNLPNEKVLPKHSLLYEYFTVYNELTKVKYVTEGMRKPAFLSGEQKKAIVDLLFKTNRKVTVKQLKEDYFKKIECFDSVEISGVEDRFNASLGTYHDLLKIIKDKDFLDNEENEDILEDIVLTLTLFEDREMIEERLKTYAHLFDDKVMKQLKRRRYTGWGRLSRKLINGIRDKQSGKTILDFLKSDGFANRNFMQLIHDDSLTFKEDIQKAQVSGQGDSLHEHIANLAGSPAIKKGILQTVKVVDELVKVMGRHKPENIVIEMARENQTTQKGQKNSRERMKRIEEGIKELGSQILKEHPVENTQLQNEKLYLYYLQNGRDMYVDQELDINRLSDYDVDHIVPQSFLKDDSIDNKVLTRSDKARGKSDNVPSEEVVKKMKNYWRQLLNAKLITQRKFDNLTKAERGGLSELDKAGFIKRQLVETRQITKHVAQILDSRMNTKYDENDKLIREVKVITLKSKLVSDFRKDFQFYKVREINNYHHAHDAYLNAVVGTALIKKYPKLESEFVYGDYKVYDVRKMIAKSEQEIGKATAKYFFYSNIMNFFKTEITLANGEIRKRPLIETNGETGEIVWDKGRDFATVRKVLSMPQVNIVKKTEVQTGGFSKESILPKRNSDKLIARKKDWDPKKYGGFDSPTVAYSVLVVAKVEKGKSKKLKSVKELLGITIMERSSFEKNPIDFLEAKGYKEVKKDLIIKLPKYSLFELENGRKRMLASAGELQKGNELALPSKYVNFLYLASHYEKLKGSPEDNEQKQLFVEQHKHYLDEIIEQISEFSKRVILADANLDKVLSAYNKHRDKPIREQAENIIHLFTLTNLGAPAAFKYFDTTIDRKRYTSTKEVLDATLIHQSITGLYETRIDLSQLGGDGGPAPGGSEAAAKGGVQEISDSRPMLHIYLNGRRFLGLLDTGADKTCIAGRDWPANWPIHQTESSLQGLGMACGVARSSQPLRWQHEDKSGIIHPFVIPTLPFTLWGRDIMKDIKVRLMTDSPDDSQDLMIGAIESNLFADQISWKSDQPVWLNQWPLKQEKLQALQQLVTEQLQLGHLEESNSPWNTPVFVIKKKSGKWRLLQDLRAVNATMHDMGALQPGLPSPPAVPKGWEIIIIDLQDCFFNIKLHPEDCKRFAFSVPSPNFKRPYQRFQWKVLPQGMKNSPTLCQKFVDKAILTVRDKYQDSYIVHYMDDILLAHPSRSIVDEILTSMIQALNKHGLVVSTEKIQKYDNLKYLGTHIQGDSVSYQKLQIRTDKLRTLNDFQKLLGNINWIRPFLKLTTGELKPLFEILNPDSNPISTRKLTPEACKALQLMNERLSTARVKRLDLSQPWSLCILKTEYTPTACLWQDGVVEWIHLPHISPKVITPYDIFCTQLIIKGRHRSKELFSKDPDYIVVPYTKVQFDLLLQEKEDWPISLLGFLGEVHFHLPKDPLLTFTLQTAIIFPHMTSTTPLEKGIVIFTDGSANGRSVTYIQGREPIIKENTQNTAQQAEIVAVITAFEEVSQPFNLYTDSKYVTGLFPEIETATLSPRTKIYTELKHLQRLIHKRQEKFYIGHIRGHTGLPGPLAQGNAYADSLTRILTAAGKRTADGSEFEKRTADGSEFESPKKKAKVE

SEQ ID NO: 22 - protein, 2116 aa, synthetic construct
MPAAKRVKLDGGDKKYSIGLDIGTNSVGWAVITDEYKVPSKKFKVLGNTDRHSIKKNLIGALLFDSGETAEATRLKRTARRRYTRRKNRICYLQEIFSNEMAKVDDSFFHRLEESFLVEEDKKHERHPIFGNIVDEVAYHEKYPTIYHLRKKLVDSTDKADLRLIYLALAHMIKFRGHFLIEGDLNPDNSDVDKLFIQLVQTYNQLFEENPINASGVDAKAILSARLSKSRRLENLIAQLPGEKKNGLFGNLIALSLGLTPNFKSNFDLAEDAKLQLSKDTYDDDLDNLLAQIGDQYADLFLAAKNLSDAILLSDILRVNTEITKAPLSASMIKRYDEHHQDLTLLKALVRQQLPEKYKEIFFDQSKNGYAGYIDGGASQEEFYKFIKPILEKMDGTEELLVKLNREDLLRKQRTFDNGSIPHQIHLGELHAILRRQEDFYPFLKDNREKIEKILTFRIPYYVGPLARGNSRFAWMTRKSEETITPWNFEEVVDKGASAQSFIERMTNFDKNLPNEKVLPKHSLLYEYFTVYNELTKVKYVTEGMRKPAFLSGEQKKAIVDLLFKTNRKVTVKQLKEDYFKKIECFDSVEISGVEDRFNASLGTYHDLLKIIKDKDFLDNEENEDILEDIVLTLTLFEDREMIEERLKTYAHLFDDKVMKQLKRRRYTGWGRLSRKLINGIRDKQSGKTILDFLKSDGFANRNFMQLIHDDSLTFKEDIQKAQVSGQGDSLHEHIANLAGSPAIKKGILQTVKVVDELVKVMGRHKPENIVIEMARENQTTQKGQKNSRERMKRIEEGIKELGSQILKEHPVENTQLQNEKLYLYYLQNGRDMYVDQELDINRLSDYDVDHIVPQSFLKDDSIDNKVLTRSDKARGKSDNVPSEEVVKKMKNYWRQLLNAKLITQRKFDNLTKAERGGLSELDKAGFIKRQLVETRQITKHVAQILDSRMNTKYDENDKLIREVKVITLKSKLVSDFRKDFQFYKVREINNYHHAHDAYLNAVVGTALIKKYPKLESEFVYGDYKVYDVRKMIAKSEQEIGKATAKYFFYSNIMNFFKTEITLANGEIRKRPLIETNGETGEIVWDKGRDFATVRKVLSMPQVNIVKKTEVQTGGFSKESILPKRNSDKLIARKKDWDPKKYGGFDSPTVAYSVLVVAKVEKGKSKKLKSVKELLGITIMERSSFEKNPIDFLEAKGYKEVKKDLIIKLPKYSLFELENGRKRMLASAGELQKGNELALPSKYVNFLYLASHYEKLKGSPEDNEQKQLFVEQHKHYLDEIIEQISEFSKRVILADANLDKVLSAYNKHRDKPIREQAENIIHLFTLTNLGAPAAFKYFDTTIDRKRYTSTKEVLDATLIHQSITGLYETRIDLSQLGGDGGGGSEAAAKGGGGGVQEISDSRPMLHIYLNGRRFLGLLDTGADKTCIAGRDWPANWPIHQTESSLQGLGMACGVARSSQPLRWQHEDKSGIIHPFVIPTLPFTLWGRDIMKDIKVRLMTDSPDDSQDLMIGAIESNLFADQISWKSDQPVWLNQWPLKQEKLQALQQLVTEQLQLGHLEESNSPWNTPVFVIKKKSGKWRLLQDLRAVNATMHDMGALQPGLPSPPAVPKGWEIIIIDLQDCFFNIKLHPEDCKRFAFSVPSPNFKRPYQRFQWKVLPQGMKNSPTLCQKFVDKAILTVRDKYQDSYIVHYMDDILLAHPSRSIVDEILTSMIQALNKHGLVVSTEKIQKYDNLKYLGTHIQGDSVSYQKLQIRTDKLRTLNDFQKLLGNINWIRPFLKLTTGELKPLFEILNPDSNPISTRKLTPEACKALQLMNERLSTARVKRLDLSQPWSLCILKTEYTPTACLWQDGVVEWIHLPHISPKVITPYDIFCTQLIIKGRHRSKELFSKDPDYIVVPYTKVQFDLLLQEKEDWPISLLGFLGEVHFHLPKDPLLTFTLQTAIIFPHMTSTTPLEKGIVIFTDGSANGRSVTYIQGREPIIKENTQNTAQQAEIVAVITAFEEVSQPFNLYTDSKYVTGLFPEIETATLSPRTKIYTELKHLQRLIHKRQEKFYIGHIRGHTGLPGPLAQGNAYADSLTRILTAAGKRTADGSEFEKRTADGSEFESPKKKAKVE

SEQ ID NO: 23 - protein, 2116 aa, synthetic construct
MPAAKRVKLDGGDKKYSIGLDIGTNSVGWAVITDEYKVPSKKFKVLGNTDRHSIKKNLIGALLFDSGETAEATRLKRTARRRYTRRKNRICYLQEIFSNEMAKVDDSFFHRLEESFLVEEDKKHERHPIFGNIVDEVAYHEKYPTIYHLRKKLVDSTDKADLRLIYLALAHMIKFRGHFLIEGDLNPDNSDVDKLFIQLVQTYNQLFEENPINASGVDAKAILSARLSKSRRLENLIAQLPGEKKNGLFGNLIALSLGLTPNFKSNFDLAEDAKLQLSKDTYDDDLDNLLAQIGDQYADLFLAAKNLSDAILLSDILRVNTEITKAPLSASMIKRYDEHHQDLTLLKALVRQQLPEKYKEIFFDQSKNGYAGYIDGGASQEEFYKFIKPILEKMDGTEELLVKLNREDLLRKQRTFDNGSIPHQIHLGELHAILRRQEDFYPFLKDNREKIEKILTFRIPYYVGPLARGNSRFAWMTRKSEETITPWNFEEVVDKGASAQSFIERMTNFDKNLPNEKVLPKHSLLYEYFTVYNELTKVKYVTEGMRKPAFLSGEQKKAIVDLLFKTNRKVTVKQLKEDYFKKIECFDSVEISGVEDRFNASLGTYHDLLKIIKDKDFLDNEENEDILEDIVLTLTLFEDREMIEERLKTYAHLFDDKVMKQLKRRRYTGWGRLSRKLINGIRDKQSGKTILDFLKSDGFANRNFMQLIHDDSLTFKEDIQKAQVSGQGDSLHEHIANLAGSPAIKKGILQTVKVVDELVKVMGRHKPENIVIEMARENQTTQKGQKNSRERMKRIEEGIKELGSQILKEHPVENTQLQNEKLYLYYLQNGRDMYVDQELDINRLSDYDVDHIVPQSFLKDDSIDNKVLTRSDKARGKSDNVPSEEVVKKMKNYWRQLLNAKLITQRKFDNLTKAERGGLSELDKAGFIKRQLVETRQITKHVAQILDSRMNTKYDENDKLIREVKVITLKSKLVSDFRKDFQFYKVREINNYHHAHDAYLNAVVGTALIKKYPKLESEFVYGDYKVYDVRKMIAKSEQEIGKATAKYFFYSNIMNFFKTEITLANGEIRKRPLIETNGETGEIVWDKGRDFATVRKVLSMPQVNIVKKTEVQTGGFSKESILPKRNSDKLIARKKDWDPKKYGGFDSPTVAYSVLVVAKVEKGKSKKLKSVKELLGITIMERSSFEKNPIDFLEAKGYKEVKKDLIIKLPKYSLFELENGRKRMLASAGELQKGNELALPSKYVNFLYLASHYEKLKGSPEDNEQKQLFVEQHKHYLDEIIEQISEFSKRVILADANLDKVLSAYNKHRDKPIREQAENIIHLFTLTNLGAPAAFKYFDTTIDRKRYTSTKEVLDATLIHQSITGLYETRIDLSQLGGDGGGGGGGSEAAAKGGVQEISDSRPMLHIYLNGRRFLGLLDTGADKTCIAGRDWPANWPIHQTESSLQGLGMACGVARSSQPLRWQHEDKSGIIHPFVIPTLPFTLWGRDIMKDIKVRLMTDSPDDSQDLMIGAIESNLFADQISWKSDQPVWLNQWPLKQEKLQALQQLVTEQLQLGHLEESNSPWNTPVFVIKKKSGKWRLLQDLRAVNATMHDMGALQPGLPSPPAVPKGWEIIIIDLQDCFFNIKLHPEDCKRFAFSVPSPNFKRPYQRFQWKVLPQGMKNSPTLCQKFVDKAILTVRDKYQDSYIVHYMDDILLAHPSRSIVDEILTSMIQALNKHGLVVSTEKIQKYDNLKYLGTHIQGDSVSYQKLQIRTDKLRTLNDFQKLLGNINWIRPFLKLTTGELKPLFEILNPDSNPISTRKLTPEACKALQLMNERLSTARVKRLDLSQPWSLCILKTEYTPTACLWQDGVVEWIHLPHISPKVITPYDIFCTQLIIKGRHRSKELFSKDPDYIVVPYTKVQFDLLLQEKEDWPISLLGFLGEVHFHLPKDPLLTFTLQTAIIFPHMTSTTPLEKGIVIFTDGSANGRSVTYIQGREPIIKENTQNTAQQAEIVAVITAFEEVSQPFNLYTDSKYVTGLFPEIETATLSPRTKIYTELKHLQRLIHKRQEKFYIGHIRGHTGLPGPLAQGNAYADSLTRILTAAGKRTADGSEFEKRTADGSEFESPKKKAKVE

SEQ ID NO: 24 - protein, 2116 aa, synthetic construct
MPAAKRVKLDGGDKKYSIGLDIGTNSVGWAVITDEYKVPSKKFKVLGNTDRHSIKKNLIGALLFDSGETAEATRLKRTARRRYTRRKNRICYLQEIFSNEMAKVDDSFFHRLEESFLVEEDKKHERHPIFGNIVDEVAYHEKYPTIYHLRKKLVDSTDKADLRLIYLALAHMIKFRGHFLIEGDLNPDNSDVDKLFIQLVQTYNQLFEENPINASGVDAKAILSARLSKSRRLENLIAQLPGEKKNGLFGNLIALSLGLTPNFKSNFDLAEDAKLQLSKDTYDDDLDNLLAQIGDQYADLFLAAKNLSDAILLSDILRVNTEITKAPLSASMIKRYDEHHQDLTLLKALVRQQLPEKYKEIFFDQSKNGYAGYIDGGASQEEFYKFIKPILEKMDGTEELLVKLNREDLLRKQRTFDNGSIPHQIHLGELHAILRRQEDFYPFLKDNREKIEKILTFRIPYYVGPLARGNSRFAWMTRKSEETITPWNFEEVVDKGASAQSFIERMTNFDKNLPNEKVLPKHSLLYEYFTVYNELTKVKYVTEGMRKPAFLSGEQKKAIVDLLFKTNRKVTVKQLKEDYFKKIECFDSVEISGVEDRFNASLGTYHDLLKIIKDKDFLDNEENEDILEDIVLTLTLFEDREMIEERLKTYAHLFDDKVMKQLKRRRYTGWGRLSRKLINGIRDKQSGKTILDFLKSDGFANRNFMQLIHDDSLTFKEDIQKAQVSGQGDSLHEHIANLAGSPAIKKGILQTVKVVDELVKVMGRHKPENIVIEMARENQTTQKGQKNSRERMKRIEEGIKELGSQILKEHPVENTQLQNEKLYLYYLQNGRDMYVDQELDINRLSDYDVDHIVPQSFLKDDSIDNKVLTRSDKARGKSDNVPSEEVVKKMKNYWRQLLNAKLITQRKFDNLTKAERGGLSELDKAGFIKRQLVETRQITKHVAQILDSRMNTKYDENDKLIREVKVITLKSKLVSDFRKDFQFYKVREINNYHHAHDAYLNAVVGTALIKKYPKLESEFVYGDYKVYDVRKMIAKSEQEIGKATAKYFFYSNIMNFFKTEITLANGEIRKRPLIETNGETGEIVWDKGRDFATVRKVLSMPQVNIVKKTEVQTGGFSKESILPKRNSDKLIARKKDWDPKKYGGFDSPTVAYSVLVVAKVEKGKSKKLKSVKELLGITIMERSSFEKNPIDFLEAKGYKEVKKDLIIKLPKYSLFELENGRKRMLASAGELQKGNELALPSKYVNFLYLASHYEKLKGSPEDNEQKQLFVEQHKHYLDEIIEQISEFSKRVILADANLDKVLSAYNKHRDKPIREQAENIIHLFTLTNLGAPAAFKYFDTTIDRKRYTSTKEVLDATLIHQSITGLYETRIDLSQLGGDGGPAPEAAAKGSSGGVQEISDSRPMLHIYLNGRRFLGLLDTGADKTCIAGRDWPANWPIHQTESSLQGLGMACGVARSSQPLRWQHEDKSGIIHPFVIPTLPFTLWGRDIMKDIKVRLMTDSPDDSQDLMIGAIESNLFADQISWKSDQPVWLNQWPLKQEKLQALQQLVTEQLQLGHLEESNSPWNTPVFVIKKKSGKWRLLQDLRAVNATMHDMGALQPGLPSPPAVPKGWEIIIIDLQDCFFNIKLHPEDCKRFAFSVPSPNFKRPYQRFQWKVLPQGMKNSPTLCQKFVDKAILTVRDKYQDSYIVHYMDDILLAHPSRSIVDEILTSMIQALNKHGLVVSTEKIQKYDNLKYLGTHIQGDSVSYQKLQIRTDKLRTLNDFQKLLGNINWIRPFLKLTTGELKPLFEILNPDSNPISTRKLTPEACKALQLMNERLSTARVKRLDLSQPWSLCILKTEYTPTACLWQDGVVEWIHLPHISPKVITPYDIFCTQLIIKGRHRSKELFSKDPDYIVVPYTKVQFDLLLQEKEDWPISLLGFLGEVHFHLPKDPLLTFTLQTAIIFPHMTSTTPLEKGIVIFTDGSANGRSVTYIQGREPIIKENTQNTAQQAEIVAVITAFEEVSQPFNLYTDSKYVTGLFPEIETATLSPRTKIYTELKHLQRLIHKRQEKFYIGHIRGHTGLPGPLAQGNAYADSLTRILTAAGKRTADGSEFEKRTADGSEFESPKKKAKVE

SEQ ID NO: 25 - protein, 2116 aa, synthetic construct
MPAAKRVKLDGGDKKYSIGLDIGTNSVGWAVITDEYKVPSKKFKVLGNTDRHSIKKNLIGALLFDSGETAEATRLKRTARRRYTRRKNRICYLQEIFSNEMAKVDDSFFHRLEESFLVEEDKKHERHPIFGNIVDEVAYHEKYPTIYHLRKKLVDSTDKADLRLIYLALAHMIKFRGHFLIEGDLNPDNSDVDKLFIQLVQTYNQLFEENPINASGVDAKAILSARLSKSRRLENLIAQLPGEKKNGLFGNLIALSLGLTPNFKSNFDLAEDAKLQLSKDTYDDDLDNLLAQIGDQYADLFLAAKNLSDAILLSDILRVNTEITKAPLSASMIKRYDEHHQDLTLLKALVRQQLPEKYKEIFFDQSKNGYAGYIDGGASQEEFYKFIKPILEKMDGTEELLVKLNREDLLRKQRTFDNGSIPHQIHLGELHAILRRQEDFYPFLKDNREKIEKILTFRIPYYVGPLARGNSRFAWMTRKSEETITPWNFEEVVDKGASAQSFIERMTNFDKNLPNEKVLPKHSLLYEYFTVYNELTKVKYVTEGMRKPAFLSGEQKKAIVDLLFKTNRKVTVKQLKEDYFKKIECFDSVEISGVEDRFNASLGTYHDLLKIIKDKDFLDNEENEDILEDIVLTLTLFEDREMIEERLKTYAHLFDDKVMKQLKRRRYTGWGRLSRKLINGIRDKQSGKTILDFLKSDGFANRNFMQLIHDDSLTFKEDIQKAQVSGQGDSLHEHIANLAGSPAIKKGILQTVKVVDELVKVMGRHKPENIVIEMARENQTTQKGQKNSRERMKRIEEGIKELGSQILKEHPVENTQLQNEKLYLYYLQNGRDMYVDQELDINRLSDYDVDHIVPQSFLKDDSIDNKVLTRSDKARGKSDNVPSEEVVKKMKNYWRQLLNAKLITQRKFDNLTKAERGGLSELDKAGFIKRQLVETRQITKHVAQILDSRMNTKYDENDKLIREVKVITLKSKLVSDFRKDFQFYKVREINNYHHAHDAYLNAVVGTALIKKYPKLESEFVYGDYKVYDVRKMIAKSEQEIGKATAKYFFYSNIMNFFKTEITLANGEIRKRPLIETNGETGEIVWDKGRDFATVRKVLSMPQVNIVKKTEVQTGGFSKESILPKRNSDKLIARKKDWDPKKYGGFDSPTVAYSVLVVAKVEKGKSKKLKSVKELLGITIMERSSFEKNPIDFLEAKGYKEVKKDLIIKLPKYSLFELENGRKRMLASAGELQKGNELALPSKYVNFLYLASHYEKLKGSPEDNEQKQLFVEQHKHYLDEIIEQISEFSKRVILADANLDKVLSAYNKHRDKPIREQAENIIHLFTLTNLGAPAAFKYFDTTIDRKRYTSTKEVLDATLIHQSITGLYETRIDLSQLGGDGGGGSGSSEAAAKGGVQEISDSRPMLHIYLNGRRFLGLLDTGADKTCIAGRDWPANWPIHQTESSLQGLGMACGVARSSQPLRWQHEDKSGIIHPFVIPTLPFTLWGRDIMKDIKVRLMTDSPDDSQDLMIGAIESNLFADQISWKSDQPVWLNQWPLKQEKLQALQQLVTEQLQLGHLEESNSPWNTPVFVIKKKSGKWRLLQDLRAVNATMHDMGALQPGLPSPPAVPKGWEIIIIDLQDCFFNIKLHPEDCKRFAFSVPSPNFKRPYQRFQWKVLPQGMKNSPTLCQKFVDKAILTVRDKYQDSYIVHYMDDILLAHPSRSIVDEILTSMIQALNKHGLVVSTEKIQKYDNLKYLGTHIQGDSVSYQKLQIRTDKLRTLNDFQKLLGNINWIRPFLKLTTGELKPLFEILNPDSNPISTRKLTPEACKALQLMNERLSTARVKRLDLSQPWSLCILKTEYTPTACLWQDGVVEWIHLPHISPKVITPYDIFCTQLIIKGRHRSKELFSKDPDYIVVPYTKVQFDLLLQEKEDWPISLLGFLGEVHFHLPKDPLLTFTLQTAIIFPHMTSTTPLEKGIVIFTDGSANGRSVTYIQGREPIIKENTQNTAQQAEIVAVITAFEEVSQPFNLYTDSKYVTGLFPEIETATLSPRTKIYTELKHLQRLIHKRQEKFYIGHIRGHTGLPGPLAQGNAYADSLTRILTAAGKRTADGSEFEKRTADGSEFESPKKKAKVE

SEQ ID NO: 26 - protein, 2116 aa, synthetic construct
MPAAKRVKLDGGDKKYSIGLDIGTNSVGWAVITDEYKVPSKKFKVLGNTDRHSIKKNLIGALLFDSGETAEATRLKRTARRRYTRRKNRICYLQEIFSNEMAKVDDSFFHRLEESFLVEEDKKHERHPIFGNIVDEVAYHEKYPTIYHLRKKLVDSTDKADLRLIYLALAHMIKFRGHFLIEGDLNPDNSDVDKLFIQLVQTYNQLFEENPINASGVDAKAILSARLSKSRRLENLIAQLPGEKKNGLFGNLIALSLGLTPNFKSNFDLAEDAKLQLSKDTYDDDLDNLLAQIGDQYADLFLAAKNLSDAILLSDILRVNTEITKAPLSASMIKRYDEHHQDLTLLKALVRQQLPEKYKEIFFDQSKNGYAGYIDGGASQEEFYKFIKPILEKMDGTEELLVKLNREDLLRKQRTFDNGSIPHQIHLGELHAILRRQEDFYPFLKDNREKIEKILTFRIPYYVGPLARGNSRFAWMTRKSEETITPWNFEEVVDKGASAQSFIERMTNFDKNLPNEKVLPKHSLLYEYFTVYNELTKVKYVTEGMRKPAFLSGEQKKAIVDLLFKTNRKVTVKQLKEDYFKKIECFDSVEISGVEDRFNASLGTYHDLLKIIKDKDFLDNEENEDILEDIVLTLTLFEDREMIEERLKTYAHLFDDKVMKQLKRRRYTGWGRLSRKLINGIRDKQSGKTILDFLKSDGFANRNFMQLIHDDSLTFKEDIQKAQVSGQGDSLHEHIANLAGSPAIKKGILQTVKVVDELVKVMGRHKPENIVIEMARENQTTQKGQKNSRERMKRIEEGIKELGSQILKEHPVENTQLQNEKLYLYYLQNGRDMYVDQELDINRLSDYDVDHIVPQSFLKDDSIDNKVLTRSDKARGKSDNVPSEEVVKKMKNYWRQLLNAKLITQRKFDNLTKAERGGLSELDKAGFIKRQLVETRQITKHVAQILDSRMNTKYDENDKLIREVKVITLKSKLVSDFRKDFQFYKVREINNYHHAHDAYLNAVVGTALIKKYPKLESEFVYGDYKVYDVRKMIAKSEQEIGKATAKYFFYSNIMNFFKTEITLANGEIRKRPLIETNGETGEIVWDKGRDFATVRKVLSMPQVNIVKKTEVQTGGFSKESILPKRNSDKLIARKKDWDPKKYGGFDSPTVAYSVLVVAKVEKGKSKKLKSVKELLGITIMERSSFEKNPIDFLEAKGYKEVKKDLIIKLPKYSLFELENGRKRMLASAGELQKGNELALPSKYVNFLYLASHYEKLKGSPEDNEQKQLFVEQHKHYLDEIIEQISEFSKRVILADANLDKVLSAYNKHRDKPIREQAENIIHLFTLTNLGAPAAFKYFDTTIDRKRYTSTKEVLDATLIHQSITGLYETRIDLSQLGGDGGEAAAKGGSGSSGGVQEISDSRPMLHIYLNGRRFLGLLDTGADKTCIAGRDWPANWPIHQTESSLQGLGMACGVARSSQPLRWQHEDKSGIIHPFVIPTLPFTLWGRDIMKDIKVRLMTDSPDDSQDLMIGAIESNLFADQISWKSDQPVWLNQWPLKQEKLQALQQLVTEQLQLGHLEESNSPWNTPVFVIKKKSGKWRLLQDLRAVNATMHDMGALQPGLPSPVAVPKGWEIIIIDLQDCFFNIKLHPEDCKRFAFSVPSPNFKRPYQRFQWKVLPQGMKNSPTLCQKFVDKAILTVRDKYQDSYIVHYMDDILLAHPSRSIVDEILTSMIQALNKHGLVVSTEKIQKYDNLKYLGTHIQGDSVSYQKLQIRTDKLRTLNDFQKLLGNINWIRPFLKLTTGELKPLFEILNPDSNPISTRKLTPEACKALQLMNERLSTARVKRLDLSQPWSLCILKTEYTPTACLWQDGVVEWIHLPHISPKVITPYDIFCTQLIIKGRHRSKELFSKDPDYIVVPYTKVQFDLLLQEKEDWPISLLGFLGEVHFHLPKDPLLTFTLQTAIIFPHMTSTTPLEKGIVIFTDGSANGRSVTYIQGREPIIKENTQNTAQQAEIVAVITAFEEVSQPFNLYTDSKYVTGLFPEIETATLSPRTKIYTELKHLQRLIHKRQEKFYIGHIRGHTGLPGPLAQGNAYADSLTRILTAAGKRTADGSEFEKRTADGSEFESPKKKAKVE

SEQ ID NO: 27 - protein, 2116 aa, synthetic construct
MPAAKRVKLDGGDKKYSIGLDIGTNSVGWAVITDEYKVPSKKFKVLGNTDRHSIKKNLIGALLFDSGETAEATRLKRTARRRYTRRKNRICYLQEIFSNEMAKVDDSFFHRLEESFLVEEDKKHERHPIFGNIVDEVAYHEKYPTIYHLRKKLVDSTDKADLRLIYLALAHMIKFRGHFLIEGDLNPDNSDVDKLFIQLVQTYNQLFEENPINASGVDAKAILSARLSKSRRLENLIAQLPGEKKNGLFGNLIALSLGLTPNFKSNFDLAEDAKLQLSKDTYDDDLDNLLAQIGDQYADLFLAAKNLSDAILLSDILRVNTEITKAPLSASMIKRYDEHHQDLTLLKALVRQQLPEKYKEIFFDQSKNGYAGYIDGGASQEEFYKFIKPILEKMDGTEELLVKLNREDLLRKQRTFDNGSIPHQIHLGELHAILRRQEDFYPFLKDNREKIEKILTFRIPYYVGPLARGNSRFAWMTRKSEETITPWNFEEVVDKGASAQSFIERMTNFDKNLPNEKVLPKHSLLYEYFTVYNELTKVKYVTEGMRKPAFLSGEQKKAIVDLLFKTNRKVTVKQLKEDYFKKIECFDSVEISGVEDRFNASLGTYHDLLKIIKDKDFLDNEENEDILEDIVLTLTLFEDREMIEERLKTYAHLFDDKVMKQLKRRRYTGWGRLSRKLINGIRDKQSGKTILDFLKSDGFANRNFMQLIHDDSLTFKEDIQKAQVSGQGDSLHEHIANLAGSPAIKKGILQTVKVVDELVKVMGRHKPENIVIEMARENQTTQKGQKNSRERMKRIEEGIKELGSQILKEHPVENTQLQNEKLYLYYLQNGRDMYVDQELDINRLSDYDVDHIVPQSFLKDDSIDNKVLTRSDKARGKSDNVPSEEVVKKMKNYWRQLLNAKLITQRKFDNLTKAERGGLSELDKAGFIKRQLVETRQITKHVAQILDSRMNTKYDENDKLIREVKVITLKSKLVSDFRKDFQFYKVREINNYHHAHDAYLNAVVGTALIKKYPKLESEFVYGDYKVYDVRKMIAKSEQEIGKATAKYFFYSNIMNFFKTEITLANGEIRKRPLIETNGETGEIVWDKGRDFATVRKVLSMPQVNIVKKTEVQTGGFSKESILPKRNSDKLIARKKDWDPKKYGGFDSPTVAYSVLVVAKVEKGKSKKLKSVKELLGITIMERSSFEKNPIDFLEAKGYKEVKKDLIIKLPKYSLFELENGRKRMLASAGELQKGNELALPSKYVNFLYLASHYEKLKGSPEDNEQKQLFVEQHKHYLDEIIEQISEFSKRVILADANLDKVLSAYNKHRDKPIREQAENIIHLFTLTNLGAPAAFKYFDTTIDRKRYTSTKEVLDATLIHQSITGLYETRIDLSQLGGDGGEAAAKGGGGGSGGVQEISDSRPMLHIYLNGRRFLGLLDTGADKTCIAGRDWPANWPIHQTESSLQGLGMACGVARSSQPLRWQHEDKSGIIHPFVIPTLPFTLWGRDIMKDIKVRLMTDSPDDSQDLMIGAIESNLFADQISWKSDQPVWLNQWPLKQEKLQALQQLVTEQLQLGHLEESNSPWNTPVFVIKKKSGKWRLLQDLRAVNATMHDMGALQPGLPSPVAVPKGWEIIIIDLQDCFFNIKLHPEDCKRFAFSVPSPNFKRPYQRFQWKVLPQGMKNSPTLCQKFVDKAILTVRDKYQDSYIVHYMDDILLAHPSRSIVDEILTSMIQALNKHGLVVSTEKIQKYDNLKYLGTHIQGDSVSYQKLQIRTDKLRTLNDFQKLLGNINWIRPFLKLTTGELKPLFEILNPDSNPISTRKLTPEACKALQLMNERLSTARVKRLDLSQPWSLCILKTEYTPTACLWQDGVVEWIHLPHISPKVITPYDIFCTQLIIKGRHRSKELFSKDPDYIVVPYTKVQFDLLLQEKEDWPISLLGFLGEVHFHLPKDPLLTFTLQTAIIFPHMTSTTPLEKGIVIFTDGSANGRSVTYIQGREPIIKENTQNTAQQAEIVAVITAFEEVSQPFNLYTDSKYVTGLFPEIETATLSPRTKIYTELKHLQRLIHKRQEKFYIGHIRGHTGLPGPLAQGNAYADSLTRILTAAGKRTADGSEFEKRTADGSEFESPKKKAKVE

SEQ ID NO: 28 - protein, 2116 aa, synthetic construct
MPAAKRVKLDGGDKKYSIGLDIGTNSVGWAVITDEYKVPSKKFKVLGNTDRHSIKKNLIGALLFDSGETAEATRLKRTARRRYTRRKNRICYLQEIFSNEMAKVDDSFFHRLEESFLVEEDKKHERHPIFGNIVDEVAYHEKYPTIYHLRKKLVDSTDKADLRLIYLALAHMIKFRGHFLIEGDLNPDNSDVDKLFIQLVQTYNQLFEENPINASGVDAKAILSARLSKSRRLENLIAQLPGEKKNGLFGNLIALSLGLTPNFKSNFDLAEDAKLQLSKDTYDDDLDNLLAQIGDQYADLFLAAKNLSDAILLSDILRVNTEITKAPLSASMIKRYDEHHQDLTLLKALVRQQLPEKYKEIFFDQSKNGYAGYIDGGASQEEFYKFIKPILEKMDGTEELLVKLNREDLLRKQRTFDNGSIPHQIHLGELHAILRRQEDFYPFLKDNREKIEKILTFRIPYYVGPLARGNSRFAWMTRKSEETITPWNFEEVVDKGASAQSFIERMTNFDKNLPNEKVLPKHSLLYEYFTVYNELTKVKYVTEGMRKPAFLSGEQKKAIVDLLFKTNRKVTVKQLKEDYFKKIECFDSVEISGVEDRFNASLGTYHDLLKIIKDKDFLDNEENEDILEDIVLTLTLFEDREMIEERLKTYAHLFDDKVMKQLKRRRYTGWGRLSRKLINGIRDKQSGKTILDFLKSDGFANRNFMQLIHDDSLTFKEDIQKAQVSGQGDSLHEHIANLAGSPAIKKGILQTVKVVDELVKVMGRHKPENIVIEMARENQTTQKGQKNSRERMKRIEEGIKELGSQILKEHPVENTQLQNEKLYLYYLQNGRDMYVDQELDINRLSDYDVDHIVPQSFLKDDSIDNKVLTRSDKARGKSDNVPSEEVVKKMKNYWRQLLNAKLITQRKFDNLTKAERGGLSELDKAGFIKRQLVETRQITKHVAQILDSRMNTKYDENDKLIREVKVITLKSKLVSDFRKDFQFYKVREINNYHHAHDAYLNAVVGTALIKKYPKLESEFVYGDYKVYDVRKMIAKSEQEIGKATAKYFFYSNIMNFFKTEITLANGEIRKRPLIETNGETGEIVWDKGRDFATVRKVLSMPQVNIVKKTEVQTGGFSKESILPKRNSDKLIARKKDWDPKKYGGFDSPTVAYSVLVVAKVEKGKSKKLKSVKELLGITIMERSSFEKNPIDFLEAKGYKEVKKDLIIKLPKYSLFELENGRKRMLASAGELQKGNELALPSKYVNFLYLASHYEKLKGSPEDNEQKQLFVEQHKHYLDEIIEQISEFSKRVILADANLDKVLSAYNKHRDKPIREQAENIIHLFTLTNLGAPAAFKYFDTTIDRKRYTSTKEVLDATLIHQSITGLYETRIDLSQLGGDGGEAAAKPAPGGSGGVQEISDSRPMLHIYLNGRRFLGLLDTGADKTCIAGRDWPANWPIHQTESSLQGLGMACGVARSSQPLRWQHEDKSGIIHPFVIPTLPFTLWGRDIMKDIKVRLMTDSPDDSQDLMIGAIESNLFADQISWKSDQPVWLNQWPLKQEKLQALQQLVTEQLQLGHLEESNSPWNTPVFVIKKKSGKWRLLQDLRAVNATMHDMGALQPGLPSPVAVPKGWEIIIIDLQDCFFNIKLHPEDCKRFAFSVPSPNFKRPYQRFQWKVLPQGMKNSPTLCQKFVDKAILTVRDKYQDSYIVHYMDDILLAHPSRSIVDEILTSMIQALNKHGLVVSTEKIQKYDNLKYLGTHIQGDSVSYQKLQIRTDKLRTLNDFQKLLGNINWIRPFLKLTTGELKPLFEILNPDSNPISTRKLTPEACKALQLMNERLSTARVKRLDLSQPWSLCILKTEYTPTACLWQDGVVEWIHLPHISPKVITPYDIFCTQLIIKGRHRSKELFSKDPDYIVVPYTKVQFDLLLQEKEDWPISLLGFLGEVHFHLPKDPLLTFTLQTAIIFPHMTSTTPLEKGIVIFTDGSANGRSVTYIQGREPIIKENTQNTAQQAEIVAVITAFEEVSQPFNLYTDSKYVTGLFPEIETATLSPRTKIYTELKHLQRLIHKRQEKFYIGHIRGHTGLPGPLAQGNAYADSLTRILTAAGKRTADGSEFEKRTADGSEFESPKKKAKVE

SEQ ID NO: 29 - protein, 2113 aa, synthetic construct
MPAAKRVKLDGGDKKYSIGLDIGTNSVGWAVITDEYKVPSKKFKVLGNTDRHSIKKNLIGALLFDSGETAEATRLKRTARRRYTRRKNRICYLQEIFSNEMAKVDDSFFHRLEESFLVEEDKKHERHPIFGNIVDEVAYHEKYPTIYHLRKKLVDSTDKADLRLIYLALAHMIKFRGHFLIEGDLNPDNSDVDKLFIQLVQTYNQLFEENPINASGVDAKAILSARLSKSRRLENLIAQLPGEKKNGLFGNLIALSLGLTPNFKSNFDLAEDAKLQLSKDTYDDDLDNLLAQIGDQYADLFLAAKNLSDAILLSDILRVNTEITKAPLSASMIKRYDEHHQDLTLLKALVRQQLPEKYKEIFFDQSKNGYAGYIDGGASQEEFYKFIKPILEKMDGTEELLVKLNREDLLRKQRTFDNGSIPHQIHLGELHAILRRQEDFYPFLKDNREKIEKILTFRIPYYVGPLARGNSRFAWMTRKSEETITPWNFEEVVDKGASAQSFIERMTNFDKNLPNEKVLPKHSLLYEYFTVYNELTKVKYVTEGMRKPAFLSGEQKKAIVDLLFKTNRKVTVKQLKEDYFKKIECFDSVEISGVEDRFNASLGTYHDLLKIIKDKDFLDNEENEDILEDIVLTLTLFEDREMIEERLKTYAHLFDDKVMKQLKRRRYTGWGRLSRKLINGIRDKQSGKTILDFLKSDGFANRNFMQLIHDDSLTFKEDIQKAQVSGQGDSLHEHIANLAGSPAIKKGILQTVKVVDELVKVMGRHKPENIVIEMARENQTTQKGQKNSRERMKRIEEGIKELGSQILKEHPVENTQLQNEKLYLYYLQNGRDMYVDQELDINRLSDYDVDHIVPQSFLKDDSIDNKVLTRSDKARGKSDNVPSEEVVKKMKNYWRQLLNAKLITQRKFDNLTKAERGGLSELDKAGFIKRQLVETRQITKHVAQILDSRMNTKYDENDKLIREVKVITLKSKLVSDFRKDFQFYKVREINNYHHAHDAYLNAVVGTALIKKYPKLESEFVYGDYKVYDVRKMIAKSEQEIGKATAKYFFYSNIMNFFKTEITLANGEIRKRPLIETNGETGEIVWDKGRDFATVRKVLSMPQVNIVKKTEVQTGGFSKESILPKRNSDKLIARKKDWDPKKYGGFDSPTVAYSVLVVAKVEKGKSKKLKSVKELLGITIMERSSFEKNPIDFLEAKGYKEVKKDLIIKLPKYSLFELENGRKRMLASAGELQKGNELALPSKYVNFLYLASHYEKLKGSPEDNEQKQLFVEQHKHYLDEIIEQISEFSKRVILADANLDKVLSAYNKHRDKPIREQAENIIHLFTLTNLGAPAAFKYFDTTIDRKRYTSTKEVLDATLIHQSITGLYETRIDLSQLGGDGGGGSEAAAKGGVQEISDSRPMLHIYLNGRRFLGLLDTGADKTCIAGRDWPANWPIHQTESSLQGLGMACGVARSSQPLRWQHEDKSGIIHPFVIPTLPFTLWGRDIMKDIKVRLMTDSPDDSQDLMIGAIESNLFADQISWKSDQPVWLNQWPLKQEKLQALQQLVTEQLQLGHLEESNSPWNTPVFVIKKKSGKWRLLQDLRAVNATMHDMGALQPGLPSPVAVPKGWEIIIIDLQDCFFNIKLHPEDCKRFAFSVPSPNFKRPYQRFQWKVLPQGMKNSPTLCQKFVDKAILTVRDKYQDSYIVHYMDDILLAHPSRSIVDEILTSMIQALNKHGLVVSTEKIQKYDNLKYLGTHIQGDSVSYQKLQIRTDKLRTLNDFQKLLGNINWIRPFLKLTTGELKPLFEILNPDSNPISTRKLTPEACKALQLMNERLSTARVKRLDLSQPWSLCILKTEYTPTACLWQDGVVEWIHLPHISPKVITPYDIFCTQLIIKGRHRSKELFSKDPDYIVVPYTKVQFDLLLQEKEDWPISLLGFLGEVHFHLPKDPLLTFTLQTAIIFPHMTSTTPLEKGIVIFTDGSANGRSVTYIQGREPIIKENTQNTAQQAEIVAVITAFEEVSQPFNLYTDSKYVTGLFPEIETATLSPRTKIYTELKHLQRLIHKRQEKFYIGHIRGHTGLPGPLAQGNAYADSLTRILTAAGKRTADGSEFEKRTADGSEFESPKKKAKVE

SEQ ID NO: 30 - protein, 2111 aa, synthetic construct
MPAAKRVKLDGGDKKYSIGLDIGTNSVGWAVITDEYKVPSKKFKVLGNTDRHSIKKNLIGALLFDSGETAEATRLKRTARRRYTRRKNRICYLQEIFSNEMAKVDDSFFHRLEESFLVEEDKKHERHPIFGNIVDEVAYHEKYPTIYHLRKKLVDSTDKADLRLIYLALAHMIKFRGHFLIEGDLNPDNSDVDKLFIQLVQTYNQLFEENPINASGVDAKAILSARLSKSRRLENLIAQLPGEKKNGLFGNLIALSLGLTPNFKSNFDLAEDAKLQLSKDTYDDDLDNLLAQIGDQYADLFLAAKNLSDAILLSDILRVNTEITKAPLSASMIKRYDEHHQDLTLLKALVRQQLPEKYKEIFFDQSKNGYAGYIDGGASQEEFYKFIKPILEKMDGTEELLVKLNREDLLRKQRTFDNGSIPHQIHLGELHAILRRQEDFYPFLKDNREKIEKILTFRIPYYVGPLARGNSRFAWMTRKSEETITPWNFEEVVDKGASAQSFIERMTNFDKNLPNEKVLPKHSLLYEYFTVYNELTKVKYVTEGMRKPAFLSGEQKKAIVDLLFKTNRKVTVKQLKEDYFKKIECFDSVEISGVEDRFNASLGTYHDLLKIIKDKDFLDNEENEDILEDIVLTLTLFEDREMIEERLKTYAHLFDDKVMKQLKRRRYTGWGRLSRKLINGIRDKQSGKTILDFLKSDGFANRNFMQLIHDDSLTFKEDIQKAQVSGQGDSLHEHIANLAGSPAIKKGILQTVKVVDELVKVMGRHKPENIVIEMARENQTTQKGQKNSRERMKRIEEGIKELGSQILKEHPVENTQLQNEKLYLYYLQNGRDMYVDQELDINRLSDYDVDHIVPQSFLKDDSIDNKVLTRSDKARGKSDNVPSEEVVKKMKNYWRQLLNAKLITQRKFDNLTKAERGGLSELDKAGFIKRQLVETRQITKHVAQILDSRMNTKYDENDKLIREVKVITLKSKLVSDFRKDFQFYKVREINNYHHAHDAYLNAVVGTALIKKYPKLESEFVYGDYKVYDVRKMIAKSEQEIGKATAKYFFYSNIMNFFKTEITLANGEIRKRPLIETNGETGEIVWDKGRDFATVRKVLSMPQVNIVKKTEVQTGGFSKESILPKRNSDKLIARKKDWDPKKYGGFDSPTVAYSVLVVAKVEKGKSKKLKSVKELLGITIMERSSFEKNPIDFLEAKGYKEVKKDLIIKLPKYSLFELENGRKRMLASAGELQKGNELALPSKYVNFLYLASHYEKLKGSPEDNEQKQLFVEQHKHYLDEIIEQISEFSKRVILADANLDKVLSAYNKHRDKPIREQAENIIHLFTLTNLGAPAAFKYFDTTIDRKRYTSTKEVLDATLIHQSITGLYETRIDLSQLGGDGGGSSGGGGGVQEISDSRPMLHIYLNGRRFLGLLDTGADKTCIAGRDWPANWPIHQTESSLQGLGMACGVARSSQPLRWQHEDKSGIIHPFVIPTLPFTLWGRDIMKDIKVRLMTDSPDDSQDLMIGAIESNLFADQISWKSDQPVWLNQWPLKQEKLQALQQLVTEQLQLGHLEESNSPWNTPVFVIKKKSGKWRLLQDLRAVNATMHDMGALQPGLPSPVAVPKGWEIIIIDLQDCFFNIKLHPEDCKRFAFSVPSPNFKRPYQRFQWKVLPQGMKNSPTLCQKFVDKAILTVRDKYQDSYIVHYMDDILLAHPSRSIVDEILTSMIQALNKHGLVVSTEKIQKYDNLKYLGTHIQGDSVSYQKLQIRTDKLRTLNDFQKLLGNINWIRPFLKLTTGELKPLFEILNPDSNPISTRKLTPEACKALQLMNERLSTARVKRLDLSQPWSLCILKTEYTPTACLWQDGVVEWIHLPHISPKVITPYDIFCTQLIIKGRHRSKELFSKDPDYIVVPYTKVQFDLLLQEKEDWPISLLGFLGEVHFHLPKDPLLTFTLQTAIIFPHMTSTTPLEKGIVIFTDGSANGRSVTYIQGREPIIKENTQNTAQQAEIVAVITAFEEVSQPFNLYTDSKYVTGLFPEIETATLSPRTKIYTELKHLQRLIHKRQEKFYIGHIRGHTGLPGPLAQGNAYADSLTRILTAAGKRTADGSEFEKRTADGSEFESPKKKAKVE

SEQ ID NO: 31 - protein, 2114 aa, synthetic construct
MPAAKRVKLDGGDKKYSIGLDIGTNSVGWAVITDEYKVPSKKFKVLGNTDRHSIKKNLIGALLFDSGETAEATRLKRTARRRYTRRKNRICYLQEIFSNEMAKVDDSFFHRLEESFLVEEDKKHERHPIFGNIVDEVAYHEKYPTIYHLRKKLVDSTDKADLRLIYLALAHMIKFRGHFLIEGDLNPDNSDVDKLFIQLVQTYNQLFEENPINASGVDAKAILSARLSKSRRLENLIAQLPGEKKNGLFGNLIALSLGLTPNFKSNFDLAEDAKLQLSKDTYDDDLDNLLAQIGDQYADLFLAAKNLSDAILLSDILRVNTEITKAPLSASMIKRYDEHHQDLTLLKALVRQQLPEKYKEIFFDQSKNGYAGYIDGGASQEEFYKFIKPILEKMDGTEELLVKLNREDLLRKQRTFDNGSIPHQIHLGELHAILRRQEDFYPFLKDNREKIEKILTFRIPYYVGPLARGNSRFAWMTRKSEETITPWNFEEVVDKGASAQSFIERMTNFDKNLPNEKVLPKHSLLYEYFTVYNELTKVKYVTEGMRKPAFLSGEQKKAIVDLLFKTNRKVTVKQLKEDYFKKIECFDSVEISGVEDRFNASLGTYHDLLKIIKDKDFLDNEENEDILEDIVLTLTLFEDREMIEERLKTYAHLFDDKVMKQLKRRRYTGWGRLSRKLINGIRDKQSGKTILDFLKSDGFANRNFMQLIHDDSLTFKEDIQKAQVSGQGDSLHEHIANLAGSPAIKKGILQTVKVVDELVKVMGRHKPENIVIEMARENQTTQKGQKNSRERMKRIEEGIKELGSQILKEHPVENTQLQNEKLYLYYLQNGRDMYVDQELDINRLSDYDVDHIVPQSFLKDDSIDNKVLTRSDKARGKSDNVPSEEVVKKMKNYWRQLLNAKLITQRKFDNLTKAERGGLSELDKAGFIKRQLVETRQITKHVAQILDSRMNTKYDENDKLIREVKVITLKSKLVSDFRKDFQFYKVREINNYHHAHDAYLNAVVGTALIKKYPKLESEFVYGDYKVYDVRKMIAKSEQEIGKATAKYFFYSNIMNFFKTEITLANGEIRKRPLIETNGETGEIVWDKGRDFATVRKVLSMPQVNIVKKTEVQTGGFSKESILPKRNSDKLIARKKDWDPKKYGGFDSPTVAYSVLVVAKVEKGKSKKLKSVKELLGITIMERSSFEKNPIDFLEAKGYKEVKKDLIIKLPKYSLFELENGRKRMLASAGELQKGNELALPSKYVNFLYLASHYEKLKGSPEDNEQKQLFVEQHKHYLDEIIEQISEFSKRVILADANLDKVLSAYNKHRDKPIREQAENIIHLFTLTNLGAPAAFKYFDTTIDRKRYTSTKEVLDATLIHQSITGLYETRIDLSQLGGDGGGGGPAPGSSGGVQEISDSRPMLHIYLNGRRFLGLLDTGADKTCIAGRDWPANWPIHQTESSLQGLGMACGVARSSQPLRWQHEDKSGIIHPFVIPTLPFTLWGRDIMKDIKVRLMTDSPDDSQDLMIGAIESNLFADQISWKSDQPVWLNQWPLKQEKLQALQQLVTEQLQLGHLEESNSPWNTPVFVIKKKSGKWRLLQDLRAVNATMHDMGALQPGLPSPVAVPKGWEIIIIDLQDCFFNIKLHPEDCKRFAFSVPSPNFKRPYQRFQWKVLPQGMKNSPTLCQKFVDKAILTVRDKYQDSYIVHYMDDILLAHPSRSIVDEILTSMIQALNKHGLVVSTEKIQKYDNLKYLGTHIQGDSVSYQKLQIRTDKLRTLNDFQKLLGNINWIRPFLKLTTGELKPLFEILNPDSNPISTRKLTPEACKALQLMNERLSTARVKRLDLSQPWSLCILKTEYTPTACLWQDGVVEWIHLPHISPKVITPYDIFCTQLIIKGRHRSKELFSKDPDYIVVPYTKVQFDLLLQEKEDWPISLLGFLGEVHFHLPKDPLLTFTLQTAIIFPHMTSTTPLEKGIVIFTDGSANGRSVTYIQGREPIIKENTQNTAQQAEIVAVITAFEEVSQPFNLYTDSKYVTGLFPEIETATLSPRTKIYTELKHLQRLIHKRQEKFYIGHIRGHTGLPGPLAQGNAYADSLTRILTAAGKRTADGSEFEKRTADGSEFESPKKKAKVE

SEQ ID NO: 32 - protein, 2010 aa, synthetic construct
MPAAKRVKLDGGDKKYSIGLDIGTNSVGWAVITDEYKVPSKKFKVLGNTDRHSIKKNLIGALLFDSGETAEATRLKRTARRRYTRRKNRICYLQEIFSNEMAKVDDSFFHRLEESFLVEEDKKHERHPIFGNIVDEVAYHEKYPTIYHLRKKLVDSTDKADLRLIYLALAHMIKFRGHFLIEGDLNPDNSDVDKLFIQLVQTYNQLFEENPINASGVDAKAILSARLSKSRRLENLIAQLPGEKKNGLFGNLIALSLGLTPNFKSNFDLAEDAKLQLSKDTYDDDLDNLLAQIGDQYADLFLAAKNLSDAILLSDILRVNTEITKAPLSASMIKRYDEHHQDLTLLKALVRQQLPEKYKEIFFDQSKNGYAGYIDGGASQEEFYKFIKPILEKMDGTEELLVKLNREDLLRKQRTFDNGSIPHQIHLGELHAILRRQEDFYPFLKDNREKIEKILTFRIPYYVGPLARGNSRFAWMTRKSEETITPWNFEEVVDKGASAQSFIERMTNFDKNLPNEKVLPKHSLLYEYFTVYNELTKVKYVTEGMRKPAFLSGEQKKAIVDLLFKTNRKVTVKQLKEDYFKKIECFDSVEISGVEDRFNASLGTYHDLLKIIKDKDFLDNEENEDILEDIVLTLTLFEDREMIEERLKTYAHLFDDKVMKQLKRRRYTGWGRLSRKLINGIRDKQSGKTILDFLKSDGFANRNFMQLIHDDSLTFKEDIQKAQVSGQGDSLHEHIANLAGSPAIKKGILQTVKVVDELVKVMGRHKPENIVIEMARENQTTQKGQKNSRERMKRIEEGIKELGSQILKEHPVENTQLQNEKLYLYYLQNGRDMYVDQELDINRLSDYDVDHIVPQSFLKDDSIDNKVLTRSDKARGKSDNVPSEEVVKKMKNYWRQLLNAKLITQRKFDNLTKAERGGLSELDKAGFIKRQLVETRQITKHVAQILDSRMNTKYDENDKLIREVKVITLKSKLVSDFRKDFQFYKVREINNYHHAHDAYLNAVVGTALIKKYPKLESEFVYGDYKVYDVRKMIAKSEQEIGKATAKYFFYSNIMNFFKTEITLANGEIRKRPLIETNGETGEIVWDKGRDFATVRKVLSMPQVNIVKKTEVQTGGFSKESILPKRNSDKLIARKKDWDPKKYGGFDSPTVAYSVLVVAKVEKGKSKKLKSVKELLGITIMERSSFEKNPIDFLEAKGYKEVKKDLIIKLPKYSLFELENGRKRMLASAGELQKGNELALPSKYVNFLYLASHYEKLKGSPEDNEQKQLFVEQHKHYLDEIIEQISEFSKRVILADANLDKVLSAYNKHRDKPIREQAENIIHLFTLTNLGAPAAFKYFDTTIDRKRYTSTKEVLDATLIHQSITGLYETRIDLSQLGGDGGGGGEAAAKGSSGGLTAAIDILAPQQCAEPITWKSDEPVWVDQWPLTNDKLAAAQQLVQEQLEAGHITESSSPWNTPIFVIKKKSGKWRLLQDLRAVNATMVLMGALQPGLPSPVAIPQGYLKIIIDLKDCFFSIPLHPSDQKRFAFSLPSTNFKEPMQRFQWKVLPQGMANSPTLCQKYVATAIHKVRHAWKQMYIIHYMDDILIAGKDGQQVLQCFDQLKQELTAAGLHIAPEKVQLQDPYTYLGFELNGPKITNQKAVIRKDKLQTLNDFQKLLGDINWLRPYLKLTTGDLKPLFDTLKGDSDPNSHRSLSKEALASLEKVETAIAEQFVTHINYSLPLIFLIFNTALTPTGLFWQDNPIMWIHLPASPKKVLLPYYDAIADLIILGRDHSKKYFGIEPSTIIQPYSKSQIDWLMQNTEMWPIACASFVGILDNHYPPNKLIQFCKLHTFVFPQIISKTPLNNALLVFTDGSSTGMAAYTLTDTTIKFQTNLNSAQLVELQALIAVLSAFPNQPLNIYTDSAYLAHSIPLLETVAQIKHISETAKLFLQCQQLIYNRSIPFYIGHVRAHSGLPGPIAQGNQRADLATKIVASNINTAGKRTADGSEFEKRTADGSEFESPKKKAKVE

SEQ ID NO: 33 - protein, 2008 aa, synthetic construct
MPAAKRVKLDGGDKKYSIGLDIGTNSVGWAVITDEYKVPSKKFKVLGNTDRHSIKKNLIGALLFDSGETAEATRLKRTARRRYTRRKNRICYLQEIFSNEMAKVDDSFFHRLEESFLVEEDKKHERHPIFGNIVDEVAYHEKYPTIYHLRKKLVDSTDKADLRLIYLALAHMIKFRGHFLIEGDLNPDNSDVDKLFIQLVQTYNQLFEENPINASGVDAKAILSARLSKSRRLENLIAQLPGEKKNGLFGNLIALSLGLTPNFKSNFDLAEDAKLQLSKDTYDDDLDNLLAQIGDQYADLFLAAKNLSDAILLSDILRVNTEITKAPLSASMIKRYDEHHQDLTLLKALVRQQLPEKYKEIFFDQSKNGYAGYIDGGASQEEFYKFIKPILEKMDGTEELLVKLNREDLLRKQRTFDNGSIPHQIHLGELHAILRRQEDFYPFLKDNREKIEKILTFRIPYYVGPLARGNSRFAWMTRKSEETITPWNFEEVVDKGASAQSFIERMTNFDKNLPNEKVLPKHSLLYEYFTVYNELTKVKYVTEGMRKPAFLSGEQKKAIVDLLFKTNRKVTVKQLKEDYFKKIECFDSVEISGVEDRFNASLGTYHDLLKIIKDKDFLDNEENEDILEDIVLTLTLFEDREMIEERLKTYAHLFDDKVMKQLKRRRYTGWGRLSRKLINGIRDKQSGKTILDFLKSDGFANRNFMQLIHDDSLTFKEDIQKAQVSGQGDSLHEHIANLAGSPAIKKGILQTVKVVDELVKVMGRHKPENIVIEMARENQTTQKGQKNSRERMKRIEEGIKELGSQILKEHPVENTQLQNEKLYLYYLQNGRDMYVDQELDINRLSDYDVDHIVPQSFLKDDSIDNKVLTRSDKARGKSDNVPSEEVVKKMKNYWRQLLNAKLITQRKFDNLTKAERGGLSELDKAGFIKRQLVETRQITKHVAQILDSRMNTKYDENDKLIREVKVITLKSKLVSDFRKDFQFYKVREINNYHHAHDAYLNAVVGTALIKKYPKLESEFVYGDYKVYDVRKMIAKSEQEIGKATAKYFFYSNIMNFFKTEITLANGEIRKRPLIETNGETGEIVWDKGRDFATVRKVLSMPQVNIVKKTEVQTGGFSKESILPKRNSDKLIARKKDWDPKKYGGFDSPTVAYSVLVVAKVEKGKSKKLKSVKELLGITIMERSSFEKNPIDFLEAKGYKEVKKDLIIKLPKYSLFELENGRKRMLASAGELQKGNELALPSKYVNFLYLASHYEKLKGSPEDNEQKQLFVEQHKHYLDEIIEQISEFSKRVILADANLDKVLSAYNKHRDKPIREQAENIIHLFTLTNLGAPAAFKYFDTTIDRKRYTSTKEVLDATLIHQSITGLYETRIDLSQLGGDGGGSSPAPGGGGGLTAAIDILAPQQCAEPITWKSDEPVWVDQWPLTNDKLAAAQQLVQEQLEAGHITESSSPWNTPIFVIKKKSGKWRLLQDLRAVNATMVLMGALQPGLPSPVAPPQGYLKIIIDLKDCFFSIPLHPSDQKRFAFSLPSTNFKEPMQRFQWKVLPQGMANSPTLCQKYVATAIHKVRHAWKQMYIIHYMDDILIAGKDGQQVLQCFDQLKQELTAAGLHIAPEKVQLQDPYTYLGFELNGPKITNQKAVIRKDKLQTLNDFQKLLGDINWLRPYLKLTTGDLKPLFDTLKPDSDPNSHRSLSKEALASLEKVETAIAEQFVTHINYSLPLIFLIFNTALTPTGLFWQDNPIMWIHLPASPKKVLLPYYDAIADLIILGRDHSKKYFGIEPSTIIQPYSKSQIDWLMQNTEMWPIACASFVGILDNHYPPNKLIQFCKLHTFVFPQIISKTPLNNALLVFTDGSSTGMAAYTLTDTTIKFQTNLNSAQLVELQALIAVLSAFPNQPLNIYTDSAYLAHSIPLLETVAQIKHISETAKLFLQCQQLIYNRSIPFYIGHVRAHSGLPGPIAQGNQRADLATKIVASNINTAGKRTADGSEFEKRTADGSEFESPKKKAKVE

SEQ ID NO: 34 - protein, 2085 aa, synthetic construct
MPAAKRVKLDGGDKKYSIGLDIGTNSVGWAVITDEYKVPSKKFKVLGNTDRHSIKKNLIGALLFDSGETAEATRLKRTARRRYTRRKNRICYLQEIFSNEMAKVDDSFFHRLEESFLVEEDKKHERHPIFGNIVDEVAYHEKYPTIYHLRKKLVDSTDKADLRLIYLALAHMIKFRGHFLIEGDLNPDNSDVDKLFIQLVQTYNQLFEENPINASGVDAKAILSARLSKSRRLENLIAQLPGEKKNGLFGNLIALSLGLTPNFKSNFDLAEDAKLQLSKDTYDDDLDNLLAQIGDQYADLFLAAKNLSDAILLSDILRVNTEITKAPLSASMIKRYDEHHQDLTLLKALVRQQLPEKYKEIFFDQSKNGYAGYIDGGASQEEFYKFIKPILEKMDGTEELLVKLNREDLLRKQRTFDNGSIPHQIHLGELHAILRRQEDFYPFLKDNREKIEKILTFRIPYYVGPLARGNSRFAWMTRKSEETITPWNFEEVVDKGASAQSFIERMTNFDKNLPNEKVLPKHSLLYEYFTVYNELTKVKYVTEGMRKPAFLSGEQKKAIVDLLFKTNRKVTVKQLKEDYFKKIECFDSVEISGVEDRFNASLGTYHDLLKIIKDKDFLDNEENEDILEDIVLTLTLFEDREMIEERLKTYAHLFDDKVMKQLKRRRYTGWGRLSRKLINGIRDKQSGKTILDFLKSDGFANRNFMQLIHDDSLTFKEDIQKAQVSGQGDSLHEHIANLAGSPAIKKGILQTVKVVDELVKVMGRHKPENIVIEMARENQTTQKGQKNSRERMKRIEEGIKELGSQILKEHPVENTQLQNEKLYLYYLQNGRDMYVDQELDINRLSDYDVDHIVPQSFLKDDSIDNKVLTRSDKARGKSDNVPSEEVVKKMKNYWRQLLNAKLITQRKFDNLTKAERGGLSELDKAGFIKRQLVETRQITKHVAQILDSRMNTKYDENDKLIREVKVITLKSKLVSDFRKDFQFYKVREINNYHHAHDAYLNAVVGTALIKKYPKLESEFVYGDYKVYDVRKMIAKSEQEIGKATAKYFFYSNIMNFFKTEITLANGEIRKRPLIETNGETGEIVWDKGRDFATVRKVLSMPQVNIVKKTEVQTGGFSKESILPKRNSDKLIARKKDWDPKKYGGFDSPTVAYSVLVVAKVEKGKSKKLKSVKELLGITIMERSSFEKNPIDFLEAKGYKEVKKDLIIKLPKYSLFELENGRKRMLASAGELQKGNELALPSKYVNFLYLASHYEKLKGSPEDNEQKQLFVEQHKHYLDEIIEQISEFSKRVILADANLDKVLSAYNKHRDKPIREQAENIIHLFTLTNLGAPAAFKYFDTTIDRKRYTSTKEVLDATLIHQSITGLYETRIDLSQLGGDGGEAAAKGSSGGLDDEYRLYSPLVKPDQNIQFWLEQFPQAWAETAGMGLAKQVPPQVIQLKASATPVSVRQYPLSKEAQEGIRPHVQRLIQQGILVPVQSPWNTPLLPVRKPGTNDYRPVQDLREVNKRVQDIHPTVPNPYNLLCALPPQRSWYTVLDLKDAFFCLRLHPTSQPLFAFEWRDPGTGRTGQLTWTRLPQGFKNSPTIFNEALHRDLANFRIQHPQVTLLQYVDDLLLAGATKQDCLEGTKALLLELSDLGYRASAKKAQICRREVTYLGYSLRDGQRWLTEARKKTVVQIPAPTTAKQVREFLGKAGFCRLFIPGFATLAAPLYPLTKPKGEFSWAPEHQKAFDAIKKALLSAPALALPDVTKPFTLYVDERKGVARGVLTQTLGPWRRPVAYLSKKLDPVASGWPVCLKAIAAVAILVKDADKLTLGQNITVIAPHALENIVRQPPDRWMTNARMTHYQSLLLTERVTFAPPAALNPATLLPEETDEPVTHDCHQLLIEETGVRKDLTDIPLTGEVLTWFTDGSSYVVEGKRMAGAAVVDGTRTIWASSLPEGTSAQKAELMALTQALRLAEGKSINIYTDSRYAFATAHVHGAIYKQRGWLTSAGREIKNKEEILSLLEALHLPKRLAIIHCPGHQKAKDPISRGNQMADRVAKQAAQGVNLLPAGKRTADGSEFEKRTADGSEFESPKKKAKVE

SEQ ID NO: 35 - protein, 2088 aa, synthetic construct
MPAAKRVKLDGGDKKYSIGLDIGTNSVGWAVITDEYKVPSKKFKVLGNTDRHSIKKNLIGALLFDSGETAEATRLKRTARRRYTRRKNRICYLQEIFSNEMAKVDDSFFHRLEESFLVEEDKKHERHPIFGNIVDEVAYHEKYPTIYHLRKKLVDSTDKADLRLIYLALAHMIKFRGHFLIEGDLNPDNSDVDKLFIQLVQTYNQLFEENPINASGVDAKAILSARLSKSRRLENLIAQLPGEKKNGLFGNLIALSLGLTPNFKSNFDLAEDAKLQLSKDTYDDDLDNLLAQIGDQYADLFLAAKNLSDAILLSDILRVNTEITKAPLSASMIKRYDEHHQDLTLLKALVRQQLPEKYKEIFFDQSKNGYAGYIDGGASQEEFYKFIKPILEKMDGTEELLVKLNREDLLRKQRTFDNGSIPHQIHLGELHAILRRQEDFYPFLKDNREKIEKILTFRIPYYVGPLARGNSRFAWMTRKSEETITPWNFEEVVDKGASAQSFIERMTNFDKNLPNEKVLPKHSLLYEYFTVYNELTKVKYVTEGMRKPAFLSGEQKKAIVDLLFKTNRKVTVKQLKEDYFKKIECFDSVEISGVEDRFNASLGTYHDLLKIIKDKDFLDNEENEDILEDIVLTLTLFEDREMIEERLKTYAHLFDDKVMKQLKRRRYTGWGRLSRKLINGIRDKQSGKTILDFLKSDGFANRNFMQLIHDDSLTFKEDIQKAQVSGQGDSLHEHIANLAGSPAIKKGILQTVKVVDELVKVMGRHKPENIVIEMARENQTTQKGQKNSRERMKRIEEGIKELGSQILKEHPVENTQLQNEKLYLYYLQNGRDMYVDQELDINRLSDYDVDHIVPQSFLKDDSIDNKVLTRSDKARGKSDNVPSEEVVKKMKNYWRQLLNAKLITQRKFDNLTKAERGGLSELDKAGFIKRQLVETRQITKHVAQILDSRMNTKYDENDKLIREVKVITLKSKLVSDFRKDFQFYKVREINNYHHAHDAYLNAVVGTALIKKYPKLESEFVYGDYKVYDVRKMIAKSEQEIGKATAKYFFYSNIMNFFKTEITLANGEIRKRPLIETNGETGEIVWDKGRDFATVRKVLSMPQVNIVKKTEVQTGGFSKESILPKRNSDKLIARKKDWDPKKYGGFDSPTVAYSVLVVAKVEKGKSKKLKSVKELLGITIMERSSFEKNPIDFLEAKGYKEVKKDLIIKLPKYSLFELENGRKRMLASAGELQKGNELALPSKYVNFLYLASHYEKLKGSPEDNEQKQLFVEQHKHYLDEIIEQISEFSKRVILADANLDKVLSAYNKHRDKPIREQAENIIHLFTLTNLGAPAAFKYFDTTIDRKRYTSTKEVLDATLIHQSITGLYETRIDLSQLGGDGGEAAAKGGSPAPGGLDDEYRLYSPLVKPDQNIQFWLEQFPQAWAETAGMGLAKQVPPQVIQLKASATPVSVRQYPLSKEAQEGIRPHVQRLIQQGILVPVQSPWNTPLLPVRKPGTNDYRPVQDLREVNKRVQDIHPTVPNPYNLLCALPPQRSWYTVLDLKDAFFCLRLHPTSQPLFAFEWRDPGTGRTGQLTWTRLPQGFKNSPTIFNEALHRDLANFRIQHPQVTLLQYVDDLLLAGATKQDCLEGTKALLLELSDLGYRASAKKAQICRREVTYLGYSLRDGQRWLTEARKKTVVQIPAPTTAKQVREFLGKAGFCRLFIPGFATLAAPLYPLTKPKGEFSWAPEHQKAFDAIKKALLSAPALALPDVTKPFTLYVDERKGVARGVLTQTLGPWRRPVAYLSKKLDPVASGWPVCLKAIAAVAILVKDADKLTLGQNITVIAPHALENIVRQPPDRWMTNARMTHYQSLLLTERVTFAPPAALNPATLLPEETDEPVTHDCHQLLIEETGVRKDLTDIPLTGEVLTWFTDGSSYVVEGKRMAGAAVVDGTRTIWASSLPEGTSAQKAELMALTQALRLAEGKSINIYTDSRYAFATAHVHGAIYKQRGWLTSAGREIKNKEEILSLLEALHLPKRLAIIHCPGHQKAKDPISRGNQMADRVAKQAAQGVNLLPAGKRTADGSEFEKRTADGSEFESPKKKAKVE

SEQ ID NO: 36 - protein, 2123 aa, synthetic construct
MPAAKRVKLDGGDKKYSIGLDIGTNSVGWAVITDEYKVPSKKFKVLGNTDRHSIKKNLIGALLFDSGETAEATRLKRTARRRYTRRKNRICYLQEIFSNEMAKVDDSFFHRLEESFLVEEDKKHERHPIFGNIVDEVAYHEKYPTIYHLRKKLVDSTDKADLRLIYLALAHMIKFRGHFLIEGDLNPDNSDVDKLFIQLVQTYNQLFEENPINASGVDAKAILSARLSKSRRLENLIAQLPGEKKNGLFGNLIALSLGLTPNFKSNFDLAEDAKLQLSKDTYDDDLDNLLAQIGDQYADLFLAAKNLSDAILLSDILRVNTEITKAPLSASMIKRYDEHHQDLTLLKALVRQQLPEKYKEIFFDQSKNGYAGYIDGGASQEEFYKFIKPILEKMDGTEELLVKLNREDLLRKQRTFDNGSIPHQIHLGELHAILRRQEDFYPFLKDNREKIEKILTFRIPYYVGPLARGNSRFAWMTRKSEETITPWNFEEVVDKGASAQSFIERMTNFDKNLPNEKVLPKHSLLYEYFTVYNELTKVKYVTEGMRKPAFLSGEQKKAIVDLLFKTNRKVTVKQLKEDYFKKIECFDSVEISGVEDRFNASLGTYHDLLKIIKDKDFLDNEENEDILEDIVLTLTLFEDREMIEERLKTYAHLFDDKVMKQLKRRRYTGWGRLSRKLINGIRDKQSGKTILDFLKSDGFANRNFMQLIHDDSLTFKEDIQKAQVSGQGDSLHEHIANLAGSPAIKKGILQTVKVVDELVKVMGRHKPENIVIEMARENQTTQKGQKNSRERMKRIEEGIKELGSQILKEHPVENTQLQNEKLYLYYLQNGRDMYVDQELDINRLSDYDVDHIVPQSFLKDDSIDNKVLTRSDKARGKSDNVPSEEVVKKMKNYWRQLLNAKLITQRKFDNLTKAERGGLSELDKAGFIKRQLVETRQITKHVAQILDSRMNTKYDENDKLIREVKVITLKSKLVSDFRKDFQFYKVREINNYHHAHDAYLNAVVGTALIKKYPKLESEFVYGDYKVYDVRKMIAKSEQEIGKATAKYFFYSNIMNFFKTEITLANGEIRKRPLIETNGETGEIVWDKGRDFATVRKVLSMPQVNIVKKTEVQTGGFSKESILPKRNSDKLIARKKDWDPKKYGGFDSPTVAYSVLVVAKVEKGKSKKLKSVKELLGITIMERSSFEKNPIDFLEAKGYKEVKKDLIIKLPKYSLFELENGRKRMLASAGELQKGNELALPSKYVNFLYLASHYEKLKGSPEDNEQKQLFVEQHKHYLDEIIEQISEFSKRVILADANLDKVLSAYNKHRDKPIREQAENIIHLFTLTNLGAPAAFKYFDTTIDRKRYTSTKEVLDATLIHQSITGLYETRIDLSQLGGDGGAEAAAKEAAAKEAAAKEAAAKALEAEAAAKEAAAKEAAAKEAAAKAGGLDDEYRLYSPLVKPDQNIQFWLEQFPQAWAETAGMGLAKQVPPQVIQLKASATPVSVRQYPLSKEAQEGIRPHVQRLIQQGILVPVQSPWNTPLLPVRKPGTNDYRPVQDLREVNKRVQDIHPTVPNPYNLLCALPPQRSWYTVLDLKDAFFCLRLHPTSQPLFAFEWRDPGTGRTGQLTWTRLPQGFKNSPTIFNEALHRDLANFRIQHPQVTLLQYVDDLLLAGATKQDCLEGTKALLLELSDLGYRASAKKAQICRREVTYLGYSLRDGQRWLTEARKKTVVQIPAPTTAKQVREFLGKAGFCRLFIPGFATLAAPLYPLTKPKGEFSWAPEHQKAFDAIKKALLSAPALALPDVTKPFTLYVDERKGVARGVLTQTLGPWRRPVAYLSKKLDPVASGWPVCLKAIAAVAILVKDADKLTLGQNITVIAPHALENIVRQPPDRWMTNARMTHYQSLLLTERVTFAPPAALNPATLLPEETDEPVTHDCHQLLIEETGVRKDLTDIPLTGEVLTWFTDGSSYVVEGKRMAGAAVVDGTRTIWASSLPEGTSAQKAELMALTQALRLAEGKSINIYTDSRYAFATAHVHGAIYKQRGWLTSAGREIKNKEEILSLLEALHLPKRLAIIHCPGHQKAKDPISRGNQMADRVAKQAAQGVNLLPAGKRTADGSEFEKRTADGSEFESPKKKAKVE

SEQ ID NO: 37 - protein, 2092 aa, synthetic construct
MPAAKRVKLDGGDKKYSIGLDIGTNSVGWAVITDEYKVPSKKFKVLGNTDRHSIKKNLIGALLFDSGETAEATRLKRTARRRYTRRKNRICYLQEIFSNEMAKVDDSFFHRLEESFLVEEDKKHERHPIFGNIVDEVAYHEKYPTIYHLRKKLVDSTDKADLRLIYLALAHMIKFRGHFLIEGDLNPDNSDVDKLFIQLVQTYNQLFEENPINASGVDAKAILSARLSKSRRLENLIAQLPGEKKNGLFGNLIALSLGLTPNFKSNFDLAEDAKLQLSKDTYDDDLDNLLAQIGDQYADLFLAAKNLSDAILLSDILRVNTEITKAPLSASMIKRYDEHHQDLTLLKALVRQQLPEKYKEIFFDQSKNGYAGYIDGGASQEEFYKFIKPILEKMDGTEELLVKLNREDLLRKQRTFDNGSIPHQIHLGELHAILRRQEDFYPFLKDNREKIEKILTFRIPYYVGPLARGNSRFAWMTRKSEETITPWNFEEVVDKGASAQSFIERMTNFDKNLPNEKVLPKHSLLYEYFTVYNELTKVKYVTEGMRKPAFLSGEQKKAIVDLLFKTNRKVTVKQLKEDYFKKIECFDSVEISGVEDRFNASLGTYHDLLKIIKDKDFLDNEENEDILEDIVLTLTLFEDREMIEERLKTYAHLFDDKVMKQLKRRRYTGWGRLSRKLINGIRDKQSGKTILDFLKSDGFANRNFMQLIHDDSLTFKEDIQKAQVSGQGDSLHEHIANLAGSPAIKKGILQTVKVVDELVKVMGRHKPENIVIEMARENQTTQKGQKNSRERMKRIEEGIKELGSQILKEHPVENTQLQNEKLYLYYLQNGRDMYVDQELDINRLSDYDVDHIVPQSFLKDDSIDNKVLTRSDKARGKSDNVPSEEVVKKMKNYWRQLLNAKLITQRKFDNLTKAERGGLSELDKAGFIKRQLVETRQITKHVAQILDSRMNTKYDENDKLIREVKVITLKSKLVSDFRKDFQFYKVREINNYHHAHDAYLNAVVGTALIKKYPKLESEFVYGDYKVYDVRKMIAKSEQEIGKATAKYFFYSNIMNFFKTEITLANGEIRKRPLIETNGETGEIVWDKGRDFATVRKVLSMPQVNIVKKTEVQTGGFSKESILPKRNSDKLIARKKDWDPKKYGGFDSPTVAYSVLVVAKVEKGKSKKLKSVKELLGITIMERSSFEKNPIDFLEAKGYKEVKKDLIIKLPKYSLFELENGRKRMLASAGELQKGNELALPSKYVNFLYLASHYEKLKGSPEDNEQKQLFVEQHKHYLDEIIEQISEFSKRVILADANLDKVLSAYNKHRDKPIREQAENIIHLFTLTNLGAPAAFKYFDTTIDRKRYTSTKEVLDATLIHQSITGLYETRIDLSQLGGDGGEAAAKEAAAKEAAAKGGLDDEYRLYSPLVKPDQNIQFWLEQFPQAWAETAGMGLAKQVPPQVIQLKASATPVSVRQYPLSKEAQEGIRPHVQRLIQQGILVPVQSPWNTPLLPVRKPGTNDYRPVQDLREVNKRVQDIHPTVPNPYNLLCALPPQRSWYTVLDLKDAFFCLRLHPTSQPLFAFEWRDPGTGRTGQLTWTRLPQGFKNSPTIFNEALHRDLANFRIQHPQVTLLQYVDDLLLAGATKQDCLEGTKALLLELSDLGYRASAKKAQICRREVTYLGYSLRDGQRWLTEARKKTVVQIPAPTTAKQVREFLGKAGFCRLFIPGFATLAAPLYPLTKPKGEFSWAPEHQKAFDAIKKALLSAPALALPDVTKPFTLYVDERKGVARGVLTQTLGPWRRPVAYLSKKLDPVASGWPVCLKAIAAVAILVKDADKLTLGQNITVIAPHALENIVRQPPDRWMTNARMTHYQSLLLTERVTFAPPAALNPATLLPEETDEPVTHDCHQLLIEETGVRKDLTDIPLTGEVLTWFTDGSSYVVEGKRMAGAAVVDGTRTIWASSLPEGTSAQKAELMALTQALRLAEGKSINIYTDSRYAFATAHVHGAIYKQRGWLTSAGREIKNKEEILSLLEALHLPKRLAIIHCPGHQKAKDPISRGNQMADRVAKQAAQGVNLLPAGKRTADGSEFEKRTADGSEFESPKKKAKVE

SEQ ID NO: 38 - protein, 2086 aa, synthetic construct
MPAAKRVKLDGGDKKYSIGLDIGTNSVGWAVITDEYKVPSKKFKVLGNTDRHSIKKNLIGALLFDSGETAEATRLKRTARRRYTRRKNRICYLQEIFSNEMAKVDDSFFHRLEESFLVEEDKKHERHPIFGNIVDEVAYHEKYPTIYHLRKKLVDSTDKADLRLIYLALAHMIKFRGHFLIEGDLNPDNSDVDKLFIQLVQTYNQLFEENPINASGVDAKAILSARLSKSRRLENLIAQLPGEKKNGLFGNLIALSLGLTPNFKSNFDLAEDAKLQLSKDTYDDDLDNLLAQIGDQYADLFLAAKNLSDAILLSDILRVNTEITKAPLSASMIKRYDEHHQDLTLLKALVRQQLPEKYKEIFFDQSKNGYAGYIDGGASQEEFYKFIKPILEKMDGTEELLVKLNREDLLRKQRTFDNGSIPHQIHLGELHAILRRQEDFYPFLKDNREKIEKILTFRIPYYVGPLARGNSRFAWMTRKSEETITPWNFEEVVDKGASAQSFIERMTNFDKNLPNEKVLPKHSLLYEYFTVYNELTKVKYVTEGMRKPAFLSGEQKKAIVDLLFKTNRKVTVKQLKEDYFKKIECFDSVEISGVEDRFNASLGTYHDLLKIIKDKDFLDNEENEDILEDIVLTLTLFEDREMIEERLKTYAHLFDDKVMKQLKRRRYTGWGRLSRKLINGIRDKQSGKTILDFLKSDGFANRNFMQLIHDDSLTFKEDIQKAQVSGQGDSLHEHIANLAGSPAIKKGILQTVKVVDELVKVMGRHKPENIVIEMARENQTTQKGQKNSRERMKRIEEGIKELGSQILKEHPVENTQLQNEKLYLYYLQNGRDMYVDQELDINRLSDYDVDHIVPQSFLKDDSIDNKVLTRSDKARGKSDNVPSEEVVKKMKNYWRQLLNAKLITQRKFDNLTKAERGGLSELDKAGFIKRQLVETRQITKHVAQILDSRMNTKYDENDKLIREVKVITLKSKLVSDFRKDFQFYKVREINNYHHAHDAYLNAVVGTALIKKYPKLESEFVYGDYKVYDVRKMIAKSEQEIGKATAKYFFYSNIMNFFKTEITLANGEIRKRPLIETNGETGEIVWDKGRDFATVRKVLSMPQVNIVKKTEVQTGGFSKESILPKRNSDKLIARKKDWDPKKYGGFDSPTVAYSVLVVAKVEKGKSKKLKSVKELLGITIMERSSFEKNPIDFLEAKGYKEVKKDLIIKLPKYSLFELENGRKRMLASAGELQKGNELALPSKYVNFLYLASHYEKLKGSPEDNEQKQLFVEQHKHYLDEIIEQISEFSKRVILADANLDKVLSAYNKHRDKPIREQAENIIHLFTLTNLGAPAAFKYFDTTIDRKRYTSTKEVLDATLIHQSITGLYETRIDLSQLGGDGGGGSGSSPAPGGLDDEYRLYSPLVKPDQNIQFWLEQFPQAWAETAGMGLAKQVPPQVIQLKASATPVSVRQYPLSKEAQEGIRPHVQRLIQQGILVPVQSPWNTPLLPVRKPGTNDYRPVQDLREVNKRVQDIHPTVPNPYNLLCALPPQRSWYTVLDLKDAFFCLRLHPTSQPLFAFEWRDPGTGRTGQLTWTRLPQGFKNSPTIFNEALHRDLANFRIQHPQVTLLQYVDDLLLAGATKQDCLEGTKALLLELSDLGYRASAKKAQICRREVTYLGYSLRDGQRWLTEARKKTVVQIPAPTTAKQVREFLGKAGFCRLFIPGFATLAAPLYPLTKPKGEFSWAPEHQKAFDAIKKALLSAPALALPDVTKPFTLYVDERKGVARGVLTQTLGPWRRPVAYLSKKLDPVASGWPVCLKAIAAVAILVKDADKLTLGQNITVIAPHALENIVRQPPDRWMTNARMTHYQSLLLTERVTFAPPAALNPATLLPEETDEPVTHDCHQLLIEETGVRKDLTDIPLTGEVLTWFTDGSSYVVEGKRMAGAAVVDGTRTIWASSLPEGTSAQKAELMALTQALRLAEGKSINIYTDSRYAFATAHVHGAIYKQRGWLTSAGREIKNKEEILSLLEALHLPKRLAIIHCPGHQKAKDPISRGNQMADRVAKQAAQGVNLLPAGKRTADGSEFEKRTADGSEFESPKKKAKVE

SEQ ID NO: 39 - protein, 2102 aa, synthetic construct
MPAAKRVKLDGGDKKYSIGLDIGTNSVGWAVITDEYKVPSKKFKVLGNTDRHSIKKNLIGALLFDSGETAEATRLKRTARRRYTRRKNRICYLQEIFSNEMAKVDDSFFHRLEESFLVEEDKKHERHPIFGNIVDEVAYHEKYPTIYHLRKKLVDSTDKADLRLIYLALAHMIKFRGHFLIEGDLNPDNSDVDKLFIQLVQTYNQLFEENPINASGVDAKAILSARLSKSRRLENLIAQLPGEKKNGLFGNLIALSLGLTPNFKSNFDLAEDAKLQLSKDTYDDDLDNLLAQIGDQYADLFLAAKNLSDAILLSDILRVNTEITKAPLSASMIKRYDEHHQDLTLLKALVRQQLPEKYKEIFFDQSKNGYAGYIDGGASQEEFYKFIKPILEKMDGTEELLVKLNREDLLRKQRTFDNGSIPHQIHLGELHAILRRQEDFYPFLKDNREKIEKILTFRIPYYVGPLARGNSRFAWMTRKSEETITPWNFEEVVDKGASAQSFIERMTNFDKNLPNEKVLPKHSLLYEYFTVYNELTKVKYVTEGMRKPAFLSGEQKKAIVDLLFKTNRKVTVKQLKEDYFKKIECFDSVEISGVEDRFNASLGTYHDLLKIIKDKDFLDNEENEDILEDIVLTLTLFEDREMIEERLKTYAHLFDDKVMKQLKRRRYTGWGRLSRKLINGIRDKQSGKTILDFLKSDGFANRNFMQLIHDDSLTFKEDIQKAQVSGQGDSLHEHIANLAGSPAIKKGILQTVKVVDELVKVMGRHKPENIVIEMARENQTTQKGQKNSRERMKRIEEGIKELGSQILKEHPVENTQLQNEKLYLYYLQNGRDMYVDQELDINRLSDYDVDHIVPQSFLKDDSIDNKVLTRSDKARGKSDNVPSEEVVKKMKNYWRQLLNAKLITQRKFDNLTKAERGGLSELDKAGFIKRQLVETRQITKHVAQILDSRMNTKYDENDKLIREVKVITLKSKLVSDFRKDFQFYKVREINNYHHAHDAYLNAVVGTALIKKYPKLESEFVYGDYKVYDVRKMIAKSEQEIGKATAKYFFYSNIMNFFKTEITLANGEIRKRPLIETNGETGEIVWDKGRDFATVRKVLSMPQVNIVKKTEVQTGGFSKESILPKRNSDKLIARKKDWDPKKYGGFDSPTVAYSVLVVAKVEKGKSKKLKSVKELLGITIMERSSFEKNPIDFLEAKGYKEVKKDLIIKLPKYSLFELENGRKRMLASAGELQKGNELALPSKYVNFLYLASHYEKLKGSPEDNEQKQLFVEQHKHYLDEIIEQISEFSKRVILADANLDKVLSAYNKHRDKPIREQAENIIHLFTLTNLGAPAAFKYFDTTIDRKRYTSTKEVLDATLIHQSITGLYETRIDLSQLGGDGGEAAAKEAAAKEAAAKEAAAKEAAAKGGLDDEYRLYSPLVKPDQNIQFWLEQFPQAWAETAGMGLAKQVPPQVIQLKASATPVSVRQYPLSKEAQEGIRPHVQRLIQQGILVPVQSPWNTPLLPVRKPGTNDYRPVQDLREVNKRVQDIHPTVPNPYNLLCALPPQRSWYTVLDLKDAFFCLRLHPTSQPLFAFEWRDPGTGRTGQLTWTRLPQGFKNSPTIFNEALHRDLANFRIQHPQVTLLQYVDDLLLAGATKQDCLEGTKALLLELSDLGYRASAKKAQICRREVTYLGYSLRDGQRWLTEARKKTVVQIPAPTTAKQVREFLGKAGFCRLFIPGFATLAAPLYPLTKPKGEFSWAPEHQKAFDAIKKALLSAPALALPDVTKPFTLYVDERKGVARGVLTQTLGPWRRPVAYLSKKLDPVASGWPVCLKAIAAVAILVKDADKLTLGQNITVIAPHALENIVRQPPDRWMTNARMTHYQSLLLTERVTFAPPAALNPATLLPEETDEPVTHDCHQLLIEETGVRKDLTDIPLTGEVLTWFTDGSSYVVEGKRMAGAAVVDGTRTIWASSLPEGTSAQKAELMALTQALRLAEGKSINIYTDSRYAFATAHVHGAIYKQRGWLTSAGREIKNKEEILSLLEALHLPKRLAIIHCPGHQKAKDPISRGNQMADRVAKQAAQGVNLLPAGKRTADGSEFEKRTADGSEFESPKKKAKVE

SEQ ID NO: 40 - protein, 2088 aa, synthetic construct
MPAAKRVKLDGGDKKYSIGLDIGTNSVGWAVITDEYKVPSKKFKVLGNTDRHSIKKNLIGALLFDSGETAEATRLKRTARRRYTRRKNRICYLQEIFSNEMAKVDDSFFHRLEESFLVEEDKKHERHPIFGNIVDEVAYHEKYPTIYHLRKKLVDSTDKADLRLIYLALAHMIKFRGHFLIEGDLNPDNSDVDKLFIQLVQTYNQLFEENPINASGVDAKAILSARLSKSRRLENLIAQLPGEKKNGLFGNLIALSLGLTPNFKSNFDLAEDAKLQLSKDTYDDDLDNLLAQIGDQYADLFLAAKNLSDAILLSDILRVNTEITKAPLSASMIKRYDEHHQDLTLLKALVRQQLPEKYKEIFFDQSKNGYAGYIDGGASQEEFYKFIKPILEKMDGTEELLVKLNREDLLRKQRTFDNGSIPHQIHLGELHAILRRQEDFYPFLKDNREKIEKILTFRIPYYVGPLARGNSRFAWMTRKSEETITPWNFEEVVDKGASAQSFIERMTNFDKNLPNEKVLPKHSLLYEYFTVYNELTKVKYVTEGMRKPAFLSGEQKKAIVDLLFKTNRKVTVKQLKEDYFKKIECFDSVEISGVEDRFNASLGTYHDLLKIIKDKDFLDNEENEDILEDIVLTLTLFEDREMIEERLKTYAHLFDDKVMKQLKRRRYTGWGRLSRKLINGIRDKQSGKTILDFLKSDGFANRNFMQLIHDDSLTFKEDIQKAQVSGQGDSLHEHIANLAGSPAIKKGILQTVKVVDELVKVMGRHKPENIVIEMARENQTTQKGQKNSRERMKRIEEGIKELGSQILKEHPVENTQLQNEKLYLYYLQNGRDMYVDQELDINRLSDYDVDHIVPQSFLKDDSIDNKVLTRSDKARGKSDNVPSEEVVKKMKNYWRQLLNAKLITQRKFDNLTKAERGGLSELDKAGFIKRQLVETRQITKHVAQILDSRMNTKYDENDKLIREVKVITLKSKLVSDFRKDFQFYKVREINNYHHAHDAYLNAVVGTALIKKYPKLESEFVYGDYKVYDVRKMIAKSEQEIGKATAKYFFYSNIMNFFKTEITLANGEIRKRPLIETNGETGEIVWDKGRDFATVRKVLSMPQVNIVKKTEVQTGGFSKESILPKRNSDKLIARKKDWDPKKYGGFDSPTVAYSVLVVAKVEKGKSKKLKSVKELLGITIMERSSFEKNPIDFLEAKGYKEVKKDLIIKLPKYSLFELENGRKRMLASAGELQKGNELALPSKYVNFLYLASHYEKLKGSPEDNEQKQLFVEQHKHYLDEIIEQISEFSKRVILADANLDKVLSAYNKHRDKPIREQAENIIHLFTLTNLGAPAAFKYFDTTIDRKRYTSTKEVLDATLIHQSITGLYETRIDLSQLGGDGGGSSGGGEAAAKGGLDDEYRLYSPLVKPDQNIQFWLEQFPQAWAETAGMGLAKQVPPQVIQLKASATPVSVRQYPLSKEAQEGIRPHVQRLIQQGILVPVQSPWNTPLLPVRKPGTNDYRPVQDLREVNKRVQDIHPTVPNPYNLLCALPPQRSWYTVLDLKDAFFCLRLHPTSQPLFAFEWRDPGTGRTGQLTWTRLPQGFKNSPTIFNEALHRDLANFRIQHPQVTLLQYVDDLLLAGATKQDCLEGTKALLLELSDLGYRASAKKAQICRREVTYLGYSLRDGQRWLTEARKKTVVQIPAPTTAKQVREFLGKAGFCRLFIPGFATLAAPLYPLTKPKGEFSWAPEHQKAFDAIKKALLSAPALALPDVTKPFTLYVDERKGVARGVLTQTLGPWRRPVAYLSKKLDPVASGWPVCLKAIAAVAILVKDADKLTLGQNITVIAPHALENIVRQPPDRWMTNARMTHYQSLLLTERVTFAPPAALNPATLLPEETDEPVTHDCHQLLIEETGVRKDLTDIPLTGEVLTWFTDGSSYVVEGKRMAGAAVVDGTRTIWASSLPEGTSAQKAELMALTQALRLAEGKSINIYTDSRYAFATAHVHGAIYKQRGWLTSAGREIKNKEEILSLLEALHLPKRLAIIHCPGHQKAKDPISRGNQMADRVAKQAAQGVNLLPAGKRTADGSEFEKRTADGSEFESPKKKAKVE

SEQ ID NO: 41 - protein, 2089 aa, synthetic construct
MPAAKRVKLDGGDKKYSIGLDIGTNSVGWAVITDEYKVPSKKFKVLGNTDRHSIKKNLIGALLFDSGETAEATRLKRTARRRYTRRKNRICYLQEIFSNEMAKVDDSFFHRLEESFLVEEDKKHERHPIFGNIVDEVAYHEKYPTIYHLRKKLVDSTDKADLRLIYLALAHMIKFRGHFLIEGDLNPDNSDVDKLFIQLVQTYNQLFEENPINASGVDAKAILSARLSKSRRLENLIAQLPGEKKNGLFGNLIALSLGLTPNFKSNFDLAEDAKLQLSKDTYDDDLDNLLAQIGDQYADLFLAAKNLSDAILLSDILRVNTEITKAPLSASMIKRYDEHHQDLTLLKALVRQQLPEKYKEIFFDQSKNGYAGYIDGGASQEEFYKFIKPILEKMDGTEELLVKLNREDLLRKQRTFDNGSIPHQIHLGELHAILRRQEDFYPFLKDNREKIEKILTFRIPYYVGPLARGNSRFAWMTRKSEETITPWNFEEVVDKGASAQSFIERMTNFDKNLPNEKVLPKHSLLYEYFTVYNELTKVKYVTEGMRKPAFLSGEQKKAIVDLLFKTNRKVTVKQLKEDYFKKIECFDSVEISGVEDRFNASLGTYHDLLKIIKDKDFLDNEENEDILEDIVLTLTLFEDREMIEERLKTYAHLFDDKVMKQLKRRRYTGWGRLSRKLINGIRDKQSGKTILDFLKSDGFANRNFMQLIHDDSLTFKEDIQKAQVSGQGDSLHEHIANLAGSPAIKKGILQTVKVVDELVKVMGRHKPENIVIEMARENQTTQKGQKNSRERMKRIEEGIKELGSQILKEHPVENTQLQNEKLYLYYLQNGRDMYVDQELDINRLSDYDVDHIVPQSFLKDDSIDNKVLTRSDKARGKSDNVPSEEVVKKMKNYWRQLLNAKLITQRKFDNLTKAERGGLSELDKAGFIKRQLVETRQITKHVAQILDSRMNTKYDENDKLIREVKVITLKSKLVSDFRKDFQFYKVREINNYHHAHDAYLNAVVGTALIKKYPKLESEFVYGDYKVYDVRKMIAKSEQEIGKATAKYFFYSNIMNFFKTEITLANGEIRKRPLIETNGETGEIVWDKGRDFATVRKVLSMPQVNIVKKTEVQTGGFSKESILPKRNSDKLIARKKDWDPKKYGGFDSPTVAYSVLVVAKVEKGKSKKLKSVKELLGITIMERSSFEKNPIDFLEAKGYKEVKKDLIIKLPKYSLFELENGRKRMLASAGELQKGNELALPSKYVNFLYLASHYEKLKGSPEDNEQKQLFVEQHKHYLDEIIEQISEFSKRVILADANLDKVLSAYNKHRDKPIREQAENIIHLFTLTNLGAPAAFKYFDTTIDRKRYTSTKEVLDATLIHQSITGLYETRIDLSQLGGDGGGSSGSSGSSGSSGGLDDEYRLYSPLVKPDQNIQFWLEQFPQAWAETAGMGLAKQVPPQVIQLKASATPVSVRQYPLSKEAQEGIRPHVQRLIQQGILVPVQSPWNTPLLPVRKPGTNDYRPVQDLREVNKRVQDIHPTVPNPYNLLCALPPQRSWYTVLDLKDAFFCLRLHPTSQPLFAFEWRDPGTGRTGQLTWTRLPQGFKNSPTIFNEALHRDLANFRIQHPQVTLLQYVDDLLLAGATKQDCLEGTKALLLELSDLGYRASAKKAQICRREVTYLGYSLRDGQRWLTEARKKTVVQIPAPTTAKQVREFLGKAGFCRLFIPGFATLAAPLYPLTKPKGEFSWAPEHQKAFDAIKKALLSAPALALPDVTKPFTLYVDERKGVARGVLTQTLGPWRRPVAYLSKKLDPVASGWPVCLKAIAAVAILVKDADKLTLGQNITVIAPHALENIVRQPPDRWMTNARMTHYQSLLLTERVTFAPPAALNPATLLPEETDEPVTHDCHQLLIEETGVRKDLTDIPLTGEVLTWFTDGSSYVVEGKRMAGAAVVDGTRTIWASSLPEGTSAQKAELMALTQALRLAEGKSINIYTDSRYAFATAHVHGAIYKQRGWLTSAGREIKNKEEILSLLEALHLPKRLAIIHCPGHQKAKDPISRGNQMADRVAKQAAQGVNLLPAGKRTADGSEFEKRTADGSEFESPKKKAKVE

SEQ ID NO: 42 - protein, 2088 aa, synthetic construct
MPAAKRVKLDGGDKKYSIGLDIGTNSVGWAVITDEYKVPSKKFKVLGNTDRHSIKKNLIGALLFDSGETAEATRLKRTARRRYTRRKNRICYLQEIFSNEMAKVDDSFFHRLEESFLVEEDKKHERHPIFGNIVDEVAYHEKYPTIYHLRKKLVDSTDKADLRLIYLALAHMIKFRGHFLIEGDLNPDNSDVDKLFIQLVQTYNQLFEENPINASGVDAKAILSARLSKSRRLENLIAQLPGEKKNGLFGNLIALSLGLTPNFKSNFDLAEDAKLQLSKDTYDDDLDNLLAQIGDQYADLFLAAKNLSDAILLSDILRVNTEITKAPLSASMIKRYDEHHQDLTLLKALVRQQLPEKYKEIFFDQSKNGYAGYIDGGASQEEFYKFIKPILEKMDGTEELLVKLNREDLLRKQRTFDNGSIPHQIHLGELHAILRRQEDFYPFLKDNREKIEKILTFRIPYYVGPLARGNSRFAWMTRKSEETITPWNFEEVVDKGASAQSFIERMTNFDKNLPNEKVLPKHSLLYEYFTVYNELTKVKYVTEGMRKPAFLSGEQKKAIVDLLFKTNRKVTVKQLKEDYFKKIECFDSVEISGVEDRFNASLGTYHDLLKIIKDKDFLDNEENEDILEDIVLTLTLFEDREMIEERLKTYAHLFDDKVMKQLKRRRYTGWGRLSRKLINGIRDKQSGKTILDFLKSDGFANRNFMQLIHDDSLTFKEDIQKAQVSGQGDSLHEHIANLAGSPAIKKGILQTVKVVDELVKVMGRHKPENIVIEMARENQTTQKGQKNSRERMKRIEEGIKELGSQILKEHPVENTQLQNEKLYLYYLQNGRDMYVDQELDINRLSDYDVDHIVPQSFLKDDSIDNKVLTRSDKARGKSDNVPSEEVVKKMKNYWRQLLNAKLITQRKFDNLTKAERGGLSELDKAGFIKRQLVETRQITKHVAQILDSRMNTKYDENDKLIREVKVITLKSKLVSDFRKDFQFYKVREINNYHHAHDAYLNAVVGTALIKKYPKLESEFVYGDYKVYDVRKMIAKSEQEIGKATAKYFFYSNIMNFFKTEITLANGEIRKRPLIETNGETGEIVWDKGRDFATVRKVLSMPQVNIVKKTEVQTGGFSKESILPKRNSDKLIARKKDWDPKKYGGFDSPTVAYSVLVVAKVEKGKSKKLKSVKELLGITIMERSSFEKNPIDFLEAKGYKEVKKDLIIKLPKYSLFELENGRKRMLASAGELQKGNELALPSKYVNFLYLASHYEKLKGSPEDNEQKQLFVEQHKHYLDEIIEQISEFSKRVILADANLDKVLSAYNKHRDKPIREQAENIIHLFTLTNLGAPAAFKYFDTTIDRKRYTSTKEVLDATLIHQSITGLYETRIDLSQLGGDGGGSSEAAAKGGGGGLDDEYRLYSPLVKPDQNIQFWLEQFPQAWAETAGMGLAKQVPPQVIQLKASATPVSVRQYPLSKEAQEGIRPHVQRLIQQGILVPVQSPWNTPLLPVRKPGTNDYRPVQDLREVNKRVQDIHPTVPNPYNLLCALPPQRSWYTVLDLKDAFFCLRLHPTSQPLFAFEWRDPGTGRTGQLTWTRLPQGFKNSPTIFNEALHRDLANFRIQHPQVTLLQYVDDLLLAGATKQDCLEGTKALLLELSDLGYRASAKKAQICRREVTYLGYSLRDGQRWLTEARKKTVVQIPAPTTAKQVREFLGKAGFCRLFIPGFATLAAPLYPLTKPKGEFSWAPEHQKAFDAIKKALLSAPALALPDVTKPFTLYVDERKGVARGVLTQTLGPWRRPVAYLSKKLDPVASGWPVCLKAIAAVAILVKDADKLTLGQNITVIAPHALENIVRQPPDRWMTNARMTHYQSLLLTERVTFAPPAALNPATLLPEETDEPVTHDCHQLLIEETGVRKDLTDIPLTGEVLTWFTDGSSYVVEGKRMAGAAVVDGTRTIWASSLPEGTSAQKAELMALTQALRLAEGKSINIYTDSRYAFATAHVHGAIYKQRGWLTSAGREIKNKEEILSLLEALHLPKRLAIIHCPGHQKAKDPISRGNQMADRVAKQAAQGVNLLPAGKRTADGSEFEKRTADGSEFESPKKKAKVE

SEQ ID NO: 43 - protein, 2086 aa, synthetic construct
MPAAKRVKLDGGDKKYSIGLDIGTNSVGWAVITDEYKVPSKKFKVLGNTDRHSIKKNLIGALLFDSGETAEATRLKRTARRRYTRRKNRICYLQEIFSNEMAKVDDSFFHRLEESFLVEEDKKHERHPIFGNIVDEVAYHEKYPTIYHLRKKLVDSTDKADLRLIYLALAHMIKFRGHFLIEGDLNPDNSDVDKLFIQLVQTYNQLFEENPINASGVDAKAILSARLSKSRRLENLIAQLPGEKKNGLFGNLIALSLGLTPNFKSNFDLAEDAKLQLSKDTYDDDLDNLLAQIGDQYADLFLAAKNLSDAILLSDILRVNTEITKAPLSASMIKRYDEHHQDLTLLKALVRQQLPEKYKEIFFDQSKNGYAGYIDGGASQEEFYKFIKPILEKMDGTEELLVKLNREDLLRKQRTFDNGSIPHQIHLGELHAILRRQEDFYPFLKDNREKIEKILTFRIPYYVGPLARGNSRFAWMTRKSEETITPWNFEEVVDKGASAQSFIERMTNFDKNLPNEKVLPKHSLLYEYFTVYNELTKVKYVTEGMRKPAFLSGEQKKAIVDLLFKTNRKVTVKQLKEDYFKKIECFDSVEISGVEDRFNASLGTYHDLLKIIKDKDFLDNEENEDILEDIVLTLTLFEDREMIEERLKTYAHLFDDKVMKQLKRRRYTGWGRLSRKLINGIRDKQSGKTILDFLKSDGFANRNFMQLIHDDSLTFKEDIQKAQVSGQGDSLHEHIANLAGSPAIKKGILQTVKVVDELVKVMGRHKPENIVIEMARENQTTQKGQKNSRERMKRIEEGIKELGSQILKEHPVENTQLQNEKLYLYYLQNGRDMYVDQELDINRLSDYDVDHIVPQSFLKDDSIDNKVLTRSDKARGKSDNVPSEEVVKKMKNYWRQLLNAKLITQRKFDNLTKAERGGLSELDKAGFIKRQLVETRQITKHVAQILDSRMNTKYDENDKLIREVKVITLKSKLVSDFRKDFQFYKVREINNYHHAHDAYLNAVVGTALIKKYPKLESEFVYGDYKVYDVRKMIAKSEQEIGKATAKYFFYSNIMNFFKTEITLANGEIRKRPLIETNGETGEIVWDKGRDFATVRKVLSMPQVNIVKKTEVQTGGFSKESILPKRNSDKLIARKKDWDPKKYGGFDSPTVAYSVLVVAKVEKGKSKKLKSVKELLGITIMERSSFEKNPIDFLEAKGYKEVKKDLIIKLPKYSLFELENGRKRMLASAGELQKGNELALPSKYVNFLYLASHYEKLKGSPEDNEQKQLFVEQHKHYLDEIIEQISEFSKRVILADANLDKVLSAYNKHRDKPIREQAENIIHLFTLTNLGAPAAFKYFDTTIDRKRYTSTKEVLDATLIHQSITGLYETRIDLSQLGGDGGGGGGSSPAPGGLDDEYRLYSPLVKPDQNIQFWLEQFPQAWAETAGMGLAKQVPPQVIQLKASATPVSVRQYPLSKEAQEGIRPHVQRLIQQGILVPVQSPWNTPLLPVRKPGTNDYRPVQDLREVNKRVQDIHPTVPNPYNLLCALPPQRSWYTVLDLKDAFFCLRLHPTSQPLFAFEWRDPGTGRTGQLTWTRLPQGFKNSPTIFNEALHRDLANFRIQHPQVTLLQYVDDLLLAGATKQDCLEGTKALLLELSDLGYRASAKKAQICRREVTYLGYSLRDGQRWLTEARKKTVVQIPAPTTAKQVREFLGKAGFCRLFIPGFATLAAPLYPLTKPKGEFSWAPEHQKAFDAIKKALLSAPALALPDVTKPFTLYVDERKGVARGVLTQTLGPWRRPVAYLSKKLDPVASGWPVCLKAIAAVAILVKDADKLTLGQNITVIAPHALENIVRQPPDRWMTNARMTHYQSLLLTERVTFAPPAALNPATLLPEETDEPVTHDCHQLLIEETGVRKDLTDIPLTGEVLTWFTDGSSYVVEGKRMAGAAVVDGTRTIWASSLPEGTSAQKAELMALTQALRLAEGKSINIYTDSRYAFATAHVHGAIYKQRGWLTSAGREIKNKEEILSLLEALHLPKRLAIIHCPGHQKAKDPISRGNQMADRVAKQAAQGVNLLPAGKRTADGSEFEKRTADGSEFESPKKKAKVE

SEQ ID NO: 44 - protein, 2086 aa, synthetic construct
MPAAKRVKLDGGDKKYSIGLDIGTNSVGWAVITDEYKVPSKKFKVLGNTDRHSIKKNLIGALLFDSGETAEATRLKRTARRRYTRRKNRICYLQEIFSNEMAKVDDSFFHRLEESFLVEEDKKHERHPIFGNIVDEVAYHEKYPTIYHLRKKLVDSTDKADLRLIYLALAHMIKFRGHFLIEGDLNPDNSDVDKLFIQLVQTYNQLFEENPINASGVDAKAILSARLSKSRRLENLIAQLPGEKKNGLFGNLIALSLGLTPNFKSNFDLAEDAKLQLSKDTYDDDLDNLLAQIGDQYADLFLAAKNLSDAILLSDILRVNTEITKAPLSASMIKRYDEHHQDLTLLKALVRQQLPEKYKEIFFDQSKNGYAGYIDGGASQEEFYKFIKPILEKMDGTEELLVKLNREDLLRKQRTFDNGSIPHQIHLGELHAILRRQEDFYPFLKDNREKIEKILTFRIPYYVGPLARGNSRFAWMTRKSEETITPWNFEEVVDKGASAQSFIERMTNFDKNLPNEKVLPKHSLLYEYFTVYNELTKVKYVTEGMRKPAFLSGEQKKAIVDLLFKTNRKVTVKQLKEDYFKKIECFDSVEISGVEDRFNASLGTYHDLLKIIKDKDFLDNEENEDILEDIVLTLTLFEDREMIEERLKTYAHLFDDKVMKQLKRRRYTGWGRLSRKLINGIRDKQSGKTILDFLKSDGFANRNFMQLIHDDSLTFKEDIQKAQVSGQGDSLHEHIANLAGSPAIKKGILQTVKVVDELVKVMGRHKPENIVIEMARENQTTQKGQKNSRERMKRIEEGIKELGSQILKEHPVENTQLQNEKLYLYYLQNGRDMYVDQELDINRLSDYDVDHIVPQSFLKDDSIDNKVLTRSDKARGKSDNVPSEEVVKKMKNYWRQLLNAKLITQRKFDNLTKAERGGLSELDKAGFIKRQLVETRQITKHVAQILDSRMNTKYDENDKLIREVKVITLKSKLVSDFRKDFQFYKVREINNYHHAHDAYLNAVVGTALIKKYPKLESEFVYGDYKVYDVRKMIAKSEQEIGKATAKYFFYSNIMNFFKTEITLANGEIRKRPLIETNGETGEIVWDKGRDFATVRKVLSMPQVNIVKKTEVQTGGFSKESILPKRNSDKLIARKKDWDPKKYGGFDSPTVAYSVLVVAKVEKGKSKKLKSVKELLGITIMERSSFEKNPIDFLEAKGYKEVKKDLIIKLPKYSLFELENGRKRMLASAGELQKGNELALPSKYVNFLYLASHYEKLKGSPEDNEQKQLFVEQHKHYLDEIIEQISEFSKRVILADANLDKVLSAYNKHRDKPIREQAENIIHLFTLTNLGAPAAFKYFDTTIDRKRYTSTKEVLDATLIHQSITGLYETRIDLSQLGGDGGPAPGGSGGGGGLDDEYRLYSPLVKPDQNIQFWLEQFPQAWAETAGMGLAKQVPPQVIQLKASATPVSVRQYPLSKEAQEGIRPHVQRLIQQGILVPVQSPWNTPLLPVRKPGTNDYRPVQDLREVNKRVQDIHPTVPNPYNLLCALPPQRSWYTVLDLKDAFFCLRLHPTSQPLFAFEWRDPGTGRTGQLTWTRLPQGFKNSPTIFNEALHRDLANFRIQHPQVTLLQYVDDLLLAGATKQDCLEGTKALLLELSDLGYRASAKKAQICRREVTYLGYSLRDGQRWLTEARKKTVVQIPAPTTAKQVREFLGKAGFCRLFIPGFATLAAPLYPLTKPKGEFSWAPEHQKAFDAIKKALLSAPALALPDVTKPFTLYVDERKGVARGVLTQTLGPWRRPVAYLSKKLDPVASGWPVCLKAIAAVAILVKDADKLTLGQNITVIAPHALENIVRQPPDRWMTNARMTHYQSLLLTERVTFAPPAALNPATLLPEETDEPVTHDCHQLLIEETGVRKDLTDIPLTGEVLTWFTDGSSYVVEGKRMAGAAVVDGTRTIWASSLPEGTSAQKAELMALTQALRLAEGKSINIYTDSRYAFATAHVHGAIYKQRGWLTSAGREIKNKEEILSLLEALHLPKRLAIIHCPGHQKAKDPISRGNQMADRVAKQAAQGVNLLPAGKRTADGSEFEKRTADGSEFESPKKKAKVE

SEQ ID NO: 45 - protein, 2084 aa, synthetic construct
MPAAKRVKLDGGDKKYSIGLDIGTNSVGWAVITDEYKVPSKKFKVLGNTDRHSIKKNLIGALLFDSGETAEATRLKRTARRRYTRRKNRICYLQEIFSNEMAKVDDSFFHRLEESFLVEEDKKHERHPIFGNIVDEVAYHEKYPTIYHLRKKLVDSTDKADLRLIYLALAHMIKFRGHFLIEGDLNPDNSDVDKLFIQLVQTYNQLFEENPINASGVDAKAILSARLSKSRRLENLIAQLPGEKKNGLFGNLIALSLGLTPNFKSNFDLAEDAKLQLSKDTYDDDLDNLLAQIGDQYADLFLAAKNLSDAILLSDILRVNTEITKAPLSASMIKRYDEHHQDLTLLKALVRQQLPEKYKEIFFDQSKNGYAGYIDGGASQEEFYKFIKPILEKMDGTEELLVKLNREDLLRKQRTFDNGSIPHQIHLGELHAILRRQEDFYPFLKDNREKIEKILTFRIPYYVGPLARGNSRFAWMTRKSEETITPWNFEEVVDKGASAQSFIERMTNFDKNLPNEKVLPKHSLLYEYFTVYNELTKVKYVTEGMRKPAFLSGEQKKAIVDLLFKTNRKVTVKQLKEDYFKKIECFDSVEISGVEDRFNASLGTYHDLLKIIKDKDFLDNEENEDILEDIVLTLTLFEDREMIEERLKTYAHLFDDKVMKQLKRRRYTGWGRLSRKLINGIRDKQSGKTILDFLKSDGFANRNFMQLIHDDSLTFKEDIQKAQVSGQGDSLHEHIANLAGSPAIKKGILQTVKVVDELVKVMGRHKPENIVIEMARENQTTQKGQKNSRERMKRIEEGIKELGSQILKEHPVENTQLQNEKLYLYYLQNGRDMYVDQELDINRLSDYDVDHIVPQSFLKDDSIDNKVLTRSDKARGKSDNVPSEEVVKKMKNYWRQLLNAKLITQRKFDNLTKAERGGLSELDKAGFIKRQLVETRQITKHVAQILDSRMNTKYDENDKLIREVKVITLKSKLVSDFRKDFQFYKVREINNYHHAHDAYLNAVVGTALIKKYPKLESEFVYGDYKVYDVRKMIAKSEQEIGKATAKYFFYSNIMNFFKTEITLANGEIRKRPLIETNGETGEIVWDKGRDFATVRKVLSMPQVNIVKKTEVQTGGFSKESILPKRNSDKLIARKKDWDPKKYGGFDSPTVAYSVLVVAKVEKGKSKKLKSVKELLGITIMERSSFEKNPIDFLEAKGYKEVKKDLIIKLPKYSLFELENGRKRMLASAGELQKGNELALPSKYVNFLYLASHYEKLKGSPEDNEQKQLFVEQHKHYLDEIIEQISEFSKRVILADANLDKVLSAYNKHRDKPIREQAENIIHLFTLTNLGAPAAFKYFDTTIDRKRYTSTKEVLDATLIHQSITGLYETRIDLSQLGGDGGPAPAPAPGGLDDEYRLYSPLVKPDQNIQFWLEQFPQAWAETAGMGLAKQVPPQVIQLKASATPVSVRQYPLSKEAQEGIRPHVQRLIQQGILVPVQSPWNTPLLPVRKPGTNDYRPVQDLREVNKRVQDIHPTVPNPYNLLCALPPQRSWYTVLDLKDAFFCLRLHPTSQPLFAFEWRDPGTGRTGQLTWTRLPQGFKNSPTIFNEALHRDLANFRIQHPQVTLLQYVDDLLLAGATKQDCLEGTKALLLELSDLGYRASAKKAQICRREVTYLGYSLRDGQRWLTEARKKTVVQIPAPTTAKQVREFLGKAGFCRLFIPGFATLAAPLYPLTKPKGEFSWAPEHQKAFDAIKKALLSAPALALPDVTKPFTLYVDERKGVARGVLTQTLGPWRRPVAYLSKKLDPVASGWPVCLKAIAAVAILVKDADKLTLGQNITVIAPHALENIVRQPPDRWMTNARMTHYQSLLLTERVTFAPPAALNPATLLPEETDEPVTHDCHQLLIEETGVRKDLTDIPLTGEVLTWFTDGSSYVVEGKRMAGAAVVDGTRTIWASSLPEGTSAQKAELMALTQALRLAEGKSINIYTDSRYAFATAHVHGAIYKQRGWLTSAGREIKNKEEILSLLEALHLPKRLAIIHCPGHQKAKDPISRGNQMADRVAKQAAQGVNLLPAGKRTADGSEFEKRTADGSEFESPKKKAKVE

SEQ ID NO: 46 - protein, 2097 aa, synthetic construct
MPAAKRVKLDGGDKKYSIGLDIGTNSVGWAVITDEYKVPSKKFKVLGNTDRHSIKKNLIGALLFDSGETAEATRLKRTARRRYTRRKNRICYLQEIFSNEMAKVDDSFFHRLEESFLVEEDKKHERHPIFGNIVDEVAYHEKYPTIYHLRKKLVDSTDKADLRLIYLALAHMIKFRGHFLIEGDLNPDNSDVDKLFIQLVQTYNQLFEENPINASGVDAKAILSARLSKSRRLENLIAQLPGEKKNGLFGNLIALSLGLTPNFKSNFDLAEDAKLQLSKDTYDDDLDNLLAQIGDQYADLFLAAKNLSDAILLSDILRVNTEITKAPLSASMIKRYDEHHQDLTLLKALVRQQLPEKYKEIFFDQSKNGYAGYIDGGASQEEFYKFIKPILEKMDGTEELLVKLNREDLLRKQRTFDNGSIPHQIHLGELHAILRRQEDFYPFLKDNREKIEKILTFRIPYYVGPLARGNSRFAWMTRKSEETITPWNFEEVVDKGASAQSFIERMTNFDKNLPNEKVLPKHSLLYEYFTVYNELTKVKYVTEGMRKPAFLSGEQKKAIVDLLFKTNRKVTVKQLKEDYFKKIECFDSVEISGVEDRFNASLGTYHDLLKIIKDKDFLDNEENEDILEDIVLTLTLFEDREMIEERLKTYAHLFDDKVMKQLKRRRYTGWGRLSRKLINGIRDKQSGKTILDFLKSDGFANRNFMQLIHDDSLTFKEDIQKAQVSGQGDSLHEHIANLAGSPAIKKGILQTVKVVDELVKVMGRHKPENIVIEMARENQTTQKGQKNSRERMKRIEEGIKELGSQILKEHPVENTQLQNEKLYLYYLQNGRDMYVDQELDINRLSDYDVDHIVPQSFLKDDSIDNKVLTRSDKARGKSDNVPSEEVVKKMKNYWRQLLNAKLITQRKFDNLTKAERGGLSELDKAGFIKRQLVETRQITKHVAQILDSRMNTKYDENDKLIREVKVITLKSKLVSDFRKDFQFYKVREINNYHHAHDAYLNAVVGTALIKKYPKLESEFVYGDYKVYDVRKMIAKSEQEIGKATAKYFFYSNIMNFFKTEITLANGEIRKRPLIETNGETGEIVWDKGRDFATVRKVLSMPQVNIVKKTEVQTGGFSKESILPKRNSDKLIARKKDWDPKKYGGFDSPTVAYSVLVVAKVEKGKSKKLKSVKELLGITIMERSSFEKNPIDFLEAKGYKEVKKDLIIKLPKYSLFELENGRKRMLASAGELQKGNELALPSKYVNFLYLASHYEKLKGSPEDNEQKQLFVEQHKHYLDEIIEQISEFSKRVILADANLDKVLSAYNKHRDKPIREQAENIIHLFTLTNLGAPAAFKYFDTTIDRKRYTSTKEVLDATLIHQSITGLYETRIDLSQLGGDGGEAAAKEAAAKEAAAKEAAAKGGLDDEYRLYSPLVKPDQNIQFWLEQFPQAWAETAGMGLAKQVPPQVIQLKASATPVSVRQYPLSKEAQEGIRPHVQRLIQQGILVPVQSPWNTPLLPVRKPGTNDYRPVQDLREVNKRVQDIHPTVPNPYNLLCALPPQRSWYTVLDLKDAFFCLRLHPTSQPLFAFEWRDPGTGRTGQLTWTRLPQGFKNSPTIFNEALHRDLANFRIQHPQVTLLQYVDDLLLAGATKQDCLEGTKALLLELSDLGYRASAKKAQICRREVTYLGYSLRDGQRWLTEARKKTVVQIPAPTTAKQVREFLGKAGFCRLFIPGFATLAAPLYPLTKPKGEFSWAPEHQKAFDAIKKALLSAPALALPDVTKPFTLYVDERKGVARGVLTQTLGPWRRPVAYLSKKLDPVASGWPVCLKAIAAVAILVKDADKLTLGQNITVIAPHALENIVRQPPDRWMTNARMTHYQSLLLTERVTFAPPAALNPATLLPEETDEPVTHDCHQLLIEETGVRKDLTDIPLTGEVLTWFTDGSSYVVEGKRMAGAAVVDGTRTIWASSLPEGTSAQKAELMALTQALRLAEGKSINIYTDSRYAFATAHVHGAIYKQRGWLTSAGREIKNKEEILSLLEALHLPKRLAIIHCPGHQKAKDPISRGNQMADRVAKQAAQGVNLLPAGKRTADGSEFEKRTADGSEFESPKKKAKVE

SEQ ID NO: 47 - protein, 2083 aa, synthetic construct
MPAAKRVKLDGGDKKYSIGLDIGTNSVGWAVITDEYKVPSKKFKVLGNTDRHSIKKNLIGALLFDSGETAEATRLKRTARRRYTRRKNRICYLQEIFSNEMAKVDDSFFHRLEESFLVEEDKKHERHPIFGNIVDEVAYHEKYPTIYHLRKKLVDSTDKADLRLIYLALAHMIKFRGHFLIEGDLNPDNSDVDKLFIQLVQTYNQLFEENPINASGVDAKAILSARLSKSRRLENLIAQLPGEKKNGLFGNLIALSLGLTPNFKSNFDLAEDAKLQLSKDTYDDDLDNLLAQIGDQYADLFLAAKNLSDAILLSDILRVNTEITKAPLSASMIKRYDEHHQDLTLLKALVRQQLPEKYKEIFFDQSKNGYAGYIDGGASQEEFYKFIKPILEKMDGTEELLVKLNREDLLRKQRTFDNGSIPHQIHLGELHAILRRQEDFYPFLKDNREKIEKILTFRIPYYVGPLARGNSRFAWMTRKSEETITPWNFEEVVDKGASAQSFIERMTNFDKNLPNEKVLPKHSLLYEYFTVYNELTKVKYVTEGMRKPAFLSGEQKKAIVDLLFKTNRKVTVKQLKEDYFKKIECFDSVEISGVEDRFNASLGTYHDLLKIIKDKDFLDNEENEDILEDIVLTLTLFEDREMIEERLKTYAHLFDDKVMKQLKRRRYTGWGRLSRKLINGIRDKQSGKTILDFLKSDGFANRNFMQLIHDDSLTFKEDIQKAQVSGQGDSLHEHIANLAGSPAIKKGILQTVKVVDELVKVMGRHKPENIVIEMARENQTTQKGQKNSRERMKRIEEGIKELGSQILKEHPVENTQLQNEKLYLYYLQNGRDMYVDQELDINRLSDYDVDHIVPQSFLKDDSIDNKVLTRSDKARGKSDNVPSEEVVKKMKNYWRQLLNAKLITQRKFDNLTKAERGGLSELDKAGFIKRQLVETRQITKHVAQILDSRMNTKYDENDKLIREVKVITLKSKLVSDFRKDFQFYKVREINNYHHAHDAYLNAVVGTALIKKYPKLESEFVYGDYKVYDVRKMIAKSEQEIGKATAKYFFYSNIMNFFKTEITLANGEIRKRPLIETNGETGEIVWDKGRDFATVRKVLSMPQVNIVKKTEVQTGGFSKESILPKRNSDKLIARKKDWDPKKYGGFDSPTVAYSVLVVAKVEKGKSKKLKSVKELLGITIMERSSFEKNPIDFLEAKGYKEVKKDLIIKLPKYSLFELENGRKRMLASAGELQKGNELALPSKYVNFLYLASHYEKLKGSPEDNEQKQLFVEQHKHYLDEIIEQISEFSKRVILADANLDKVLSAYNKHRDKPIREQAENIIHLFTLTNLGAPAAFKYFDTTIDRKRYTSTKEVLDATLIHQSITGLYETRIDLSQLGGDGGGSSPAPGGLDDEYRLYSPLVKPDQNIQFWLEQFPQAWAETAGMGLAKQVPPQVIQLKASATPVSVRQYPLSKEAQEGIRPHVQRLIQQGILVPVQSPWNTPLLPVRKPGTNDYRPVQDLREVNKRVQDIHPTVPNPYNLLCALPPQRSWYTVLDLKDAFFCLRLHPTSQPLFAFEWRDPGTGRTGQLTWTRLPQGFKNSPTIFNEALHRDLANFRIQHPQVTLLQYVDDLLLAGATKQDCLEGTKALLLELSDLGYRASAKKAQICRREVTYLGYSLRDGQRWLTEARKKTVVQIPAPTTAKQVREFLGKAGFCRLFIPGFATLAAPLYPLTKPKGEFSWAPEHQKAFDAIKKALLSAPALALPDVTKPFTLYVDERKGVARGVLTQTLGPWRRPVAYLSKKLDPVASGWPVCLKAIAAVAILVKDADKLTLGQNITVIAPHALENIVRQPPDRWMTNARMTHYQSLLLTERVTFAPPAALNPATLLPEETDEPVTHDCHQLLIEETGVRKDLTDIPLTGEVLTWFTDGSSYVVEGKRMAGAAVVDGTRTIWASSLPEGTSAQKAELMALTQALRLAEGKSINIYTDSRYAFATAHVHGAIYKQRGWLTSAGREIKNKEEILSLLEALHLPKRLAIIHCPGHQKAKDPISRGNQMADRVAKQAAQGVNLLPAGKRTADGSEFEKRTADGSEFESPKKKAKVE

SEQ ID NO: 48 - protein, 2085 aa, synthetic construct
MPAAKRVKLDGGDKKYSIGLDIGTNSVGWAVITDEYKVPSKKFKVLGNTDRHSIKKNLIGALLFDSGETAEATRLKRTARRRYTRRKNRICYLQEIFSNEMAKVDDSFFHRLEESFLVEEDKKHERHPIFGNIVDEVAYHEKYPTIYHLRKKLVDSTDKADLRLIYLALAHMIKFRGHFLIEGDLNPDNSDVDKLFIQLVQTYNQLFEENPINASGVDAKAILSARLSKSRRLENLIAQLPGEKKNGLFGNLIALSLGLTPNFKSNFDLAEDAKLQLSKDTYDDDLDNLLAQIGDQYADLFLAAKNLSDAILLSDILRVNTEITKAPLSASMIKRYDEHHQDLTLLKALVRQQLPEKYKEIFFDQSKNGYAGYIDGGASQEEFYKFIKPILEKMDGTEELLVKLNREDLLRKQRTFDNGSIPHQIHLGELHAILRRQEDFYPFLKDNREKIEKILTFRIPYYVGPLARGNSRFAWMTRKSEETITPWNFEEVVDKGASAQSFIERMTNFDKNLPNEKVLPKHSLLYEYFTVYNELTKVKYVTEGMRKPAFLSGEQKKAIVDLLFKTNRKVTVKQLKEDYFKKIECFDSVEISGVEDRFNASLGTYHDLLKIIKDKDFLDNEENEDILEDIVLTLTLFEDREMIEERLKTYAHLFDDKVMKQLKRRRYTGWGRLSRKLINGIRDKQSGKTILDFLKSDGFANRNFMQLIHDDSLTFKEDIQKAQVSGQGDSLHEHIANLAGSPAIKKGILQTVKVVDELVKVMGRHKPENIVIEMARENQTTQKGQKNSRERMKRIEEGIKELGSQILKEHPVENTQLQNEKLYLYYLQNGRDMYVDQELDINRLSDYDVDHIVPQSFLKDDSIDNKVLTRSDKARGKSDNVPSEEVVKKMKNYWRQLLNAKLITQRKFDNLTKAERGGLSELDKAGFIKRQLVETRQITKHVAQILDSRMNTKYDENDKLIREVKVITLKSKLVSDFRKDFQFYKVREINNYHHAHDAYLNAVVGTALIKKYPKLESEFVYGDYKVYDVRKMIAKSEQEIGKATAKYFFYSNIMNFFKTEITLANGEIRKRPLIETNGETGEIVWDKGRDFATVRKVLSMPQVNIVKKTEVQTGGFSKESILPKRNSDKLIARKKDWDPKKYGGFDSPTVAYSVLVVAKVEKGKSKKLKSVKELLGITIMERSSFEKNPIDFLEAKGYKEVKKDLIIKLPKYSLFELENGRKRMLASAGELQKGNELALPSKYVNFLYLASHYEKLKGSPEDNEQKQLFVEQHKHYLDEIIEQISEFSKRVILADANLDKVLSAYNKHRDKPIREQAENIIHLFTLTNLGAPAAFKYFDTTIDRKRYTSTKEVLDATLIHQSITGLYETRIDLSQLGGDGGEAAAKGGGGGLDDEYRLYSPLVKPDQNIQFWLEQFPQAWAETAGMGLAKQVPPQVIQLKASATPVSVRQYPLSKEAQEGIRPHVQRLIQQGILVPVQSPWNTPLLPVRKPGTNDYRPVQDLREVNKRVQDIHPTVPNPYNLLCALPPQRSWYTVLDLKDAFFCLRLHPTSQPLFAFEWRDPGTGRTGQLTWTRLPQGFKNSPTIFNEALHRDLANFRIQHPQVTLLQYVDDLLLAGATKQDCLEGTKALLLELSDLGYRASAKKAQICRREVTYLGYSLRDGQRWLTEARKKTVVQIPAPTTAKQVREFLGKAGFCRLFIPGFATLAAPLYPLTKPKGEFSWAPEHQKAFDAIKKALLSAPALALPDVTKPFTLYVDERKGVARGVLTQTLGPWRRPVAYLSKKLDPVASGWPVCLKAIAAVAILVKDADKLTLGQNITVIAPHALENIVRQPPDRWMTNARMTHYQSLLLTERVTFAPPAALNPATLLPEETDEPVTHDCHQLLIEETGVRKDLTDIPLTGEVLTWFTDGSSYVVEGKRMAGAAVVDGTRTIWASSLPEGTSAQKAELMALTQALRLAEGKSINIYTDSRYAFATAHVHGAIYKQRGWLTSAGREIKNKEEILSLLEALHLPKRLAIIHCPGHQKAKDPISRGNQMADRVAKQAAQGVNLLPAGKRTADGSEFEKRTADGSEFESPKKKAKVE

SEQ ID NO: 49 - protein, 2088 aa, synthetic construct
MPAAKRVKLDGGDKKYSIGLDIGTNSVGWAVITDEYKVPSKKFKVLGNTDRHSIKKNLIGALLFDSGETAEATRLKRTARRRYTRRKNRICYLQEIFSNEMAKVDDSFFHRLEESFLVEEDKKHERHPIFGNIVDEVAYHEKYPTIYHLRKKLVDSTDKADLRLIYLALAHMIKFRGHFLIEGDLNPDNSDVDKLFIQLVQTYNQLFEENPINASGVDAKAILSARLSKSRRLENLIAQLPGEKKNGLFGNLIALSLGLTPNFKSNFDLAEDAKLQLSKDTYDDDLDNLLAQIGDQYADLFLAAKNLSDAILLSDILRVNTEITKAPLSASMIKRYDEHHQDLTLLKALVRQQLPEKYKEIFFDQSKNGYAGYIDGGASQEEFYKFIKPILEKMDGTEELLVKLNREDLLRKQRTFDNGSIPHQIHLGELHAILRRQEDFYPFLKDNREKIEKILTFRIPYYVGPLARGNSRFAWMTRKSEETITPWNFEEVVDKGASAQSFIERMTNFDKNLPNEKVLPKHSLLYEYFTVYNELTKVKYVTEGMRKPAFLSGEQKKAIVDLLFKTNRKVTVKQLKEDYFKKIECFDSVEISGVEDRFNASLGTYHDLLKIIKDKDFLDNEENEDILEDIVLTLTLFEDREMIEERLKTYAHLFDDKVMKQLKRRRYTGWGRLSRKLINGIRDKQSGKTILDFLKSDGFANRNFMQLIHDDSLTFKEDIQKAQVSGQGDSLHEHIANLAGSPAIKKGILQTVKVVDELVKVMGRHKPENIVIEMARENQTTQKGQKNSRERMKRIEEGIKELGSQILKEHPVENTQLQNEKLYLYYLQNGRDMYVDQELDINRLSDYDVDHIVPQSFLKDDSIDNKVLTRSDKARGKSDNVPSEEVVKKMKNYWRQLLNAKLITQRKFDNLTKAERGGLSELDKAGFIKRQLVETRQITKHVAQILDSRMNTKYDENDKLIREVKVITLKSKLVSDFRKDFQFYKVREINNYHHAHDAYLNAVVGTALIKKYPKLESEFVYGDYKVYDVRKMIAKSEQEIGKATAKYFFYSNIMNFFKTEITLANGEIRKRPLIETNGETGEIVWDKGRDFATVRKVLSMPQVNIVKKTEVQTGGFSKESILPKRNSDKLIARKKDWDPKKYGGFDSPTVAYSVLVVAKVEKGKSKKLKSVKELLGITIMERSSFEKNPIDFLEAKGYKEVKKDLIIKLPKYSLFELENGRKRMLASAGELQKGNELALPSKYVNFLYLASHYEKLKGSPEDNEQKQLFVEQHKHYLDEIIEQISEFSKRVILADANLDKVLSAYNKHRDKPIREQAENIIHLFTLTNLGAPAAFKYFDTTIDRKRYTSTKEVLDATLIHQSITGLYETRIDLSQLGGDGGGGSEAAAKPAPGGLDDEYRLYSPLVKPDQNIQFWLEQFPQAWAETAGMGLAKQVPPQVIQLKASATPVSVRQYPLSKEAQEGIRPHVQRLIQQGILVPVQSPWNTPLLPVRKPGTNDYRPVQDLREVNKRVQDIHPTVPNPYNLLCALPPQRSWYTVLDLKDAFFCLRLHPTSQPLFAFEWRDPGTGRTGQLTWTRLPQGFKNSPTIFNEALHRDLANFRIQHPQVTLLQYVDDLLLAGATKQDCLEGTKALLLELSDLGYRASAKKAQICRREVTYLGYSLRDGQRWLTEARKKTVVQIPAPTTAKQVREFLGKAGFCRLFIPGFATLAAPLYPLTKPKGEFSWAPEHQKAFDAIKKALLSAPALALPDVTKPFTLYVDERKGVARGVLTQTLGPWRRPVAYLSKKLDPVASGWPVCLKAIAAVAILVKDADKLTLGQNITVIAPHALENIVRQPPDRWMTNARMTHYQSLLLTERVTFAPPAALNPATLLPEETDEPVTHDCHQLLIEETGVRKDLTDIPLTGEVLTWFTDGSSYVVEGKRMAGAAVVDGTRTIWASSLPEGTSAQKAELMALTQALRLAEGKSINIYTDSRYAFATAHVHGAIYKQRGWLTSAGREIKNKEEILSLLEALHLPKRLAIIHCPGHQKAKDPISRGNQMADRVAKQAAQGVNLLPAGKRTADGSEFEKRTADGSEFESPKKKAKVE

SEQ ID NO: 50 - protein, 2088 aa, synthetic construct
MPAAKRVKLDGGDKKYSIGLDIGTNSVGWAVITDEYKVPSKKFKVLGNTDRHSIKKNLIGALLFDSGETAEATRLKRTARRRYTRRKNRICYLQEIFSNEMAKVDDSFFHRLEESFLVEEDKKHERHPIFGNIVDEVAYHEKYPTIYHLRKKLVDSTDKADLRLIYLALAHMIKFRGHFLIEGDLNPDNSDVDKLFIQLVQTYNQLFEENPINASGVDAKAILSARLSKSRRLENLIAQLPGEKKNGLFGNLIALSLGLTPNFKSNFDLAEDAKLQLSKDTYDDDLDNLLAQIGDQYADLFLAAKNLSDAILLSDILRVNTEITKAPLSASMIKRYDEHHQDLTLLKALVRQQLPEKYKEIFFDQSKNGYAGYIDGGASQEEFYKFIKPILEKMDGTEELLVKLNREDLLRKQRTFDNGSIPHQIHLGELHAILRRQEDFYPFLKDNREKIEKILTFRIPYYVGPLARGNSRFAWMTRKSEETITPWNFEEVVDKGASAQSFIERMTNFDKNLPNEKVLPKHSLLYEYFTVYNELTKVKYVTEGMRKPAFLSGEQKKAIVDLLFKTNRKVTVKQLKEDYFKKIECFDSVEISGVEDRFNASLGTYHDLLKIIKDKDFLDNEENEDILEDIVLTLTLFEDREMIEERLKTYAHLFDDKVMKQLKRRRYTGWGRLSRKLINGIRDKQSGKTILDFLKSDGFANRNFMQLIHDDSLTFKEDIQKAQVSGQGDSLHEHIANLAGSPAIKKGILQTVKVVDELVKVMGRHKPENIVIEMARENQTTQKGQKNSRERMKRIEEGIKELGSQILKEHPVENTQLQNEKLYLYYLQNGRDMYVDQELDINRLSDYDVDHIVPQSFLKDDSIDNKVLTRSDKARGKSDNVPSEEVVKKMKNYWRQLLNAKLITQRKFDNLTKAERGGLSELDKAGFIKRQLVETRQITKHVAQILDSRMNTKYDENDKLIREVKVITLKSKLVSDFRKDFQFYKVREINNYHHAHDAYLNAVVGTALIKKYPKLESEFVYGDYKVYDVRKMIAKSEQEIGKATAKYFFYSNIMNFFKTEITLANGEIRKRPLIETNGETGEIVWDKGRDFATVRKVLSMPQVNIVKKTEVQTGGFSKESILPKRNSDKLIARKKDWDPKKYGGFDSPTVAYSVLVVAKVEKGKSKKLKSVKELLGITIMERSSFEKNPIDFLEAKGYKEVKKDLIIKLPKYSLFELENGRKRMLASAGELQKGNELALPSKYVNFLYLASHYEKLKGSPEDNEQKQLFVEQHKHYLDEIIEQISEFSKRVILADANLDKVLSAYNKHRDKPIREQAENIIHLFTLTNLGAPAAFKYFDTTIDRKRYTSTKEVLDATLIHQSITGLYETRIDLSQLGGDGGPAPGGGEAAAKGGLDDEYRLYSPLVKPDQNIQFWLEQFPQAWAETAGMGLAKQVPPQVIQLKASATPVSVRQYPLSKEAQEGIRPHVQRLIQQGILVPVQSPWNTPLLPVRKPGTNDYRPVQDLREVNKRVQDIHPTVPNPYNLLCALPPQRSWYTVLDLKDAFFCLRLHPTSQPLFAFEWRDPGTGRTGQLTWTRLPQGFKNSPTIFNEALHRDLANFRIQHPQVTLLQYVDDLLLAGATKQDCLEGTKALLLELSDLGYRASAKKAQICRREVTYLGYSLRDGQRWLTEARKKTVVQIPAPTTAKQVREFLGKAGFCRLFIPGFATLAAPLYPLTKPKGEFSWAPEHQKAFDAIKKALLSAPALALPDVTKPFTLYVDERKGVARGVLTQTLGPWRRPVAYLSKKLDPVASGWPVCLKAIAAVAILVKDADKLTLGQNITVIAPHALENIVRQPPDRWMTNARMTHYQSLLLTERVTFAPPAALNPATLLPEETDEPVTHDCHQLLIEETGVRKDLTDIPLTGEVLTWFTDGSSYVVEGKRMAGAAVVDGTRTIWASSLPEGTSAQKAELMALTQALRLAEGKSINIYTDSRYAFATAHVHGAIYKQRGWLTSAGREIKNKEEILSLLEALHLPKRLAIIHCPGHQKAKDPISRGNQMADRVAKQAAQGVNLLPAGKRTADGSEFEKRTADGSEFESPKKKAKVE

SEQ ID NO: 51 - protein, 2092 aa, synthetic construct
MPAAKRVKLDGGDKKYSIGLDIGTNSVGWAVITDEYKVPSKKFKVLGNTDRHSIKKNLIGALLFDSGETAEATRLKRTARRRYTRRKNRICYLQEIFSNEMAKVDDSFFHRLEESFLVEEDKKHERHPIFGNIVDEVAYHEKYPTIYHLRKKLVDSTDKADLRLIYLALAHMIKFRGHFLIEGDLNPDNSDVDKLFIQLVQTYNQLFEENPINASGVDAKAILSARLSKSRRLENLIAQLPGEKKNGLFGNLIALSLGLTPNFKSNFDLAEDAKLQLSKDTYDDDLDNLLAQIGDQYADLFLAAKNLSDAILLSDILRVNTEITKAPLSASMIKRYDEHHQDLTLLKALVRQQLPEKYKEIFFDQSKNGYAGYIDGGASQEEFYKFIKPILEKMDGTEELLVKLNREDLLRKQRTFDNGSIPHQIHLGELHAILRRQEDFYPFLKDNREKIEKILTFRIPYYVGPLARGNSRFAWMTRKSEETITPWNFEEVVDKGASAQSFIERMTNFDKNLPNEKVLPKHSLLYEYFTVYNELTKVKYVTEGMRKPAFLSGEQKKAIVDLLFKTNRKVTVKQLKEDYFKKIECFDSVEISGVEDRFNASLGTYHDLLKIIKDKDFLDNEENEDILEDIVLTLTLFEDREMIEERLKTYAHLFDDKVMKQLKRRRYTGWGRLSRKLINGIRDKQSGKTILDFLKSDGFANRNFMQLIHDDSLTFKEDIQKAQVSGQGDSLHEHIANLAGSPAIKKGILQTVKVVDELVKVMGRHKPENIVIEMARENQTTQKGQKNSRERMKRIEEGIKELGSQILKEHPVENTQLQNEKLYLYYLQNGRDMYVDQELDINRLSDYDVDHIVPQSFLKDDSIDNKVLTRSDKARGKSDNVPSEEVVKKMKNYWRQLLNAKLITQRKFDNLTKAERGGLSELDKAGFIKRQLVETRQITKHVAQILDSRMNTKYDENDKLIREVKVITLKSKLVSDFRKDFQFYKVREINNYHHAHDAYLNAVVGTALIKKYPKLESEFVYGDYKVYDVRKMIAKSEQEIGKATAKYFFYSNIMNFFKTEITLANGEIRKRPLIETNGETGEIVWDKGRDFATVRKVLSMPQVNIVKKTEVQTGGFSKESILPKRNSDKLIARKKDWDPKKYGGFDSPTVAYSVLVVAKVEKGKSKKLKSVKELLGITIMERSSFEKNPIDFLEAKGYKEVKKDLIIKLPKYSLFELENGRKRMLASAGELQKGNELALPSKYVNFLYLASHYEKLKGSPEDNEQKQLFVEQHKHYLDEIIEQISEFSKRVILADANLDKVLSAYNKHRDKPIREQAENIIHLFTLTNLGAPAAFKYFDTTIDRKRYTSTKEVLDATLIHQSITGLYETRIDLSQLGGDGGGGGGSGGGGSGGGGSGGLDDEYRLYSPLVKPDQNIQFWLEQFPQAWAETAGMGLAKQVPPQVIQLKASATPVSVRQYPLSKEAQEGIRPHVQRLIQQGILVPVQSPWNTPLLPVRKPGTNDYRPVQDLREVNKRVQDIHPTVPNPYNLLCALPPQRSWYTVLDLKDAFFCLRLHPTSQPLFAFEWRDPGTGRTGQLTWTRLPQGFKNSPTIFNEALHRDLANFRIQHPQVTLLQYVDDLLLAGATKQDCLEGTKALLLELSDLGYRASAKKAQICRREVTYLGYSLRDGQRWLTEARKKTVVQIPAPTTAKQVREFLGKAGFCRLFIPGFATLAAPLYPLTKPKGEFSWAPEHQKAFDAIKKALLSAPALALPDVTKPFTLYVDERKGVARGVLTQTLGPWRRPVAYLSKKLDPVASGWPVCLKAIAAVAILVKDADKLTLGQNITVIAPHALENIVRQPPDRWMTNARMTHYQSLLLTERVTFAPPAALNPATLLPEETDEPVTHDCHQLLIEETGVRKDLTDIPLTGEVLTWFTDGSSYVVEGKRMAGAAVVDGTRTIWASSLPEGTSAQKAELMALTQALRLAEGKSINIYTDSRYAFATAHVHGAIYKQRGWLTSAGREIKNKEEILSLLEALHLPKRLAIIHCPGHQKAKDPISRGNQMADRVAKQAAQGVNLLPAGKRTADGSEFEKRTADGSEFESPKKKAKVE

SEQ ID NO: 52 - protein, 2092 aa, synthetic construct
MPAAKRVKLDGGDKKYSIGLDIGTNSVGWAVITDEYKVPSKKFKVLGNTDRHSIKKNLIGALLFDSGETAEATRLKRTARRRYTRRKNRICYLQEIFSNEMAKVDDSFFHRLEESFLVEEDKKHERHPIFGNIVDEVAYHEKYPTIYHLRKKLVDSTDKADLRLIYLALAHMIKFRGHFLIEGDLNPDNSDVDKLFIQLVQTYNQLFEENPINASGVDAKAILSARLSKSRRLENLIAQLPGEKKNGLFGNLIALSLGLTPNFKSNFDLAEDAKLQLSKDTYDDDLDNLLAQIGDQYADLFLAAKNLSDAILLSDILRVNTEITKAPLSASMIKRYDEHHQDLTLLKALVRQQLPEKYKEIFFDQSKNGYAGYIDGGASQEEFYKFIKPILEKMDGTEELLVKLNREDLLRKQRTFDNGSIPHQIHLGELHAILRRQEDFYPFLKDNREKIEKILTFRIPYYVGPLARGNSRFAWMTRKSEETITPWNFEEVVDKGASAQSFIERMTNFDKNLPNEKVLPKHSLLYEYFTVYNELTKVKYVTEGMRKPAFLSGEQKKAIVDLLFKTNRKVTVKQLKEDYFKKIECFDSVEISGVEDRFNASLGTYHDLLKIIKDKDFLDNEENEDILEDIVLTLTLFEDREMIEERLKTYAHLFDDKVMKQLKRRRYTGWGRLSRKLINGIRDKQSGKTILDFLKSDGFANRNFMQLIHDDSLTFKEDIQKAQVSGQGDSLHEHIANLAGSPAIKKGILQTVKVVDELVKVMGRHKPENIVIEMARENQTTQKGQKNSRERMKRIEEGIKELGSQILKEHPVENTQLQNEKLYLYYLQNGRDMYVDQELDINRLSDYDVDHIVPQSFLKDDSIDNKVLTRSDKARGKSDNVPSEEVVKKMKNYWRQLLNAKLITQRKFDNLTKAERGGLSELDKAGFIKRQLVETRQITKHVAQILDSRMNTKYDENDKLIREVKVITLKSKLVSDFRKDFQFYKVREINNYHHAHDAYLNAVVGTALIKKYPKLESEFVYGDYKVYDVRKMIAKSEQEIGKATAKYFFYSNIMNFFKTEITLANGEIRKRPLIETNGETGEIVWDKGRDFATVRKVLSMPQVNIVKKTEVQTGGFSKESILPKRNSDKLIARKKDWDPKKYGGFDSPTVAYSVLVVAKVEKGKSKKLKSVKELLGITIMERSSFEKNPIDFLEAKGYKEVKKDLIIKLPKYSLFELENGRKRMLASAGELQKGNELALPSKYVNFLYLASHYEKLKGSPEDNEQKQLFVEQHKHYLDEIIEQISEFSKRVILADANLDKVLSAYNKHRDKPIREQAENIIHLFTLTNLGAPAAFKYFDTTIDRKRYTSTKEVLDATLIHQSITGLYETRIDLSQLGGDGGGGSGGSGGSGGSGGSGGLDDEYRLYSPLVKPDQNIQFWLEQFPQAWAETAGMGLAKQVPPQVIQLKASATPVSVRQYPLSKEAQEGIRPHVQRLIQQGILVPVQSPWNTPLLPVRKPGTNDYRPVQDLREVNKRVQDIHPTVPNPYNLLCALPPQRSWYTVLDLKDAFFCLRLHPTSQPLFAFEWRDPGTGRTGQLTWTRLPQGFKNSPTIFNEALHRDLANFRIQHPQVTLLQYVDDLLLAGATKQDCLEGTKALLLELSDLGYRASAKKAQICRREVTYLGYSLRDGQRWLTEARKKTVVQIPAPTTAKQVREFLGKAGFCRLFIPGFATLAAPLYPLTKPKGEFSWAPEHQKAFDAIKKALLSAPALALPDVTKPFTLYVDERKGVARGVLTQTLGPWRRPVAYLSKKLDPVASGWPVCLKAIAAVAILVKDADKLTLGQNITVIAPHALENIVRQPPDRWMTNARMTHYQSLLLTERVTFAPPAALNPATLLPEETDEPVTHDCHQLLIEETGVRKDLTDIPLTGEVLTWFTDGSSYVVEGKRMAGAAVVDGTRTIWASSLPEGTSAQKAELMALTQALRLAEGKSINIYTDSRYAFATAHVHGAIYKQRGWLTSAGREIKNKEEILSLLEALHLPKRLAIIHCPGHQKAKDPISRGNQMADRVAKQAAQGVNLLPAGKRTADGSEFEKRTADGSEFESPKKKAKVE

SEQ ID NO: 53 - protein, 2088 aa, synthetic construct
MPAAKRVKLDGGDKKYSIGLDIGTNSVGWAVITDEYKVPSKKFKVLGNTDRHSIKKNLIGALLFDSGETAEATRLKRTARRRYTRRKNRICYLQEIFSNEMAKVDDSFFHRLEESFLVEEDKKHERHPIFGNIVDEVAYHEKYPTIYHLRKKLVDSTDKADLRLIYLALAHMIKFRGHFLIEGDLNPDNSDVDKLFIQLVQTYNQLFEENPINASGVDAKAILSARLSKSRRLENLIAQLPGEKKNGLFGNLIALSLGLTPNFKSNFDLAEDAKLQLSKDTYDDDLDNLLAQIGDQYADLFLAAKNLSDAILLSDILRVNTEITKAPLSASMIKRYDEHHQDLTLLKALVRQQLPEKYKEIFFDQSKNGYAGYIDGGASQEEFYKFIKPILEKMDGTEELLVKLNREDLLRKQRTFDNGSIPHQIHLGELHAILRRQEDFYPFLKDNREKIEKILTFRIPYYVGPLARGNSRFAWMTRKSEETITPWNFEEVVDKGASAQSFIERMTNFDKNLPNEKVLPKHSLLYEYFTVYNELTKVKYVTEGMRKPAFLSGEQKKAIVDLLFKTNRKVTVKQLKEDYFKKIECFDSVEISGVEDRFNASLGTYHDLLKIIKDKDFLDNEENEDILEDIVLTLTLFEDREMIEERLKTYAHLFDDKVMKQLKRRRYTGWGRLSRKLINGIRDKQSGKTILDFLKSDGFANRNFMQLIHDDSLTFKEDIQKAQVSGQGDSLHEHIANLAGSPAIKKGILQTVKVVDELVKVMGRHKPENIVIEMARENQTTQKGQKNSRERMKRIEEGIKELGSQILKEHPVENTQLQNEKLYLYYLQNGRDMYVDQELDINRLSDYDVDHIVPQSFLKDDSIDNKVLTRSDKARGKSDNVPSEEVVKKMKNYWRQLLNAKLITQRKFDNLTKAERGGLSELDKAGFIKRQLVETRQITKHVAQILDSRMNTKYDENDKLIREVKVITLKSKLVSDFRKDFQFYKVREINNYHHAHDAYLNAVVGTALIKKYPKLESEFVYGDYKVYDVRKMIAKSEQEIGKATAKYFFYSNIMNFFKTEITLANGEIRKRPLIETNGETGEIVWDKGRDFATVRKVLSMPQVNIVKKTEVQTGGFSKESILPKRNSDKLIARKKDWDPKKYGGFDSPTVAYSVLVVAKVEKGKSKKLKSVKELLGITIMERSSFEKNPIDFLEAKGYKEVKKDLIIKLPKYSLFELENGRKRMLASAGELQKGNELALPSKYVNFLYLASHYEKLKGSPEDNEQKQLFVEQHKHYLDEIIEQISEFSKRVILADANLDKVLSAYNKHRDKPIREQAENIIHLFTLTNLGAPAAFKYFDTTIDRKRYTSTKEVLDATLIHQSITGLYETRIDLSQLGGDGGEAAAKGGGGSSGGLDDEYRLYSPLVKPDQNIQFWLEQFPQAWAETAGMGLAKQVPPQVIQLKASATPVSVRQYPLSKEAQEGIRPHVQRLIQQGILVPVQSPWNTPLLPVRKPGTNDYRPVQDLREVNKRVQDIHPTVPNPYNLLCALPPQRSWYTVLDLKDAFFCLRLHPTSQPLFAFEWRDPGTGRTGQLTWTRLPQGFKNSPTIFNEALHRDLANFRIQHPQVTLLQYVDDLLLAGATKQDCLEGTKALLLELSDLGYRASAKKAQICRREVTYLGYSLRDGQRWLTEARKKTVVQIPAPTTAKQVREFLGKAGFCRLFIPGFATLAAPLYPLTKPKGEFSWAPEHQKAFDAIKKALLSAPALALPDVTKPFTLYVDERKGVARGVLTQTLGPWRRPVAYLSKKLDPVASGWPVCLKAIAAVAILVKDADKLTLGQNITVIAPHALENIVRQPPDRWMTNARMTHYQSLLLTERVTFAPPAALNPATLLPEETDEPVTHDCHQLLIEETGVRKDLTDIPLTGEVLTWFTDGSSYVVEGKRMAGAAVVDGTRTIWASSLPEGTSAQKAELMALTQALRLAEGKSINIYTDSRYAFATAHVHGAIYKQRGWLTSAGREIKNKEEILSLLEALHLPKRLAIIHCPGHQKAKDPISRGNQMADRVAKQAAQGVNLLPAGKRTADGSEFEKRTADGSEFESPKKKAKVE

SEQ ID NO: 54 - protein, 2090 aa, synthetic construct
MPAAKRVKLDGGDKKYSIGLDIGTNSVGWAVITDEYKVPSKKFKVLGNTDRHSIKKNLIGALLFDSGETAEATRLKRTARRRYTRRKNRICYLQEIFSNEMAKVDDSFFHRLEESFLVEEDKKHERHPIFGNIVDEVAYHEKYPTIYHLRKKLVDSTDKADLRLIYLALAHMIKFRGHFLIEGDLNPDNSDVDKLFIQLVQTYNQLFEENPINASGVDAKAILSARLSKSRRLENLIAQLPGEKKNGLFGNLIALSLGLTPNFKSNFDLAEDAKLQLSKDTYDDDLDNLLAQIGDQYADLFLAAKNLSDAILLSDILRVNTEITKAPLSASMIKRYDEHHQDLTLLKALVRQQLPEKYKEIFFDQSKNGYAGYIDGGASQEEFYKFIKPILEKMDGTEELLVKLNREDLLRKQRTFDNGSIPHQIHLGELHAILRRQEDFYPFLKDNREKIEKILTFRIPYYVGPLARGNSRFAWMTRKSEETITPWNFEEVVDKGASAQSFIERMTNFDKNLPNEKVLPKHSLLYEYFTVYNELTKVKYVTEGMRKPAFLSGEQKKAIVDLLFKTNRKVTVKQLKEDYFKKIECFDSVEISGVEDRFNASLGTYHDLLKIIKDKDFLDNEENEDILEDIVLTLTLFEDREMIEERLKTYAHLFDDKVMKQLKRRRYTGWGRLSRKLINGIRDKQSGKTILDFLKSDGFANRNFMQLIHDDSLTFKEDIQKAQVSGQGDSLHEHIANLAGSPAIKKGILQTVKVVDELVKVMGRHKPENIVIEMARENQTTQKGQKNSRERMKRIEEGIKELGSQILKEHPVENTQLQNEKLYLYYLQNGRDMYVDQELDINRLSDYDVDHIVPQSFLKDDSIDNKVLTRSDKARGKSDNVPSEEVVKKMKNYWRQLLNAKLITQRKFDNLTKAERGGLSELDKAGFIKRQLVETRQITKHVAQILDSRMNTKYDENDKLIREVKVITLKSKLVSDFRKDFQFYKVREINNYHHAHDAYLNAVVGTALIKKYPKLESEFVYGDYKVYDVRKMIAKSEQEIGKATAKYFFYSNIMNFFKTEITLANGEIRKRPLIETNGETGEIVWDKGRDFATVRKVLSMPQVNIVKKTEVQTGGFSKESILPKRNSDKLIARKKDWDPKKYGGFDSPTVAYSVLVVAKVEKGKSKKLKSVKELLGITIMERSSFEKNPIDFLEAKGYKEVKKDLIIKLPKYSLFELENGRKRMLASAGELQKGNELALPSKYVNFLYLASHYEKLKGSPEDNEQKQLFVEQHKHYLDEIIEQISEFSKRVILADANLDKVLSAYNKHRDKPIREQAENIIHLFTLTNLGAPAAFKYFDTTIDRKRYTSTKEVLDATLIHQSITGLYETRIDLSQLGGDGGPAPAPAPAPAPAPGGLDDEYRLYSPLVKPDQNIQFWLEQFPQAWAETAGMGLAKQVPPQVIQLKASATPVSVRQYPLSKEAQEGIRPHVQRLIQQGILVPVQSPWNTPLLPVRKPGTNDYRPVQDLREVNKRVQDIHPTVPNPYNLLCALPPQRSWYTVLDLKDAFFCLRLHPTSQPLFAFEWRDPGTGRTGQLTWTRLPQGFKNSPTIFNEALHRDLANFRIQHPQVTLLQYVDDLLLAGATKQDCLEGTKALLLELSDLGYRASAKKAQICRREVTYLGYSLRDGQRWLTEARKKTVVQIPAPTTAKQVREFLGKAGFCRLFIPGFATLAAPLYPLTKPKGEFSWAPEHQKAFDAIKKALLSAPALALPDVTKPFTLYVDERKGVARGVLTQTLGPWRRPVAYLSKKLDPVASGWPVCLKAIAAVAILVKDADKLTLGQNITVIAPHALENIVRQPPDRWMTNARMTHYQSLLLTERVTFAPPAALNPATLLPEETDEPVTHDCHQLLIEETGVRKDLTDIPLTGEVLTWFTDGSSYVVEGKRMAGAAVVDGTRTIWASSLPEGTSAQKAELMALTQALRLAEGKSINIYTDSRYAFATAHVHGAIYKQRGWLTSAGREIKNKEEILSLLEALHLPKRLAIIHCPGHQKAKDPISRGNQMADRVAKQAAQGVNLLPAGKRTADGSEFEKRTADGSEFESPKKKAKVE

SEQ ID NO: 55 - protein, 2087 aa, synthetic construct
MPAAKRVKLDGGDKKYSIGLDIGTNSVGWAVITDEYKVPSKKFKVLGNTDRHSIKKNLIGALLFDSGETAEATRLKRTARRRYTRRKNRICYLQEIFSNEMAKVDDSFFHRLEESFLVEEDKKHERHPIFGNIVDEVAYHEKYPTIYHLRKKLVDSTDKADLRLIYLALAHMIKFRGHFLIEGDLNPDNSDVDKLFIQLVQTYNQLFEENPINASGVDAKAILSARLSKSRRLENLIAQLPGEKKNGLFGNLIALSLGLTPNFKSNFDLAEDAKLQLSKDTYDDDLDNLLAQIGDQYADLFLAAKNLSDAILLSDILRVNTEITKAPLSASMIKRYDEHHQDLTLLKALVRQQLPEKYKEIFFDQSKNGYAGYIDGGASQEEFYKFIKPILEKMDGTEELLVKLNREDLLRKQRTFDNGSIPHQIHLGELHAILRRQEDFYPFLKDNREKIEKILTFRIPYYVGPLARGNSRFAWMTRKSEETITPWNFEEVVDKGASAQSFIERMTNFDKNLPNEKVLPKHSLLYEYFTVYNELTKVKYVTEGMRKPAFLSGEQKKAIVDLLFKTNRKVTVKQLKEDYFKKIECFDSVEISGVEDRFNASLGTYHDLLKIIKDKDFLDNEENEDILEDIVLTLTLFEDREMIEERLKTYAHLFDDKVMKQLKRRRYTGWGRLSRKLINGIRDKQSGKTILDFLKSDGFANRNFMQLIHDDSLTFKEDIQKAQVSGQGDSLHEHIANLAGSPAIKKGILQTVKVVDELVKVMGRHKPENIVIEMARENQTTQKGQKNSRERMKRIEEGIKELGSQILKEHPVENTQLQNEKLYLYYLQNGRDMYVDQELDINRLSDYDVDHIVPQSFLKDDSIDNKVLTRSDKARGKSDNVPSEEVVKKMKNYWRQLLNAKLITQRKFDNLTKAERGGLSELDKAGFIKRQLVETRQITKHVAQILDSRMNTKYDENDKLIREVKVITLKSKLVSDFRKDFQFYKVREINNYHHAHDAYLNAVVGTALIKKYPKLESEFVYGDYKVYDVRKMIAKSEQEIGKATAKYFFYSNIMNFFKTEITLANGEIRKRPLIETNGETGEIVWDKGRDFATVRKVLSMPQVNIVKKTEVQTGGFSKESILPKRNSDKLIARKKDWDPKKYGGFDSPTVAYSVLVVAKVEKGKSKKLKSVKELLGITIMERSSFEKNPIDFLEAKGYKEVKKDLIIKLPKYSLFELENGRKRMLASAGELQKGNELALPSKYVNFLYLASHYEKLKGSPEDNEQKQLFVEQHKHYLDEIIEQISEFSKRVILADANLDKVLSAYNKHRDKPIREQAENIIHLFTLTNLGAPAAFKYFDTTIDRKRYTSTKEVLDATLIHQSITGLYETRIDLSQLGGDGGGGGGSGGGGSGGLDDEYRLYSPLVKPDQNIQFWLEQFPQAWAETAGMGLAKQVPPQVIQLKASATPVSVRQYPLSKEAQEGIRPHVQRLIQQGILVPVQSPWNTPLLPVRKPGTNDYRPVQDLREVNKRVQDIHPTVPNPYNLLCALPPQRSWYTVLDLKDAFFCLRLHPTSQPLFAFEWRDPGTGRTGQLTWTRLPQGFKNSPTIFNEALHRDLANFRIQHPQVTLLQYVDDLLLAGATKQDCLEGTKALLLELSDLGYRASAKKAQICRREVTYLGYSLRDGQRWLTEARKKTVVQIPAPTTAKQVREFLGKAGFCRLFIPGFATLAAPLYPLTKPKGEFSWAPEHQKAFDAIKKALLSAPALALPDVTKPFTLYVDERKGVARGVLTQTLGPWRRPVAYLSKKLDPVASGWPVCLKAIAAVAILVKDADKLTLGQNITVIAPHALENIVRQPPDRWMTNARMTHYQSLLLTERVTFAPPAALNPATLLPEETDEPVTHDCHQLLIEETGVRKDLTDIPLTGEVLTWFTDGSSYVVEGKRMAGAAVVDGTRTIWASSLPEGTSAQKAELMALTQALRLAEGKSINIYTDSRYAFATAHVHGAIYKQRGWLTSAGREIKNKEEILSLLEALHLPKRLAIIHCPGHQKAKDPISRGNQMADRVAKQAAQGVNLLPAGKRTADGSEFEKRTADGSEFESPKKKAKVE

SEQ ID NO: 56 - protein, 2092 aa, synthetic construct
MPAAKRVKLDGGDKKYSIGLDIGTNSVGWAVITDEYKVPSKKFKVLGNTDRHSIKKNLIGALLFDSGETAEATRLKRTARRRYTRRKNRICYLQEIFSNEMAKVDDSFFHRLEESFLVEEDKKHERHPIFGNIVDEVAYHEKYPTIYHLRKKLVDSTDKADLRLIYLALAHMIKFRGHFLIEGDLNPDNSDVDKLFIQLVQTYNQLFEENPINASGVDAKAILSARLSKSRRLENLIAQLPGEKKNGLFGNLIALSLGLTPNFKSNFDLAEDAKLQLSKDTYDDDLDNLLAQIGDQYADLFLAAKNLSDAILLSDILRVNTEITKAPLSASMIKRYDEHHQDLTLLKALVRQQLPEKYKEIFFDQSKNGYAGYIDGGASQEEFYKFIKPILEKMDGTEELLVKLNREDLLRKQRTFDNGSIPHQIHLGELHAILRRQEDFYPFLKDNREKIEKILTFRIPYYVGPLARGNSRFAWMTRKSEETITPWNFEEVVDKGASAQSFIERMTNFDKNLPNEKVLPKHSLLYEYFTVYNELTKVKYVTEGMRKPAFLSGEQKKAIVDLLFKTNRKVTVKQLKEDYFKKIECFDSVEISGVEDRFNASLGTYHDLLKIIKDKDFLDNEENEDILEDIVLTLTLFEDREMIEERLKTYAHLFDDKVMKQLKRRRYTGWGRLSRKLINGIRDKQSGKTILDFLKSDGFANRNFMQLIHDDSLTFKEDIQKAQVSGQGDSLHEHIANLAGSPAIKKGILQTVKVVDELVKVMGRHKPENIVIEMARENQTTQKGQKNSRERMKRIEEGIKELGSQILKEHPVENTQLQNEKLYLYYLQNGRDMYVDQELDINRLSDYDVDHIVPQSFLKDDSIDNKVLTRSDKARGKSDNVPSEEVVKKMKNYWRQLLNAKLITQRKFDNLTKAERGGLSELDKAGFIKRQLVETRQITKHVAQILDSRMNTKYDENDKLIREVKVITLKSKLVSDFRKDFQFYKVREINNYHHAHDAYLNAVVGTALIKKYPKLESEFVYGDYKVYDVRKMIAKSEQEIGKATAKYFFYSNIMNFFKTEITLANGEIRKRPLIETNGETGEIVWDKGRDFATVRKVLSMPQVNIVKKTEVQTGGFSKESILPKRNSDKLIARKKDWDPKKYGGFDSPTVAYSVLVVAKVEKGKSKKLKSVKELLGITIMERSSFEKNPIDFLEAKGYKEVKKDLIIKLPKYSLFELENGRKRMLASAGELQKGNELALPSKYVNFLYLASHYEKLKGSPEDNEQKQLFVEQHKHYLDEIIEQISEFSKRVILADANLDKVLSAYNKHRDKPIREQAENIIHLFTLTNLGAPAAFKYFDTTIDRKRYTSTKEVLDATLIHQSITGLYETRIDLSQLGGDGGEAAAKGGGGSEAAAKGGLDDEYRLYSPLVKPDQNIQFWLEQFPQAWAETAGMGLAKQVPPQVIQLKASATPVSVRQYPLSKEAQEGIRPHVQRLIQQGILVPVQSPWNTPLLPVRKPGTNDYRPVQDLREVNKRVQDIHPTVPNPYNLLCALPPQRSWYTVLDLKDAFFCLRLHPTSQPLFAFEWRDPGTGRTGQLTWTRLPQGFKNSPTIFNEALHRDLANFRIQHPQVTLLQYVDDLLLAGATKQDCLEGTKALLLELSDLGYRASAKKAQICRREVTYLGYSLRDGQRWLTEARKKTVVQIPAPTTAKQVREFLGKAGFCRLFIPGFATLAAPLYPLTKPKGEFSWAPEHQKAFDAIKKALLSAPALALPDVTKPFTLYVDERKGVARGVLTQTLGPWRRPVAYLSKKLDPVASGWPVCLKAIAAVAILVKDADKLTLGQNITVIAPHALENIVRQPPDRWMTNARMTHYQSLLLTERVTFAPPAALNPATLLPEETDEPVTHDCHQLLIEETGVRKDLTDIPLTGEVLTWFTDGSSYVVEGKRMAGAAVVDGTRTIWASSLPEGTSAQKAELMALTQALRLAEGKSINIYTDSRYAFATAHVHGAIYKQRGWLTSAGREIKNKEEILSLLEALHLPKRLAIIHCPGHQKAKDPISRGNQMADRVAKQAAQGVNLLPAGKRTADGSEFEKRTADGSEFESPKKKAKVE

SEQ ID NO: 57 - protein, 2085 aa, synthetic construct
MPAAKRVKLDGGDKKYSIGLDIGTNSVGWAVITDEYKVPSKKFKVLGNTDRHSIKKNLIGALLFDSGETAEATRLKRTARRRYTRRKNRICYLQEIFSNEMAKVDDSFFHRLEESFLVEEDKKHERHPIFGNIVDEVAYHEKYPTIYHLRKKLVDSTDKADLRLIYLALAHMIKFRGHFLIEGDLNPDNSDVDKLFIQLVQTYNQLFEENPINASGVDAKAILSARLSKSRRLENLIAQLPGEKKNGLFGNLIALSLGLTPNFKSNFDLAEDAKLQLSKDTYDDDLDNLLAQIGDQYADLFLAAKNLSDAILLSDILRVNTEITKAPLSASMIKRYDEHHQDLTLLKALVRQQLPEKYKEIFFDQSKNGYAGYIDGGASQEEFYKFIKPILEKMDGTEELLVKLNREDLLRKQRTFDNGSIPHQIHLGELHAILRRQEDFYPFLKDNREKIEKILTFRIPYYVGPLARGNSRFAWMTRKSEETITPWNFEEVVDKGASAQSFIERMTNFDKNLPNEKVLPKHSLLYEYFTVYNELTKVKYVTEGMRKPAFLSGEQKKAIVDLLFKTNRKVTVKQLKEDYFKKIECFDSVEISGVEDRFNASLGTYHDLLKIIKDKDFLDNEENEDILEDIVLTLTLFEDREMIEERLKTYAHLFDDKVMKQLKRRRYTGWGRLSRKLINGIRDKQSGKTILDFLKSDGFANRNFMQLIHDDSLTFKEDIQKAQVSGQGDSLHEHIANLAGSPAIKKGILQTVKVVDELVKVMGRHKPENIVIEMARENQTTQKGQKNSRERMKRIEEGIKELGSQILKEHPVENTQLQNEKLYLYYLQNGRDMYVDQELDINRLSDYDVDHIVPQSFLKDDSIDNKVLTRSDKARGKSDNVPSEEVVKKMKNYWRQLLNAKLITQRKFDNLTKAERGGLSELDKAGFIKRQLVETRQITKHVAQILDSRMNTKYDENDKLIREVKVITLKSKLVSDFRKDFQFYKVREINNYHHAHDAYLNAVVGTALIKKYPKLESEFVYGDYKVYDVRKMIAKSEQEIGKATAKYFFYSNIMNFFKTEITLANGEIRKRPLIETNGETGEIVWDKGRDFATVRKVLSMPQVNIVKKTEVQTGGFSKESILPKRNSDKLIARKKDWDPKKYGGFDSPTVAYSVLVVAKVEKGKSKKLKSVKELLGITIMERSSFEKNPIDFLEAKGYKEVKKDLIIKLPKYSLFELENGRKRMLASAGELQKGNELALPSKYVNFLYLASHYEKLKGSPEDNEQKQLFVEQHKHYLDEIIEQISEFSKRVILADANLDKVLSAYNKHRDKPIREQAENIIHLFTLTNLGAPAAFKYFDTTIDRKRYTSTKEVLDATLIHQSITGLYETRIDLSQLGGDGGGGGGGGGGGGLDDEYRLYSPLVKPDQNIQFWLEQFPQAWAETAGMGLAKQVPPQVIQLKASATPVSVRQYPLSKEAQEGIRPHVQRLIQQGILVPVQSPWNTPLLPVRKPGTNDYRPVQDLREVNKRVQDIHPTVPNPYNLLCALPPQRSWYTVLDLKDAFFCLRLHPTSQPLFAFEWRDPGTGRTGQLTWTRLPQGFKNSPTIFNEALHRDLANFRIQHPQVTLLQYVDDLLLAGATKQDCLEGTKALLLELSDLGYRASAKKAQICRREVTYLGYSLRDGQRWLTEARKKTVVQIPAPTTAKQVREFLGKAGFCRLFIPGFATLAAPLYPLTKPKGEFSWAPEHQKAFDAIKKALLSAPALALPDVTKPFTLYVDERKGVARGVLTQTLGPWRRPVAYLSKKLDPVASGWPVCLKAIAAVAILVKDADKLTLGQNITVIAPHALENIVRQPPDRWMTNARMTHYQSLLLTERVTFAPPAALNPATLLPEETDEPVTHDCHQLLIEETGVRKDLTDIPLTGEVLTWFTDGSSYVVEGKRMAGAAVVDGTRTIWASSLPEGTSAQKAELMALTQALRLAEGKSINIYTDSRYAFATAHVHGAIYKQRGWLTSAGREIKNKEEILSLLEALHLPKRLAIIHCPGHQKAKDPISRGNQMADRVAKQAAQGVNLLPAGKRTADGSEFEKRTADGSEFESPKKKAKVE

SEQ ID NO: 58 - protein, 2086 aa, synthetic construct
MPAAKRVKLDGGDKKYSIGLDIGTNSVGWAVITDEYKVPSKKFKVLGNTDRHSIKKNLIGALLFDSGETAEATRLKRTARRRYTRRKNRICYLQEIFSNEMAKVDDSFFHRLEESFLVEEDKKHERHPIFGNIVDEVAYHEKYPTIYHLRKKLVDSTDKADLRLIYLALAHMIKFRGHFLIEGDLNPDNSDVDKLFIQLVQTYNQLFEENPINASGVDAKAILSARLSKSRRLENLIAQLPGEKKNGLFGNLIALSLGLTPNFKSNFDLAEDAKLQLSKDTYDDDLDNLLAQIGDQYADLFLAAKNLSDAILLSDILRVNTEITKAPLSASMIKRYDEHHQDLTLLKALVRQQLPEKYKEIFFDQSKNGYAGYIDGGASQEEFYKFIKPILEKMDGTEELLVKLNREDLLRKQRTFDNGSIPHQIHLGELHAILRRQEDFYPFLKDNREKIEKILTFRIPYYVGPLARGNSRFAWMTRKSEETITPWNFEEVVDKGASAQSFIERMTNFDKNLPNEKVLPKHSLLYEYFTVYNELTKVKYVTEGMRKPAFLSGEQKKAIVDLLFKTNRKVTVKQLKEDYFKKIECFDSVEISGVEDRFNASLGTYHDLLKIIKDKDFLDNEENEDILEDIVLTLTLFEDREMIEERLKTYAHLFDDKVMKQLKRRRYTGWGRLSRKLINGIRDKQSGKTILDFLKSDGFANRNFMQLIHDDSLTFKEDIQKAQVSGQGDSLHEHIANLAGSPAIKKGILQTVKVVDELVKVMGRHKPENIVIEMARENQTTQKGQKNSRERMKRIEEGIKELGSQILKEHPVENTQLQNEKLYLYYLQNGRDMYVDQELDINRLSDYDVDHIVPQSFLKDDSIDNKVLTRSDKARGKSDNVPSEEVVKKMKNYWRQLLNAKLITQRKFDNLTKAERGGLSELDKAGFIKRQLVETRQITKHVAQILDSRMNTKYDENDKLIREVKVITLKSKLVSDFRKDFQFYKVREINNYHHAHDAYLNAVVGTALIKKYPKLESEFVYGDYKVYDVRKMIAKSEQEIGKATAKYFFYSNIMNFFKTEITLANGEIRKRPLIETNGETGEIVWDKGRDFATVRKVLSMPQVNIVKKTEVQTGGFSKESILPKRNSDKLIARKKDWDPKKYGGFDSPTVAYSVLVVAKVEKGKSKKLKSVKELLGITIMERSSFEKNPIDFLEAKGYKEVKKDLIIKLPKYSLFELENGRKRMLASAGELQKGNELALPSKYVNFLYLASHYEKLKGSPEDNEQKQLFVEQHKHYLDEIIEQISEFSKRVILADANLDKVLSAYNKHRDKPIREQAENIIHLFTLTNLGAPAAFKYFDTTIDRKRYTSTKEVLDATLIHQSITGLYETRIDLSQLGGDGGGGSPAPGGGGGLDDEYRLYSPLVKPDQNIQFWLEQFPQAWAETAGMGLAKQVPPQVIQLKASATPVSVRQYPLSKEAQEGIRPHVQRLIQQGILVPVQSPWNTPLLPVRKPGTNDYRPVQDLREVNKRVQDIHPTVPNPYNLLCALPPQRSWYTVLDLKDAFFCLRLHPTSQPLFAFEWRDPGTGRTGQLTWTRLPQGFKNSPTIFNEALHRDLANFRIQHPQVTLLQYVDDLLLAGATKQDCLEGTKALLLELSDLGYRASAKKAQICRREVTYLGYSLRDGQRWLTEARKKTVVQIPAPTTAKQVREFLGKAGFCRLFIPGFATLAAPLYPLTKPKGEFSWAPEHQKAFDAIKKALLSAPALALPDVTKPFTLYVDERKGVARGVLTQTLGPWRRPVAYLSKKLDPVASGWPVCLKAIAAVAILVKDADKLTLGQNITVIAPHALENIVRQPPDRWMTNARMTHYQSLLLTERVTFAPPAALNPATLLPEETDEPVTHDCHQLLIEETGVRKDLTDIPLTGEVLTWFTDGSSYVVEGKRMAGAAVVDGTRTIWASSLPEGTSAQKAELMALTQALRLAEGKSINIYTDSRYAFATAHVHGAIYKQRGWLTSAGREIKNKEEILSLLEALHLPKRLAIIHCPGHQKAKDPISRGNQMADRVAKQAAQGVNLLPAGKRTADGSEFEKRTADGSEFESPKKKAKVE

SEQ ID NO: 59 - protein, 2083 aa, synthetic construct
MPAAKRVKLDGGDKKYSIGLDIGTNSVGWAVITDEYKVPSKKFKVLGNTDRHSIKKNLIGALLFDSGETAEATRLKRTARRRYTRRKNRICYLQEIFSNEMAKVDDSFFHRLEESFLVEEDKKHERHPIFGNIVDEVAYHEKYPTIYHLRKKLVDSTDKADLRLIYLALAHMIKFRGHFLIEGDLNPDNSDVDKLFIQLVQTYNQLFEENPINASGVDAKAILSARLSKSRRLENLIAQLPGEKKNGLFGNLIALSLGLTPNFKSNFDLAEDAKLQLSKDTYDDDLDNLLAQIGDQYADLFLAAKNLSDAILLSDILRVNTEITKAPLSASMIKRYDEHHQDLTLLKALVRQQLPEKYKEIFFDQSKNGYAGYIDGGASQEEFYKFIKPILEKMDGTEELLVKLNREDLLRKQRTFDNGSIPHQIHLGELHAILRRQEDFYPFLKDNREKIEKILTFRIPYYVGPLARGNSRFAWMTRKSEETITPWNFEEVVDKGASAQSFIERMTNFDKNLPNEKVLPKHSLLYEYFTVYNELTKVKYVTEGMRKPAFLSGEQKKAIVDLLFKTNRKVTVKQLKEDYFKKIECFDSVEISGVEDRFNASLGTYHDLLKIIKDKDFLDNEENEDILEDIVLTLTLFEDREMIEERLKTYAHLFDDKVMKQLKRRRYTGWGRLSRKLINGIRDKQSGKTILDFLKSDGFANRNFMQLIHDDSLTFKEDIQKAQVSGQGDSLHEHIANLAGSPAIKKGILQTVKVVDELVKVMGRHKPENIVIEMARENQTTQKGQKNSRERMKRIEEGIKELGSQILKEHPVENTQLQNEKLYLYYLQNGRDMYVDQELDINRLSDYDVDHIVPQSFLKDDSIDNKVLTRSDKARGKSDNVPSEEVVKKMKNYWRQLLNAKLITQRKFDNLTKAERGGLSELDKAGFIKRQLVETRQITKHVAQILDSRMNTKYDENDKLIREVKVITLKSKLVSDFRKDFQFYKVREINNYHHAHDAYLNAVVGTALIKKYPKLESEFVYGDYKVYDVRKMIAKSEQEIGKATAKYFFYSNIMNFFKTEITLANGEIRKRPLIETNGETGEIVWDKGRDFATVRKVLSMPQVNIVKKTEVQTGGFSKESILPKRNSDKLIARKKDWDPKKYGGFDSPTVAYSVLVVAKVEKGKSKKLKSVKELLGITIMERSSFEKNPIDFLEAKGYKEVKKDLIIKLPKYSLFELENGRKRMLASAGELQKGNELALPSKYVNFLYLASHYEKLKGSPEDNEQKQLFVEQHKHYLDEIIEQISEFSKRVILADANLDKVLSAYNKHRDKPIREQAENIIHLFTLTNLGAPAAFKYFDTTIDRKRYTSTKEVLDATLIHQSITGLYETRIDLSQLGGDGGGGGGGGGGLDDEYRLYSPLVKPDQNIQFWLEQFPQAWAETAGMGLAKQVPPQVIQLKASATPVSVRQYPLSKEAQEGIRPHVQRLIQQGILVPVQSPWNTPLLPVRKPGTNDYRPVQDLREVNKRVQDIHPTVPNPYNLLCALPPQRSWYTVLDLKDAFFCLRLHPTSQPLFAFEWRDPGTGRTGQLTWTRLPQGFKNSPTIFNEALHRDLANFRIQHPQVTLLQYVDDLLLAGATKQDCLEGTKALLLELSDLGYRASAKKAQICRREVTYLGYSLRDGQRWLTEARKKTVVQIPAPTTAKQVREFLGKAGFCRLFIPGFATLAAPLYPLTKPKGEFSWAPEHQKAFDAIKKALLSAPALALPDVTKPFTLYVDERKGVARGVLTQTLGPWRRPVAYLSKKLDPVASGWPVCLKAIAAVAILVKDADKLTLGQNITVIAPHALENIVRQPPDRWMTNARMTHYQSLLLTERVTFAPPAALNPATLLPEETDEPVTHDCHQLLIEETGVRKDLTDIPLTGEVLTWFTDGSSYVVEGKRMAGAAVVDGTRTIWASSLPEGTSAQKAELMALTQALRLAEGKSINIYTDSRYAFATAHVHGAIYKQRGWLTSAGREIKNKEEILSLLEALHLPKRLAIIHCPGHQKAKDPISRGNQMADRVAKQAAQGVNLLPAGKRTADGSEFEKRTADGSEFESPKKKAKVE

SEQ ID NO: 60 - protein, 2086 aa, synthetic construct
MPAAKRVKLDGGDKKYSIGLDIGTNSVGWAVITDEYKVPSKKFKVLGNTDRHSIKKNLIGALLFDSGETAEATRLKRTARRRYTRRKNRICYLQEIFSNEMAKVDDSFFHRLEESFLVEEDKKHERHPIFGNIVDEVAYHEKYPTIYHLRKKLVDSTDKADLRLIYLALAHMIKFRGHFLIEGDLNPDNSDVDKLFIQLVQTYNQLFEENPINASGVDAKAILSARLSKSRRLENLIAQLPGEKKNGLFGNLIALSLGLTPNFKSNFDLAEDAKLQLSKDTYDDDLDNLLAQIGDQYADLFLAAKNLSDAILLSDILRVNTEITKAPLSASMIKRYDEHHQDLTLLKALVRQQLPEKYKEIFFDQSKNGYAGYIDGGASQEEFYKFIKPILEKMDGTEELLVKLNREDLLRKQRTFDNGSIPHQIHLGELHAILRRQEDFYPFLKDNREKIEKILTFRIPYYVGPLARGNSRFAWMTRKSEETITPWNFEEVVDKGASAQSFIERMTNFDKNLPNEKVLPKHSLLYEYFTVYNELTKVKYVTEGMRKPAFLSGEQKKAIVDLLFKTNRKVTVKQLKEDYFKKIECFDSVEISGVEDRFNASLGTYHDLLKIIKDKDFLDNEENEDILEDIVLTLTLFEDREMIEERLKTYAHLFDDKVMKQLKRRRYTGWGRLSRKLINGIRDKQSGKTILDFLKSDGFANRNFMQLIHDDSLTFKEDIQKAQVSGQGDSLHEHIANLAGSPAIKKGILQTVKVVDELVKVMGRHKPENIVIEMARENQTTQKGQKNSRERMKRIEEGIKELGSQILKEHPVENTQLQNEKLYLYYLQNGRDMYVDQELDINRLSDYDVDHIVPQSFLKDDSIDNKVLTRSDKARGKSDNVPSEEVVKKMKNYWRQLLNAKLITQRKFDNLTKAERGGLSELDKAGFIKRQLVETRQITKHVAQILDSRMNTKYDENDKLIREVKVITLKSKLVSDFRKDFQFYKVREINNYHHAHDAYLNAVVGTALIKKYPKLESEFVYGDYKVYDVRKMIAKSEQEIGKATAKYFFYSNIMNFFKTEITLANGEIRKRPLIETNGETGEIVWDKGRDFATVRKVLSMPQVNIVKKTEVQTGGFSKESILPKRNSDKLIARKKDWDPKKYGGFDSPTVAYSVLVVAKVEKGKSKKLKSVKELLGITIMERSSFEKNPIDFLEAKGYKEVKKDLIIKLPKYSLFELENGRKRMLASAGELQKGNELALPSKYVNFLYLASHYEKLKGSPEDNEQKQLFVEQHKHYLDEIIEQISEFSKRVILADANLDKVLSAYNKHRDKPIREQAENIIHLFTLTNLGAPAAFKYFDTTIDRKRYTSTKEVLDATLIHQSITGLYETRIDLSQLGGDGGPAPGGSGSSGGLDDEYRLYSPLVKPDQNIQFWLEQFPQAWAETAGMGLAKQVPPQVIQLKASATPVSVRQYPLSKEAQEGIRPHVQRLIQQGILVPVQSPWNTPLLPVRKPGTNDYRPVQDLREVNKRVQDIHPTVPNPYNLLCALPPQRSWYTVLDLKDAFFCLRLHPTSQPLFAFEWRDPGTGRTGQLTWTRLPQGFKNSPTIFNEALHRDLANFRIQHPQVTLLQYVDDLLLAGATKQDCLEGTKALLLELSDLGYRASAKKAQICRREVTYLGYSLRDGQRWLTEARKKTVVQIPAPTTAKQVREFLGKAGFCRLFIPGFATLAAPLYPLTKPKGEFSWAPEHQKAFDAIKKALLSAPALALPDVTKPFTLYVDERKGVARGVLTQTLGPWRRPVAYLSKKLDPVASGWPVCLKAIAAVAILVKDADKLTLGQNITVIAPHALENIVRQPPDRWMTNARMTHYQSLLLTERVTFAPPAALNPATLLPEETDEPVTHDCHQLLIEETGVRKDLTDIPLTGEVLTWFTDGSSYVVEGKRMAGAAVVDGTRTIWASSLPEGTSAQKAELMALTQALRLAEGKSINIYTDSRYAFATAHVHGAIYKQRGWLTSAGREIKNKEEILSLLEALHLPKRLAIIHCPGHQKAKDPISRGNQMADRVAKQAAQGVNLLPAGKRTADGSEFEKRTADGSEFESPKKKAKVE

SEQ ID NO: 61 - protein, 2083 aa, synthetic construct
MPAAKRVKLDGGDKKYSIGLDIGTNSVGWAVITDEYKVPSKKFKVLGNTDRHSIKKNLIGALLFDSGETAEATRLKRTARRRYTRRKNRICYLQEIFSNEMAKVDDSFFHRLEESFLVEEDKKHERHPIFGNIVDEVAYHEKYPTIYHLRKKLVDSTDKADLRLIYLALAHMIKFRGHFLIEGDLNPDNSDVDKLFIQLVQTYNQLFEENPINASGVDAKAILSARLSKSRRLENLIAQLPGEKKNGLFGNLIALSLGLTPNFKSNFDLAEDAKLQLSKDTYDDDLDNLLAQIGDQYADLFLAAKNLSDAILLSDILRVNTEITKAPLSASMIKRYDEHHQDLTLLKALVRQQLPEKYKEIFFDQSKNGYAGYIDGGASQEEFYKFIKPILEKMDGTEELLVKLNREDLLRKQRTFDNGSIPHQIHLGELHAILRRQEDFYPFLKDNREKIEKILTFRIPYYVGPLARGNSRFAWMTRKSEETITPWNFEEVVDKGASAQSFIERMTNFDKNLPNEKVLPKHSLLYEYFTVYNELTKVKYVTEGMRKPAFLSGEQKKAIVDLLFKTNRKVTVKQLKEDYFKKIECFDSVEISGVEDRFNASLGTYHDLLKIIKDKDFLDNEENEDILEDIVLTLTLFEDREMIEERLKTYAHLFDDKVMKQLKRRRYTGWGRLSRKLINGIRDKQSGKTILDFLKSDGFANRNFMQLIHDDSLTFKEDIQKAQVSGQGDSLHEHIANLAGSPAIKKGILQTVKVVDELVKVMGRHKPENIVIEMARENQTTQKGQKNSRERMKRIEEGIKELGSQILKEHPVENTQLQNEKLYLYYLQNGRDMYVDQELDINRLSDYDVDHIVPQSFLKDDSIDNKVLTRSDKARGKSDNVPSEEVVKKMKNYWRQLLNAKLITQRKFDNLTKAERGGLSELDKAGFIKRQLVETRQITKHVAQILDSRMNTKYDENDKLIREVKVITLKSKLVSDFRKDFQFYKVREINNYHHAHDAYLNAVVGTALIKKYPKLESEFVYGDYKVYDVRKMIAKSEQEIGKATAKYFFYSNIMNFFKTEITLANGEIRKRPLIETNGETGEIVWDKGRDFATVRKVLSMPQVNIVKKTEVQTGGFSKESILPKRNSDKLIARKKDWDPKKYGGFDSPTVAYSVLVVAKVEKGKSKKLKSVKELLGITIMERSSFEKNPIDFLEAKGYKEVKKDLIIKLPKYSLFELENGRKRMLASAGELQKGNELALPSKYVNFLYLASHYEKLKGSPEDNEQKQLFVEQHKHYLDEIIEQISEFSKRVILADANLDKVLSAYNKHRDKPIREQAENIIHLFTLTNLGAPAAFKYFDTTIDRKRYTSTKEVLDATLIHQSITGLYETRIDLSQLGGDGGPAPGSSGGLDDEYRLYSPLVKPDQNIQFWLEQFPQAWAETAGMGLAKQVPPQVIQLKASATPVSVRQYPLSKEAQEGIRPHVQRLIQQGILVPVQSPWNTPLLPVRKPGTNDYRPVQDLREVNKRVQDIHPTVPNPYNLLCALPPQRSWYTVLDLKDAFFCLRLHPTSQPLFAFEWRDPGTGRTGQLTWTRLPQGFKNSPTIFNEALHRDLANFRIQHPQVTLLQYVDDLLLAGATKQDCLEGTKALLLELSDLGYRASAKKAQICRREVTYLGYSLRDGQRWLTEARKKTVVQIPAPTTAKQVREFLGKAGFCRLFIPGFATLAAPLYPLTKPKGEFSWAPEHQKAFDAIKKALLSAPALALPDVTKPFTLYVDERKGVARGVLTQTLGPWRRPVAYLSKKLDPVASGWPVCLKAIAAVAILVKDADKLTLGQNITVIAPHALENIVRQPPDRWMTNARMTHYQSLLLTERVTFAPPAALNPATLLPEETDEPVTHDCHQLLIEETGVRKDLTDIPLTGEVLTWFTDGSSYVVEGKRMAGAAVVDGTRTIWASSLPEGTSAQKAELMALTQALRLAEGKSINIYTDSRYAFATAHVHGAIYKQRGWLTSAGREIKNKEEILSLLEALHLPKRLAIIHCPGHQKAKDPISRGNQMADRVAKQAAQGVNLLPAGKRTADGSEFEKRTADGSEFESPKKKAKVE

SEQ ID NO: 62 - protein, 2088 aa, synthetic construct
MPAAKRVKLDGGDKKYSIGLDIGTNSVGWAVITDEYKVPSKKFKVLGNTDRHSIKKNLIGALLFDSGETAEATRLKRTARRRYTRRKNRICYLQEIFSNEMAKVDDSFFHRLEESFLVEEDKKHERHPIFGNIVDEVAYHEKYPTIYHLRKKLVDSTDKADLRLIYLALAHMIKFRGHFLIEGDLNPDNSDVDKLFIQLVQTYNQLFEENPINASGVDAKAILSARLSKSRRLENLIAQLPGEKKNGLFGNLIALSLGLTPNFKSNFDLAEDAKLQLSKDTYDDDLDNLLAQIGDQYADLFLAAKNLSDAILLSDILRVNTEITKAPLSASMIKRYDEHHQDLTLLKALVRQQLPEKYKEIFFDQSKNGYAGYIDGGASQEEFYKFIKPILEKMDGTEELLVKLNREDLLRKQRTFDNGSIPHQIHLGELHAILRRQEDFYPFLKDNREKIEKILTFRIPYYVGPLARGNSRFAWMTRKSEETITPWNFEEVVDKGASAQSFIERMTNFDKNLPNEKVLPKHSLLYEYFTVYNELTKVKYVTEGMRKPAFLSGEQKKAIVDLLFKTNRKVTVKQLKEDYFKKIECFDSVEISGVEDRFNASLGTYHDLLKIIKDKDFLDNEENEDILEDIVLTLTLFEDREMIEERLKTYAHLFDDKVMKQLKRRRYTGWGRLSRKLINGIRDKQSGKTILDFLKSDGFANRNFMQLIHDDSLTFKEDIQKAQVSGQGDSLHEHIANLAGSPAIKKGILQTVKVVDELVKVMGRHKPENIVIEMARENQTTQKGQKNSRERMKRIEEGIKELGSQILKEHPVENTQLQNEKLYLYYLQNGRDMYVDQELDINRLSDYDVDHIVPQSFLKDDSIDNKVLTRSDKARGKSDNVPSEEVVKKMKNYWRQLLNAKLITQRKFDNLTKAERGGLSELDKAGFIKRQLVETRQITKHVAQILDSRMNTKYDENDKLIREVKVITLKSKLVSDFRKDFQFYKVREINNYHHAHDAYLNAVVGTALIKKYPKLESEFVYGDYKVYDVRKMIAKSEQEIGKATAKYFFYSNIMNFFKTEITLANGEIRKRPLIETNGETGEIVWDKGRDFATVRKVLSMPQVNIVKKTEVQTGGFSKESILPKRNSDKLIARKKDWDPKKYGGFDSPTVAYSVLVVAKVEKGKSKKLKSVKELLGITIMERSSFEKNPIDFLEAKGYKEVKKDLIIKLPKYSLFELENGRKRMLASAGELQKGNELALPSKYVNFLYLASHYEKLKGSPEDNEQKQLFVEQHKHYLDEIIEQISEFSKRVILADANLDKVLSAYNKHRDKPIREQAENIIHLFTLTNLGAPAAFKYFDTTIDRKRYTSTKEVLDATLIHQSITGLYETRIDLSQLGGDGGPAPAPAPAPAPGGLDDEYRLYSPLVKPDQNIQFWLEQFPQAWAETAGMGLAKQVPPQVIQLKASATPVSVRQYPLSKEAQEGIRPHVQRLIQQGILVPVQSPWNTPLLPVRKPGTNDYRPVQDLREVNKRVQDIHPTVPNPYNLLCALPPQRSWYTVLDLKDAFFCLRLHPTSQPLFAFEWRDPGTGRTGQLTWTRLPQGFKNSPTIFNEALHRDLANFRIQHPQVTLLQYVDDLLLAGATKQDCLEGTKALLLELSDLGYRASAKKAQICRREVTYLGYSLRDGQRWLTEARKKTVVQIPAPTTAKQVREFLGKAGFCRLFIPGFATLAAPLYPLTKPKGEFSWAPEHQKAFDAIKKALLSAPALALPDVTKPFTLYVDERKGVARGVLTQTLGPWRRPVAYLSKKLDPVASGWPVCLKAIAAVAILVKDADKLTLGQNITVIAPHALENIVRQPPDRWMTNARMTHYQSLLLTERVTFAPPAALNPATLLPEETDEPVTHDCHQLLIEETGVRKDLTDIPLTGEVLTWFTDGSSYVVEGKRMAGAAVVDGTRTIWASSLPEGTSAQKAELMALTQALRLAEGKSINIYTDSRYAFATAHVHGAIYKQRGWLTSAGREIKNKEEILSLLEALHLPKRLAIIHCPGHQKAKDPISRGNQMADRVAKQAAQGVNLLPAGKRTADGSEFEKRTADGSEFESPKKKAKVE

SEQ ID NO: 63 - protein, 2088 aa, synthetic construct
MPAAKRVKLDGGDKKYSIGLDIGTNSVGWAVITDEYKVPSKKFKVLGNTDRHSIKKNLIGALLFDSGETAEATRLKRTARRRYTRRKNRICYLQEIFSNEMAKVDDSFFHRLEESFLVEEDKKHERHPIFGNIVDEVAYHEKYPTIYHLRKKLVDSTDKADLRLIYLALAHMIKFRGHFLIEGDLNPDNSDVDKLFIQLVQTYNQLFEENPINASGVDAKAILSARLSKSRRLENLIAQLPGEKKNGLFGNLIALSLGLTPNFKSNFDLAEDAKLQLSKDTYDDDLDNLLAQIGDQYADLFLAAKNLSDAILLSDILRVNTEITKAPLSASMIKRYDEHHQDLTLLKALVRQQLPEKYKEIFFDQSKNGYAGYIDGGASQEEFYKFIKPILEKMDGTEELLVKLNREDLLRKQRTFDNGSIPHQIHLGELHAILRRQEDFYPFLKDNREKIEKILTFRIPYYVGPLARGNSRFAWMTRKSEETITPWNFEEVVDKGASAQSFIERMTNFDKNLPNEKVLPKHSLLYEYFTVYNELTKVKYVTEGMRKPAFLSGEQKKAIVDLLFKTNRKVTVKQLKEDYFKKIECFDSVEISGVEDRFNASLGTYHDLLKIIKDKDFLDNEENEDILEDIVLTLTLFEDREMIEERLKTYAHLFDDKVMKQLKRRRYTGWGRLSRKLINGIRDKQSGKTILDFLKSDGFANRNFMQLIHDDSLTFKEDIQKAQVSGQGDSLHEHIANLAGSPAIKKGILQTVKVVDELVKVMGRHKPENIVIEMARENQTTQKGQKNSRERMKRIEEGIKELGSQILKEHPVENTQLQNEKLYLYYLQNGRDMYVDQELDINRLSDYDVDHIVPQSFLKDDSIDNKVLTRSDKARGKSDNVPSEEVVKKMKNYWRQLLNAKLITQRKFDNLTKAERGGLSELDKAGFIKRQLVETRQITKHVAQILDSRMNTKYDENDKLIREVKVITLKSKLVSDFRKDFQFYKVREINNYHHAHDAYLNAVVGTALIKKYPKLESEFVYGDYKVYDVRKMIAKSEQEIGKATAKYFFYSNIMNFFKTEITLANGEIRKRPLIETNGETGEIVWDKGRDFATVRKVLSMPQVNIVKKTEVQTGGFSKESILPKRNSDKLIARKKDWDPKKYGGFDSPTVAYSVLVVAKVEKGKSKKLKSVKELLGITIMERSSFEKNPIDFLEAKGYKEVKKDLIIKLPKYSLFELENGRKRMLASAGELQKGNELALPSKYVNFLYLASHYEKLKGSPEDNEQKQLFVEQHKHYLDEIIEQISEFSKRVILADANLDKVLSAYNKHRDKPIREQAENIIHLFTLTNLGAPAAFKYFDTTIDRKRYTSTKEVLDATLIHQSITGLYETRIDLSQLGGDGGGGGEAAAKPAPGGLDDEYRLYSPLVKPDQNIQFWLEQFPQAWAETAGMGLAKQVPPQVIQLKASATPVSVRQYPLSKEAQEGIRPHVQRLIQQGILVPVQSPWNTPLLPVRKPGTNDYRPVQDLREVNKRVQDIHPTVPNPYNLLCALPPQRSWYTVLDLKDAFFCLRLHPTSQPLFAFEWRDPGTGRTGQLTWTRLPQGFKNSPTIFNEALHRDLANFRIQHPQVTLLQYVDDLLLAGATKQDCLEGTKALLLELSDLGYRASAKKAQICRREVTYLGYSLRDGQRWLTEARKKTVVQIPAPTTAKQVREFLGKAGFCRLFIPGFATLAAPLYPLTKPKGEFSWAPEHQKAFDAIKKALLSAPALALPDVTKPFTLYVDERKGVARGVLTQTLGPWRRPVAYLSKKLDPVASGWPVCLKAIAAVAILVKDADKLTLGQNITVIAPHALENIVRQPPDRWMTNARMTHYQSLLLTERVTFAPPAALNPATLLPEETDEPVTHDCHQLLIEETGVRKDLTDIPLTGEVLTWFTDGSSYVVEGKRMAGAAVVDGTRTIWASSLPEGTSAQKAELMALTQALRLAEGKSINIYTDSRYAFATAHVHGAIYKQRGWLTSAGREIKNKEEILSLLEALHLPKRLAIIHCPGHQKAKDPISRGNQMADRVAKQAAQGVNLLPAGKRTADGSEFEKRTADGSEFESPKKKAKVE

SEQ ID NO: 64 - protein, 2086 aa, synthetic construct
MPAAKRVKLDGGDKKYSIGLDIGTNSVGWAVITDEYKVPSKKFKVLGNTDRHSIKKNLIGALLFDSGETAEATRLKRTARRRYTRRKNRICYLQEIFSNEMAKVDDSFFHRLEESFLVEEDKKHERHPIFGNIVDEVAYHEKYPTIYHLRKKLVDSTDKADLRLIYLALAHMIKFRGHFLIEGDLNPDNSDVDKLFIQLVQTYNQLFEENPINASGVDAKAILSARLSKSRRLENLIAQLPGEKKNGLFGNLIALSLGLTPNFKSNFDLAEDAKLQLSKDTYDDDLDNLLAQIGDQYADLFLAAKNLSDAILLSDILRVNTEITKAPLSASMIKRYDEHHQDLTLLKALVRQQLPEKYKEIFFDQSKNGYAGYIDGGASQEEFYKFIKPILEKMDGTEELLVKLNREDLLRKQRTFDNGSIPHQIHLGELHAILRRQEDFYPFLKDNREKIEKILTFRIPYYVGPLARGNSRFAWMTRKSEETITPWNFEEVVDKGASAQSFIERMTNFDKNLPNEKVLPKHSLLYEYFTVYNELTKVKYVTEGMRKPAFLSGEQKKAIVDLLFKTNRKVTVKQLKEDYFKKIECFDSVEISGVEDRFNASLGTYHDLLKIIKDKDFLDNEENEDILEDIVLTLTLFEDREMIEERLKTYAHLFDDKVMKQLKRRRYTGWGRLSRKLINGIRDKQSGKTILDFLKSDGFANRNFMQLIHDDSLTFKEDIQKAQVSGQGDSLHEHIANLAGSPAIKKGILQTVKVVDELVKVMGRHKPENIVIEMARENQTTQKGQKNSRERMKRIEEGIKELGSQILKEHPVENTQLQNEKLYLYYLQNGRDMYVDQELDINRLSDYDVDHIVPQSFLKDDSIDNKVLTRSDKARGKSDNVPSEEVVKKMKNYWRQLLNAKLITQRKFDNLTKAERGGLSELDKAGFIKRQLVETRQITKHVAQILDSRMNTKYDENDKLIREVKVITLKSKLVSDFRKDFQFYKVREINNYHHAHDAYLNAVVGTALIKKYPKLESEFVYGDYKVYDVRKMIAKSEQEIGKATAKYFFYSNIMNFFKTEITLANGEIRKRPLIETNGETGEIVWDKGRDFATVRKVLSMPQVNIVKKTEVQTGGFSKESILPKRNSDKLIARKKDWDPKKYGGFDSPTVAYSVLVVAKVEKGKSKKLKSVKELLGITIMERSSFEKNPIDFLEAKGYKEVKKDLIIKLPKYSLFELENGRKRMLASAGELQKGNELALPSKYVNFLYLASHYEKLKGSPEDNEQKQLFVEQHKHYLDEIIEQISEFSKRVILADANLDKVLSAYNKHRDKPIREQAENIIHLFTLTNLGAPAAFKYFDTTIDRKRYTSTKEVLDATLIHQSITGLYETRIDLSQLGGDGGGSSGGSPAPGGLDDEYRLYSPLVKPDQNIQFWLEQFPQAWAETAGMGLAKQVPPQVIQLKASATPVSVRQYPLSKEAQEGIRPHVQRLIQQGILVPVQSPWNTPLLPVRKPGTNDYRPVQDLREVNKRVQDIHPTVPNPYNLLCALPPQRSWYTVLDLKDAFFCLRLHPTSQPLFAFEWRDPGTGRTGQLTWTRLPQGFKNSPTIFNEALHRDLANFRIQHPQVTLLQYVDDLLLAGATKQDCLEGTKALLLELSDLGYRASAKKAQICRREVTYLGYSLRDGQRWLTEARKKTVVQIPAPTTAKQVREFLGKAGFCRLFIPGFATLAAPLYPLTKPKGEFSWAPEHQKAFDAIKKALLSAPALALPDVTKPFTLYVDERKGVARGVLTQTLGPWRRPVAYLSKKLDPVASGWPVCLKAIAAVAILVKDADKLTLGQNITVIAPHALENIVRQPPDRWMTNARMTHYQSLLLTERVTFAPPAALNPATLLPEETDEPVTHDCHQLLIEETGVRKDLTDIPLTGEVLTWFTDGSSYVVEGKRMAGAAVVDGTRTIWASSLPEGTSAQKAELMALTQALRLAEGKSINIYTDSRYAFATAHVHGAIYKQRGWLTSAGREIKNKEEILSLLEALHLPKRLAIIHCPGHQKAKDPISRGNQMADRVAKQAAQGVNLLPAGKRTADGSEFEKRTADGSEFESPKKKAKVE

SEQ ID NO: 65 - protein, 2088 aa, synthetic construct
MPAAKRVKLDGGDKKYSIGLDIGTNSVGWAVITDEYKVPSKKFKVLGNTDRHSIKKNLIGALLFDSGETAEATRLKRTARRRYTRRKNRICYLQEIFSNEMAKVDDSFFHRLEESFLVEEDKKHERHPIFGNIVDEVAYHEKYPTIYHLRKKLVDSTDKADLRLIYLALAHMIKFRGHFLIEGDLNPDNSDVDKLFIQLVQTYNQLFEENPINASGVDAKAILSARLSKSRRLENLIAQLPGEKKNGLFGNLIALSLGLTPNFKSNFDLAEDAKLQLSKDTYDDDLDNLLAQIGDQYADLFLAAKNLSDAILLSDILRVNTEITKAPLSASMIKRYDEHHQDLTLLKALVRQQLPEKYKEIFFDQSKNGYAGYIDGGASQEEFYKFIKPILEKMDGTEELLVKLNREDLLRKQRTFDNGSIPHQIHLGELHAILRRQEDFYPFLKDNREKIEKILTFRIPYYVGPLARGNSRFAWMTRKSEETITPWNFEEVVDKGASAQSFIERMTNFDKNLPNEKVLPKHSLLYEYFTVYNELTKVKYVTEGMRKPAFLSGEQKKAIVDLLFKTNRKVTVKQLKEDYFKKIECFDSVEISGVEDRFNASLGTYHDLLKIIKDKDFLDNEENEDILEDIVLTLTLFEDREMIEERLKTYAHLFDDKVMKQLKRRRYTGWGRLSRKLINGIRDKQSGKTILDFLKSDGFANRNFMQLIHDDSLTFKEDIQKAQVSGQGDSLHEHIANLAGSPAIKKGILQTVKVVDELVKVMGRHKPENIVIEMARENQTTQKGQKNSRERMKRIEEGIKELGSQILKEHPVENTQLQNEKLYLYYLQNGRDMYVDQELDINRLSDYDVDHIVPQSFLKDDSIDNKVLTRSDKARGKSDNVPSEEVVKKMKNYWRQLLNAKLITQRKFDNLTKAERGGLSELDKAGFIKRQLVETRQITKHVAQILDSRMNTKYDENDKLIREVKVITLKSKLVSDFRKDFQFYKVREINNYHHAHDAYLNAVVGTALIKKYPKLESEFVYGDYKVYDVRKMIAKSEQEIGKATAKYFFYSNIMNFFKTEITLANGEIRKRPLIETNGETGEIVWDKGRDFATVRKVLSMPQVNIVKKTEVQTGGFSKESILPKRNSDKLIARKKDWDPKKYGGFDSPTVAYSVLVVAKVEKGKSKKLKSVKELLGITIMERSSFEKNPIDFLEAKGYKEVKKDLIIKLPKYSLFELENGRKRMLASAGELQKGNELALPSKYVNFLYLASHYEKLKGSPEDNEQKQLFVEQHKHYLDEIIEQISEFSKRVILADANLDKVLSAYNKHRDKPIREQAENIIHLFTLTNLGAPAAFKYFDTTIDRKRYTSTKEVLDATLIHQSITGLYETRIDLSQLGGDGGGGGEAAAKGGSGGLDDEYRLYSPLVKPDQNIQFWLEQFPQAWAETAGMGLAKQVPPQVIQLKASATPVSVRQYPLSKEAQEGIRPHVQRLIQQGILVPVQSPWNTPLLPVRKPGTNDYRPVQDLREVNKRVQDIHPTVPNPYNLLCALPPQRSWYTVLDLKDAFFCLRLHPTSQPLFAFEWRDPGTGRTGQLTWTRLPQGFKNSPTIFNEALHRDLANFRIQHPQVTLLQYVDDLLLAGATKQDCLEGTKALLLELSDLGYRASAKKAQICRREVTYLGYSLRDGQRWLTEARKKTVVQIPAPTTAKQVREFLGKAGFCRLFIPGFATLAAPLYPLTKPKGEFSWAPEHQKAFDAIKKALLSAPALALPDVTKPFTLYVDERKGVARGVLTQTLGPWRRPVAYLSKKLDPVASGWPVCLKAIAAVAILVKDADKLTLGQNITVIAPHALENIVRQPPDRWMTNARMTHYQSLLLTERVTFAPPAALNPATLLPEETDEPVTHDCHQLLIEETGVRKDLTDIPLTGEVLTWFTDGSSYVVEGKRMAGAAVVDGTRTIWASSLPEGTSAQKAELMALTQALRLAEGKSINIYTDSRYAFATAHVHGAIYKQRGWLTSAGREIKNKEEILSLLEALHLPKRLAIIHCPGHQKAKDPISRGNQMADRVAKQAAQGVNLLPAGKRTADGSEFEKRTADGSEFESPKKKAKVE

SEQ ID NO: 66 - protein, 2081 aa, synthetic construct
MPAAKRVKLDGGDKKYSIGLDIGTNSVGWAVITDEYKVPSKKFKVLGNTDRHSIKKNLIGALLFDSGETAEATRLKRTARRRYTRRKNRICYLQEIFSNEMAKVDDSFFHRLEESFLVEEDKKHERHPIFGNIVDEVAYHEKYPTIYHLRKKLVDSTDKADLRLIYLALAHMIKFRGHFLIEGDLNPDNSDVDKLFIQLVQTYNQLFEENPINASGVDAKAILSARLSKSRRLENLIAQLPGEKKNGLFGNLIALSLGLTPNFKSNFDLAEDAKLQLSKDTYDDDLDNLLAQIGDQYADLFLAAKNLSDAILLSDILRVNTEITKAPLSASMIKRYDEHHQDLTLLKALVRQQLPEKYKEIFFDQSKNGYAGYIDGGASQEEFYKFIKPILEKMDGTEELLVKLNREDLLRKQRTFDNGSIPHQIHLGELHAILRRQEDFYPFLKDNREKIEKILTFRIPYYVGPLARGNSRFAWMTRKSEETITPWNFEEVVDKGASAQSFIERMTNFDKNLPNEKVLPKHSLLYEYFTVYNELTKVKYVTEGMRKPAFLSGEQKKAIVDLLFKTNRKVTVKQLKEDYFKKIECFDSVEISGVEDRFNASLGTYHDLLKIIKDKDFLDNEENEDILEDIVLTLTLFEDREMIEERLKTYAHLFDDKVMKQLKRRRYTGWGRLSRKLINGIRDKQSGKTILDFLKSDGFANRNFMQLIHDDSLTFKEDIQKAQVSGQGDSLHEHIANLAGSPAIKKGILQTVKVVDELVKVMGRHKPENIVIEMARENQTTQKGQKNSRERMKRIEEGIKELGSQILKEHPVENTQLQNEKLYLYYLQNGRDMYVDQELDINRLSDYDVDHIVPQSFLKDDSIDNKVLTRSDKARGKSDNVPSEEVVKKMKNYWRQLLNAKLITQRKFDNLTKAERGGLSELDKAGFIKRQLVETRQITKHVAQILDSRMNTKYDENDKLIREVKVITLKSKLVSDFRKDFQFYKVREINNYHHAHDAYLNAVVGTALIKKYPKLESEFVYGDYKVYDVRKMIAKSEQEIGKATAKYFFYSNIMNFFKTEITLANGEIRKRPLIETNGETGEIVWDKGRDFATVRKVLSMPQVNIVKKTEVQTGGFSKESILPKRNSDKLIARKKDWDPKKYGGFDSPTVAYSVLVVAKVEKGKSKKLKSVKELLGITIMERSSFEKNPIDFLEAKGYKEVKKDLIIKLPKYSLFELENGRKRMLASAGELQKGNELALPSKYVNFLYLASHYEKLKGSPEDNEQKQLFVEQHKHYLDEIIEQISEFSKRVILADANLDKVLSAYNKHRDKPIREQAENIIHLFTLTNLGAPAAFKYFDTTIDRKRYTSTKEVLDATLIHQSITGLYETRIDLSQLGGDGGGGGGGGLDDEYRLYSPLVKPDQNIQFWLEQFPQAWAETAGMGLAKQVPPQVIQLKASATPVSVRQYPLSKEAQEGIRPHVQRLIQQGILVPVQSPWNTPLLPVRKPGTNDYRPVQDLREVNKRVQDIHPTVPNPYNLLCALPPQRSWYTVLDLKDAFFCLRLHPTSQPLFAFEWRDPGTGRTGQLTWTRLPQGFKNSPTIFNEALHRDLANFRIQHPQVTLLQYVDDLLLAGATKQDCLEGTKALLLELSDLGYRASAKKAQICRREVTYLGYSLRDGQRWLTEARKKTVVQIPAPTTAKQVREFLGKAGFCRLFIPGFATLAAPLYPLTKPKGEFSWAPEHQKAFDAIKKALLSAPALALPDVTKPFTLYVDERKGVARGVLTQTLGPWRRPVAYLSKKLDPVASGWPVCLKAIAAVAILVKDADKLTLGQNITVIAPHALENIVRQPPDRWMTNARMTHYQSLLLTERVTFAPPAALNPATLLPEETDEPVTHDCHQLLIEETGVRKDLTDIPLTGEVLTWFTDGSSYVVEGKRMAGAAVVDGTRTIWASSLPEGTSAQKAELMALTQALRLAEGKSINIYTDSRYAFATAHVHGAIYKQRGWLTSAGREIKNKEEILSLLEALHLPKRLAIIHCPGHQKAKDPISRGNQMADRVAKQAAQGVNLLPAGKRTADGSEFEKRTADGSEFESPKKKAKVE

SEQ ID NO: 67 - protein, 2089 aa, synthetic construct
MPAAKRVKLDGGDKKYSIGLDIGTNSVGWAVITDEYKVPSKKFKVLGNTDRHSIKKNLIGALLFDSGETAEATRLKRTARRRYTRRKNRICYLQEIFSNEMAKVDDSFFHRLEESFLVEEDKKHERHPIFGNIVDEVAYHEKYPTIYHLRKKLVDSTDKADLRLIYLALAHMIKFRGHFLIEGDLNPDNSDVDKLFIQLVQTYNQLFEENPINASGVDAKAILSARLSKSRRLENLIAQLPGEKKNGLFGNLIALSLGLTPNFKSNFDLAEDAKLQLSKDTYDDDLDNLLAQIGDQYADLFLAAKNLSDAILLSDILRVNTEITKAPLSASMIKRYDEHHQDLTLLKALVRQQLPEKYKEIFFDQSKNGYAGYIDGGASQEEFYKFIKPILEKMDGTEELLVKLNREDLLRKQRTFDNGSIPHQIHLGELHAILRRQEDFYPFLKDNREKIEKILTFRIPYYVGPLARGNSRFAWMTRKSEETITPWNFEEVVDKGASAQSFIERMTNFDKNLPNEKVLPKHSLLYEYFTVYNELTKVKYVTEGMRKPAFLSGEQKKAIVDLLFKTNRKVTVKQLKEDYFKKIECFDSVEISGVEDRFNASLGTYHDLLKIIKDKDFLDNEENEDILEDIVLTLTLFEDREMIEERLKTYAHLFDDKVMKQLKRRRYTGWGRLSRKLINGIRDKQSGKTILDFLKSDGFANRNFMQLIHDDSLTFKEDIQKAQVSGQGDSLHEHIANLAGSPAIKKGILQTVKVVDELVKVMGRHKPENIVIEMARENQTTQKGQKNSRERMKRIEEGIKELGSQILKEHPVENTQLQNEKLYLYYLQNGRDMYVDQELDINRLSDYDVDHIVPQSFLKDDSIDNKVLTRSDKARGKSDNVPSEEVVKKMKNYWRQLLNAKLITQRKFDNLTKAERGGLSELDKAGFIKRQLVETRQITKHVAQILDSRMNTKYDENDKLIREVKVITLKSKLVSDFRKDFQFYKVREINNYHHAHDAYLNAVVGTALIKKYPKLESEFVYGDYKVYDVRKMIAKSEQEIGKATAKYFFYSNIMNFFKTEITLANGEIRKRPLIETNGETGEIVWDKGRDFATVRKVLSMPQVNIVKKTEVQTGGFSKESILPKRNSDKLIARKKDWDPKKYGGFDSPTVAYSVLVVAKVEKGKSKKLKSVKELLGITIMERSSFEKNPIDFLEAKGYKEVKKDLIIKLPKYSLFELENGRKRMLASAGELQKGNELALPSKYVNFLYLASHYEKLKGSPEDNEQKQLFVEQHKHYLDEIIEQISEFSKRVILADANLDKVLSAYNKHRDKPIREQAENIIHLFTLTNLGAPAAFKYFDTTIDRKRYTSTKEVLDATLIHQSITGLYETRIDLSQLGGDGGGGSGGSGGSGGSGGLDDEYRLYSPLVKPDQNIQFWLEQFPQAWAETAGMGLAKQVPPQVIQLKASATPVSVRQYPLSKEAQEGIRPHVQRLIQQGILVPVQSPWNTPLLPVRKPGTNDYRPVQDLREVNKRVQDIHPTVPNPYNLLCALPPQRSWYTVLDLKDAFFCLRLHPTSQPLFAFEWRDPGTGRTGQLTWTRLPQGFKNSPTIFNEALHRDLANFRIQHPQVTLLQYVDDLLLAGATKQDCLEGTKALLLELSDLGYRASAKKAQICRREVTYLGYSLRDGQRWLTEARKKTVVQIPAPTTAKQVREFLGKAGFCRLFIPGFATLAAPLYPLTKPKGEFSWAPEHQKAFDAIKKALLSAPALALPDVTKPFTLYVDERKGVARGVLTQTLGPWRRPVAYLSKKLDPVASGWPVCLKAIAAVAILVKDADKLTLGQNITVIAPHALENIVRQPPDRWMTNARMTHYQSLLLTERVTFAPPAALNPATLLPEETDEPVTHDCHQLLIEETGVRKDLTDIPLTGEVLTWFTDGSSYVVEGKRMAGAAVVDGTRTIWASSLPEGTSAQKAELMALTQALRLAEGKSINIYTDSRYAFATAHVHGAIYKQRGWLTSAGREIKNKEEILSLLEALHLPKRLAIIHCPGHQKAKDPISRGNQMADRVAKQAAQGVNLLPAGKRTADGSEFEKRTADGSEFESPKKKAKVE

SEQ ID NO: 68 - protein, 2088 aa, synthetic construct
MPAAKRVKLDGGDKKYSIGLDIGTNSVGWAVITDEYKVPSKKFKVLGNTDRHSIKKNLIGALLFDSGETAEATRLKRTARRRYTRRKNRICYLQEIFSNEMAKVDDSFFHRLEESFLVEEDKKHERHPIFGNIVDEVAYHEKYPTIYHLRKKLVDSTDKADLRLIYLALAHMIKFRGHFLIEGDLNPDNSDVDKLFIQLVQTYNQLFEENPINASGVDAKAILSARLSKSRRLENLIAQLPGEKKNGLFGNLIALSLGLTPNFKSNFDLAEDAKLQLSKDTYDDDLDNLLAQIGDQYADLFLAAKNLSDAILLSDILRVNTEITKAPLSASMIKRYDEHHQDLTLLKALVRQQLPEKYKEIFFDQSKNGYAGYIDGGASQEEFYKFIKPILEKMDGTEELLVKLNREDLLRKQRTFDNGSIPHQIHLGELHAILRRQEDFYPFLKDNREKIEKILTFRIPYYVGPLARGNSRFAWMTRKSEETITPWNFEEVVDKGASAQSFIERMTNFDKNLPNEKVLPKHSLLYEYFTVYNELTKVKYVTEGMRKPAFLSGEQKKAIVDLLFKTNRKVTVKQLKEDYFKKIECFDSVEISGVEDRFNASLGTYHDLLKIIKDKDFLDNEENEDILEDIVLTLTLFEDREMIEERLKTYAHLFDDKVMKQLKRRRYTGWGRLSRKLINGIRDKQSGKTILDFLKSDGFANRNFMQLIHDDSLTFKEDIQKAQVSGQGDSLHEHIANLAGSPAIKKGILQTVKVVDELVKVMGRHKPENIVIEMARENQTTQKGQKNSRERMKRIEEGIKELGSQILKEHPVENTQLQNEKLYLYYLQNGRDMYVDQELDINRLSDYDVDHIVPQSFLKDDSIDNKVLTRSDKARGKSDNVPSEEVVKKMKNYWRQLLNAKLITQRKFDNLTKAERGGLSELDKAGFIKRQLVETRQITKHVAQILDSRMNTKYDENDKLIREVKVITLKSKLVSDFRKDFQFYKVREINNYHHAHDAYLNAVVGTALIKKYPKLESEFVYGDYKVYDVRKMIAKSEQEIGKATAKYFFYSNIMNFFKTEITLANGEIRKRPLIETNGETGEIVWDKGRDFATVRKVLSMPQVNIVKKTEVQTGGFSKESILPKRNSDKLIARKKDWDPKKYGGFDSPTVAYSVLVVAKVEKGKSKKLKSVKELLGITIMERSSFEKNPIDFLEAKGYKEVKKDLIIKLPKYSLFELENGRKRMLASAGELQKGNELALPSKYVNFLYLASHYEKLKGSPEDNEQKQLFVEQHKHYLDEIIEQISEFSKRVILADANLDKVLSAYNKHRDKPIREQAENIIHLFTLTNLGAPAAFKYFDTTIDRKRYTSTKEVLDATLIHQSITGLYETRIDLSQLGGDGGGGGGGSEAAAKGGLDDEYRLYSPLVKPDQNIQFWLEQFPQAWAETAGMGLAKQVPPQVIQLKASATPVSVRQYPLSKEAQEGIRPHVQRLIQQGILVPVQSPWNTPLLPVRKPGTNDYRPVQDLREVNKRVQDIHPTVPNPYNLLCALPPQRSWYTVLDLKDAFFCLRLHPTSQPLFAFEWRDPGTGRTGQLTWTRLPQGFKNSPTIFNEALHRDLANFRIQHPQVTLLQYVDDLLLAGATKQDCLEGTKALLLELSDLGYRASAKKAQICRREVTYLGYSLRDGQRWLTEARKKTVVQIPAPTTAKQVREFLGKAGFCRLFIPGFATLAAPLYPLTKPKGEFSWAPEHQKAFDAIKKALLSAPALALPDVTKPFTLYVDERKGVARGVLTQTLGPWRRPVAYLSKKLDPVASGWPVCLKAIAAVAILVKDADKLTLGQNITVIAPHALENIVRQPPDRWMTNARMTHYQSLLLTERVTFAPPAALNPATLLPEETDEPVTHDCHQLLIEETGVRKDLTDIPLTGEVLTWFTDGSSYVVEGKRMAGAAVVDGTRTIWASSLPEGTSAQKAELMALTQALRLAEGKSINIYTDSRYAFATAHVHGAIYKQRGWLTSAGREIKNKEEILSLLEALHLPKRLAIIHCPGHQKAKDPISRGNQMADRVAKQAAQGVNLLPAGKRTADGSEFEKRTADGSEFESPKKKAKVE

SEQ ID NO: 69 - protein, 2086 aa, synthetic construct
MPAAKRVKLDGGDKKYSIGLDIGTNSVGWAVITDEYKVPSKKFKVLGNTDRHSIKKNLIGALLFDSGETAEATRLKRTARRRYTRRKNRICYLQEIFSNEMAKVDDSFFHRLEESFLVEEDKKHERHPIFGNIVDEVAYHEKYPTIYHLRKKLVDSTDKADLRLIYLALAHMIKFRGHFLIEGDLNPDNSDVDKLFIQLVQTYNQLFEENPINASGVDAKAILSARLSKSRRLENLIAQLPGEKKNGLFGNLIALSLGLTPNFKSNFDLAEDAKLQLSKDTYDDDLDNLLAQIGDQYADLFLAAKNLSDAILLSDILRVNTEITKAPLSASMIKRYDEHHQDLTLLKALVRQQLPEKYKEIFFDQSKNGYAGYIDGGASQEEFYKFIKPILEKMDGTEELLVKLNREDLLRKQRTFDNGSIPHQIHLGELHAILRRQEDFYPFLKDNREKIEKILTFRIPYYVGPLARGNSRFAWMTRKSEETITPWNFEEVVDKGASAQSFIERMTNFDKNLPNEKVLPKHSLLYEYFTVYNELTKVKYVTEGMRKPAFLSGEQKKAIVDLLFKTNRKVTVKQLKEDYFKKIECFDSVEISGVEDRFNASLGTYHDLLKIIKDKDFLDNEENEDILEDIVLTLTLFEDREMIEERLKTYAHLFDDKVMKQLKRRRYTGWGRLSRKLINGIRDKQSGKTILDFLKSDGFANRNFMQLIHDDSLTFKEDIQKAQVSGQGDSLHEHIANLAGSPAIKKGILQTVKVVDELVKVMGRHKPENIVIEMARENQTTQKGQKNSRERMKRIEEGIKELGSQILKEHPVENTQLQNEKLYLYYLQNGRDMYVDQELDINRLSDYDVDHIVPQSFLKDDSIDNKVLTRSDKARGKSDNVPSEEVVKKMKNYWRQLLNAKLITQRKFDNLTKAERGGLSELDKAGFIKRQLVETRQITKHVAQILDSRMNTKYDENDKLIREVKVITLKSKLVSDFRKDFQFYKVREINNYHHAHDAYLNAVVGTALIKKYPKLESEFVYGDYKVYDVRKMIAKSEQEIGKATAKYFFYSNIMNFFKTEITLANGEIRKRPLIETNGETGEIVWDKGRDFATVRKVLSMPQVNIVKKTEVQTGGFSKESILPKRNSDKLIARKKDWDPKKYGGFDSPTVAYSVLVVAKVEKGKSKKLKSVKELLGITIMERSSFEKNPIDFLEAKGYKEVKKDLIIKLPKYSLFELENGRKRMLASAGELQKGNELALPSKYVNFLYLASHYEKLKGSPEDNEQKQLFVEQHKHYLDEIIEQISEFSKRVILADANLDKVLSAYNKHRDKPIREQAENIIHLFTLTNLGAPAAFKYFDTTIDRKRYTSTKEVLDATLIHQSITGLYETRIDLSQLGGDGGGSSPAPGGSGGLDDEYRLYSPLVKPDQNIQFWLEQFPQAWAETAGMGLAKQVPPQVIQLKASATPVSVRQYPLSKEAQEGIRPHVQRLIQQGILVPVQSPWNTPLLPVRKPGTNDYRPVQDLREVNKRVQDIHPTVPNPYNLLCALPPQRSWYTVLDLKDAFFCLRLHPTSQPLFAFEWRDPGTGRTGQLTWTRLPQGFKNSPTIFNEALHRDLANFRIQHPQVTLLQYVDDLLLAGATKQDCLEGTKALLLELSDLGYRASAKKAQICRREVTYLGYSLRDGQRWLTEARKKTVVQIPAPTTAKQVREFLGKAGFCRLFIPGFATLAAPLYPLTKPKGEFSWAPEHQKAFDAIKKALLSAPALALPDVTKPFTLYVDERKGVARGVLTQTLGPWRRPVAYLSKKLDPVASGWPVCLKAIAAVAILVKDADKLTLGQNITVIAPHALENIVRQPPDRWMTNARMTHYQSLLLTERVTFAPPAALNPATLLPEETDEPVTHDCHQLLIEETGVRKDLTDIPLTGEVLTWFTDGSSYVVEGKRMAGAAVVDGTRTIWASSLPEGTSAQKAELMALTQALRLAEGKSINIYTDSRYAFATAHVHGAIYKQRGWLTSAGREIKNKEEILSLLEALHLPKRLAIIHCPGHQKAKDPISRGNQMADRVAKQAAQGVNLLPAGKRTADGSEFEKRTADGSEFESPKKKAKVE

SEQ ID NO: 70 - protein, 2082 aa, synthetic construct
MPAAKRVKLDGGDKKYSIGLDIGTNSVGWAVITDEYKVPSKKFKVLGNTDRHSIKKNLIGALLFDSGETAEATRLKRTARRRYTRRKNRICYLQEIFSNEMAKVDDSFFHRLEESFLVEEDKKHERHPIFGNIVDEVAYHEKYPTIYHLRKKLVDSTDKADLRLIYLALAHMIKFRGHFLIEGDLNPDNSDVDKLFIQLVQTYNQLFEENPINASGVDAKAILSARLSKSRRLENLIAQLPGEKKNGLFGNLIALSLGLTPNFKSNFDLAEDAKLQLSKDTYDDDLDNLLAQIGDQYADLFLAAKNLSDAILLSDILRVNTEITKAPLSASMIKRYDEHHQDLTLLKALVRQQLPEKYKEIFFDQSKNGYAGYIDGGASQEEFYKFIKPILEKMDGTEELLVKLNREDLLRKQRTFDNGSIPHQIHLGELHAILRRQEDFYPFLKDNREKIEKILTFRIPYYVGPLARGNSRFAWMTRKSEETITPWNFEEVVDKGASAQSFIERMTNFDKNLPNEKVLPKHSLLYEYFTVYNELTKVKYVTEGMRKPAFLSGEQKKAIVDLLFKTNRKVTVKQLKEDYFKKIECFDSVEISGVEDRFNASLGTYHDLLKIIKDKDFLDNEENEDILEDIVLTLTLFEDREMIEERLKTYAHLFDDKVMKQLKRRRYTGWGRLSRKLINGIRDKQSGKTILDFLKSDGFANRNFMQLIHDDSLTFKEDIQKAQVSGQGDSLHEHIANLAGSPAIKKGILQTVKVVDELVKVMGRHKPENIVIEMARENQTTQKGQKNSRERMKRIEEGIKELGSQILKEHPVENTQLQNEKLYLYYLQNGRDMYVDQELDINRLSDYDVDHIVPQSFLKDDSIDNKVLTRSDKARGKSDNVPSEEVVKKMKNYWRQLLNAKLITQRKFDNLTKAERGGLSELDKAGFIKRQLVETRQITKHVAQILDSRMNTKYDENDKLIREVKVITLKSKLVSDFRKDFQFYKVREINNYHHAHDAYLNAVVGTALIKKYPKLESEFVYGDYKVYDVRKMIAKSEQEIGKATAKYFFYSNIMNFFKTEITLANGEIRKRPLIETNGETGEIVWDKGRDFATVRKVLSMPQVNIVKKTEVQTGGFSKESILPKRNSDKLIARKKDWDPKKYGGFDSPTVAYSVLVVAKVEKGKSKKLKSVKELLGITIMERSSFEKNPIDFLEAKGYKEVKKDLIIKLPKYSLFELENGRKRMLASAGELQKGNELALPSKYVNFLYLASHYEKLKGSPEDNEQKQLFVEQHKHYLDEIIEQISEFSKRVILADANLDKVLSAYNKHRDKPIREQAENIIHLFTLTNLGAPAAFKYFDTTIDRKRYTSTKEVLDATLIHQSITGLYETRIDLSQLGGDGGGGGGGGGLDDEYRLYSPLVKPDQNIQFWLEQFPQAWAETAGMGLAKQVPPQVIQLKASATPVSVRQYPLSKEAQEGIRPHVQRLIQQGILVPVQSPWNTPLLPVRKPGTNDYRPVQDLREVNKRVQDIHPTVPNPYNLLCALPPQRSWYTVLDLKDAFFCLRLHPTSQPLFAFEWRDPGTGRTGQLTWTRLPQGFKNSPTIFNEALHRDLANFRIQHPQVTLLQYVDDLLLAGATKQDCLEGTKALLLELSDLGYRASAKKAQICRREVTYLGYSLRDGQRWLTEARKKTVVQIPAPTTAKQVREFLGKAGFCRLFIPGFATLAAPLYPLTKPKGEFSWAPEHQKAFDAIKKALLSAPALALPDVTKPFTLYVDERKGVARGVLTQTLGPWRRPVAYLSKKLDPVASGWPVCLKAIAAVAILVKDADKLTLGQNITVIAPHALENIVRQPPDRWMTNARMTHYQSLLLTERVTFAPPAALNPATLLPEETDEPVTHDCHQLLIEETGVRKDLTDIPLTGEVLTWFTDGSSYVVEGKRMAGAAVVDGTRTIWASSLPEGTSAQKAELMALTQALRLAEGKSINIYTDSRYAFATAHVHGAIYKQRGWLTSAGREIKNKEEILSLLEALHLPKRLAIIHCPGHQKAKDPISRGNQMADRVAKQAAQGVNLLPAGKRTADGSEFEKRTADGSEFESPKKKAKVE

SEQ ID NO: 71 - protein, 2088 aa, synthetic construct
MPAAKRVKLDGGDKKYSIGLDIGTNSVGWAVITDEYKVPSKKFKVLGNTDRHSIKKNLIGALLFDSGETAEATRLKRTARRRYTRRKNRICYLQEIFSNEMAKVDDSFFHRLEESFLVEEDKKHERHPIFGNIVDEVAYHEKYPTIYHLRKKLVDSTDKADLRLIYLALAHMIKFRGHFLIEGDLNPDNSDVDKLFIQLVQTYNQLFEENPINASGVDAKAILSARLSKSRRLENLIAQLPGEKKNGLFGNLIALSLGLTPNFKSNFDLAEDAKLQLSKDTYDDDLDNLLAQIGDQYADLFLAAKNLSDAILLSDILRVNTEITKAPLSASMIKRYDEHHQDLTLLKALVRQQLPEKYKEIFFDQSKNGYAGYIDGGASQEEFYKFIKPILEKMDGTEELLVKLNREDLLRKQRTFDNGSIPHQIHLGELHAILRRQEDFYPFLKDNREKIEKILTFRIPYYVGPLARGNSRFAWMTRKSEETITPWNFEEVVDKGASAQSFIERMTNFDKNLPNEKVLPKHSLLYEYFTVYNELTKVKYVTEGMRKPAFLSGEQKKAIVDLLFKTNRKVTVKQLKEDYFKKIECFDSVEISGVEDRFNASLGTYHDLLKIIKDKDFLDNEENEDILEDIVLTLTLFEDREMIEERLKTYAHLFDDKVMKQLKRRRYTGWGRLSRKLINGIRDKQSGKTILDFLKSDGFANRNFMQLIHDDSLTFKEDIQKAQVSGQGDSLHEHIANLAGSPAIKKGILQTVKVVDELVKVMGRHKPENIVIEMARENQTTQKGQKNSRERMKRIEEGIKELGSQILKEHPVENTQLQNEKLYLYYLQNGRDMYVDQELDINRLSDYDVDHIVPQSFLKDDSIDNKVLTRSDKARGKSDNVPSEEVVKKMKNYWRQLLNAKLITQRKFDNLTKAERGGLSELDKAGFIKRQLVETRQITKHVAQILDSRMNTKYDENDKLIREVKVITLKSKLVSDFRKDFQFYKVREINNYHHAHDAYLNAVVGTALIKKYPKLESEFVYGDYKVYDVRKMIAKSEQEIGKATAKYFFYSNIMNFFKTEITLANGEIRKRPLIETNGETGEIVWDKGRDFATVRKVLSMPQVNIVKKTEVQTGGFSKESILPKRNSDKLIARKKDWDPKKYGGFDSPTVAYSVLVVAKVEKGKSKKLKSVKELLGITIMERSSFEKNPIDFLEAKGYKEVKKDLIIKLPKYSLFELENGRKRMLASAGELQKGNELALPSKYVNFLYLASHYEKLKGSPEDNEQKQLFVEQHKHYLDEIIEQISEFSKRVILADANLDKVLSAYNKHRDKPIREQAENIIHLFTLTNLGAPAAFKYFDTTIDRKRYTSTKEVLDATLIHQSITGLYETRIDLSQLGGDGGEAAAKGGSGSSGGLDDEYRLYSPLVKPDQNIQFWLEQFPQAWAETAGMGLAKQVPPQVIQLKASATPVSVRQYPLSKEAQEGIRPHVQRLIQQGILVPVQSPWNTPLLPVRKPGTNDYRPVQDLREVNKRVQDIHPTVPNPYNLLCALPPQRSWYTVLDLKDAFFCLRLHPTSQPLFAFEWRDPGTGRTGQLTWTRLPQGFKNSPTIFNEALHRDLANFRIQHPQVTLLQYVDDLLLAGATKQDCLEGTKALLLELSDLGYRASAKKAQICRREVTYLGYSLRDGQRWLTEARKKTVVQIPAPTTAKQVREFLGKAGFCRLFIPGFATLAAPLYPLTKPKGEFSWAPEHQKAFDAIKKALLSAPALALPDVTKPFTLYVDERKGVARGVLTQTLGPWRRPVAYLSKKLDPVASGWPVCLKAIAAVAILVKDADKLTLGQNITVIAPHALENIVRQPPDRWMTNARMTHYQSLLLTERVTFAPPAALNPATLLPEETDEPVTHDCHQLLIEETGVRKDLTDIPLTGEVLTWFTDGSSYVVEGKRMAGAAVVDGTRTIWASSLPEGTSAQKAELMALTQALRLAEGKSINIYTDSRYAFATAHVHGAIYKQRGWLTSAGREIKNKEEILSLLEALHLPKRLAIIHCPGHQKAKDPISRGNQMADRVAKQAAQGVNLLPAGKRTADGSEFEKRTADGSEFESPKKKAKVE

SEQ ID NO: 72 - protein, 2088 aa, synthetic construct
MPAAKRVKLDGGDKKYSIGLDIGTNSVGWAVITDEYKVPSKKFKVLGNTDRHSIKKNLIGALLFDSGETAEATRLKRTARRRYTRRKNRICYLQEIFSNEMAKVDDSFFHRLEESFLVEEDKKHERHPIFGNIVDEVAYHEKYPTIYHLRKKLVDSTDKADLRLIYLALAHMIKFRGHFLIEGDLNPDNSDVDKLFIQLVQTYNQLFEENPINASGVDAKAILSARLSKSRRLENLIAQLPGEKKNGLFGNLIALSLGLTPNFKSNFDLAEDAKLQLSKDTYDDDLDNLLAQIGDQYADLFLAAKNLSDAILLSDILRVNTEITKAPLSASMIKRYDEHHQDLTLLKALVRQQLPEKYKEIFFDQSKNGYAGYIDGGASQEEFYKFIKPILEKMDGTEELLVKLNREDLLRKQRTFDNGSIPHQIHLGELHAILRRQEDFYPFLKDNREKIEKILTFRIPYYVGPLARGNSRFAWMTRKSEETITPWNFEEVVDKGASAQSFIERMTNFDKNLPNEKVLPKHSLLYEYFTVYNELTKVKYVTEGMRKPAFLSGEQKKAIVDLLFKTNRKVTVKQLKEDYFKKIECFDSVEISGVEDRFNASLGTYHDLLKIIKDKDFLDNEENEDILEDIVLTLTLFEDREMIEERLKTYAHLFDDKVMKQLKRRRYTGWGRLSRKLINGIRDKQSGKTILDFLKSDGFANRNFMQLIHDDSLTFKEDIQKAQVSGQGDSLHEHIANLAGSPAIKKGILQTVKVVDELVKVMGRHKPENIVIEMARENQTTQKGQKNSRERMKRIEEGIKELGSQILKEHPVENTQLQNEKLYLYYLQNGRDMYVDQELDINRLSDYDVDHIVPQSFLKDDSIDNKVLTRSDKARGKSDNVPSEEVVKKMKNYWRQLLNAKLITQRKFDNLTKAERGGLSELDKAGFIKRQLVETRQITKHVAQILDSRMNTKYDENDKLIREVKVITLKSKLVSDFRKDFQFYKVREINNYHHAHDAYLNAVVGTALIKKYPKLESEFVYGDYKVYDVRKMIAKSEQEIGKATAKYFFYSNIMNFFKTEITLANGEIRKRPLIETNGETGEIVWDKGRDFATVRKVLSMPQVNIVKKTEVQTGGFSKESILPKRNSDKLIARKKDWDPKKYGGFDSPTVAYSVLVVAKVEKGKSKKLKSVKELLGITIMERSSFEKNPIDFLEAKGYKEVKKDLIIKLPKYSLFELENGRKRMLASAGELQKGNELALPSKYVNFLYLASHYEKLKGSPEDNEQKQLFVEQHKHYLDEIIEQISEFSKRVILADANLDKVLSAYNKHRDKPIREQAENIIHLFTLTNLGAPAAFKYFDTTIDRKRYTSTKEVLDATLIHQSITGLYETRIDLSQLGGDGGEAAAKGGSGGGGGLDDEYRLYSPLVKPDQNIQFWLEQFPQAWAETAGMGLAKQVPPQVIQLKASATPVSVRQYPLSKEAQEGIRPHVQRLIQQGILVPVQSPWNTPLLPVRKPGTNDYRPVQDLREVNKRVQDIHPTVPNPYNLLCALPPQRSWYTVLDLKDAFFCLRLHPTSQPLFAFEWRDPGTGRTGQLTWTRLPQGFKNSPTIFNEALHRDLANFRIQHPQVTLLQYVDDLLLAGATKQDCLEGTKALLLELSDLGYRASAKKAQICRREVTYLGYSLRDGQRWLTEARKKTVVQIPAPTTAKQVREFLGKAGFCRLFIPGFATLAAPLYPLTKPKGEFSWAPEHQKAFDAIKKALLSAPALALPDVTKPFTLYVDERKGVARGVLTQTLGPWRRPVAYLSKKLDPVASGWPVCLKAIAAVAILVKDADKLTLGQNITVIAPHALENIVRQPPDRWMTNARMTHYQSLLLTERVTFAPPAALNPATLLPEETDEPVTHDCHQLLIEETGVRKDLTDIPLTGEVLTWFTDGSSYVVEGKRMAGAAVVDGTRTIWASSLPEGTSAQKAELMALTQALRLAEGKSINIYTDSRYAFATAHVHGAIYKQRGWLTSAGREIKNKEEILSLLEALHLPKRLAIIHCPGHQKAKDPISRGNQMADRVAKQAAQGVNLLPAGKRTADGSEFEKRTADGSEFESPKKKAKVE

SEQ ID NO: 73 - protein, 2086 aa, synthetic construct
MPAAKRVKLDGGDKKYSIGLDIGTNSVGWAVITDEYKVPSKKFKVLGNTDRHSIKKNLIGALLFDSGETAEATRLKRTARRRYTRRKNRICYLQEIFSNEMAKVDDSFFHRLEESFLVEEDKKHERHPIFGNIVDEVAYHEKYPTIYHLRKKLVDSTDKADLRLIYLALAHMIKFRGHFLIEGDLNPDNSDVDKLFIQLVQTYNQLFEENPINASGVDAKAILSARLSKSRRLENLIAQLPGEKKNGLFGNLIALSLGLTPNFKSNFDLAEDAKLQLSKDTYDDDLDNLLAQIGDQYADLFLAAKNLSDAILLSDILRVNTEITKAPLSASMIKRYDEHHQDLTLLKALVRQQLPEKYKEIFFDQSKNGYAGYIDGGASQEEFYKFIKPILEKMDGTEELLVKLNREDLLRKQRTFDNGSIPHQIHLGELHAILRRQEDFYPFLKDNREKIEKILTFRIPYYVGPLARGNSRFAWMTRKSEETITPWNFEEVVDKGASAQSFIERMTNFDKNLPNEKVLPKHSLLYEYFTVYNELTKVKYVTEGMRKPAFLSGEQKKAIVDLLFKTNRKVTVKQLKEDYFKKIECFDSVEISGVEDRFNASLGTYHDLLKIIKDKDFLDNEENEDILEDIVLTLTLFEDREMIEERLKTYAHLFDDKVMKQLKRRRYTGWGRLSRKLINGIRDKQSGKTILDFLKSDGFANRNFMQLIHDDSLTFKEDIQKAQVSGQGDSLHEHIANLAGSPAIKKGILQTVKVVDELVKVMGRHKPENIVIEMARENQTTQKGQKNSRERMKRIEEGIKELGSQILKEHPVENTQLQNEKLYLYYLQNGRDMYVDQELDINRLSDYDVDHIVPQSFLKDDSIDNKVLTRSDKARGKSDNVPSEEVVKKMKNYWRQLLNAKLITQRKFDNLTKAERGGLSELDKAGFIKRQLVETRQITKHVAQILDSRMNTKYDENDKLIREVKVITLKSKLVSDFRKDFQFYKVREINNYHHAHDAYLNAVVGTALIKKYPKLESEFVYGDYKVYDVRKMIAKSEQEIGKATAKYFFYSNIMNFFKTEITLANGEIRKRPLIETNGETGEIVWDKGRDFATVRKVLSMPQVNIVKKTEVQTGGFSKESILPKRNSDKLIARKKDWDPKKYGGFDSPTVAYSVLVVAKVEKGKSKKLKSVKELLGITIMERSSFEKNPIDFLEAKGYKEVKKDLIIKLPKYSLFELENGRKRMLASAGELQKGNELALPSKYVNFLYLASHYEKLKGSPEDNEQKQLFVEQHKHYLDEIIEQISEFSKRVILADANLDKVLSAYNKHRDKPIREQAENIIHLFTLTNLGAPAAFKYFDTTIDRKRYTSTKEVLDATLIHQSITGLYETRIDLSQLGGDGGGSSPAPGGGGGLDDEYRLYSPLVKPDQNIQFWLEQFPQAWAETAGMGLAKQVPPQVIQLKASATPVSVRQYPLSKEAQEGIRPHVQRLIQQGILVPVQSPWNTPLLPVRKPGTNDYRPVQDLREVNKRVQDIHPTVPNPYNLLCALPPQRSWYTVLDLKDAFFCLRLHPTSQPLFAFEWRDPGTGRTGQLTWTRLPQGFKNSPTIFNEALHRDLANFRIQHPQVTLLQYVDDLLLAGATKQDCLEGTKALLLELSDLGYRASAKKAQICRREVTYLGYSLRDGQRWLTEARKKTVVQIPAPTTAKQVREFLGKAGFCRLFIPGFATLAAPLYPLTKPKGEFSWAPEHQKAFDAIKKALLSAPALALPDVTKPFTLYVDERKGVARGVLTQTLGPWRRPVAYLSKKLDPVASGWPVCLKAIAAVAILVKDADKLTLGQNITVIAPHALENIVRQPPDRWMTNARMTHYQSLLLTERVTFAPPAALNPATLLPEETDEPVTHDCHQLLIEETGVRKDLTDIPLTGEVLTWFTDGSSYVVEGKRMAGAAVVDGTRTIWASSLPEGTSAQKAELMALTQALRLAEGKSINIYTDSRYAFATAHVHGAIYKQRGWLTSAGREIKNKEEILSLLEALHLPKRLAIIHCPGHQKAKDPISRGNQMADRVAKQAAQGVNLLPAGKRTADGSEFEKRTADGSEFESPKKKAKVE

SEQ ID NO: 74 - protein, 2089 aa, synthetic construct
MPAAKRVKLDGGDKKYSIGLDIGTNSVGWAVITDEYKVPSKKFKVLGNTDRHSIKKNLIGALLFDSGETAEATRLKRTARRRYTRRKNRICYLQEIFSNEMAKVDDSFFHRLEESFLVEEDKKHERHPIFGNIVDEVAYHEKYPTIYHLRKKLVDSTDKADLRLIYLALAHMIKFRGHFLIEGDLNPDNSDVDKLFIQLVQTYNQLFEENPINASGVDAKAILSARLSKSRRLENLIAQLPGEKKNGLFGNLIALSLGLTPNFKSNFDLAEDAKLQLSKDTYDDDLDNLLAQIGDQYADLFLAAKNLSDAILLSDILRVNTEITKAPLSASMIKRYDEHHQDLTLLKALVRQQLPEKYKEIFFDQSKNGYAGYIDGGASQEEFYKFIKPILEKMDGTEELLVKLNREDLLRKQRTFDNGSIPHQIHLGELHAILRRQEDFYPFLKDNREKIEKILTFRIPYYVGPLARGNSRFAWMTRKSEETITPWNFEEVVDKGASAQSFIERMTNFDKNLPNEKVLPKHSLLYEYFTVYNELTKVKYVTEGMRKPAFLSGEQKKAIVDLLFKTNRKVTVKQLKEDYFKKIECFDSVEISGVEDRFNASLGTYHDLLKIIKDKDFLDNEENEDILEDIVLTLTLFEDREMIEERLKTYAHLFDDKVMKQLKRRRYTGWGRLSRKLINGIRDKQSGKTILDFLKSDGFANRNFMQLIHDDSLTFKEDIQKAQVSGQGDSLHEHIANLAGSPAIKKGILQTVKVVDELVKVMGRHKPENIVIEMARENQTTQKGQKNSRERMKRIEEGIKELGSQILKEHPVENTQLQNEKLYLYYLQNGRDMYVDQELDINRLSDYDVDHIVPQSFLKDDSIDNKVLTRSDKARGKSDNVPSEEVVKKMKNYWRQLLNAKLITQRKFDNLTKAERGGLSELDKAGFIKRQLVETRQITKHVAQILDSRMNTKYDENDKLIREVKVITLKSKLVSDFRKDFQFYKVREINNYHHAHDAYLNAVVGTALIKKYPKLESEFVYGDYKVYDVRKMIAKSEQEIGKATAKYFFYSNIMNFFKTEITLANGEIRKRPLIETNGETGEIVWDKGRDFATVRKVLSMPQVNIVKKTEVQTGGFSKESILPKRNSDKLIARKKDWDPKKYGGFDSPTVAYSVLVVAKVEKGKSKKLKSVKELLGITIMERSSFEKNPIDFLEAKGYKEVKKDLIIKLPKYSLFELENGRKRMLASAGELQKGNELALPSKYVNFLYLASHYEKLKGSPEDNEQKQLFVEQHKHYLDEIIEQISEFSKRVILADANLDKVLSAYNKHRDKPIREQAENIIHLFTLTNLGAPAAFKYFDTTIDRKRYTSTKEVLDATLIHQSITGLYETRIDLSQLGGDGGGSAGSAAGSGEFGGLDDEYRLYSPLVKPDQNIQFWLEQFPQAWAETAGMGLAKQVPPQVIQLKASATPVSVRQYPLSKEAQEGIRPHVQRLIQQGILVPVQSPWNTPLLPVRKPGTNDYRPVQDLREVNKRVQDIHPTVPNPYNLLCALPPQRSWYTVLDLKDAFFCLRLHPTSQPLFAFEWRDPGTGRTGQLTWTRLPQGFKNSPTIFNEALHRDLANFRIQHPQVTLLQYVDDLLLAGATKQDCLEGTKALLLELSDLGYRASAKKAQICRREVTYLGYSLRDGQRWLTEARKKTVVQIPAPTTAKQVREFLGKAGFCRLFIPGFATLAAPLYPLTKPKGEFSWAPEHQKAFDAIKKALLSAPALALPDVTKPFTLYVDERKGVARGVLTQTLGPWRRPVAYLSKKLDPVASGWPVCLKAIAAVAILVKDADKLTLGQNITVIAPHALENIVRQPPDRWMTNARMTHYQSLLLTERVTFAPPAALNPATLLPEETDEPVTHDCHQLLIEETGVRKDLTDIPLTGEVLTWFTDGSSYVVEGKRMAGAAVVDGTRTIWASSLPEGTSAQKAELMALTQALRLAEGKSINIYTDSRYAFATAHVHGAIYKQRGWLTSAGREIKNKEEILSLLEALHLPKRLAIIHCPGHQKAKDPISRGNQMADRVAKQAAQGVNLLPAGKRTADGSEFEKRTADGSEFESPKKKAKVE

SEQ ID NO: 75 - protein, 2092 aa, synthetic construct
MPAAKRVKLDGGDKKYSIGLDIGTNSVGWAVITDEYKVPSKKFKVLGNTDRHSIKKNLIGALLFDSGETAEATRLKRTARRRYTRRKNRICYLQEIFSNEMAKVDDSFFHRLEESFLVEEDKKHERHPIFGNIVDEVAYHEKYPTIYHLRKKLVDSTDKADLRLIYLALAHMIKFRGHFLIEGDLNPDNSDVDKLFIQLVQTYNQLFEENPINASGVDAKAILSARLSKSRRLENLIAQLPGEKKNGLFGNLIALSLGLTPNFKSNFDLAEDAKLQLSKDTYDDDLDNLLAQIGDQYADLFLAAKNLSDAILLSDILRVNTEITKAPLSASMIKRYDEHHQDLTLLKALVRQQLPEKYKEIFFDQSKNGYAGYIDGGASQEEFYKFIKPILEKMDGTEELLVKLNREDLLRKQRTFDNGSIPHQIHLGELHAILRRQEDFYPFLKDNREKIEKILTFRIPYYVGPLARGNSRFAWMTRKSEETITPWNFEEVVDKGASAQSFIERMTNFDKNLPNEKVLPKHSLLYEYFTVYNELTKVKYVTEGMRKPAFLSGEQKKAIVDLLFKTNRKVTVKQLKEDYFKKIECFDSVEISGVEDRFNASLGTYHDLLKIIKDKDFLDNEENEDILEDIVLTLTLFEDREMIEERLKTYAHLFDDKVMKQLKRRRYTGWGRLSRKLINGIRDKQSGKTILDFLKSDGFANRNFMQLIHDDSLTFKEDIQKAQVSGQGDSLHEHIANLAGSPAIKKGILQTVKVVDELVKVMGRHKPENIVIEMARENQTTQKGQKNSRERMKRIEEGIKELGSQILKEHPVENTQLQNEKLYLYYLQNGRDMYVDQELDINRLSDYDVDHIVPQSFLKDDSIDNKVLTRSDKARGKSDNVPSEEVVKKMKNYWRQLLNAKLITQRKFDNLTKAERGGLSELDKAGFIKRQLVETRQITKHVAQILDSRMNTKYDENDKLIREVKVITLKSKLVSDFRKDFQFYKVREINNYHHAHDAYLNAVVGTALIKKYPKLESEFVYGDYKVYDVRKMIAKSEQEIGKATAKYFFYSNIMNFFKTEITLANGEIRKRPLIETNGETGEIVWDKGRDFATVRKVLSMPQVNIVKKTEVQTGGFSKESILPKRNSDKLIARKKDWDPKKYGGFDSPTVAYSVLVVAKVEKGKSKKLKSVKELLGITIMERSSFEKNPIDFLEAKGYKEVKKDLIIKLPKYSLFELENGRKRMLASAGELQKGNELALPSKYVNFLYLASHYEKLKGSPEDNEQKQLFVEQHKHYLDEIIEQISEFSKRVILADANLDKVLSAYNKHRDKPIREQAENIIHLFTLTNLGAPAAFKYFDTTIDRKRYTSTKEVLDATLIHQSITGLYETRIDLSQLGGDGGGGGGSEAAAKGGGGSGGLDDEYRLYSPLVKPDQNIQFWLEQFPQAWAETAGMGLAKQVPPQVIQLKASATPVSVRQYPLSKEAQEGIRPHVQRLIQQGILVPVQSPWNTPLLPVRKPGTNDYRPVQDLREVNKRVQDIHPTVPNPYNLLCALPPQRSWYTVLDLKDAFFCLRLHPTSQPLFAFEWRDPGTGRTGQLTWTRLPQGFKNSPTIFNEALHRDLANFRIQHPQVTLLQYVDDLLLAGATKQDCLEGTKALLLELSDLGYRASAKKAQICRREVTYLGYSLRDGQRWLTEARKKTVVQIPAPTTAKQVREFLGKAGFCRLFIPGFATLAAPLYPLTKPKGEFSWAPEHQKAFDAIKKALLSAPALALPDVTKPFTLYVDERKGVARGVLTQTLGPWRRPVAYLSKKLDPVASGWPVCLKAIAAVAILVKDADKLTLGQNITVIAPHALENIVRQPPDRWMTNARMTHYQSLLLTERVTFAPPAALNPATLLPEETDEPVTHDCHQLLIEETGVRKDLTDIPLTGEVLTWFTDGSSYVVEGKRMAGAAVVDGTRTIWASSLPEGTSAQKAELMALTQALRLAEGKSINIYTDSRYAFATAHVHGAIYKQRGWLTSAGREIKNKEEILSLLEALHLPKRLAIIHCPGHQKAKDPISRGNQMADRVAKQAAQGVNLLPAGKRTADGSEFEKRTADGSEFESPKKKAKVE

SEQ ID NO: 76 - protein, 2083 aa, synthetic construct
MPAAKRVKLDGGDKKYSIGLDIGTNSVGWAVITDEYKVPSKKFKVLGNTDRHSIKKNLIGALLFDSGETAEATRLKRTARRRYTRRKNRICYLQEIFSNEMAKVDDSFFHRLEESFLVEEDKKHERHPIFGNIVDEVAYHEKYPTIYHLRKKLVDSTDKADLRLIYLALAHMIKFRGHFLIEGDLNPDNSDVDKLFIQLVQTYNQLFEENPINASGVDAKAILSARLSKSRRLENLIAQLPGEKKNGLFGNLIALSLGLTPNFKSNFDLAEDAKLQLSKDTYDDDLDNLLAQIGDQYADLFLAAKNLSDAILLSDILRVNTEITKAPLSASMIKRYDEHHQDLTLLKALVRQQLPEKYKEIFFDQSKNGYAGYIDGGASQEEFYKFIKPILEKMDGTEELLVKLNREDLLRKQRTFDNGSIPHQIHLGELHAILRRQEDFYPFLKDNREKIEKILTFRIPYYVGPLARGNSRFAWMTRKSEETITPWNFEEVVDKGASAQSFIERMTNFDKNLPNEKVLPKHSLLYEYFTVYNELTKVKYVTEGMRKPAFLSGEQKKAIVDLLFKTNRKVTVKQLKEDYFKKIECFDSVEISGVEDRFNASLGTYHDLLKIIKDKDFLDNEENEDILEDIVLTLTLFEDREMIEERLKTYAHLFDDKVMKQLKRRRYTGWGRLSRKLINGIRDKQSGKTILDFLKSDGFANRNFMQLIHDDSLTFKEDIQKAQVSGQGDSLHEHIANLAGSPAIKKGILQTVKVVDELVKVMGRHKPENIVIEMARENQTTQKGQKNSRERMKRIEEGIKELGSQILKEHPVENTQLQNEKLYLYYLQNGRDMYVDQELDINRLSDYDVDHIVPQSFLKDDSIDNKVLTRSDKARGKSDNVPSEEVVKKMKNYWRQLLNAKLITQRKFDNLTKAERGGLSELDKAGFIKRQLVETRQITKHVAQILDSRMNTKYDENDKLIREVKVITLKSKLVSDFRKDFQFYKVREINNYHHAHDAYLNAVVGTALIKKYPKLESEFVYGDYKVYDVRKMIAKSEQEIGKATAKYFFYSNIMNFFKTEITLANGEIRKRPLIETNGETGEIVWDKGRDFATVRKVLSMPQVNIVKKTEVQTGGFSKESILPKRNSDKLIARKKDWDPKKYGGFDSPTVAYSVLVVAKVEKGKSKKLKSVKELLGITIMERSSFEKNPIDFLEAKGYKEVKKDLIIKLPKYSLFELENGRKRMLASAGELQKGNELALPSKYVNFLYLASHYEKLKGSPEDNEQKQLFVEQHKHYLDEIIEQISEFSKRVILADANLDKVLSAYNKHRDKPIREQAENIIHLFTLTNLGAPAAFKYFDTTIDRKRYTSTKEVLDATLIHQSITGLYETRIDLSQLGGDGGGGGPAPGGLDDEYRLYSPLVKPDQNIQFWLEQFPQAWAETAGMGLAKQVPPQVIQLKASATPVSVRQYPLSKEAQEGIRPHVQRLIQQGILVPVQSPWNTPLLPVRKPGTNDYRPVQDLREVNKRVQDIHPTVPNPYNLLCALPPQRSWYTVLDLKDAFFCLRLHPTSQPLFAFEWRDPGTGRTGQLTWTRLPQGFKNSPTIFNEALHRDLANFRIQHPQVTLLQYVDDLLLAGATKQDCLEGTKALLLELSDLGYRASAKKAQICRREVTYLGYSLRDGQRWLTEARKKTVVQIPAPTTAKQVREFLGKAGFCRLFIPGFATLAAPLYPLTKPKGEFSWAPEHQKAFDAIKKALLSAPALALPDVTKPFTLYVDERKGVARGVLTQTLGPWRRPVAYLSKKLDPVASGWPVCLKAIAAVAILVKDADKLTLGQNITVIAPHALENIVRQPPDRWMTNARMTHYQSLLLTERVTFAPPAALNPATLLPEETDEPVTHDCHQLLIEETGVRKDLTDIPLTGEVLTWFTDGSSYVVEGKRMAGAAVVDGTRTIWASSLPEGTSAQKAELMALTQALRLAEGKSINIYTDSRYAFATAHVHGAIYKQRGWLTSAGREIKNKEEILSLLEALHLPKRLAIIHCPGHQKAKDPISRGNQMADRVAKQAAQGVNLLPAGKRTADGSEFEKRTADGSEFESPKKKAKVE

SEQ ID NO: 77 - protein, 2084 aa, synthetic construct
MPAAKRVKLDGGDKKYSIGLDIGTNSVGWAVITDEYKVPSKKFKVLGNTDRHSIKKNLIGALLFDSGETAEATRLKRTARRRYTRRKNRICYLQEIFSNEMAKVDDSFFHRLEESFLVEEDKKHERHPIFGNIVDEVAYHEKYPTIYHLRKKLVDSTDKADLRLIYLALAHMIKFRGHFLIEGDLNPDNSDVDKLFIQLVQTYNQLFEENPINASGVDAKAILSARLSKSRRLENLIAQLPGEKKNGLFGNLIALSLGLTPNFKSNFDLAEDAKLQLSKDTYDDDLDNLLAQIGDQYADLFLAAKNLSDAILLSDILRVNTEITKAPLSASMIKRYDEHHQDLTLLKALVRQQLPEKYKEIFFDQSKNGYAGYIDGGASQEEFYKFIKPILEKMDGTEELLVKLNREDLLRKQRTFDNGSIPHQIHLGELHAILRRQEDFYPFLKDNREKIEKILTFRIPYYVGPLARGNSRFAWMTRKSEETITPWNFEEVVDKGASAQSFIERMTNFDKNLPNEKVLPKHSLLYEYFTVYNELTKVKYVTEGMRKPAFLSGEQKKAIVDLLFKTNRKVTVKQLKEDYFKKIECFDSVEISGVEDRFNASLGTYHDLLKIIKDKDFLDNEENEDILEDIVLTLTLFEDREMIEERLKTYAHLFDDKVMKQLKRRRYTGWGRLSRKLINGIRDKQSGKTILDFLKSDGFANRNFMQLIHDDSLTFKEDIQKAQVSGQGDSLHEHIANLAGSPAIKKGILQTVKVVDELVKVMGRHKPENIVIEMARENQTTQKGQKNSRERMKRIEEGIKELGSQILKEHPVENTQLQNEKLYLYYLQNGRDMYVDQELDINRLSDYDVDHIVPQSFLKDDSIDNKVLTRSDKARGKSDNVPSEEVVKKMKNYWRQLLNAKLITQRKFDNLTKAERGGLSELDKAGFIKRQLVETRQITKHVAQILDSRMNTKYDENDKLIREVKVITLKSKLVSDFRKDFQFYKVREINNYHHAHDAYLNAVVGTALIKKYPKLESEFVYGDYKVYDVRKMIAKSEQEIGKATAKYFFYSNIMNFFKTEITLANGEIRKRPLIETNGETGEIVWDKGRDFATVRKVLSMPQVNIVKKTEVQTGGFSKESILPKRNSDKLIARKKDWDPKKYGGFDSPTVAYSVLVVAKVEKGKSKKLKSVKELLGITIMERSSFEKNPIDFLEAKGYKEVKKDLIIKLPKYSLFELENGRKRMLASAGELQKGNELALPSKYVNFLYLASHYEKLKGSPEDNEQKQLFVEQHKHYLDEIIEQISEFSKRVILADANLDKVLSAYNKHRDKPIREQAENIIHLFTLTNLGAPAAFKYFDTTIDRKRYTSTKEVLDATLIHQSITGLYETRIDLSQLGGDGGGGGGGGGGGLDDEYRLYSPLVKPDQNIQFWLEQFPQAWAETAGMGLAKQVPPQVIQLKASATPVSVRQYPLSKEAQEGIRPHVQRLIQQGILVPVQSPWNTPLLPVRKPGTNDYRPVQDLREVNKRVQDIHPTVPNPYNLLCALPPQRSWYTVLDLKDAFFCLRLHPTSQPLFAFEWRDPGTGRTGQLTWTRLPQGFKNSPTIFNEALHRDLANFRIQHPQVTLLQYVDDLLLAGATKQDCLEGTKALLLELSDLGYRASAKKAQICRREVTYLGYSLRDGQRWLTEARKKTVVQIPAPTTAKQVREFLGKAGFCRLFIPGFATLAAPLYPLTKPKGEFSWAPEHQKAFDAIKKALLSAPALALPDVTKPFTLYVDERKGVARGVLTQTLGPWRRPVAYLSKKLDPVASGWPVCLKAIAAVAILVKDADKLTLGQNITVIAPHALENIVRQPPDRWMTNARMTHYQSLLLTERVTFAPPAALNPATLLPEETDEPVTHDCHQLLIEETGVRKDLTDIPLTGEVLTWFTDGSSYVVEGKRMAGAAVVDGTRTIWASSLPEGTSAQKAELMALTQALRLAEGKSINIYTDSRYAFATAHVHGAIYKQRGWLTSAGREIKNKEEILSLLEALHLPKRLAIIHCPGHQKAKDPISRGNQMADRVAKQAAQGVNLLPAGKRTADGSEFEKRTADGSEFESPKKKAKVE

SEQ ID NO: 78 - protein, 2083 aa, synthetic construct
MPAAKRVKLDGGDKKYSIGLDIGTNSVGWAVITDEYKVPSKKFKVLGNTDRHSIKKNLIGALLFDSGETAEATRLKRTARRRYTRRKNRICYLQEIFSNEMAKVDDSFFHRLEESFLVEEDKKHERHPIFGNIVDEVAYHEKYPTIYHLRKKLVDSTDKADLRLIYLALAHMIKFRGHFLIEGDLNPDNSDVDKLFIQLVQTYNQLFEENPINASGVDAKAILSARLSKSRRLENLIAQLPGEKKNGLFGNLIALSLGLTPNFKSNFDLAEDAKLQLSKDTYDDDLDNLLAQIGDQYADLFLAAKNLSDAILLSDILRVNTEITKAPLSASMIKRYDEHHQDLTLLKALVRQQLPEKYKEIFFDQSKNGYAGYIDGGASQEEFYKFIKPILEKMDGTEELLVKLNREDLLRKQRTFDNGSIPHQIHLGELHAILRRQEDFYPFLKDNREKIEKILTFRIPYYVGPLARGNSRFAWMTRKSEETITPWNFEEVVDKGASAQSFIERMTNFDKNLPNEKVLPKHSLLYEYFTVYNELTKVKYVTEGMRKPAFLSGEQKKAIVDLLFKTNRKVTVKQLKEDYFKKIECFDSVEISGVEDRFNASLGTYHDLLKIIKDKDFLDNEENEDILEDIVLTLTLFEDREMIEERLKTYAHLFDDKVMKQLKRRRYTGWGRLSRKLINGIRDKQSGKTILDFLKSDGFANRNFMQLIHDDSLTFKEDIQKAQVSGQGDSLHEHIANLAGSPAIKKGILQTVKVVDELVKVMGRHKPENIVIEMARENQTTQKGQKNSRERMKRIEEGIKELGSQILKEHPVENTQLQNEKLYLYYLQNGRDMYVDQELDINRLSDYDVDHIVPQSFLKDDSIDNKVLTRSDKARGKSDNVPSEEVVKKMKNYWRQLLNAKLITQRKFDNLTKAERGGLSELDKAGFIKRQLVETRQITKHVAQILDSRMNTKYDENDKLIREVKVITLKSKLVSDFRKDFQFYKVREINNYHHAHDAYLNAVVGTALIKKYPKLESEFVYGDYKVYDVRKMIAKSEQEIGKATAKYFFYSNIMNFFKTEITLANGEIRKRPLIETNGETGEIVWDKGRDFATVRKVLSMPQVNIVKKTEVQTGGFSKESILPKRNSDKLIARKKDWDPKKYGGFDSPTVAYSVLVVAKVEKGKSKKLKSVKELLGITIMERSSFEKNPIDFLEAKGYKEVKKDLIIKLPKYSLFELENGRKRMLASAGELQKGNELALPSKYVNFLYLASHYEKLKGSPEDNEQKQLFVEQHKHYLDEIIEQISEFSKRVILADANLDKVLSAYNKHRDKPIREQAENIIHLFTLTNLGAPAAFKYFDTTIDRKRYTSTKEVLDATLIHQSITGLYETRIDLSQLGGDGGGGSPAPGGLDDEYRLYSPLVKPDQNIQFWLEQFPQAWAETAGMGLAKQVPPQVIQLKASATPVSVRQYPLSKEAQEGIRPHVQRLIQQGILVPVQSPWNTPLLPVRKPGTNDYRPVQDLREVNKRVQDIHPTVPNPYNLLCALPPQRSWYTVLDLKDAFFCLRLHPTSQPLFAFEWRDPGTGRTGQLTWTRLPQGFKNSPTIFNEALHRDLANFRIQHPQVTLLQYVDDLLLAGATKQDCLEGTKALLLELSDLGYRASAKKAQICRREVTYLGYSLRDGQRWLTEARKKTVVQIPAPTTAKQVREFLGKAGFCRLFIPGFATLAAPLYPLTKPKGEFSWAPEHQKAFDAIKKALLSAPALALPDVTKPFTLYVDERKGVARGVLTQTLGPWRRPVAYLSKKLDPVASGWPVCLKAIAAVAILVKDADKLTLGQNITVIAPHALENIVRQPPDRWMTNARMTHYQSLLLTERVTFAPPAALNPATLLPEETDEPVTHDCHQLLIEETGVRKDLTDIPLTGEVLTWFTDGSSYVVEGKRMAGAAVVDGTRTIWASSLPEGTSAQKAELMALTQALRLAEGKSINIYTDSRYAFATAHVHGAIYKQRGWLTSAGREIKNKEEILSLLEALHLPKRLAIIHCPGHQKAKDPISRGNQMADRVAKQAAQGVNLLPAGKRTADGSEFEKRTADGSEFESPKKKAKVE

SEQ ID NO: 79 - protein, 2083 aa, synthetic construct
MPAAKRVKLDGGDKKYSIGLDIGTNSVGWAVITDEYKVPSKKFKVLGNTDRHSIKKNLIGALLFDSGETAEATRLKRTARRRYTRRKNRICYLQEIFSNEMAKVDDSFFHRLEESFLVEEDKKHERHPIFGNIVDEVAYHEKYPTIYHLRKKLVDSTDKADLRLIYLALAHMIKFRGHFLIEGDLNPDNSDVDKLFIQLVQTYNQLFEENPINASGVDAKAILSARLSKSRRLENLIAQLPGEKKNGLFGNLIALSLGLTPNFKSNFDLAEDAKLQLSKDTYDDDLDNLLAQIGDQYADLFLAAKNLSDAILLSDILRVNTEITKAPLSASMIKRYDEHHQDLTLLKALVRQQLPEKYKEIFFDQSKNGYAGYIDGGASQEEFYKFIKPILEKMDGTEELLVKLNREDLLRKQRTFDNGSIPHQIHLGELHAILRRQEDFYPFLKDNREKIEKILTFRIPYYVGPLARGNSRFAWMTRKSEETITPWNFEEVVDKGASAQSFIERMTNFDKNLPNEKVLPKHSLLYEYFTVYNELTKVKYVTEGMRKPAFLSGEQKKAIVDLLFKTNRKVTVKQLKEDYFKKIECFDSVEISGVEDRFNASLGTYHDLLKIIKDKDFLDNEENEDILEDIVLTLTLFEDREMIEERLKTYAHLFDDKVMKQLKRRRYTGWGRLSRKLINGIRDKQSGKTILDFLKSDGFANRNFMQLIHDDSLTFKEDIQKAQVSGQGDSLHEHIANLAGSPAIKKGILQTVKVVDELVKVMGRHKPENIVIEMARENQTTQKGQKNSRERMKRIEEGIKELGSQILKEHPVENTQLQNEKLYLYYLQNGRDMYVDQELDINRLSDYDVDHIVPQSFLKDDSIDNKVLTRSDKARGKSDNVPSEEVVKKMKNYWRQLLNAKLITQRKFDNLTKAERGGLSELDKAGFIKRQLVETRQITKHVAQILDSRMNTKYDENDKLIREVKVITLKSKLVSDFRKDFQFYKVREINNYHHAHDAYLNAVVGTALIKKYPKLESEFVYGDYKVYDVRKMIAKSEQEIGKATAKYFFYSNIMNFFKTEITLANGEIRKRPLIETNGETGEIVWDKGRDFATVRKVLSMPQVNIVKKTEVQTGGFSKESILPKRNSDKLIARKKDWDPKKYGGFDSPTVAYSVLVVAKVEKGKSKKLKSVKELLGITIMERSSFEKNPIDFLEAKGYKEVKKDLIIKLPKYSLFELENGRKRMLASAGELQKGNELALPSKYVNFLYLASHYEKLKGSPEDNEQKQLFVEQHKHYLDEIIEQISEFSKRVILADANLDKVLSAYNKHRDKPIREQAENIIHLFTLTNLGAPAAFKYFDTTIDRKRYTSTKEVLDATLIHQSITGLYETRIDLSQLGGDGGPAPGGGGGLDDEYRLYSPLVKPDQNIQFWLEQFPQAWAETAGMGLAKQVPPQVIQLKASATPVSVRQYPLSKEAQEGIRPHVQRLIQQGILVPVQSPWNTPLLPVRKPGTNDYRPVQDLREVNKRVQDIHPTVPNPYNLLCALPPQRSWYTVLDLKDAFFCLRLHPTSQPLFAFEWRDPGTGRTGQLTWTRLPQGFKNSPTIFNEALHRDLANFRIQHPQVTLLQYVDDLLLAGATKQDCLEGTKALLLELSDLGYRASAKKAQICRREVTYLGYSLRDGQRWLTEARKKTVVQIPAPTTAKQVREFLGKAGFCRLFIPGFATLAAPLYPLTKPKGEFSWAPEHQKAFDAIKKALLSAPALALPDVTKPFTLYVDERKGVARGVLTQTLGPWRRPVAYLSKKLDPVASGWPVCLKAIAAVAILVKDADKLTLGQNITVIAPHALENIVRQPPDRWMTNARMTHYQSLLLTERVTFAPPAALNPATLLPEETDEPVTHDCHQLLIEETGVRKDLTDIPLTGEVLTWFTDGSSYVVEGKRMAGAAVVDGTRTIWASSLPEGTSAQKAELMALTQALRLAEGKSINIYTDSRYAFATAHVHGAIYKQRGWLTSAGREIKNKEEILSLLEALHLPKRLAIIHCPGHQKAKDPISRGNQMADRVAKQAAQGVNLLPAGKRTADGSEFEKRTADGSEFESPKKKAKVE

SEQ ID NO: 80 - protein, 2088 aa, synthetic construct
MPAAKRVKLDGGDKKYSIGLDIGTNSVGWAVITDEYKVPSKKFKVLGNTDRHSIKKNLIGALLFDSGETAEATRLKRTARRRYTRRKNRICYLQEIFSNEMAKVDDSFFHRLEESFLVEEDKKHERHPIFGNIVDEVAYHEKYPTIYHLRKKLVDSTDKADLRLIYLALAHMIKFRGHFLIEGDLNPDNSDVDKLFIQLVQTYNQLFEENPINASGVDAKAILSARLSKSRRLENLIAQLPGEKKNGLFGNLIALSLGLTPNFKSNFDLAEDAKLQLSKDTYDDDLDNLLAQIGDQYADLFLAAKNLSDAILLSDILRVNTEITKAPLSASMIKRYDEHHQDLTLLKALVRQQLPEKYKEIFFDQSKNGYAGYIDGGASQEEFYKFIKPILEKMDGTEELLVKLNREDLLRKQRTFDNGSIPHQIHLGELHAILRRQEDFYPFLKDNREKIEKILTFRIPYYVGPLARGNSRFAWMTRKSEETITPWNFEEVVDKGASAQSFIERMTNFDKNLPNEKVLPKHSLLYEYFTVYNELTKVKYVTEGMRKPAFLSGEQKKAIVDLLFKTNRKVTVKQLKEDYFKKIECFDSVEISGVEDRFNASLGTYHDLLKIIKDKDFLDNEENEDILEDIVLTLTLFEDREMIEERLKTYAHLFDDKVMKQLKRRRYTGWGRLSRKLINGIRDKQSGKTILDFLKSDGFANRNFMQLIHDDSLTFKEDIQKAQVSGQGDSLHEHIANLAGSPAIKKGILQTVKVVDELVKVMGRHKPENIVIEMARENQTTQKGQKNSRERMKRIEEGIKELGSQILKEHPVENTQLQNEKLYLYYLQNGRDMYVDQELDINRLSDYDVDHIVPQSFLKDDSIDNKVLTRSDKARGKSDNVPSEEVVKKMKNYWRQLLNAKLITQRKFDNLTKAERGGLSELDKAGFIKRQLVETRQITKHVAQILDSRMNTKYDENDKLIREVKVITLKSKLVSDFRKDFQFYKVREINNYHHAHDAYLNAVVGTALIKKYPKLESEFVYGDYKVYDVRKMIAKSEQEIGKATAKYFFYSNIMNFFKTEITLANGEIRKRPLIETNGETGEIVWDKGRDFATVRKVLSMPQVNIVKKTEVQTGGFSKESILPKRNSDKLIARKKDWDPKKYGGFDSPTVAYSVLVVAKVEKGKSKKLKSVKELLGITIMERSSFEKNPIDFLEAKGYKEVKKDLIIKLPKYSLFELENGRKRMLASAGELQKGNELALPSKYVNFLYLASHYEKLKGSPEDNEQKQLFVEQHKHYLDEIIEQISEFSKRVILADANLDKVLSAYNKHRDKPIREQAENIIHLFTLTNLGAPAAFKYFDTTIDRKRYTSTKEVLDATLIHQSITGLYETRIDLSQLGGDGGGGSGSSEAAAKGGLDDEYRLYSPLVKPDQNIQFWLEQFPQAWAETAGMGLAKQVPPQVIQLKASATPVSVRQYPLSKEAQEGIRPHVQRLIQQGILVPVQSPWNTPLLPVRKPGTNDYRPVQDLREVNKRVQDIHPTVPNPYNLLCALPPQRSWYTVLDLKDAFFCLRLHPTSQPLFAFEWRDPGTGRTGQLTWTRLPQGFKNSPTIFNEALHRDLANFRIQHPQVTLLQYVDDLLLAGATKQDCLEGTKALLLELSDLGYRASAKKAQICRREVTYLGYSLRDGQRWLTEARKKTVVQIPAPTTAKQVREFLGKAGFCRLFIPGFATLAAPLYPLTKPKGEFSWAPEHQKAFDAIKKALLSAPALALPDVTKPFTLYVDERKGVARGVLTQTLGPWRRPVAYLSKKLDPVASGWPVCLKAIAAVAILVKDADKLTLGQNITVIAPHALENIVRQPPDRWMTNARMTHYQSLLLTERVTFAPPAALNPATLLPEETDEPVTHDCHQLLIEETGVRKDLTDIPLTGEVLTWFTDGSSYVVEGKRMAGAAVVDGTRTIWASSLPEGTSAQKAELMALTQALRLAEGKSINIYTDSRYAFATAHVHGAIYKQRGWLTSAGREIKNKEEILSLLEALHLPKRLAIIHCPGHQKAKDPISRGNQMADRVAKQAAQGVNLLPAGKRTADGSEFEKRTADGSEFESPKKKAKVE

SEQ ID NO: 81 - protein, 2083 aa, synthetic construct
MPAAKRVKLDGGDKKYSIGLDIGTNSVGWAVITDEYKVPSKKFKVLGNTDRHSIKKNLIGALLFDSGETAEATRLKRTARRRYTRRKNRICYLQEIFSNEMAKVDDSFFHRLEESFLVEEDKKHERHPIFGNIVDEVAYHEKYPTIYHLRKKLVDSTDKADLRLIYLALAHMIKFRGHFLIEGDLNPDNSDVDKLFIQLVQTYNQLFEENPINASGVDAKAILSARLSKSRRLENLIAQLPGEKKNGLFGNLIALSLGLTPNFKSNFDLAEDAKLQLSKDTYDDDLDNLLAQIGDQYADLFLAAKNLSDAILLSDILRVNTEITKAPLSASMIKRYDEHHQDLTLLKALVRQQLPEKYKEIFFDQSKNGYAGYIDGGASQEEFYKFIKPILEKMDGTEELLVKLNREDLLRKQRTFDNGSIPHQIHLGELHAILRRQEDFYPFLKDNREKIEKILTFRIPYYVGPLARGNSRFAWMTRKSEETITPWNFEEVVDKGASAQSFIERMTNFDKNLPNEKVLPKHSLLYEYFTVYNELTKVKYVTEGMRKPAFLSGEQKKAIVDLLFKTNRKVTVKQLKEDYFKKIECFDSVEISGVEDRFNASLGTYHDLLKIIKDKDFLDNEENEDILEDIVLTLTLFEDREMIEERLKTYAHLFDDKVMKQLKRRRYTGWGRLSRKLINGIRDKQSGKTILDFLKSDGFANRNFMQLIHDDSLTFKEDIQKAQVSGQGDSLHEHIANLAGSPAIKKGILQTVKVVDELVKVMGRHKPENIVIEMARENQTTQKGQKNSRERMKRIEEGIKELGSQILKEHPVENTQLQNEKLYLYYLQNGRDMYVDQELDINRLSDYDVDHIVPQSFLKDDSIDNKVLTRSDKARGKSDNVPSEEVVKKMKNYWRQLLNAKLITQRKFDNLTKAERGGLSELDKAGFIKRQLVETRQITKHVAQILDSRMNTKYDENDKLIREVKVITLKSKLVSDFRKDFQFYKVREINNYHHAHDAYLNAVVGTALIKKYPKLESEFVYGDYKVYDVRKMIAKSEQEIGKATAKYFFYSNIMNFFKTEITLANGEIRKRPLIETNGETGEIVWDKGRDFATVRKVLSMPQVNIVKKTEVQTGGFSKESILPKRNSDKLIARKKDWDPKKYGGFDSPTVAYSVLVVAKVEKGKSKKLKSVKELLGITIMERSSFEKNPIDFLEAKGYKEVKKDLIIKLPKYSLFELENGRKRMLASAGELQKGNELALPSKYVNFLYLASHYEKLKGSPEDNEQKQLFVEQHKHYLDEIIEQISEFSKRVILADANLDKVLSAYNKHRDKPIREQAENIIHLFTLTNLGAPAAFKYFDTTIDRKRYTSTKEVLDATLIHQSITGLYETRIDLSQLGGDGGGSSGGGGGLDDEYRLYSPLVKPDQNIQFWLEQFPQAWAETAGMGLAKQVPPQVIQLKASATPVSVRQYPLSKEAQEGIRPHVQRLIQQGILVPVQSPWNTPLLPVRKPGTNDYRPVQDLREVNKRVQDIHPTVPNPYNLLCALPPQRSWYTVLDLKDAFFCLRLHPTSQPLFAFEWRDPGTGRTGQLTWTRLPQGFKNSPTIFNEALHRDLANFRIQHPQVTLLQYVDDLLLAGATKQDCLEGTKALLLELSDLGYRASAKKAQICRREVTYLGYSLRDGQRWLTEARKKTVVQIPAPTTAKQVREFLGKAGFCRLFIPGFATLAAPLYPLTKPKGEFSWAPEHQKAFDAIKKALLSAPALALPDVTKPFTLYVDERKGVARGVLTQTLGPWRRPVAYLSKKLDPVASGWPVCLKAIAAVAILVKDADKLTLGQNITVIAPHALENIVRQPPDRWMTNARMTHYQSLLLTERVTFAPPAALNPATLLPEETDEPVTHDCHQLLIEETGVRKDLTDIPLTGEVLTWFTDGSSYVVEGKRMAGAAVVDGTRTIWASSLPEGTSAQKAELMALTQALRLAEGKSINIYTDSRYAFATAHVHGAIYKQRGWLTSAGREIKNKEEILSLLEALHLPKRLAIIHCPGHQKAKDPISRGNQMADRVAKQAAQGVNLLPAGKRTADGSEFEKRTADGSEFESPKKKAKVE

SEQ ID NO: 82 - protein, 2086 aa, synthetic construct
MPAAKRVKLDGGDKKYSIGLDIGTNSVGWAVITDEYKVPSKKFKVLGNTDRHSIKKNLIGALLFDSGETAEATRLKRTARRRYTRRKNRICYLQEIFSNEMAKVDDSFFHRLEESFLVEEDKKHERHPIFGNIVDEVAYHEKYPTIYHLRKKLVDSTDKADLRLIYLALAHMIKFRGHFLIEGDLNPDNSDVDKLFIQLVQTYNQLFEENPINASGVDAKAILSARLSKSRRLENLIAQLPGEKKNGLFGNLIALSLGLTPNFKSNFDLAEDAKLQLSKDTYDDDLDNLLAQIGDQYADLFLAAKNLSDAILLSDILRVNTEITKAPLSASMIKRYDEHHQDLTLLKALVRQQLPEKYKEIFFDQSKNGYAGYIDGGASQEEFYKFIKPILEKMDGTEELLVKLNREDLLRKQRTFDNGSIPHQIHLGELHAILRRQEDFYPFLKDNREKIEKILTFRIPYYVGPLARGNSRFAWMTRKSEETITPWNFEEVVDKGASAQSFIERMTNFDKNLPNEKVLPKHSLLYEYFTVYNELTKVKYVTEGMRKPAFLSGEQKKAIVDLLFKTNRKVTVKQLKEDYFKKIECFDSVEISGVEDRFNASLGTYHDLLKIIKDKDFLDNEENEDILEDIVLTLTLFEDREMIEERLKTYAHLFDDKVMKQLKRRRYTGWGRLSRKLINGIRDKQSGKTILDFLKSDGFANRNFMQLIHDDSLTFKEDIQKAQVSGQGDSLHEHIANLAGSPAIKKGILQTVKVVDELVKVMGRHKPENIVIEMARENQTTQKGQKNSRERMKRIEEGIKELGSQILKEHPVENTQLQNEKLYLYYLQNGRDMYVDQELDINRLSDYDVDHIVPQSFLKDDSIDNKVLTRSDKARGKSDNVPSEEVVKKMKNYWRQLLNAKLITQRKFDNLTKAERGGLSELDKAGFIKRQLVETRQITKHVAQILDSRMNTKYDENDKLIREVKVITLKSKLVSDFRKDFQFYKVREINNYHHAHDAYLNAVVGTALIKKYPKLESEFVYGDYKVYDVRKMIAKSEQEIGKATAKYFFYSNIMNFFKTEITLANGEIRKRPLIETNGETGEIVWDKGRDFATVRKVLSMPQVNIVKKTEVQTGGFSKESILPKRNSDKLIARKKDWDPKKYGGFDSPTVAYSVLVVAKVEKGKSKKLKSVKELLGITIMERSSFEKNPIDFLEAKGYKEVKKDLIIKLPKYSLFELENGRKRMLASAGELQKGNELALPSKYVNFLYLASHYEKLKGSPEDNEQKQLFVEQHKHYLDEIIEQISEFSKRVILADANLDKVLSAYNKHRDKPIREQAENIIHLFTLTNLGAPAAFKYFDTTIDRKRYTSTKEVLDATLIHQSITGLYETRIDLSQLGGDGGPAPGSSGGSGGLDDEYRLYSPLVKPDQNIQFWLEQFPQAWAETAGMGLAKQVPPQVIQLKASATPVSVRQYPLSKEAQEGIRPHVQRLIQQGILVPVQSPWNTPLLPVRKPGTNDYRPVQDLREVNKRVQDIHPTVPNPYNLLCALPPQRSWYTVLDLKDAFFCLRLHPTSQPLFAFEWRDPGTGRTGQLTWTRLPQGFKNSPTIFNEALHRDLANFRIQHPQVTLLQYVDDLLLAGATKQDCLEGTKALLLELSDLGYRASAKKAQICRREVTYLGYSLRDGQRWLTEARKKTVVQIPAPTTAKQVREFLGKAGFCRLFIPGFATLAAPLYPLTKPKGEFSWAPEHQKAFDAIKKALLSAPALALPDVTKPFTLYVDERKGVARGVLTQTLGPWRRPVAYLSKKLDPVASGWPVCLKAIAAVAILVKDADKLTLGQNITVIAPHALENIVRQPPDRWMTNARMTHYQSLLLTERVTFAPPAALNPATLLPEETDEPVTHDCHQLLIEETGVRKDLTDIPLTGEVLTWFTDGSSYVVEGKRMAGAAVVDGTRTIWASSLPEGTSAQKAELMALTQALRLAEGKSINIYTDSRYAFATAHVHGAIYKQRGWLTSAGREIKNKEEILSLLEALHLPKRLAIIHCPGHQKAKDPISRGNQMADRVAKQAAQGVNLLPAGKRTADGSEFEKRTADGSEFESPKKKAKVE

SEQ ID NO: 83 - protein, 2088 aa, synthetic construct
MPAAKRVKLDGGDKKYSIGLDIGTNSVGWAVITDEYKVPSKKFKVLGNTDRHSIKKNLIGALLFDSGETAEATRLKRTARRRYTRRKNRICYLQEIFSNEMAKVDDSFFHRLEESFLVEEDKKHERHPIFGNIVDEVAYHEKYPTIYHLRKKLVDSTDKADLRLIYLALAHMIKFRGHFLIEGDLNPDNSDVDKLFIQLVQTYNQLFEENPINASGVDAKAILSARLSKSRRLENLIAQLPGEKKNGLFGNLIALSLGLTPNFKSNFDLAEDAKLQLSKDTYDDDLDNLLAQIGDQYADLFLAAKNLSDAILLSDILRVNTEITKAPLSASMIKRYDEHHQDLTLLKALVRQQLPEKYKEIFFDQSKNGYAGYIDGGASQEEFYKFIKPILEKMDGTEELLVKLNREDLLRKQRTFDNGSIPHQIHLGELHAILRRQEDFYPFLKDNREKIEKILTFRIPYYVGPLARGNSRFAWMTRKSEETITPWNFEEVVDKGASAQSFIERMTNFDKNLPNEKVLPKHSLLYEYFTVYNELTKVKYVTEGMRKPAFLSGEQKKAIVDLLFKTNRKVTVKQLKEDYFKKIECFDSVEISGVEDRFNASLGTYHDLLKIIKDKDFLDNEENEDILEDIVLTLTLFEDREMIEERLKTYAHLFDDKVMKQLKRRRYTGWGRLSRKLINGIRDKQSGKTILDFLKSDGFANRNFMQLIHDDSLTFKEDIQKAQVSGQGDSLHEHIANLAGSPAIKKGILQTVKVVDELVKVMGRHKPENIVIEMARENQTTQKGQKNSRERMKRIEEGIKELGSQILKEHPVENTQLQNEKLYLYYLQNGRDMYVDQELDINRLSDYDVDHIVPQSFLKDDSIDNKVLTRSDKARGKSDNVPSEEVVKKMKNYWRQLLNAKLITQRKFDNLTKAERGGLSELDKAGFIKRQLVETRQITKHVAQILDSRMNTKYDENDKLIREVKVITLKSKLVSDFRKDFQFYKVREINNYHHAHDAYLNAVVGTALIKKYPKLESEFVYGDYKVYDVRKMIAKSEQEIGKATAKYFFYSNIMNFFKTEITLANGEIRKRPLIETNGETGEIVWDKGRDFATVRKVLSMPQVNIVKKTEVQTGGFSKESILPKRNSDKLIARKKDWDPKKYGGFDSPTVAYSVLVVAKVEKGKSKKLKSVKELLGITIMERSSFEKNPIDFLEAKGYKEVKKDLIIKLPKYSLFELENGRKRMLASAGELQKGNELALPSKYVNFLYLASHYEKLKGSPEDNEQKQLFVEQHKHYLDEIIEQISEFSKRVILADANLDKVLSAYNKHRDKPIREQAENIIHLFTLTNLGAPAAFKYFDTTIDRKRYTSTKEVLDATLIHQSITGLYETRIDLSQLGGDGGEAAAKGSSGGSGGLDDEYRLYSPLVKPDQNIQFWLEQFPQAWAETAGMGLAKQVPPQVIQLKASATPVSVRQYPLSKEAQEGIRPHVQRLIQQGILVPVQSPWNTPLLPVRKPGTNDYRPVQDLREVNKRVQDIHPTVPNPYNLLCALPPQRSWYTVLDLKDAFFCLRLHPTSQPLFAFEWRDPGTGRTGQLTWTRLPQGFKNSPTIFNEALHRDLANFRIQHPQVTLLQYVDDLLLAGATKQDCLEGTKALLLELSDLGYRASAKKAQICRREVTYLGYSLRDGQRWLTEARKKTVVQIPAPTTAKQVREFLGKAGFCRLFIPGFATLAAPLYPLTKPKGEFSWAPEHQKAFDAIKKALLSAPALALPDVTKPFTLYVDERKGVARGVLTQTLGPWRRPVAYLSKKLDPVASGWPVCLKAIAAVAILVKDADKLTLGQNITVIAPHALENIVRQPPDRWMTNARMTHYQSLLLTERVTFAPPAALNPATLLPEETDEPVTHDCHQLLIEETGVRKDLTDIPLTGEVLTWFTDGSSYVVEGKRMAGAAVVDGTRTIWASSLPEGTSAQKAELMALTQALRLAEGKSINIYTDSRYAFATAHVHGAIYKQRGWLTSAGREIKNKEEILSLLEALHLPKRLAIIHCPGHQKAKDPISRGNQMADRVAKQAAQGVNLLPAGKRTADGSEFEKRTADGSEFESPKKKAKVE

SEQ ID NO: 84 - protein, 2082 aa, synthetic construct
MPAAKRVKLDGGDKKYSIGLDIGTNSVGWAVITDEYKVPSKKFKVLGNTDRHSIKKNLIGALLFDSGETAEATRLKRTARRRYTRRKNRICYLQEIFSNEMAKVDDSFFHRLEESFLVEEDKKHERHPIFGNIVDEVAYHEKYPTIYHLRKKLVDSTDKADLRLIYLALAHMIKFRGHFLIEGDLNPDNSDVDKLFIQLVQTYNQLFEENPINASGVDAKAILSARLSKSRRLENLIAQLPGEKKNGLFGNLIALSLGLTPNFKSNFDLAEDAKLQLSKDTYDDDLDNLLAQIGDQYADLFLAAKNLSDAILLSDILRVNTEITKAPLSASMIKRYDEHHQDLTLLKALVRQQLPEKYKEIFFDQSKNGYAGYIDGGASQEEFYKFIKPILEKMDGTEELLVKLNREDLLRKQRTFDNGSIPHQIHLGELHAILRRQEDFYPFLKDNREKIEKILTFRIPYYVGPLARGNSRFAWMTRKSEETITPWNFEEVVDKGASAQSFIERMTNFDKNLPNEKVLPKHSLLYEYFTVYNELTKVKYVTEGMRKPAFLSGEQKKAIVDLLFKTNRKVTVKQLKEDYFKKIECFDSVEISGVEDRFNASLGTYHDLLKIIKDKDFLDNEENEDILEDIVLTLTLFEDREMIEERLKTYAHLFDDKVMKQLKRRRYTGWGRLSRKLINGIRDKQSGKTILDFLKSDGFANRNFMQLIHDDSLTFKEDIQKAQVSGQGDSLHEHIANLAGSPAIKKGILQTVKVVDELVKVMGRHKPENIVIEMARENQTTQKGQKNSRERMKRIEEGIKELGSQILKEHPVENTQLQNEKLYLYYLQNGRDMYVDQELDINRLSDYDVDHIVPQSFLKDDSIDNKVLTRSDKARGKSDNVPSEEVVKKMKNYWRQLLNAKLITQRKFDNLTKAERGGLSELDKAGFIKRQLVETRQITKHVAQILDSRMNTKYDENDKLIREVKVITLKSKLVSDFRKDFQFYKVREINNYHHAHDAYLNAVVGTALIKKYPKLESEFVYGDYKVYDVRKMIAKSEQEIGKATAKYFFYSNIMNFFKTEITLANGEIRKRPLIETNGETGEIVWDKGRDFATVRKVLSMPQVNIVKKTEVQTGGFSKESILPKRNSDKLIARKKDWDPKKYGGFDSPTVAYSVLVVAKVEKGKSKKLKSVKELLGITIMERSSFEKNPIDFLEAKGYKEVKKDLIIKLPKYSLFELENGRKRMLASAGELQKGNELALPSKYVNFLYLASHYEKLKGSPEDNEQKQLFVEQHKHYLDEIIEQISEFSKRVILADANLDKVLSAYNKHRDKPIREQAENIIHLFTLTNLGAPAAFKYFDTTIDRKRYTSTKEVLDATLIHQSITGLYETRIDLSQLGGDGGGGGGSGGLDDEYRLYSPLVKPDQNIQFWLEQFPQAWAETAGMGLAKQVPPQVIQLKASATPVSVRQYPLSKEAQEGIRPHVQRLIQQGILVPVQSPWNTPLLPVRKPGTNDYRPVQDLREVNKRVQDIHPTVPNPYNLLCALPPQRSWYTVLDLKDAFFCLRLHPTSQPLFAFEWRDPGTGRTGQLTWTRLPQGFKNSPTIFNEALHRDLANFRIQHPQVTLLQYVDDLLLAGATKQDCLEGTKALLLELSDLGYRASAKKAQICRREVTYLGYSLRDGQRWLTEARKKTVVQIPAPTTAKQVREFLGKAGFCRLFIPGFATLAAPLYPLTKPKGEFSWAPEHQKAFDAIKKALLSAPALALPDVTKPFTLYVDERKGVARGVLTQTLGPWRRPVAYLSKKLDPVASGWPVCLKAIAAVAILVKDADKLTLGQNITVIAPHALENIVRQPPDRWMTNARMTHYQSLLLTERVTFAPPAALNPATLLPEETDEPVTHDCHQLLIEETGVRKDLTDIPLTGEVLTWFTDGSSYVVEGKRMAGAAVVDGTRTIWASSLPEGTSAQKAELMALTQALRLAEGKSINIYTDSRYAFATAHVHGAIYKQRGWLTSAGREIKNKEEILSLLEALHLPKRLAIIHCPGHQKAKDPISRGNQMADRVAKQAAQGVNLLPAGKRTADGSEFEKRTADGSEFESPKKKAKVE

SEQ ID NO: 85 - protein, 2086 aa, synthetic construct
MPAAKRVKLDGGDKKYSIGLDIGTNSVGWAVITDEYKVPSKKFKVLGNTDRHSIKKNLIGALLFDSGETAEATRLKRTARRRYTRRKNRICYLQEIFSNEMAKVDDSFFHRLEESFLVEEDKKHERHPIFGNIVDEVAYHEKYPTIYHLRKKLVDSTDKADLRLIYLALAHMIKFRGHFLIEGDLNPDNSDVDKLFIQLVQTYNQLFEENPINASGVDAKAILSARLSKSRRLENLIAQLPGEKKNGLFGNLIALSLGLTPNFKSNFDLAEDAKLQLSKDTYDDDLDNLLAQIGDQYADLFLAAKNLSDAILLSDILRVNTEITKAPLSASMIKRYDEHHQDLTLLKALVRQQLPEKYKEIFFDQSKNGYAGYIDGGASQEEFYKFIKPILEKMDGTEELLVKLNREDLLRKQRTFDNGSIPHQIHLGELHAILRRQEDFYPFLKDNREKIEKILTFRIPYYVGPLARGNSRFAWMTRKSEETITPWNFEEVVDKGASAQSFIERMTNFDKNLPNEKVLPKHSLLYEYFTVYNELTKVKYVTEGMRKPAFLSGEQKKAIVDLLFKTNRKVTVKQLKEDYFKKIECFDSVEISGVEDRFNASLGTYHDLLKIIKDKDFLDNEENEDILEDIVLTLTLFEDREMIEERLKTYAHLFDDKVMKQLKRRRYTGWGRLSRKLINGIRDKQSGKTILDFLKSDGFANRNFMQLIHDDSLTFKEDIQKAQVSGQGDSLHEHIANLAGSPAIKKGILQTVKVVDELVKVMGRHKPENIVIEMARENQTTQKGQKNSRERMKRIEEGIKELGSQILKEHPVENTQLQNEKLYLYYLQNGRDMYVDQELDINRLSDYDVDHIVPQSFLKDDSIDNKVLTRSDKARGKSDNVPSEEVVKKMKNYWRQLLNAKLITQRKFDNLTKAERGGLSELDKAGFIKRQLVETRQITKHVAQILDSRMNTKYDENDKLIREVKVITLKSKLVSDFRKDFQFYKVREINNYHHAHDAYLNAVVGTALIKKYPKLESEFVYGDYKVYDVRKMIAKSEQEIGKATAKYFFYSNIMNFFKTEITLANGEIRKRPLIETNGETGEIVWDKGRDFATVRKVLSMPQVNIVKKTEVQTGGFSKESILPKRNSDKLIARKKDWDPKKYGGFDSPTVAYSVLVVAKVEKGKSKKLKSVKELLGITIMERSSFEKNPIDFLEAKGYKEVKKDLIIKLPKYSLFELENGRKRMLASAGELQKGNELALPSKYVNFLYLASHYEKLKGSPEDNEQKQLFVEQHKHYLDEIIEQISEFSKRVILADANLDKVLSAYNKHRDKPIREQAENIIHLFTLTNLGAPAAFKYFDTTIDRKRYTSTKEVLDATLIHQSITGLYETRIDLSQLGGDGGGSSGGSGGGGGLDDEYRLYSPLVKPDQNIQFWLEQFPQAWAETAGMGLAKQVPPQVIQLKASATPVSVRQYPLSKEAQEGIRPHVQRLIQQGILVPVQSPWNTPLLPVRKPGTNDYRPVQDLREVNKRVQDIHPTVPNPYNLLCALPPQRSWYTVLDLKDAFFCLRLHPTSQPLFAFEWRDPGTGRTGQLTWTRLPQGFKNSPTIFNEALHRDLANFRIQHPQVTLLQYVDDLLLAGATKQDCLEGTKALLLELSDLGYRASAKKAQICRREVTYLGYSLRDGQRWLTEARKKTVVQIPAPTTAKQVREFLGKAGFCRLFIPGFATLAAPLYPLTKPKGEFSWAPEHQKAFDAIKKALLSAPALALPDVTKPFTLYVDERKGVARGVLTQTLGPWRRPVAYLSKKLDPVASGWPVCLKAIAAVAILVKDADKLTLGQNITVIAPHALENIVRQPPDRWMTNARMTHYQSLLLTERVTFAPPAALNPATLLPEETDEPVTHDCHQLLIEETGVRKDLTDIPLTGEVLTWFTDGSSYVVEGKRMAGAAVVDGTRTIWASSLPEGTSAQKAELMALTQALRLAEGKSINIYTDSRYAFATAHVHGAIYKQRGWLTSAGREIKNKEEILSLLEALHLPKRLAIIHCPGHQKAKDPISRGNQMADRVAKQAAQGVNLLPAGKRTADGSEFEKRTADGSEFESPKKKAKVE

SEQ ID NO: 86 - protein, 2088 aa, synthetic construct
MPAAKRVKLDGGDKKYSIGLDIGTNSVGWAVITDEYKVPSKKFKVLGNTDRHSIKKNLIGALLFDSGETAEATRLKRTARRRYTRRKNRICYLQEIFSNEMAKVDDSFFHRLEESFLVEEDKKHERHPIFGNIVDEVAYHEKYPTIYHLRKKLVDSTDKADLRLIYLALAHMIKFRGHFLIEGDLNPDNSDVDKLFIQLVQTYNQLFEENPINASGVDAKAILSARLSKSRRLENLIAQLPGEKKNGLFGNLIALSLGLTPNFKSNFDLAEDAKLQLSKDTYDDDLDNLLAQIGDQYADLFLAAKNLSDAILLSDILRVNTEITKAPLSASMIKRYDEHHQDLTLLKALVRQQLPEKYKEIFFDQSKNGYAGYIDGGASQEEFYKFIKPILEKMDGTEELLVKLNREDLLRKQRTFDNGSIPHQIHLGELHAILRRQEDFYPFLKDNREKIEKILTFRIPYYVGPLARGNSRFAWMTRKSEETITPWNFEEVVDKGASAQSFIERMTNFDKNLPNEKVLPKHSLLYEYFTVYNELTKVKYVTEGMRKPAFLSGEQKKAIVDLLFKTNRKVTVKQLKEDYFKKIECFDSVEISGVEDRFNASLGTYHDLLKIIKDKDFLDNEENEDILEDIVLTLTLFEDREMIEERLKTYAHLFDDKVMKQLKRRRYTGWGRLSRKLINGIRDKQSGKTILDFLKSDGFANRNFMQLIHDDSLTFKEDIQKAQVSGQGDSLHEHIANLAGSPAIKKGILQTVKVVDELVKVMGRHKPENIVIEMARENQTTQKGQKNSRERMKRIEEGIKELGSQILKEHPVENTQLQNEKLYLYYLQNGRDMYVDQELDINRLSDYDVDHIVPQSFLKDDSIDNKVLTRSDKARGKSDNVPSEEVVKKMKNYWRQLLNAKLITQRKFDNLTKAERGGLSELDKAGFIKRQLVETRQITKHVAQILDSRMNTKYDENDKLIREVKVITLKSKLVSDFRKDFQFYKVREINNYHHAHDAYLNAVVGTALIKKYPKLESEFVYGDYKVYDVRKMIAKSEQEIGKATAKYFFYSNIMNFFKTEITLANGEIRKRPLIETNGETGEIVWDKGRDFATVRKVLSMPQVNIVKKTEVQTGGFSKESILPKRNSDKLIARKKDWDPKKYGGFDSPTVAYSVLVVAKVEKGKSKKLKSVKELLGITIMERSSFEKNPIDFLEAKGYKEVKKDLIIKLPKYSLFELENGRKRMLASAGELQKGNELALPSKYVNFLYLASHYEKLKGSPEDNEQKQLFVEQHKHYLDEIIEQISEFSKRVILADANLDKVLSAYNKHRDKPIREQAENIIHLFTLTNLGAPAAFKYFDTTIDRKRYTSTKEVLDATLIHQSITGLYETRIDLSQLGGDGGGSSPAPEAAAKGGLDDEYRLYSPLVKPDQNIQFWLEQFPQAWAETAGMGLAKQVPPQVIQLKASATPVSVRQYPLSKEAQEGIRPHVQRLIQQGILVPVQSPWNTPLLPVRKPGTNDYRPVQDLREVNKRVQDIHPTVPNPYNLLCALPPQRSWYTVLDLKDAFFCLRLHPTSQPLFAFEWRDPGTGRTGQLTWTRLPQGFKNSPTIFNEALHRDLANFRIQHPQVTLLQYVDDLLLAGATKQDCLEGTKALLLELSDLGYRASAKKAQICRREVTYLGYSLRDGQRWLTEARKKTVVQIPAPTTAKQVREFLGKAGFCRLFIPGFATLAAPLYPLTKPKGEFSWAPEHQKAFDAIKKALLSAPALALPDVTKPFTLYVDERKGVARGVLTQTLGPWRRPVAYLSKKLDPVASGWPVCLKAIAAVAILVKDADKLTLGQNITVIAPHALENIVRQPPDRWMTNARMTHYQSLLLTERVTFAPPAALNPATLLPEETDEPVTHDCHQLLIEETGVRKDLTDIPLTGEVLTWFTDGSSYVVEGKRMAGAAVVDGTRTIWASSLPEGTSAQKAELMALTQALRLAEGKSINIYTDSRYAFATAHVHGAIYKQRGWLTSAGREIKNKEEILSLLEALHLPKRLAIIHCPGHQKAKDPISRGNQMADRVAKQAAQGVNLLPAGKRTADGSEFEKRTADGSEFESPKKKAKVE

SEQ ID NO: 87 - protein, 2083 aa, synthetic construct
MPAAKRVKLDGGDKKYSIGLDIGTNSVGWAVITDEYKVPSKKFKVLGNTDRHSIKKNLIGALLFDSGETAEATRLKRTARRRYTRRKNRICYLQEIFSNEMAKVDDSFFHRLEESFLVEEDKKHERHPIFGNIVDEVAYHEKYPTIYHLRKKLVDSTDKADLRLIYLALAHMIKFRGHFLIEGDLNPDNSDVDKLFIQLVQTYNQLFEENPINASGVDAKAILSARLSKSRRLENLIAQLPGEKKNGLFGNLIALSLGLTPNFKSNFDLAEDAKLQLSKDTYDDDLDNLLAQIGDQYADLFLAAKNLSDAILLSDILRVNTEITKAPLSASMIKRYDEHHQDLTLLKALVRQQLPEKYKEIFFDQSKNGYAGYIDGGASQEEFYKFIKPILEKMDGTEELLVKLNREDLLRKQRTFDNGSIPHQIHLGELHAILRRQEDFYPFLKDNREKIEKILTFRIPYYVGPLARGNSRFAWMTRKSEETITPWNFEEVVDKGASAQSFIERMTNFDKNLPNEKVLPKHSLLYEYFTVYNELTKVKYVTEGMRKPAFLSGEQKKAIVDLLFKTNRKVTVKQLKEDYFKKIECFDSVEISGVEDRFNASLGTYHDLLKIIKDKDFLDNEENEDILEDIVLTLTLFEDREMIEERLKTYAHLFDDKVMKQLKRRRYTGWGRLSRKLINGIRDKQSGKTILDFLKSDGFANRNFMQLIHDDSLTFKEDIQKAQVSGQGDSLHEHIANLAGSPAIKKGILQTVKVVDELVKVMGRHKPENIVIEMARENQTTQKGQKNSRERMKRIEEGIKELGSQILKEHPVENTQLQNEKLYLYYLQNGRDMYVDQELDINRLSDYDVDHIVPQSFLKDDSIDNKVLTRSDKARGKSDNVPSEEVVKKMKNYWRQLLNAKLITQRKFDNLTKAERGGLSELDKAGFIKRQLVETRQITKHVAQILDSRMNTKYDENDKLIREVKVITLKSKLVSDFRKDFQFYKVREINNYHHAHDAYLNAVVGTALIKKYPKLESEFVYGDYKVYDVRKMIAKSEQEIGKATAKYFFYSNIMNFFKTEITLANGEIRKRPLIETNGETGEIVWDKGRDFATVRKVLSMPQVNIVKKTEVQTGGFSKESILPKRNSDKLIARKKDWDPKKYGGFDSPTVAYSVLVVAKVEKGKSKKLKSVKELLGITIMERSSFEKNPIDFLEAKGYKEVKKDLIIKLPKYSLFELENGRKRMLASAGELQKGNELALPSKYVNFLYLASHYEKLKGSPEDNEQKQLFVEQHKHYLDEIIEQISEFSKRVILADANLDKVLSAYNKHRDKPIREQAENIIHLFTLTNLGAPAAFKYFDTTIDRKRYTSTKEVLDATLIHQSITGLYETRIDLSQLGGDGGGGGGGSGGLDDEYRLYSPLVKPDQNIQFWLEQFPQAWAETAGMGLAKQVPPQVIQLKASATPVSVRQYPLSKEAQEGIRPHVQRLIQQGILVPVQSPWNTPLLPVRKPGTNDYRPVQDLREVNKRVQDIHPTVPNPYNLLCALPPQRSWYTVLDLKDAFFCLRLHPTSQPLFAFEWRDPGTGRTGQLTWTRLPQGFKNSPTIFNEALHRDLANFRIQHPQVTLLQYVDDLLLAGATKQDCLEGTKALLLELSDLGYRASAKKAQICRREVTYLGYSLRDGQRWLTEARKKTVVQIPAPTTAKQVREFLGKAGFCRLFIPGFATLAAPLYPLTKPKGEFSWAPEHQKAFDAIKKALLSAPALALPDVTKPFTLYVDERKGVARGVLTQTLGPWRRPVAYLSKKLDPVASGWPVCLKAIAAVAILVKDADKLTLGQNITVIAPHALENIVRQPPDRWMTNARMTHYQSLLLTERVTFAPPAALNPATLLPEETDEPVTHDCHQLLIEETGVRKDLTDIPLTGEVLTWFTDGSSYVVEGKRMAGAAVVDGTRTIWASSLPEGTSAQKAELMALTQALRLAEGKSINIYTDSRYAFATAHVHGAIYKQRGWLTSAGREIKNKEEILSLLEALHLPKRLAIIHCPGHQKAKDPISRGNQMADRVAKQAAQGVNLLPAGKRTADGSEFEKRTADGSEFESPKKKAKVE

SEQ ID NO: 88 - protein, 2083 aa, synthetic construct
MPAAKRVKLDGGDKKYSIGLDIGTNSVGWAVITDEYKVPSKKFKVLGNTDRHSIKKNLIGALLFDSGETAEATRLKRTARRRYTRRKNRICYLQEIFSNEMAKVDDSFFHRLEESFLVEEDKKHERHPIFGNIVDEVAYHEKYPTIYHLRKKLVDSTDKADLRLIYLALAHMIKFRGHFLIEGDLNPDNSDVDKLFIQLVQTYNQLFEENPINASGVDAKAILSARLSKSRRLENLIAQLPGEKKNGLFGNLIALSLGLTPNFKSNFDLAEDAKLQLSKDTYDDDLDNLLAQIGDQYADLFLAAKNLSDAILLSDILRVNTEITKAPLSASMIKRYDEHHQDLTLLKALVRQQLPEKYKEIFFDQSKNGYAGYIDGGASQEEFYKFIKPILEKMDGTEELLVKLNREDLLRKQRTFDNGSIPHQIHLGELHAILRRQEDFYPFLKDNREKIEKILTFRIPYYVGPLARGNSRFAWMTRKSEETITPWNFEEVVDKGASAQSFIERMTNFDKNLPNEKVLPKHSLLYEYFTVYNELTKVKYVTEGMRKPAFLSGEQKKAIVDLLFKTNRKVTVKQLKEDYFKKIECFDSVEISGVEDRFNASLGTYHDLLKIIKDKDFLDNEENEDILEDIVLTLTLFEDREMIEERLKTYAHLFDDKVMKQLKRRRYTGWGRLSRKLINGIRDKQSGKTILDFLKSDGFANRNFMQLIHDDSLTFKEDIQKAQVSGQGDSLHEHIANLAGSPAIKKGILQTVKVVDELVKVMGRHKPENIVIEMARENQTTQKGQKNSRERMKRIEEGIKELGSQILKEHPVENTQLQNEKLYLYYLQNGRDMYVDQELDINRLSDYDVDHIVPQSFLKDDSIDNKVLTRSDKARGKSDNVPSEEVVKKMKNYWRQLLNAKLITQRKFDNLTKAERGGLSELDKAGFIKRQLVETRQITKHVAQILDSRMNTKYDENDKLIREVKVITLKSKLVSDFRKDFQFYKVREINNYHHAHDAYLNAVVGTALIKKYPKLESEFVYGDYKVYDVRKMIAKSEQEIGKATAKYFFYSNIMNFFKTEITLANGEIRKRPLIETNGETGEIVWDKGRDFATVRKVLSMPQVNIVKKTEVQTGGFSKESILPKRNSDKLIARKKDWDPKKYGGFDSPTVAYSVLVVAKVEKGKSKKLKSVKELLGITIMERSSFEKNPIDFLEAKGYKEVKKDLIIKLPKYSLFELENGRKRMLASAGELQKGNELALPSKYVNFLYLASHYEKLKGSPEDNEQKQLFVEQHKHYLDEIIEQISEFSKRVILADANLDKVLSAYNKHRDKPIREQAENIIHLFTLTNLGAPAAFKYFDTTIDRKRYTSTKEVLDATLIHQSITGLYETRIDLSQLGGDGGGSSGGSGGLDDEYRLYSPLVKPDQNIQFWLEQFPQAWAETAGMGLAKQVPPQVIQLKASATPVSVRQYPLSKEAQEGIRPHVQRLIQQGILVPVQSPWNTPLLPVRKPGTNDYRPVQDLREVNKRVQDIHPTVPNPYNLLCALPPQRSWYTVLDLKDAFFCLRLHPTSQPLFAFEWRDPGTGRTGQLTWTRLPQGFKNSPTIFNEALHRDLANFRIQHPQVTLLQYVDDLLLAGATKQDCLEGTKALLLELSDLGYRASAKKAQICRREVTYLGYSLRDGQRWLTEARKKTVVQIPAPTTAKQVREFLGKAGFCRLFIPGFATLAAPLYPLTKPKGEFSWAPEHQKAFDAIKKALLSAPALALPDVTKPFTLYVDERKGVARGVLTQTLGPWRRPVAYLSKKLDPVASGWPVCLKAIAAVAILVKDADKLTLGQNITVIAPHALENIVRQPPDRWMTNARMTHYQSLLLTERVTFAPPAALNPATLLPEETDEPVTHDCHQLLIEETGVRKDLTDIPLTGEVLTWFTDGSSYVVEGKRMAGAAVVDGTRTIWASSLPEGTSAQKAELMALTQALRLAEGKSINIYTDSRYAFATAHVHGAIYKQRGWLTSAGREIKNKEEILSLLEALHLPKRLAIIHCPGHQKAKDPISRGNQMADRVAKQAAQGVNLLPAGKRTADGSEFEKRTADGSEFESPKKKAKVE

SEQ ID NO: 89 - protein, 2086 aa, synthetic construct
MPAAKRVKLDGGDKKYSIGLDIGTNSVGWAVITDEYKVPSKKFKVLGNTDRHSIKKNLIGALLFDSGETAEATRLKRTARRRYTRRKNRICYLQEIFSNEMAKVDDSFFHRLEESFLVEEDKKHERHPIFGNIVDEVAYHEKYPTIYHLRKKLVDSTDKADLRLIYLALAHMIKFRGHFLIEGDLNPDNSDVDKLFIQLVQTYNQLFEENPINASGVDAKAILSARLSKSRRLENLIAQLPGEKKNGLFGNLIALSLGLTPNFKSNFDLAEDAKLQLSKDTYDDDLDNLLAQIGDQYADLFLAAKNLSDAILLSDILRVNTEITKAPLSASMIKRYDEHHQDLTLLKALVRQQLPEKYKEIFFDQSKNGYAGYIDGGASQEEFYKFIKPILEKMDGTEELLVKLNREDLLRKQRTFDNGSIPHQIHLGELHAILRRQEDFYPFLKDNREKIEKILTFRIPYYVGPLARGNSRFAWMTRKSEETITPWNFEEVVDKGASAQSFIERMTNFDKNLPNEKVLPKHSLLYEYFTVYNELTKVKYVTEGMRKPAFLSGEQKKAIVDLLFKTNRKVTVKQLKEDYFKKIECFDSVEISGVEDRFNASLGTYHDLLKIIKDKDFLDNEENEDILEDIVLTLTLFEDREMIEERLKTYAHLFDDKVMKQLKRRRYTGWGRLSRKLINGIRDKQSGKTILDFLKSDGFANRNFMQLIHDDSLTFKEDIQKAQVSGQGDSLHEHIANLAGSPAIKKGILQTVKVVDELVKVMGRHKPENIVIEMARENQTTQKGQKNSRERMKRIEEGIKELGSQILKEHPVENTQLQNEKLYLYYLQNGRDMYVDQELDINRLSDYDVDHIVPQSFLKDDSIDNKVLTRSDKARGKSDNVPSEEVVKKMKNYWRQLLNAKLITQRKFDNLTKAERGGLSELDKAGFIKRQLVETRQITKHVAQILDSRMNTKYDENDKLIREVKVITLKSKLVSDFRKDFQFYKVREINNYHHAHDAYLNAVVGTALIKKYPKLESEFVYGDYKVYDVRKMIAKSEQEIGKATAKYFFYSNIMNFFKTEITLANGEIRKRPLIETNGETGEIVWDKGRDFATVRKVLSMPQVNIVKKTEVQTGGFSKESILPKRNSDKLIARKKDWDPKKYGGFDSPTVAYSVLVVAKVEKGKSKKLKSVKELLGITIMERSSFEKNPIDFLEAKGYKEVKKDLIIKLPKYSLFELENGRKRMLASAGELQKGNELALPSKYVNFLYLASHYEKLKGSPEDNEQKQLFVEQHKHYLDEIIEQISEFSKRVILADANLDKVLSAYNKHRDKPIREQAENIIHLFTLTNLGAPAAFKYFDTTIDRKRYTSTKEVLDATLIHQSITGLYETRIDLSQLGGDGGPAPGSSGGGGGLDDEYRLYSPLVKPDQNIQFWLEQFPQAWAETAGMGLAKQVPPQVIQLKASATPVSVRQYPLSKEAQEGIRPHVQRLIQQGILVPVQSPWNTPLLPVRKPGTNDYRPVQDLREVNKRVQDIHPTVPNPYNLLCALPPQRSWYTVLDLKDAFFCLRLHPTSQPLFAFEWRDPGTGRTGQLTWTRLPQGFKNSPTIFNEALHRDLANFRIQHPQVTLLQYVDDLLLAGATKQDCLEGTKALLLELSDLGYRASAKKAQICRREVTYLGYSLRDGQRWLTEARKKTVVQIPAPTTAKQVREFLGKAGFCRLFIPGFATLAAPLYPLTKPKGEFSWAPEHQKAFDAIKKALLSAPALALPDVTKPFTLYVDERKGVARGVLTQTLGPWRRPVAYLSKKLDPVASGWPVCLKAIAAVAILVKDADKLTLGQNITVIAPHALENIVRQPPDRWMTNARMTHYQSLLLTERVTFAPPAALNPATLLPEETDEPVTHDCHQLLIEETGVRKDLTDIPLTGEVLTWFTDGSSYVVEGKRMAGAAVVDGTRTIWASSLPEGTSAQKAELMALTQALRLAEGKSINIYTDSRYAFATAHVHGAIYKQRGWLTSAGREIKNKEEILSLLEALHLPKRLAIIHCPGHQKAKDPISRGNQMADRVAKQAAQGVNLLPAGKRTADGSEFEKRTADGSEFESPKKKAKVE

SEQ ID NO: 90 - protein, 2093 aa, synthetic construct
MPAAKRVKLDGGDKKYSIGLDIGTNSVGWAVITDEYKVPSKKFKVLGNTDRHSIKKNLIGALLFDSGETAEATRLKRTARRRYTRRKNRICYLQEIFSNEMAKVDDSFFHRLEESFLVEEDKKHERHPIFGNIVDEVAYHEKYPTIYHLRKKLVDSTDKADLRLIYLALAHMIKFRGHFLIEGDLNPDNSDVDKLFIQLVQTYNQLFEENPINASGVDAKAILSARLSKSRRLENLIAQLPGEKKNGLFGNLIALSLGLTPNFKSNFDLAEDAKLQLSKDTYDDDLDNLLAQIGDQYADLFLAAKNLSDAILLSDILRVNTEITKAPLSASMIKRYDEHHQDLTLLKALVRQQLPEKYKEIFFDQSKNGYAGYIDGGASQEEFYKFIKPILEKMDGTEELLVKLNREDLLRKQRTFDNGSIPHQIHLGELHAILRRQEDFYPFLKDNREKIEKILTFRIPYYVGPLARGNSRFAWMTRKSEETITPWNFEEVVDKGASAQSFIERMTNFDKNLPNEKVLPKHSLLYEYFTVYNELTKVKYVTEGMRKPAFLSGEQKKAIVDLLFKTNRKVTVKQLKEDYFKKIECFDSVEISGVEDRFNASLGTYHDLLKIIKDKDFLDNEENEDILEDIVLTLTLFEDREMIEERLKTYAHLFDDKVMKQLKRRRYTGWGRLSRKLINGIRDKQSGKTILDFLKSDGFANRNFMQLIHDDSLTFKEDIQKAQVSGQGDSLHEHIANLAGSPAIKKGILQTVKVVDELVKVMGRHKPENIVIEMARENQTTQKGQKNSRERMKRIEEGIKELGSQILKEHPVENTQLQNEKLYLYYLQNGRDMYVDQELDINRLSDYDVDHIVPQSFLKDDSIDNKVLTRSDKARGKSDNVPSEEVVKKMKNYWRQLLNAKLITQRKFDNLTKAERGGLSELDKAGFIKRQLVETRQITKHVAQILDSRMNTKYDENDKLIREVKVITLKSKLVSDFRKDFQFYKVREINNYHHAHDAYLNAVVGTALIKKYPKLESEFVYGDYKVYDVRKMIAKSEQEIGKATAKYFFYSNIMNFFKTEITLANGEIRKRPLIETNGETGEIVWDKGRDFATVRKVLSMPQVNIVKKTEVQTGGFSKESILPKRNSDKLIARKKDWDPKKYGGFDSPTVAYSVLVVAKVEKGKSKKLKSVKELLGITIMERSSFEKNPIDFLEAKGYKEVKKDLIIKLPKYSLFELENGRKRMLASAGELQKGNELALPSKYVNFLYLASHYEKLKGSPEDNEQKQLFVEQHKHYLDEIIEQISEFSKRVILADANLDKVLSAYNKHRDKPIREQAENIIHLFTLTNLGAPAAFKYFDTTIDRKRYTSTKEVLDATLIHQSITGLYETRIDLSQLGGDGGSGSETPGTSESATPESGGLDDEYRLYSPLVKPDQNIQFWLEQFPQAWAETAGMGLAKQVPPQVIQLKASATPVSVRQYPLSKEAQEGIRPHVQRLIQQGILVPVQSPWNTPLLPVRKPGTNDYRPVQDLREVNKRVQDIHPTVPNPYNLLCALPPQRSWYTVLDLKDAFFCLRLHPTSQPLFAFEWRDPGTGRTGQLTWTRLPQGFKNSPTIFNEALHRDLANFRIQHPQVTLLQYVDDLLLAGATKQDCLEGTKALLLELSDLGYRASAKKAQICRREVTYLGYSLRDGQRWLTEARKKTVVQIPAPTTAKQVREFLGKAGFCRLFIPGFATLAAPLYPLTKPKGEFSWAPEHQKAFDAIKKALLSAPALALPDVTKPFTLYVDERKGVARGVLTQTLGPWRRPVAYLSKKLDPVASGWPVCLKAIAAVAILVKDADKLTLGQNITVIAPHALENIVRQPPDRWMTNARMTHYQSLLLTERVTFAPPAALNPATLLPEETDEPVTHDCHQLLIEETGVRKDLTDIPLTGEVLTWFTDGSSYVVEGKRMAGAAVVDGTRTIWASSLPEGTSAQKAELMALTQALRLAEGKSINIYTDSRYAFATAHVHGAIYKQRGWLTSAGREIKNKEEILSLLEALHLPKRLAIIHCPGHQKAKDPISRGNQMADRVAKQAAQGVNLLPAGKRTADGSEFEKRTADGSEFESPKKKAKVE

SEQ ID NO: 91 - protein, 2086 aa, synthetic construct
MPAAKRVKLDGGDKKYSIGLDIGTNSVGWAVITDEYKVPSKKFKVLGNTDRHSIKKNLIGALLFDSGETAEATRLKRTARRRYTRRKNRICYLQEIFSNEMAKVDDSFFHRLEESFLVEEDKKHERHPIFGNIVDEVAYHEKYPTIYHLRKKLVDSTDKADLRLIYLALAHMIKFRGHFLIEGDLNPDNSDVDKLFIQLVQTYNQLFEENPINASGVDAKAILSARLSKSRRLENLIAQLPGEKKNGLFGNLIALSLGLTPNFKSNFDLAEDAKLQLSKDTYDDDLDNLLAQIGDQYADLFLAAKNLSDAILLSDILRVNTEITKAPLSASMIKRYDEHHQDLTLLKALVRQQLPEKYKEIFFDQSKNGYAGYIDGGASQEEFYKFIKPILEKMDGTEELLVKLNREDLLRKQRTFDNGSIPHQIHLGELHAILRRQEDFYPFLKDNREKIEKILTFRIPYYVGPLARGNSRFAWMTRKSEETITPWNFEEVVDKGASAQSFIERMTNFDKNLPNEKVLPKHSLLYEYFTVYNELTKVKYVTEGMRKPAFLSGEQKKAIVDLLFKTNRKVTVKQLKEDYFKKIECFDSVEISGVEDRFNASLGTYHDLLKIIKDKDFLDNEENEDILEDIVLTLTLFEDREMIEERLKTYAHLFDDKVMKQLKRRRYTGWGRLSRKLINGIRDKQSGKTILDFLKSDGFANRNFMQLIHDDSLTFKEDIQKAQVSGQGDSLHEHIANLAGSPAIKKGILQTVKVVDELVKVMGRHKPENIVIEMARENQTTQKGQKNSRERMKRIEEGIKELGSQILKEHPVENTQLQNEKLYLYYLQNGRDMYVDQELDINRLSDYDVDHIVPQSFLKDDSIDNKVLTRSDKARGKSDNVPSEEVVKKMKNYWRQLLNAKLITQRKFDNLTKAERGGLSELDKAGFIKRQLVETRQITKHVAQILDSRMNTKYDENDKLIREVKVITLKSKLVSDFRKDFQFYKVREINNYHHAHDAYLNAVVGTALIKKYPKLESEFVYGDYKVYDVRKMIAKSEQEIGKATAKYFFYSNIMNFFKTEITLANGEIRKRPLIETNGETGEIVWDKGRDFATVRKVLSMPQVNIVKKTEVQTGGFSKESILPKRNSDKLIARKKDWDPKKYGGFDSPTVAYSVLVVAKVEKGKSKKLKSVKELLGITIMERSSFEKNPIDFLEAKGYKEVKKDLIIKLPKYSLFELENGRKRMLASAGELQKGNELALPSKYVNFLYLASHYEKLKGSPEDNEQKQLFVEQHKHYLDEIIEQISEFSKRVILADANLDKVLSAYNKHRDKPIREQAENIIHLFTLTNLGAPAAFKYFDTTIDRKRYTSTKEVLDATLIHQSITGLYETRIDLSQLGGDGGGSSGGGPAPGGLDDEYRLYSPLVKPDQNIQFWLEQFPQAWAETAGMGLAKQVPPQVIQLKASATPVSVRQYPLSKEAQEGIRPHVQRLIQQGILVPVQSPWNTPLLPVRKPGTNDYRPVQDLREVNKRVQDIHPTVPNPYNLLCALPPQRSWYTVLDLKDAFFCLRLHPTSQPLFAFEWRDPGTGRTGQLTWTRLPQGFKNSPTIFNEALHRDLANFRIQHPQVTLLQYVDDLLLAGATKQDCLEGTKALLLELSDLGYRASAKKAQICRREVTYLGYSLRDGQRWLTEARKKTVVQIPAPTTAKQVREFLGKAGFCRLFIPGFATLAAPLYPLTKPKGEFSWAPEHQKAFDAIKKALLSAPALALPDVTKPFTLYVDERKGVARGVLTQTLGPWRRPVAYLSKKLDPVASGWPVCLKAIAAVAILVKDADKLTLGQNITVIAPHALENIVRQPPDRWMTNARMTHYQSLLLTERVTFAPPAALNPATLLPEETDEPVTHDCHQLLIEETGVRKDLTDIPLTGEVLTWFTDGSSYVVEGKRMAGAAVVDGTRTIWASSLPEGTSAQKAELMALTQALRLAEGKSINIYTDSRYAFATAHVHGAIYKQRGWLTSAGREIKNKEEILSLLEALHLPKRLAIIHCPGHQKAKDPISRGNQMADRVAKQAAQGVNLLPAGKRTADGSEFEKRTADGSEFESPKKKAKVE

SEQ ID NO: 92 - protein, 2088 aa, synthetic construct
MPAAKRVKLDGGDKKYSIGLDIGTNSVGWAVITDEYKVPSKKFKVLGNTDRHSIKKNLIGALLFDSGETAEATRLKRTARRRYTRRKNRICYLQEIFSNEMAKVDDSFFHRLEESFLVEEDKKHERHPIFGNIVDEVAYHEKYPTIYHLRKKLVDSTDKADLRLIYLALAHMIKFRGHFLIEGDLNPDNSDVDKLFIQLVQTYNQLFEENPINASGVDAKAILSARLSKSRRLENLIAQLPGEKKNGLFGNLIALSLGLTPNFKSNFDLAEDAKLQLSKDTYDDDLDNLLAQIGDQYADLFLAAKNLSDAILLSDILRVNTEITKAPLSASMIKRYDEHHQDLTLLKALVRQQLPEKYKEIFFDQSKNGYAGYIDGGASQEEFYKFIKPILEKMDGTEELLVKLNREDLLRKQRTFDNGSIPHQIHLGELHAILRRQEDFYPFLKDNREKIEKILTFRIPYYVGPLARGNSRFAWMTRKSEETITPWNFEEVVDKGASAQSFIERMTNFDKNLPNEKVLPKHSLLYEYFTVYNELTKVKYVTEGMRKPAFLSGEQKKAIVDLLFKTNRKVTVKQLKEDYFKKIECFDSVEISGVEDRFNASLGTYHDLLKIIKDKDFLDNEENEDILEDIVLTLTLFEDREMIEERLKTYAHLFDDKVMKQLKRRRYTGWGRLSRKLINGIRDKQSGKTILDFLKSDGFANRNFMQLIHDDSLTFKEDIQKAQVSGQGDSLHEHIANLAGSPAIKKGILQTVKVVDELVKVMGRHKPENIVIEMARENQTTQKGQKNSRERMKRIEEGIKELGSQILKEHPVENTQLQNEKLYLYYLQNGRDMYVDQELDINRLSDYDVDHIVPQSFLKDDSIDNKVLTRSDKARGKSDNVPSEEVVKKMKNYWRQLLNAKLITQRKFDNLTKAERGGLSELDKAGFIKRQLVETRQITKHVAQILDSRMNTKYDENDKLIREVKVITLKSKLVSDFRKDFQFYKVREINNYHHAHDAYLNAVVGTALIKKYPKLESEFVYGDYKVYDVRKMIAKSEQEIGKATAKYFFYSNIMNFFKTEITLANGEIRKRPLIETNGETGEIVWDKGRDFATVRKVLSMPQVNIVKKTEVQTGGFSKESILPKRNSDKLIARKKDWDPKKYGGFDSPTVAYSVLVVAKVEKGKSKKLKSVKELLGITIMERSSFEKNPIDFLEAKGYKEVKKDLIIKLPKYSLFELENGRKRMLASAGELQKGNELALPSKYVNFLYLASHYEKLKGSPEDNEQKQLFVEQHKHYLDEIIEQISEFSKRVILADANLDKVLSAYNKHRDKPIREQAENIIHLFTLTNLGAPAAFKYFDTTIDRKRYTSTKEVLDATLIHQSITGLYETRIDLSQLGGDGGGGSEAAAKGSSGGLDDEYRLYSPLVKPDQNIQFWLEQFPQAWAETAGMGLAKQVPPQVIQLKASATPVSVRQYPLSKEAQEGIRPHVQRLIQQGILVPVQSPWNTPLLPVRKPGTNDYRPVQDLREVNKRVQDIHPTVPNPYNLLCALPPQRSWYTVLDLKDAFFCLRLHPTSQPLFAFEWRDPGTGRTGQLTWTRLPQGFKNSPTIFNEALHRDLANFRIQHPQVTLLQYVDDLLLAGATKQDCLEGTKALLLELSDLGYRASAKKAQICRREVTYLGYSLRDGQRWLTEARKKTVVQIPAPTTAKQVREFLGKAGFCRLFIPGFATLAAPLYPLTKPKGEFSWAPEHQKAFDAIKKALLSAPALALPDVTKPFTLYVDERKGVARGVLTQTLGPWRRPVAYLSKKLDPVASGWPVCLKAIAAVAILVKDADKLTLGQNITVIAPHALENIVRQPPDRWMTNARMTHYQSLLLTERVTFAPPAALNPATLLPEETDEPVTHDCHQLLIEETGVRKDLTDIPLTGEVLTWFTDGSSYVVEGKRMAGAAVVDGTRTIWASSLPEGTSAQKAELMALTQALRLAEGKSINIYTDSRYAFATAHVHGAIYKQRGWLTSAGREIKNKEEILSLLEALHLPKRLAIIHCPGHQKAKDPISRGNQMADRVAKQAAQGVNLLPAGKRTADGSEFEKRTADGSEFESPKKKAKVE

SEQ ID NO: 93 - protein, 2088 aa, synthetic construct
MPAAKRVKLDGGDKKYSIGLDIGTNSVGWAVITDEYKVPSKKFKVLGNTDRHSIKKNLIGALLFDSGETAEATRLKRTARRRYTRRKNRICYLQEIFSNEMAKVDDSFFHRLEESFLVEEDKKHERHPIFGNIVDEVAYHEKYPTIYHLRKKLVDSTDKADLRLIYLALAHMIKFRGHFLIEGDLNPDNSDVDKLFIQLVQTYNQLFEENPINASGVDAKAILSARLSKSRRLENLIAQLPGEKKNGLFGNLIALSLGLTPNFKSNFDLAEDAKLQLSKDTYDDDLDNLLAQIGDQYADLFLAAKNLSDAILLSDILRVNTEITKAPLSASMIKRYDEHHQDLTLLKALVRQQLPEKYKEIFFDQSKNGYAGYIDGGASQEEFYKFIKPILEKMDGTEELLVKLNREDLLRKQRTFDNGSIPHQIHLGELHAILRRQEDFYPFLKDNREKIEKILTFRIPYYVGPLARGNSRFAWMTRKSEETITPWNFEEVVDKGASAQSFIERMTNFDKNLPNEKVLPKHSLLYEYFTVYNELTKVKYVTEGMRKPAFLSGEQKKAIVDLLFKTNRKVTVKQLKEDYFKKIECFDSVEISGVEDRFNASLGTYHDLLKIIKDKDFLDNEENEDILEDIVLTLTLFEDREMIEERLKTYAHLFDDKVMKQLKRRRYTGWGRLSRKLINGIRDKQSGKTILDFLKSDGFANRNFMQLIHDDSLTFKEDIQKAQVSGQGDSLHEHIANLAGSPAIKKGILQTVKVVDELVKVMGRHKPENIVIEMARENQTTQKGQKNSRERMKRIEEGIKELGSQILKEHPVENTQLQNEKLYLYYLQNGRDMYVDQELDINRLSDYDVDHIVPQSFLKDDSIDNKVLTRSDKARGKSDNVPSEEVVKKMKNYWRQLLNAKLITQRKFDNLTKAERGGLSELDKAGFIKRQLVETRQITKHVAQILDSRMNTKYDENDKLIREVKVITLKSKLVSDFRKDFQFYKVREINNYHHAHDAYLNAVVGTALIKKYPKLESEFVYGDYKVYDVRKMIAKSEQEIGKATAKYFFYSNIMNFFKTEITLANGEIRKRPLIETNGETGEIVWDKGRDFATVRKVLSMPQVNIVKKTEVQTGGFSKESILPKRNSDKLIARKKDWDPKKYGGFDSPTVAYSVLVVAKVEKGKSKKLKSVKELLGITIMERSSFEKNPIDFLEAKGYKEVKKDLIIKLPKYSLFELENGRKRMLASAGELQKGNELALPSKYVNFLYLASHYEKLKGSPEDNEQKQLFVEQHKHYLDEIIEQISEFSKRVILADANLDKVLSAYNKHRDKPIREQAENIIHLFTLTNLGAPAAFKYFDTTIDRKRYTSTKEVLDATLIHQSITGLYETRIDLSQLGGDGGPAPEAAAKGSSGGLDDEYRLYSPLVKPDQNIQFWLEQFPQAWAETAGMGLAKQVPPQVIQLKASATPVSVRQYPLSKEAQEGIRPHVQRLIQQGILVPVQSPWNTPLLPVRKPGTNDYRPVQDLREVNKRVQDIHPTVPNPYNLLCALPPQRSWYTVLDLKDAFFCLRLHPTSQPLFAFEWRDPGTGRTGQLTWTRLPQGFKNSPTIFNEALHRDLANFRIQHPQVTLLQYVDDLLLAGATKQDCLEGTKALLLELSDLGYRASAKKAQICRREVTYLGYSLRDGQRWLTEARKKTVVQIPAPTTAKQVREFLGKAGFCRLFIPGFATLAAPLYPLTKPKGEFSWAPEHQKAFDAIKKALLSAPALALPDVTKPFTLYVDERKGVARGVLTQTLGPWRRPVAYLSKKLDPVASGWPVCLKAIAAVAILVKDADKLTLGQNITVIAPHALENIVRQPPDRWMTNARMTHYQSLLLTERVTFAPPAALNPATLLPEETDEPVTHDCHQLLIEETGVRKDLTDIPLTGEVLTWFTDGSSYVVEGKRMAGAAVVDGTRTIWASSLPEGTSAQKAELMALTQALRLAEGKSINIYTDSRYAFATAHVHGAIYKQRGWLTSAGREIKNKEEILSLLEALHLPKRLAIIHCPGHQKAKDPISRGNQMADRVAKQAAQGVNLLPAGKRTADGSEFEKRTADGSEFESPKKKAKVE

SEQ ID NO: 94 - protein, 2088 aa, synthetic construct
MPAAKRVKLDGGDKKYSIGLDIGTNSVGWAVITDEYKVPSKKFKVLGNTDRHSIKKNLIGALLFDSGETAEATRLKRTARRRYTRRKNRICYLQEIFSNEMAKVDDSFFHRLEESFLVEEDKKHERHPIFGNIVDEVAYHEKYPTIYHLRKKLVDSTDKADLRLIYLALAHMIKFRGHFLIEGDLNPDNSDVDKLFIQLVQTYNQLFEENPINASGVDAKAILSARLSKSRRLENLIAQLPGEKKNGLFGNLIALSLGLTPNFKSNFDLAEDAKLQLSKDTYDDDLDNLLAQIGDQYADLFLAAKNLSDAILLSDILRVNTEITKAPLSASMIKRYDEHHQDLTLLKALVRQQLPEKYKEIFFDQSKNGYAGYIDGGASQEEFYKFIKPILEKMDGTEELLVKLNREDLLRKQRTFDNGSIPHQIHLGELHAILRRQEDFYPFLKDNREKIEKILTFRIPYYVGPLARGNSRFAWMTRKSEETITPWNFEEVVDKGASAQSFIERMTNFDKNLPNEKVLPKHSLLYEYFTVYNELTKVKYVTEGMRKPAFLSGEQKKAIVDLLFKTNRKVTVKQLKEDYFKKIECFDSVEISGVEDRFNASLGTYHDLLKIIKDKDFLDNEENEDILEDIVLTLTLFEDREMIEERLKTYAHLFDDKVMKQLKRRRYTGWGRLSRKLINGIRDKQSGKTILDFLKSDGFANRNFMQLIHDDSLTFKEDIQKAQVSGQGDSLHEHIANLAGSPAIKKGILQTVKVVDELVKVMGRHKPENIVIEMARENQTTQKGQKNSRERMKRIEEGIKELGSQILKEHPVENTQLQNEKLYLYYLQNGRDMYVDQELDINRLSDYDVDHIVPQSFLKDDSIDNKVLTRSDKARGKSDNVPSEEVVKKMKNYWRQLLNAKLITQRKFDNLTKAERGGLSELDKAGFIKRQLVETRQITKHVAQILDSRMNTKYDENDKLIREVKVITLKSKLVSDFRKDFQFYKVREINNYHHAHDAYLNAVVGTALIKKYPKLESEFVYGDYKVYDVRKMIAKSEQEIGKATAKYFFYSNIMNFFKTEITLANGEIRKRPLIETNGETGEIVWDKGRDFATVRKVLSMPQVNIVKKTEVQTGGFSKESILPKRNSDKLIARKKDWDPKKYGGFDSPTVAYSVLVVAKVEKGKSKKLKSVKELLGITIMERSSFEKNPIDFLEAKGYKEVKKDLIIKLPKYSLFELENGRKRMLASAGELQKGNELALPSKYVNFLYLASHYEKLKGSPEDNEQKQLFVEQHKHYLDEIIEQISEFSKRVILADANLDKVLSAYNKHRDKPIREQAENIIHLFTLTNLGAPAAFKYFDTTIDRKRYTSTKEVLDATLIHQSITGLYETRIDLSQLGGDGGGGSGGGEAAAKGGLDDEYRLYSPLVKPDQNIQFWLEQFPQAWAETAGMGLAKQVPPQVIQLKASATPVSVRQYPLSKEAQEGIRPHVQRLIQQGILVPVQSPWNTPLLPVRKPGTNDYRPVQDLREVNKRVQDIHPTVPNPYNLLCALPPQRSWYTVLDLKDAFFCLRLHPTSQPLFAFEWRDPGTGRTGQLTWTRLPQGFKNSPTIFNEALHRDLANFRIQHPQVTLLQYVDDLLLAGATKQDCLEGTKALLLELSDLGYRASAKKAQICRREVTYLGYSLRDGQRWLTEARKKTVVQIPAPTTAKQVREFLGKAGFCRLFIPGFATLAAPLYPLTKPKGEFSWAPEHQKAFDAIKKALLSAPALALPDVTKPFTLYVDERKGVARGVLTQTLGPWRRPVAYLSKKLDPVASGWPVCLKAIAAVAILVKDADKLTLGQNITVIAPHALENIVRQPPDRWMTNARMTHYQSLLLTERVTFAPPAALNPATLLPEETDEPVTHDCHQLLIEETGVRKDLTDIPLTGEVLTWFTDGSSYVVEGKRMAGAAVVDGTRTIWASSLPEGTSAQKAELMALTQALRLAEGKSINIYTDSRYAFATAHVHGAIYKQRGWLTSAGREIKNKEEILSLLEALHLPKRLAIIHCPGHQKAKDPISRGNQMADRVAKQAAQGVNLLPAGKRTADGSEFEKRTADGSEFESPKKKAKVE

SEQ ID NO: 95 - protein, 2086 aa, synthetic construct
MPAAKRVKLDGGDKKYSIGLDIGTNSVGWAVITDEYKVPSKKFKVLGNTDRHSIKKNLIGALLFDSGETAEATRLKRTARRRYTRRKNRICYLQEIFSNEMAKVDDSFFHRLEESFLVEEDKKHERHPIFGNIVDEVAYHEKYPTIYHLRKKLVDSTDKADLRLIYLALAHMIKFRGHFLIEGDLNPDNSDVDKLFIQLVQTYNQLFEENPINASGVDAKAILSARLSKSRRLENLIAQLPGEKKNGLFGNLIALSLGLTPNFKSNFDLAEDAKLQLSKDTYDDDLDNLLAQIGDQYADLFLAAKNLSDAILLSDILRVNTEITKAPLSASMIKRYDEHHQDLTLLKALVRQQLPEKYKEIFFDQSKNGYAGYIDGGASQEEFYKFIKPILEKMDGTEELLVKLNREDLLRKQRTFDNGSIPHQIHLGELHAILRRQEDFYPFLKDNREKIEKILTFRIPYYVGPLARGNSRFAWMTRKSEETITPWNFEEVVDKGASAQSFIERMTNFDKNLPNEKVLPKHSLLYEYFTVYNELTKVKYVTEGMRKPAFLSGEQKKAIVDLLFKTNRKVTVKQLKEDYFKKIECFDSVEISGVEDRFNASLGTYHDLLKIIKDKDFLDNEENEDILEDIVLTLTLFEDREMIEERLKTYAHLFDDKVMKQLKRRRYTGWGRLSRKLINGIRDKQSGKTILDFLKSDGFANRNFMQLIHDDSLTFKEDIQKAQVSGQGDSLHEHIANLAGSPAIKKGILQTVKVVDELVKVMGRHKPENIVIEMARENQTTQKGQKNSRERMKRIEEGIKELGSQILKEHPVENTQLQNEKLYLYYLQNGRDMYVDQELDINRLSDYDVDHIVPQSFLKDDSIDNKVLTRSDKARGKSDNVPSEEVVKKMKNYWRQLLNAKLITQRKFDNLTKAERGGLSELDKAGFIKRQLVETRQITKHVAQILDSRMNTKYDENDKLIREVKVITLKSKLVSDFRKDFQFYKVREINNYHHAHDAYLNAVVGTALIKKYPKLESEFVYGDYKVYDVRKMIAKSEQEIGKATAKYFFYSNIMNFFKTEITLANGEIRKRPLIETNGETGEIVWDKGRDFATVRKVLSMPQVNIVKKTEVQTGGFSKESILPKRNSDKLIARKKDWDPKKYGGFDSPTVAYSVLVVAKVEKGKSKKLKSVKELLGITIMERSSFEKNPIDFLEAKGYKEVKKDLIIKLPKYSLFELENGRKRMLASAGELQKGNELALPSKYVNFLYLASHYEKLKGSPEDNEQKQLFVEQHKHYLDEIIEQISEFSKRVILADANLDKVLSAYNKHRDKPIREQAENIIHLFTLTNLGAPAAFKYFDTTIDRKRYTSTKEVLDATLIHQSITGLYETRIDLSQLGGDGGGGGGSSGGSGGLDDEYRLYSPLVKPDQNIQFWLEQFPQAWAETAGMGLAKQVPPQVIQLKASATPVSVRQYPLSKEAQEGIRPHVQRLIQQGILVPVQSPWNTPLLPVRKPGTNDYRPVQDLREVNKRVQDIHPTVPNPYNLLCALPPQRSWYTVLDLKDAFFCLRLHPTSQPLFAFEWRDPGTGRTGQLTWTRLPQGFKNSPTIFNEALHRDLANFRIQHPQVTLLQYVDDLLLAGATKQDCLEGTKALLLELSDLGYRASAKKAQICRREVTYLGYSLRDGQRWLTEARKKTVVQIPAPTTAKQVREFLGKAGFCRLFIPGFATLAAPLYPLTKPKGEFSWAPEHQKAFDAIKKALLSAPALALPDVTKPFTLYVDERKGVARGVLTQTLGPWRRPVAYLSKKLDPVASGWPVCLKAIAAVAILVKDADKLTLGQNITVIAPHALENIVRQPPDRWMTNARMTHYQSLLLTERVTFAPPAALNPATLLPEETDEPVTHDCHQLLIEETGVRKDLTDIPLTGEVLTWFTDGSSYVVEGKRMAGAAVVDGTRTIWASSLPEGTSAQKAELMALTQALRLAEGKSINIYTDSRYAFATAHVHGAIYKQRGWLTSAGREIKNKEEILSLLEALHLPKRLAIIHCPGHQKAKDPISRGNQMADRVAKQAAQGVNLLPAGKRTADGSEFEKRTADGSEFESPKKKAKVE

SEQ ID NO: 96 - protein, 2104 aa, synthetic construct
MPAAKRVKLDGGDKKYSIGLDIGTNSVGWAVITDEYKVPSKKFKVLGNTDRHSIKKNLIGALLFDSGETAEATRLKRTARRRYTRRKNRICYLQEIFSNEMAKVDDSFFHRLEESFLVEEDKKHERHPIFGNIVDEVAYHEKYPTIYHLRKKLVDSTDKADLRLIYLALAHMIKFRGHFLIEGDLNPDNSDVDKLFIQLVQTYNQLFEENPINASGVDAKAILSARLSKSRRLENLIAQLPGEKKNGLFGNLIALSLGLTPNFKSNFDLAEDAKLQLSKDTYDDDLDNLLAQIGDQYADLFLAAKNLSDAILLSDILRVNTEITKAPLSASMIKRYDEHHQDLTLLKALVRQQLPEKYKEIFFDQSKNGYAGYIDGGASQEEFYKFIKPILEKMDGTEELLVKLNREDLLRKQRTFDNGSIPHQIHLGELHAILRRQEDFYPFLKDNREKIEKILTFRIPYYVGPLARGNSRFAWMTRKSEETITPWNFEEVVDKGASAQSFIERMTNFDKNLPNEKVLPKHSLLYEYFTVYNELTKVKYVTEGMRKPAFLSGEQKKAIVDLLFKTNRKVTVKQLKEDYFKKIECFDSVEISGVEDRFNASLGTYHDLLKIIKDKDFLDNEENEDILEDIVLTLTLFEDREMIEERLKTYAHLFDDKVMKQLKRRRYTGWGRLSRKLINGIRDKQSGKTILDFLKSDGFANRNFMQLIHDDSLTFKEDIQKAQVSGQGDSLHEHIANLAGSPAIKKGILQTVKVVDELVKVMGRHKPENIVIEMARENQTTQKGQKNSRERMKRIEEGIKELGSQILKEHPVENTQLQNEKLYLYYLQNGRDMYVDQELDINRLSDYDVDHIVPQSFLKDDSIDNKVLTRSDKARGKSDNVPSEEVVKKMKNYWRQLLNAKLITQRKFDNLTKAERGGLSELDKAGFIKRQLVETRQITKHVAQILDSRMNTKYDENDKLIREVKVITLKSKLVSDFRKDFQFYKVREINNYHHAHDAYLNAVVGTALIKKYPKLESEFVYGDYKVYDVRKMIAKSEQEIGKATAKYFFYSNIMNFFKTEITLANGEIRKRPLIETNGETGEIVWDKGRDFATVRKVLSMPQVNIVKKTEVQTGGFSKESILPKRNSDKLIARKKDWDPKKYGGFDSPTVAYSVLVVAKVEKGKSKKLKSVKELLGITIMERSSFEKNPIDFLEAKGYKEVKKDLIIKLPKYSLFELENGRKRMLASAGELQKGNELALPSKYVNFLYLASHYEKLKGSPEDNEQKQLFVEQHKHYLDEIIEQISEFSKRVILADANLDKVLSAYNKHRDKPIREQAENIIHLFTLTNLGAPAAFKYFDTTIDRKRYTSTKEVLDATLIHQSITGLYETRIDLSQLGGDGGEAAAKEAAAKEAAAKEAAAKEAAAKGGTLQLDDEYRLYSPLVKPDQNIQFWLEQFPQAWAETAGMGLAKQVPPQVIQLKASATPVSVRQYPLSKEAQEGIRPHVQRLIQQGILVPVQSPWNTPLLPVRKPGTNDYRPVQDLREVNKRVQDIHPTVPNPYNLLCALPPQRSWYTVLDLKDAFFCLRLHPTSQPLFAFEWRDPGTGRTGQLTWTRLPQGFKNSPTIFDEALHRDLANFRIQHPQVTLLQYVDDLLLAGATKQDCLEGTKALLLELSDLGYRASAKKAQICRREVTYLGYSLRDGQRWLTEARKKTVVQIPAPTTAKQVREFLGTAGFCRLWIPGFATLAAPLYPLTKEKGEFSWAPEHQKAFDAIKKALLSAPALALPDVTKPFTLYVDERKGVARGVLTQTLGPWRRPVAYLSKKLDPVASGWPVCLKAIAAVAILVKDADKLTLGQNITVIAPHALENIVRQPPDRWMTNARMTHYQSLLLTERVTFAPPAALNPATLLPEETDEPVTHDCHQLLIEETGVRKDLTDIPLTGEVLTWFTDGSSYVVEGKRMAGAAVVDGTRTIWASSLPEGTSAQKAELMALTQALRLAEGKSINIYTDSRYAFATAHVHGAIYKQRGLLTSAGREIKNKEEILSLLEALHLPKRLAIIHCPGHQKAKDPISRGNQMADRVAKQAAQGVNLLAGKRTADGSEFEKRTADGSEFESPKKKAKVE

SEQ ID NO: 97 - protein, 2094 aa, synthetic construct
MPAAKRVKLDGGDKKYSIGLDIGTNSVGWAVITDEYKVPSKKFKVLGNTDRHSIKKNLIGALLFDSGETAEATRLKRTARRRYTRRKNRICYLQEIFSNEMAKVDDSFFHRLEESFLVEEDKKHERHPIFGNIVDEVAYHEKYPTIYHLRKKLVDSTDKADLRLIYLALAHMIKFRGHFLIEGDLNPDNSDVDKLFIQLVQTYNQLFEENPINASGVDAKAILSARLSKSRRLENLIAQLPGEKKNGLFGNLIALSLGLTPNFKSNFDLAEDAKLQLSKDTYDDDLDNLLAQIGDQYADLFLAAKNLSDAILLSDILRVNTEITKAPLSASMIKRYDEHHQDLTLLKALVRQQLPEKYKEIFFDQSKNGYAGYIDGGASQEEFYKFIKPILEKMDGTEELLVKLNREDLLRKQRTFDNGSIPHQIHLGELHAILRRQEDFYPFLKDNREKIEKILTFRIPYYVGPLARGNSRFAWMTRKSEETITPWNFEEVVDKGASAQSFIERMTNFDKNLPNEKVLPKHSLLYEYFTVYNELTKVKYVTEGMRKPAFLSGEQKKAIVDLLFKTNRKVTVKQLKEDYFKKIECFDSVEISGVEDRFNASLGTYHDLLKIIKDKDFLDNEENEDILEDIVLTLTLFEDREMIEERLKTYAHLFDDKVMKQLKRRRYTGWGRLSRKLINGIRDKQSGKTILDFLKSDGFANRNFMQLIHDDSLTFKEDIQKAQVSGQGDSLHEHIANLAGSPAIKKGILQTVKVVDELVKVMGRHKPENIVIEMARENQTTQKGQKNSRERMKRIEEGIKELGSQILKEHPVENTQLQNEKLYLYYLQNGRDMYVDQELDINRLSDYDVDHIVPQSFLKDDSIDNKVLTRSDKARGKSDNVPSEEVVKKMKNYWRQLLNAKLITQRKFDNLTKAERGGLSELDKAGFIKRQLVETRQITKHVAQILDSRMNTKYDENDKLIREVKVITLKSKLVSDFRKDFQFYKVREINNYHHAHDAYLNAVVGTALIKKYPKLESEFVYGDYKVYDVRKMIAKSEQEIGKATAKYFFYSNIMNFFKTEITLANGEIRKRPLIETNGETGEIVWDKGRDFATVRKVLSMPQVNIVKKTEVQTGGFSKESILPKRNSDKLIARKKDWDPKKYGGFDSPTVAYSVLVVAKVEKGKSKKLKSVKELLGITIMERSSFEKNPIDFLEAKGYKEVKKDLIIKLPKYSLFELENGRKRMLASAGELQKGNELALPSKYVNFLYLASHYEKLKGSPEDNEQKQLFVEQHKHYLDEIIEQISEFSKRVILADANLDKVLSAYNKHRDKPIREQAENIIHLFTLTNLGAPAAFKYFDTTIDRKRYTSTKEVLDATLIHQSITGLYETRIDLSQLGGDGGEAAAKGGGGSEAAAKGGTLQLDDEYRLYSPLVKPDQNIQFWLEQFPQAWAETAGMGLAKQVPPQVIQLKASATPVSVRQYPLSKEAQEGIRPHVQRLIQQGILVPVQSPWNTPLLPVRKPGTNDYRPVQDLREVNKRVQDIHPTVPNPYNLLCALPPQRSWYTVLDLKDAFFCLRLHPTSQPLFAFEWRDPGTGRTGQLTWTRLPQGFKNSPTIFDEALHRDLANFRIQHPQVTLLQYVDDLLLAGATKQDCLEGTKALLLELSDLGYRASAKKAQICRREVTYLGYSLRDGQRWLTEARKKTVVQIPAPTTAKQVREFLGTAGFCRLWIPGFATLAAPLYPLTKEKGEFSWAPEHQKAFDAIKKALLSAPALALPDVTKPFTLYVDERKGVARGVLTQTLGPWRRPVAYLSKKLDPVASGWPVCLKAIAAVAILVKDADKLTLGQNITVIAPHALENIVRQPPDRWMTNARMTHYQSLLLTERVTFAPPAALNPATLLPEETDEPVTHDCHQLLIEETGVRKDLTDIPLTGEVLTWFTDGSSYVVEGKRMAGAAVVDGTRTIWASSLPEGTSAQKAELMALTQALRLAEGKSINIYTDSRYAFATAHVHGAIYKQRGLLTSAGREIKNKEEILSLLEALHLPKRLAIIHCPGHQKAKDPISRGNQMADRVAKQAAQGVNLLAGKRTADGSEFEKRTADGSEFESPKKKAKVE

SEQ ID NO: 98 - protein, 2125 aa, synthetic construct
MPAAKRVKLDGGDKKYSIGLDIGTNSVGWAVITDEYKVPSKKFKVLGNTDRHSIKKNLIGALLFDSGETAEATRLKRTARRRYTRRKNRICYLQEIFSNEMAKVDDSFFHRLEESFLVEEDKKHERHPIFGNIVDEVAYHEKYPTIYHLRKKLVDSTDKADLRLIYLALAHMIKFRGHFLIEGDLNPDNSDVDKLFIQLVQTYNQLFEENPINASGVDAKAILSARLSKSRRLENLIAQLPGEKKNGLFGNLIALSLGLTPNFKSNFDLAEDAKLQLSKDTYDDDLDNLLAQIGDQYADLFLAAKNLSDAILLSDILRVNTEITKAPLSASMIKRYDEHHQDLTLLKALVRQQLPEKYKEIFFDQSKNGYAGYIDGGASQEEFYKFIKPILEKMDGTEELLVKLNREDLLRKQRTFDNGSIPHQIHLGELHAILRRQEDFYPFLKDNREKIEKILTFRIPYYVGPLARGNSRFAWMTRKSEETITPWNFEEVVDKGASAQSFIERMTNFDKNLPNEKVLPKHSLLYEYFTVYNELTKVKYVTEGMRKPAFLSGEQKKAIVDLLFKTNRKVTVKQLKEDYFKKIECFDSVEISGVEDRFNASLGTYHDLLKIIKDKDFLDNEENEDILEDIVLTLTLFEDREMIEERLKTYAHLFDDKVMKQLKRRRYTGWGRLSRKLINGIRDKQSGKTILDFLKSDGFANRNFMQLIHDDSLTFKEDIQKAQVSGQGDSLHEHIANLAGSPAIKKGILQTVKVVDELVKVMGRHKPENIVIEMARENQTTQKGQKNSRERMKRIEEGIKELGSQILKEHPVENTQLQNEKLYLYYLQNGRDMYVDQELDINRLSDYDVDHIVPQSFLKDDSIDNKVLTRSDKARGKSDNVPSEEVVKKMKNYWRQLLNAKLITQRKFDNLTKAERGGLSELDKAGFIKRQLVETRQITKHVAQILDSRMNTKYDENDKLIREVKVITLKSKLVSDFRKDFQFYKVREINNYHHAHDAYLNAVVGTALIKKYPKLESEFVYGDYKVYDVRKMIAKSEQEIGKATAKYFFYSNIMNFFKTEITLANGEIRKRPLIETNGETGEIVWDKGRDFATVRKVLSMPQVNIVKKTEVQTGGFSKESILPKRNSDKLIARKKDWDPKKYGGFDSPTVAYSVLVVAKVEKGKSKKLKSVKELLGITIMERSSFEKNPIDFLEAKGYKEVKKDLIIKLPKYSLFELENGRKRMLASAGELQKGNELALPSKYVNFLYLASHYEKLKGSPEDNEQKQLFVEQHKHYLDEIIEQISEFSKRVILADANLDKVLSAYNKHRDKPIREQAENIIHLFTLTNLGAPAAFKYFDTTIDRKRYTSTKEVLDATLIHQSITGLYETRIDLSQLGGDGGAEAAAKEAAAKEAAAKEAAAKALEAEAAAKEAAAKEAAAKEAAAKAGGTLQLDDEYRLYSPLVKPDQNIQFWLEQFPQAWAETAGMGLAKQVPPQVIQLKASATPVSVRQYPLSKEAQEGIRPHVQRLIQQGILVPVQSPWNTPLLPVRKPGTNDYRPVQDLREVNKRVQDIHPTVPNPYNLLCALPPQRSWYTVLDLKDAFFCLRLHPTSQPLFAFEWRDPGTGRTGQLTWTRLPQGFKNSPTIFDEALHRDLANFRIQHPQVTLLQYVDDLLLAGATKQDCLEGTKALLLELSDLGYRASAKKAQICRREVTYLGYSLRDGQRWLTEARKKTVVQIPAPTTAKQVREFLGTAGFCRLWIPGFATLAAPLYPLTKEKGEFSWAPEHQKAFDAIKKALLSAPALALPDVTKPFTLYVDERKGVARGVLTQTLGPWRRPVAYLSKKLDPVASGWPVCLKAIAAVAILVKDADKLTLGQNITVIAPHALENIVRQPPDRWMTNARMTHYQSLLLTERVTFAPPAALNPATLLPEETDEPVTHDCHQLLIEETGVRKDLTDIPLTGEVLTWFTDGSSYVVEGKRMAGAAVVDGTRTIWASSLPEGTSAQKAELMALTQALRLAEGKSINIYTDSRYAFATAHVHGAIYKQRGLLTSAGREIKNKEEILSLLEALHLPKRLAIIHCPGHQKAKDPISRGNQMADRVAKQAAQGVNLLAGKRTADGSEFEKRTADGSEFESPKKKAKVE

SEQ ID NO: 99 - protein, 2094 aa, synthetic construct
MPAAKRVKLDGGDKKYSIGLDIGTNSVGWAVITDEYKVPSKKFKVLGNTDRHSIKKNLIGALLFDSGETAEATRLKRTARRRYTRRKNRICYLQEIFSNEMAKVDDSFFHRLEESFLVEEDKKHERHPIFGNIVDEVAYHEKYPTIYHLRKKLVDSTDKADLRLIYLALAHMIKFRGHFLIEGDLNPDNSDVDKLFIQLVQTYNQLFEENPINASGVDAKAILSARLSKSRRLENLIAQLPGEKKNGLFGNLIALSLGLTPNFKSNFDLAEDAKLQLSKDTYDDDLDNLLAQIGDQYADLFLAAKNLSDAILLSDILRVNTEITKAPLSASMIKRYDEHHQDLTLLKALVRQQLPEKYKEIFFDQSKNGYAGYIDGGASQEEFYKFIKPILEKMDGTEELLVKLNREDLLRKQRTFDNGSIPHQIHLGELHAILRRQEDFYPFLKDNREKIEKILTFRIPYYVGPLARGNSRFAWMTRKSEETITPWNFEEVVDKGASAQSFIERMTNFDKNLPNEKVLPKHSLLYEYFTVYNELTKVKYVTEGMRKPAFLSGEQKKAIVDLLFKTNRKVTVKQLKEDYFKKIECFDSVEISGVEDRFNASLGTYHDLLKIIKDKDFLDNEENEDILEDIVLTLTLFEDREMIEERLKTYAHLFDDKVMKQLKRRRYTGWGRLSRKLINGIRDKQSGKTILDFLKSDGFANRNFMQLIHDDSLTFKEDIQKAQVSGQGDSLHEHIANLAGSPAIKKGILQTVKVVDELVKVMGRHKPENIVIEMARENQTTQKGQKNSRERMKRIEEGIKELGSQILKEHPVENTQLQNEKLYLYYLQNGRDMYVDQELDINRLSDYDVDHIVPQSFLKDDSIDNKVLTRSDKARGKSDNVPSEEVVKKMKNYWRQLLNAKLITQRKFDNLTKAERGGLSELDKAGFIKRQLVETRQITKHVAQILDSRMNTKYDENDKLIREVKVITLKSKLVSDFRKDFQFYKVREINNYHHAHDAYLNAVVGTALIKKYPKLESEFVYGDYKVYDVRKMIAKSEQEIGKATAKYFFYSNIMNFFKTEITLANGEIRKRPLIETNGETGEIVWDKGRDFATVRKVLSMPQVNIVKKTEVQTGGFSKESILPKRNSDKLIARKKDWDPKKYGGFDSPTVAYSVLVVAKVEKGKSKKLKSVKELLGITIMERSSFEKNPIDFLEAKGYKEVKKDLIIKLPKYSLFELENGRKRMLASAGELQKGNELALPSKYVNFLYLASHYEKLKGSPEDNEQKQLFVEQHKHYLDEIIEQISEFSKRVILADANLDKVLSAYNKHRDKPIREQAENIIHLFTLTNLGAPAAFKYFDTTIDRKRYTSTKEVLDATLIHQSITGLYETRIDLSQLGGDGGGSSGSSGSSGSSGSSGGTLQLDDEYRLYSPLVKPDQNIQFWLEQFPQAWAETAGMGLAKQVPPQVIQLKASATPVSVRQYPLSKEAQEGIRPHVQRLIQQGILVPVQSPWNTPLLPVRKPGTNDYRPVQDLREVNKRVQDIHPTVPNPYNLLCALPPQRSWYTVLDLKDAFFCLRLHPTSQPLFAFEWRDPGTGRTGQLTWTRLPQGFKNSPTIFDEALHRDLANFRIQHPQVTLLQYVDDLLLAGATKQDCLEGTKALLLELSDLGYRASAKKAQICRREVTYLGYSLRDGQRWLTEARKKTVVQIPAPTTAKQVREFLGTAGFCRLWIPGFATLAAPLYPLTKEKGEFSWAPEHQKAFDAIKKALLSAPALALPDVTKPFTLYVDERKGVARGVLTQTLGPWRRPVAYLSKKLDPVASGWPVCLKAIAAVAILVKDADKLTLGQNITVIAPHALENIVRQPPDRWMTNARMTHYQSLLLTERVTFAPPAALNPATLLPEETDEPVTHDCHQLLIEETGVRKDLTDIPLTGEVLTWFTDGSSYVVEGKRMAGAAVVDGTRTIWASSLPEGTSAQKAELMALTQALRLAEGKSINIYTDSRYAFATAHVHGAIYKQRGLLTSAGREIKNKEEILSLLEALHLPKRLAIIHCPGHQKAKDPISRGNQMADRVAKQAAQGVNLLAGKRTADGSEFEKRTADGSEFESPKKKAKVE

SEQ ID NO: 100 - protein, 2085 aa, synthetic construct
MPAAKRVKLDGGDKKYSIGLDIGTNSVGWAVITDEYKVPSKKFKVLGNTDRHSIKKNLIGALLFDSGETAEATRLKRTARRRYTRRKNRICYLQEIFSNEMAKVDDSFFHRLEESFLVEEDKKHERHPIFGNIVDEVAYHEKYPTIYHLRKKLVDSTDKADLRLIYLALAHMIKFRGHFLIEGDLNPDNSDVDKLFIQLVQTYNQLFEENPINASGVDAKAILSARLSKSRRLENLIAQLPGEKKNGLFGNLIALSLGLTPNFKSNFDLAEDAKLQLSKDTYDDDLDNLLAQIGDQYADLFLAAKNLSDAILLSDILRVNTEITKAPLSASMIKRYDEHHQDLTLLKALVRQQLPEKYKEIFFDQSKNGYAGYIDGGASQEEFYKFIKPILEKMDGTEELLVKLNREDLLRKQRTFDNGSIPHQIHLGELHAILRRQEDFYPFLKDNREKIEKILTFRIPYYVGPLARGNSRFAWMTRKSEETITPWNFEEVVDKGASAQSFIERMTNFDKNLPNEKVLPKHSLLYEYFTVYNELTKVKYVTEGMRKPAFLSGEQKKAIVDLLFKTNRKVTVKQLKEDYFKKIECFDSVEISGVEDRFNASLGTYHDLLKIIKDKDFLDNEENEDILEDIVLTLTLFEDREMIEERLKTYAHLFDDKVMKQLKRRRYTGWGRLSRKLINGIRDKQSGKTILDFLKSDGFANRNFMQLIHDDSLTFKEDIQKAQVSGQGDSLHEHIANLAGSPAIKKGILQTVKVVDELVKVMGRHKPENIVIEMARENQTTQKGQKNSRERMKRIEEGIKELGSQILKEHPVENTQLQNEKLYLYYLQNGRDMYVDQELDINRLSDYDVDHIVPQSFLKDDSIDNKVLTRSDKARGKSDNVPSEEVVKKMKNYWRQLLNAKLITQRKFDNLTKAERGGLSELDKAGFIKRQLVETRQITKHVAQILDSRMNTKYDENDKLIREVKVITLKSKLVSDFRKDFQFYKVREINNYHHAHDAYLNAVVGTALIKKYPKLESEFVYGDYKVYDVRKMIAKSEQEIGKATAKYFFYSNIMNFFKTEITLANGEIRKRPLIETNGETGEIVWDKGRDFATVRKVLSMPQVNIVKKTEVQTGGFSKESILPKRNSDKLIARKKDWDPKKYGGFDSPTVAYSVLVVAKVEKGKSKKLKSVKELLGITIMERSSFEKNPIDFLEAKGYKEVKKDLIIKLPKYSLFELENGRKRMLASAGELQKGNELALPSKYVNFLYLASHYEKLKGSPEDNEQKQLFVEQHKHYLDEIIEQISEFSKRVILADANLDKVLSAYNKHRDKPIREQAENIIHLFTLTNLGAPAAFKYFDTTIDRKRYTSTKEVLDATLIHQSITGLYETRIDLSQLGGDGGGGGGSSGGTLQLDDEYRLYSPLVKPDQNIQFWLEQFPQAWAETAGMGLAKQVPPQVIQLKASATPVSVRQYPLSKEAQEGIRPHVQRLIQQGILVPVQSPWNTPLLPVRKPGTNDYRPVQDLREVNKRVQDIHPTVPNPYNLLCALPPQRSWYTVLDLKDAFFCLRLHPTSQPLFAFEWRDPGTGRTGQLTWTRLPQGFKNSPTIFDEALHRDLANFRIQHPQVTLLQYVDDLLLAGATKQDCLEGTKALLLELSDLGYRASAKKAQICRREVTYLGYSLRDGQRWLTEARKKTVVQIPAPTTAKQVREFLGTAGFCRLWIPGFATLAAPLYPLTKEKGEFSWAPEHQKAFDAIKKALLSAPALALPDVTKPFTLYVDERKGVARGVLTQTLGPWRRPVAYLSKKLDPVASGWPVCLKAIAAVAILVKDADKLTLGQNITVIAPHALENIVRQPPDRWMTNARMTHYQSLLLTERVTFAPPAALNPATLLPEETDEPVTHDCHQLLIEETGVRKDLTDIPLTGEVLTWFTDGSSYVVEGKRMAGAAVVDGTRTIWASSLPEGTSAQKAELMALTQALRLAEGKSINIYTDSRYAFATAHVHGAIYKQRGLLTSAGREIKNKEEILSLLEALHLPKRLAIIHCPGHQKAKDPISRGNQMADRVAKQAAQGVNLLAGKRTADGSEFEKRTADGSEFESPKKKAKVE

SEQ ID NO: 101 - protein, 2088 aa, synthetic construct
MPAAKRVKLDGGDKKYSIGLDIGTNSVGWAVITDEYKVPSKKFKVLGNTDRHSIKKNLIGALLFDSGETAEATRLKRTARRRYTRRKNRICYLQEIFSNEMAKVDDSFFHRLEESFLVEEDKKHERHPIFGNIVDEVAYHEKYPTIYHLRKKLVDSTDKADLRLIYLALAHMIKFRGHFLIEGDLNPDNSDVDKLFIQLVQTYNQLFEENPINASGVDAKAILSARLSKSRRLENLIAQLPGEKKNGLFGNLIALSLGLTPNFKSNFDLAEDAKLQLSKDTYDDDLDNLLAQIGDQYADLFLAAKNLSDAILLSDILRVNTEITKAPLSASMIKRYDEHHQDLTLLKALVRQQLPEKYKEIFFDQSKNGYAGYIDGGASQEEFYKFIKPILEKMDGTEELLVKLNREDLLRKQRTFDNGSIPHQIHLGELHAILRRQEDFYPFLKDNREKIEKILTFRIPYYVGPLARGNSRFAWMTRKSEETITPWNFEEVVDKGASAQSFIERMTNFDKNLPNEKVLPKHSLLYEYFTVYNELTKVKYVTEGMRKPAFLSGEQKKAIVDLLFKTNRKVTVKQLKEDYFKKIECFDSVEISGVEDRFNASLGTYHDLLKIIKDKDFLDNEENEDILEDIVLTLTLFEDREMIEERLKTYAHLFDDKVMKQLKRRRYTGWGRLSRKLINGIRDKQSGKTILDFLKSDGFANRNFMQLIHDDSLTFKEDIQKAQVSGQGDSLHEHIANLAGSPAIKKGILQTVKVVDELVKVMGRHKPENIVIEMARENQTTQKGQKNSRERMKRIEEGIKELGSQILKEHPVENTQLQNEKLYLYYLQNGRDMYVDQELDINRLSDYDVDHIVPQSFLKDDSIDNKVLTRSDKARGKSDNVPSEEVVKKMKNYWRQLLNAKLITQRKFDNLTKAERGGLSELDKAGFIKRQLVETRQITKHVAQILDSRMNTKYDENDKLIREVKVITLKSKLVSDFRKDFQFYKVREINNYHHAHDAYLNAVVGTALIKKYPKLESEFVYGDYKVYDVRKMIAKSEQEIGKATAKYFFYSNIMNFFKTEITLANGEIRKRPLIETNGETGEIVWDKGRDFATVRKVLSMPQVNIVKKTEVQTGGFSKESILPKRNSDKLIARKKDWDPKKYGGFDSPTVAYSVLVVAKVEKGKSKKLKSVKELLGITIMERSSFEKNPIDFLEAKGYKEVKKDLIIKLPKYSLFELENGRKRMLASAGELQKGNELALPSKYVNFLYLASHYEKLKGSPEDNEQKQLFVEQHKHYLDEIIEQISEFSKRVILADANLDKVLSAYNKHRDKPIREQAENIIHLFTLTNLGAPAAFKYFDTTIDRKRYTSTKEVLDATLIHQSITGLYETRIDLSQLGGDGGGSSGGSPAPGGTLQLDDEYRLYSPLVKPDQNIQFWLEQFPQAWAETAGMGLAKQVPPQVIQLKASATPVSVRQYPLSKEAQEGIRPHVQRLIQQGILVPVQSPWNTPLLPVRKPGTNDYRPVQDLREVNKRVQDIHPTVPNPYNLLCALPPQRSWYTVLDLKDAFFCLRLHPTSQPLFAFEWRDPGTGRTGQLTWTRLPQGFKNSPTIFDEALHRDLANFRIQHPQVTLLQYVDDLLLAGATKQDCLEGTKALLLELSDLGYRASAKKAQICRREVTYLGYSLRDGQRWLTEARKKTVVQIPAPTTAKQVREFLGTAGFCRLWIPGFATLAAPLYPLTKEKGEFSWAPEHQKAFDAIKKALLSAPALALPDVTKPFTLYVDERKGVARGVLTQTLGPWRRPVAYLSKKLDPVASGWPVCLKAIAAVAILVKDADKLTLGQNITVIAPHALENIVRQPPDRWMTNARMTHYQSLLLTERVTFAPPAALNPATLLPEETDEPVTHDCHQLLIEETGVRKDLTDIPLTGEVLTWFTDGSSYVVEGKRMAGAAVVDGTRTIWASSLPEGTSAQKAELMALTQALRLAEGKSINIYTDSRYAFATAHVHGAIYKQRGLLTSAGREIKNKEEILSLLEALHLPKRLAIIHCPGHQKAKDPISRGNQMADRVAKQAAQGVNLLAGKRTADGSEFEKRTADGSEFESPKKKAKVE

SEQ ID NO: 102 - protein, 2089 aa, synthetic construct
MPAAKRVKLDGGDKKYSIGLDIGTNSVGWAVITDEYKVPSKKFKVLGNTDRHSIKKNLIGALLFDSGETAEATRLKRTARRRYTRRKNRICYLQEIFSNEMAKVDDSFFHRLEESFLVEEDKKHERHPIFGNIVDEVAYHEKYPTIYHLRKKLVDSTDKADLRLIYLALAHMIKFRGHFLIEGDLNPDNSDVDKLFIQLVQTYNQLFEENPINASGVDAKAILSARLSKSRRLENLIAQLPGEKKNGLFGNLIALSLGLTPNFKSNFDLAEDAKLQLSKDTYDDDLDNLLAQIGDQYADLFLAAKNLSDAILLSDILRVNTEITKAPLSASMIKRYDEHHQDLTLLKALVRQQLPEKYKEIFFDQSKNGYAGYIDGGASQEEFYKFIKPILEKMDGTEELLVKLNREDLLRKQRTFDNGSIPHQIHLGELHAILRRQEDFYPFLKDNREKIEKILTFRIPYYVGPLARGNSRFAWMTRKSEETITPWNFEEVVDKGASAQSFIERMTNFDKNLPNEKVLPKHSLLYEYFTVYNELTKVKYVTEGMRKPAFLSGEQKKAIVDLLFKTNRKVTVKQLKEDYFKKIECFDSVEISGVEDRFNASLGTYHDLLKIIKDKDFLDNEENEDILEDIVLTLTLFEDREMIEERLKTYAHLFDDKVMKQLKRRRYTGWGRLSRKLINGIRDKQSGKTILDFLKSDGFANRNFMQLIHDDSLTFKEDIQKAQVSGQGDSLHEHIANLAGSPAIKKGILQTVKVVDELVKVMGRHKPENIVIEMARENQTTQKGQKNSRERMKRIEEGIKELGSQILKEHPVENTQLQNEKLYLYYLQNGRDMYVDQELDINRLSDYDVDHIVPQSFLKDDSIDNKVLTRSDKARGKSDNVPSEEVVKKMKNYWRQLLNAKLITQRKFDNLTKAERGGLSELDKAGFIKRQLVETRQITKHVAQILDSRMNTKYDENDKLIREVKVITLKSKLVSDFRKDFQFYKVREINNYHHAHDAYLNAVVGTALIKKYPKLESEFVYGDYKVYDVRKMIAKSEQEIGKATAKYFFYSNIMNFFKTEITLANGEIRKRPLIETNGETGEIVWDKGRDFATVRKVLSMPQVNIVKKTEVQTGGFSKESILPKRNSDKLIARKKDWDPKKYGGFDSPTVAYSVLVVAKVEKGKSKKLKSVKELLGITIMERSSFEKNPIDFLEAKGYKEVKKDLIIKLPKYSLFELENGRKRMLASAGELQKGNELALPSKYVNFLYLASHYEKLKGSPEDNEQKQLFVEQHKHYLDEIIEQISEFSKRVILADANLDKVLSAYNKHRDKPIREQAENIIHLFTLTNLGAPAAFKYFDTTIDRKRYTSTKEVLDATLIHQSITGLYETRIDLSQLGGDGGGGGGSGGGGSGGTLQLDDEYRLYSPLVKPDQNIQFWLEQFPQAWAETAGMGLAKQVPPQVIQLKASATPVSVRQYPLSKEAQEGIRPHVQRLIQQGILVPVQSPWNTPLLPVRKPGTNDYRPVQDLREVNKRVQDIHPTVPNPYNLLCALPPQRSWYTVLDLKDAFFCLRLHPTSQPLFAFEWRDPGTGRTGQLTWTRLPQGFKNSPTIFDEALHRDLANFRIQHPQVTLLQYVDDLLLAGATKQDCLEGTKALLLELSDLGYRASAKKAQICRREVTYLGYSLRDGQRWLTEARKKTVVQIPAPTTAKQVREFLGTAGFCRLWIPGFATLAAPLYPLTKEKGEFSWAPEHQKAFDAIKKALLSAPALALPDVTKPFTLYVDERKGVARGVLTQTLGPWRRPVAYLSKKLDPVASGWPVCLKAIAAVAILVKDADKLTLGQNITVIAPHALENIVRQPPDRWMTNARMTHYQSLLLTERVTFAPPAALNPATLLPEETDEPVTHDCHQLLIEETGVRKDLTDIPLTGEVLTWFTDGSSYVVEGKRMAGAAVVDGTRTIWASSLPEGTSAQKAELMALTQALRLAEGKSINIYTDSRYAFATAHVHGAIYKQRGLLTSAGREIKNKEEILSLLEALHLPKRLAIIHCPGHQKAKDPISRGNQMADRVAKQAAQGVNLLAGKRTADGSEFEKRTADGSEFESPKKKAKVE

SEQ ID NO: 103 - protein, 2091 aa, synthetic construct
MPAAKRVKLDGGDKKYSIGLDIGTNSVGWAVITDEYKVPSKKFKVLGNTDRHSIKKNLIGALLFDSGETAEATRLKRTARRRYTRRKNRICYLQEIFSNEMAKVDDSFFHRLEESFLVEEDKKHERHPIFGNIVDEVAYHEKYPTIYHLRKKLVDSTDKADLRLIYLALAHMIKFRGHFLIEGDLNPDNSDVDKLFIQLVQTYNQLFEENPINASGVDAKAILSARLSKSRRLENLIAQLPGEKKNGLFGNLIALSLGLTPNFKSNFDLAEDAKLQLSKDTYDDDLDNLLAQIGDQYADLFLAAKNLSDAILLSDILRVNTEITKAPLSASMIKRYDEHHQDLTLLKALVRQQLPEKYKEIFFDQSKNGYAGYIDGGASQEEFYKFIKPILEKMDGTEELLVKLNREDLLRKQRTFDNGSIPHQIHLGELHAILRRQEDFYPFLKDNREKIEKILTFRIPYYVGPLARGNSRFAWMTRKSEETITPWNFEEVVDKGASAQSFIERMTNFDKNLPNEKVLPKHSLLYEYFTVYNELTKVKYVTEGMRKPAFLSGEQKKAIVDLLFKTNRKVTVKQLKEDYFKKIECFDSVEISGVEDRFNASLGTYHDLLKIIKDKDFLDNEENEDILEDIVLTLTLFEDREMIEERLKTYAHLFDDKVMKQLKRRRYTGWGRLSRKLINGIRDKQSGKTILDFLKSDGFANRNFMQLIHDDSLTFKEDIQKAQVSGQGDSLHEHIANLAGSPAIKKGILQTVKVVDELVKVMGRHKPENIVIEMARENQTTQKGQKNSRERMKRIEEGIKELGSQILKEHPVENTQLQNEKLYLYYLQNGRDMYVDQELDINRLSDYDVDHIVPQSFLKDDSIDNKVLTRSDKARGKSDNVPSEEVVKKMKNYWRQLLNAKLITQRKFDNLTKAERGGLSELDKAGFIKRQLVETRQITKHVAQILDSRMNTKYDENDKLIREVKVITLKSKLVSDFRKDFQFYKVREINNYHHAHDAYLNAVVGTALIKKYPKLESEFVYGDYKVYDVRKMIAKSEQEIGKATAKYFFYSNIMNFFKTEITLANGEIRKRPLIETNGETGEIVWDKGRDFATVRKVLSMPQVNIVKKTEVQTGGFSKESILPKRNSDKLIARKKDWDPKKYGGFDSPTVAYSVLVVAKVEKGKSKKLKSVKELLGITIMERSSFEKNPIDFLEAKGYKEVKKDLIIKLPKYSLFELENGRKRMLASAGELQKGNELALPSKYVNFLYLASHYEKLKGSPEDNEQKQLFVEQHKHYLDEIIEQISEFSKRVILADANLDKVLSAYNKHRDKPIREQAENIIHLFTLTNLGAPAAFKYFDTTIDRKRYTSTKEVLDATLIHQSITGLYETRIDLSQLGGDGGGSSGSSGSSGSSGGTLQLDDEYRLYSPLVKPDQNIQFWLEQFPQAWAETAGMGLAKQVPPQVIQLKASATPVSVRQYPLSKEAQEGIRPHVQRLIQQGILVPVQSPWNTPLLPVRKPGTNDYRPVQDLREVNKRVQDIHPTVPNPYNLLCALPPQRSWYTVLDLKDAFFCLRLHPTSQPLFAFEWRDPGTGRTGQLTWTRLPQGFKNSPTIFDEALHRDLANFRIQHPQVTLLQYVDDLLLAGATKQDCLEGTKALLLELSDLGYRASAKKAQICRREVTYLGYSLRDGQRWLTEARKKTVVQIPAPTTAKQVREFLGTAGFCRLWIPGFATLAAPLYPLTKEKGEFSWAPEHQKAFDAIKKALLSAPALALPDVTKPFTLYVDERKGVARGVLTQTLGPWRRPVAYLSKKLDPVASGWPVCLKAIAAVAILVKDADKLTLGQNITVIAPHALENIVRQPPDRWMTNARMTHYQSLLLTERVTFAPPAALNPATLLPEETDEPVTHDCHQLLIEETGVRKDLTDIPLTGEVLTWFTDGSSYVVEGKRMAGAAVVDGTRTIWASSLPEGTSAQKAELMALTQALRLAEGKSINIYTDSRYAFATAHVHGAIYKQRGLLTSAGREIKNKEEILSLLEALHLPKRLAIIHCPGHQKAKDPISRGNQMADRVAKQAAQGVNLLAGKRTADGSEFEKRTADGSEFESPKKKAKVE

SEQ ID NO: 104 - protein, 2090 aa, synthetic construct
MPAAKRVKLDGGDKKYSIGLDIGTNSVGWAVITDEYKVPSKKFKVLGNTDRHSIKKNLIGALLFDSGETAEATRLKRTARRRYTRRKNRICYLQEIFSNEMAKVDDSFFHRLEESFLVEEDKKHERHPIFGNIVDEVAYHEKYPTIYHLRKKLVDSTDKADLRLIYLALAHMIKFRGHFLIEGDLNPDNSDVDKLFIQLVQTYNQLFEENPINASGVDAKAILSARLSKSRRLENLIAQLPGEKKNGLFGNLIALSLGLTPNFKSNFDLAEDAKLQLSKDTYDDDLDNLLAQIGDQYADLFLAAKNLSDAILLSDILRVNTEITKAPLSASMIKRYDEHHQDLTLLKALVRQQLPEKYKEIFFDQSKNGYAGYIDGGASQEEFYKFIKPILEKMDGTEELLVKLNREDLLRKQRTFDNGSIPHQIHLGELHAILRRQEDFYPFLKDNREKIEKILTFRIPYYVGPLARGNSRFAWMTRKSEETITPWNFEEVVDKGASAQSFIERMTNFDKNLPNEKVLPKHSLLYEYFTVYNELTKVKYVTEGMRKPAFLSGEQKKAIVDLLFKTNRKVTVKQLKEDYFKKIECFDSVEISGVEDRFNASLGTYHDLLKIIKDKDFLDNEENEDILEDIVLTLTLFEDREMIEERLKTYAHLFDDKVMKQLKRRRYTGWGRLSRKLINGIRDKQSGKTILDFLKSDGFANRNFMQLIHDDSLTFKEDIQKAQVSGQGDSLHEHIANLAGSPAIKKGILQTVKVVDELVKVMGRHKPENIVIEMARENQTTQKGQKNSRERMKRIEEGIKELGSQILKEHPVENTQLQNEKLYLYYLQNGRDMYVDQELDINRLSDYDVDHIVPQSFLKDDSIDNKVLTRSDKARGKSDNVPSEEVVKKMKNYWRQLLNAKLITQRKFDNLTKAERGGLSELDKAGFIKRQLVETRQITKHVAQILDSRMNTKYDENDKLIREVKVITLKSKLVSDFRKDFQFYKVREINNYHHAHDAYLNAVVGTALIKKYPKLESEFVYGDYKVYDVRKMIAKSEQEIGKATAKYFFYSNIMNFFKTEITLANGEIRKRPLIETNGETGEIVWDKGRDFATVRKVLSMPQVNIVKKTEVQTGGFSKESILPKRNSDKLIARKKDWDPKKYGGFDSPTVAYSVLVVAKVEKGKSKKLKSVKELLGITIMERSSFEKNPIDFLEAKGYKEVKKDLIIKLPKYSLFELENGRKRMLASAGELQKGNELALPSKYVNFLYLASHYEKLKGSPEDNEQKQLFVEQHKHYLDEIIEQISEFSKRVILADANLDKVLSAYNKHRDKPIREQAENIIHLFTLTNLGAPAAFKYFDTTIDRKRYTSTKEVLDATLIHQSITGLYETRIDLSQLGGDGGPAPGSSEAAAKGGTLQLDDEYRLYSPLVKPDQNIQFWLEQFPQAWAETAGMGLAKQVPPQVIQLKASATPVSVRQYPLSKEAQEGIRPHVQRLIQQGILVPVQSPWNTPLLPVRKPGTNDYRPVQDLREVNKRVQDIHPTVPNPYNLLCALPPQRSWYTVLDLKDAFFCLRLHPTSQPLFAFEWRDPGTGRTGQLTWTRLPQGFKNSPTIFDEALHRDLANFRIQHPQVTLLQYVDDLLLAGATKQDCLEGTKALLLELSDLGYRASAKKAQICRREVTYLGYSLRDGQRWLTEARKKTVVQIPAPTTAKQVREFLGTAGFCRLWIPGFATLAAPLYPLTKEKGEFSWAPEHQKAFDAIKKALLSAPALALPDVTKPFTLYVDERKGVARGVLTQTLGPWRRPVAYLSKKLDPVASGWPVCLKAIAAVAILVKDADKLTLGQNITVIAPHALENIVRQPPDRWMTNARMTHYQSLLLTERVTFAPPAALNPATLLPEETDEPVTHDCHQLLIEETGVRKDLTDIPLTGEVLTWFTDGSSYVVEGKRMAGAAVVDGTRTIWASSLPEGTSAQKAELMALTQALRLAEGKSINIYTDSRYAFATAHVHGAIYKQRGLLTSAGREIKNKEEILSLLEALHLPKRLAIIHCPGHQKAKDPISRGNQMADRVAKQAAQGVNLLAGKRTADGSEFEKRTADGSEFESPKKKAKVE

SEQ ID NO: 105 - protein, 2085 aa, synthetic construct
MPAAKRVKLDGGDKKYSIGLDIGTNSVGWAVITDEYKVPSKKFKVLGNTDRHSIKKNLIGALLFDSGETAEATRLKRTARRRYTRRKNRICYLQEIFSNEMAKVDDSFFHRLEESFLVEEDKKHERHPIFGNIVDEVAYHEKYPTIYHLRKKLVDSTDKADLRLIYLALAHMIKFRGHFLIEGDLNPDNSDVDKLFIQLVQTYNQLFEENPINASGVDAKAILSARLSKSRRLENLIAQLPGEKKNGLFGNLIALSLGLTPNFKSNFDLAEDAKLQLSKDTYDDDLDNLLAQIGDQYADLFLAAKNLSDAILLSDILRVNTEITKAPLSASMIKRYDEHHQDLTLLKALVRQQLPEKYKEIFFDQSKNGYAGYIDGGASQEEFYKFIKPILEKMDGTEELLVKLNREDLLRKQRTFDNGSIPHQIHLGELHAILRRQEDFYPFLKDNREKIEKILTFRIPYYVGPLARGNSRFAWMTRKSEETITPWNFEEVVDKGASAQSFIERMTNFDKNLPNEKVLPKHSLLYEYFTVYNELTKVKYVTEGMRKPAFLSGEQKKAIVDLLFKTNRKVTVKQLKEDYFKKIECFDSVEISGVEDRFNASLGTYHDLLKIIKDKDFLDNEENEDILEDIVLTLTLFEDREMIEERLKTYAHLFDDKVMKQLKRRRYTGWGRLSRKLINGIRDKQSGKTILDFLKSDGFANRNFMQLIHDDSLTFKEDIQKAQVSGQGDSLHEHIANLAGSPAIKKGILQTVKVVDELVKVMGRHKPENIVIEMARENQTTQKGQKNSRERMKRIEEGIKELGSQILKEHPVENTQLQNEKLYLYYLQNGRDMYVDQELDINRLSDYDVDHIVPQSFLKDDSIDNKVLTRSDKARGKSDNVPSEEVVKKMKNYWRQLLNAKLITQRKFDNLTKAERGGLSELDKAGFIKRQLVETRQITKHVAQILDSRMNTKYDENDKLIREVKVITLKSKLVSDFRKDFQFYKVREINNYHHAHDAYLNAVVGTALIKKYPKLESEFVYGDYKVYDVRKMIAKSEQEIGKATAKYFFYSNIMNFFKTEITLANGEIRKRPLIETNGETGEIVWDKGRDFATVRKVLSMPQVNIVKKTEVQTGGFSKESILPKRNSDKLIARKKDWDPKKYGGFDSPTVAYSVLVVAKVEKGKSKKLKSVKELLGITIMERSSFEKNPIDFLEAKGYKEVKKDLIIKLPKYSLFELENGRKRMLASAGELQKGNELALPSKYVNFLYLASHYEKLKGSPEDNEQKQLFVEQHKHYLDEIIEQISEFSKRVILADANLDKVLSAYNKHRDKPIREQAENIIHLFTLTNLGAPAAFKYFDTTIDRKRYTSTKEVLDATLIHQSITGLYETRIDLSQLGGDGGGGSGSSGGTLQLDDEYRLYSPLVKPDQNIQFWLEQFPQAWAETAGMGLAKQVPPQVIQLKASATPVSVRQYPLSKEAQEGIRPHVQRLIQQGILVPVQSPWNTPLLPVRKPGTNDYRPVQDLREVNKRVQDIHPTVPNPYNLLCALPPQRSWYTVLDLKDAFFCLRLHPTSQPLFAFEWRDPGTGRTGQLTWTRLPQGFKNSPTIFDEALHRDLANFRIQHPQVTLLQYVDDLLLAGATKQDCLEGTKALLLELSDLGYRASAKKAQICRREVTYLGYSLRDGQRWLTEARKKTVVQIPAPTTAKQVREFLGTAGFCRLWIPGFATLAAPLYPLTKEKGEFSWAPEHQKAFDAIKKALLSAPALALPDVTKPFTLYVDERKGVARGVLTQTLGPWRRPVAYLSKKLDPVASGWPVCLKAIAAVAILVKDADKLTLGQNITVIAPHALENIVRQPPDRWMTNARMTHYQSLLLTERVTFAPPAALNPATLLPEETDEPVTHDCHQLLIEETGVRKDLTDIPLTGEVLTWFTDGSSYVVEGKRMAGAAVVDGTRTIWASSLPEGTSAQKAELMALTQALRLAEGKSINIYTDSRYAFATAHVHGAIYKQRGLLTSAGREIKNKEEILSLLEALHLPKRLAIIHCPGHQKAKDPISRGNQMADRVAKQAAQGVNLLAGKRTADGSEFEKRTADGSEFESPKKKAKVE

SEQ ID NO: 106 - protein, 2088 aa, synthetic construct
MPAAKRVKLDGGDKKYSIGLDIGTNSVGWAVITDEYKVPSKKFKVLGNTDRHSIKKNLIGALLFDSGETAEATRLKRTARRRYTRRKNRICYLQEIFSNEMAKVDDSFFHRLEESFLVEEDKKHERHPIFGNIVDEVAYHEKYPTIYHLRKKLVDSTDKADLRLIYLALAHMIKFRGHFLIEGDLNPDNSDVDKLFIQLVQTYNQLFEENPINASGVDAKAILSARLSKSRRLENLIAQLPGEKKNGLFGNLIALSLGLTPNFKSNFDLAEDAKLQLSKDTYDDDLDNLLAQIGDQYADLFLAAKNLSDAILLSDILRVNTEITKAPLSASMIKRYDEHHQDLTLLKALVRQQLPEKYKEIFFDQSKNGYAGYIDGGASQEEFYKFIKPILEKMDGTEELLVKLNREDLLRKQRTFDNGSIPHQIHLGELHAILRRQEDFYPFLKDNREKIEKILTFRIPYYVGPLARGNSRFAWMTRKSEETITPWNFEEVVDKGASAQSFIERMTNFDKNLPNEKVLPKHSLLYEYFTVYNELTKVKYVTEGMRKPAFLSGEQKKAIVDLLFKTNRKVTVKQLKEDYFKKIECFDSVEISGVEDRFNASLGTYHDLLKIIKDKDFLDNEENEDILEDIVLTLTLFEDREMIEERLKTYAHLFDDKVMKQLKRRRYTGWGRLSRKLINGIRDKQSGKTILDFLKSDGFANRNFMQLIHDDSLTFKEDIQKAQVSGQGDSLHEHIANLAGSPAIKKGILQTVKVVDELVKVMGRHKPENIVIEMARENQTTQKGQKNSRERMKRIEEGIKELGSQILKEHPVENTQLQNEKLYLYYLQNGRDMYVDQELDINRLSDYDVDHIVPQSFLKDDSIDNKVLTRSDKARGKSDNVPSEEVVKKMKNYWRQLLNAKLITQRKFDNLTKAERGGLSELDKAGFIKRQLVETRQITKHVAQILDSRMNTKYDENDKLIREVKVITLKSKLVSDFRKDFQFYKVREINNYHHAHDAYLNAVVGTALIKKYPKLESEFVYGDYKVYDVRKMIAKSEQEIGKATAKYFFYSNIMNFFKTEITLANGEIRKRPLIETNGETGEIVWDKGRDFATVRKVLSMPQVNIVKKTEVQTGGFSKESILPKRNSDKLIARKKDWDPKKYGGFDSPTVAYSVLVVAKVEKGKSKKLKSVKELLGITIMERSSFEKNPIDFLEAKGYKEVKKDLIIKLPKYSLFELENGRKRMLASAGELQKGNELALPSKYVNFLYLASHYEKLKGSPEDNEQKQLFVEQHKHYLDEIIEQISEFSKRVILADANLDKVLSAYNKHRDKPIREQAENIIHLFTLTNLGAPAAFKYFDTTIDRKRYTSTKEVLDATLIHQSITGLYETRIDLSQLGGDGGPAPGSSGGGGGTLQLDDEYRLYSPLVKPDQNIQFWLEQFPQAWAETAGMGLAKQVPPQVIQLKASATPVSVRQYPLSKEAQEGIRPHVQRLIQQGILVPVQSPWNTPLLPVRKPGTNDYRPVQDLREVNKRVQDIHPTVPNPYNLLCALPPQRSWYTVLDLKDAFFCLRLHPTSQPLFAFEWRDPGTGRTGQLTWTRLPQGFKNSPTIFDEALHRDLANFRIQHPQVTLLQYVDDLLLAGATKQDCLEGTKALLLELSDLGYRASAKKAQICRREVTYLGYSLRDGQRWLTEARKKTVVQIPAPTTAKQVREFLGTAGFCRLWIPGFATLAAPLYPLTKEKGEFSWAPEHQKAFDAIKKALLSAPALALPDVTKPFTLYVDERKGVARGVLTQTLGPWRRPVAYLSKKLDPVASGWPVCLKAIAAVAILVKDADKLTLGQNITVIAPHALENIVRQPPDRWMTNARMTHYQSLLLTERVTFAPPAALNPATLLPEETDEPVTHDCHQLLIEETGVRKDLTDIPLTGEVLTWFTDGSSYVVEGKRMAGAAVVDGTRTIWASSLPEGTSAQKAELMALTQALRLAEGKSINIYTDSRYAFATAHVHGAIYKQRGLLTSAGREIKNKEEILSLLEALHLPKRLAIIHCPGHQKAKDPISRGNQMADRVAKQAAQGVNLLAGKRTADGSEFEKRTADGSEFESPKKKAKVE

SEQ ID NO: 107 - protein, 2088 aa, synthetic construct
MPAAKRVKLDGGDKKYSIGLDIGTNSVGWAVITDEYKVPSKKFKVLGNTDRHSIKKNLIGALLFDSGETAEATRLKRTARRRYTRRKNRICYLQEIFSNEMAKVDDSFFHRLEESFLVEEDKKHERHPIFGNIVDEVAYHEKYPTIYHLRKKLVDSTDKADLRLIYLALAHMIKFRGHFLIEGDLNPDNSDVDKLFIQLVQTYNQLFEENPINASGVDAKAILSARLSKSRRLENLIAQLPGEKKNGLFGNLIALSLGLTPNFKSNFDLAEDAKLQLSKDTYDDDLDNLLAQIGDQYADLFLAAKNLSDAILLSDILRVNTEITKAPLSASMIKRYDEHHQDLTLLKALVRQQLPEKYKEIFFDQSKNGYAGYIDGGASQEEFYKFIKPILEKMDGTEELLVKLNREDLLRKQRTFDNGSIPHQIHLGELHAILRRQEDFYPFLKDNREKIEKILTFRIPYYVGPLARGNSRFAWMTRKSEETITPWNFEEVVDKGASAQSFIERMTNFDKNLPNEKVLPKHSLLYEYFTVYNELTKVKYVTEGMRKPAFLSGEQKKAIVDLLFKTNRKVTVKQLKEDYFKKIECFDSVEISGVEDRFNASLGTYHDLLKIIKDKDFLDNEENEDILEDIVLTLTLFEDREMIEERLKTYAHLFDDKVMKQLKRRRYTGWGRLSRKLINGIRDKQSGKTILDFLKSDGFANRNFMQLIHDDSLTFKEDIQKAQVSGQGDSLHEHIANLAGSPAIKKGILQTVKVVDELVKVMGRHKPENIVIEMARENQTTQKGQKNSRERMKRIEEGIKELGSQILKEHPVENTQLQNEKLYLYYLQNGRDMYVDQELDINRLSDYDVDHIVPQSFLKDDSIDNKVLTRSDKARGKSDNVPSEEVVKKMKNYWRQLLNAKLITQRKFDNLTKAERGGLSELDKAGFIKRQLVETRQITKHVAQILDSRMNTKYDENDKLIREVKVITLKSKLVSDFRKDFQFYKVREINNYHHAHDAYLNAVVGTALIKKYPKLESEFVYGDYKVYDVRKMIAKSEQEIGKATAKYFFYSNIMNFFKTEITLANGEIRKRPLIETNGETGEIVWDKGRDFATVRKVLSMPQVNIVKKTEVQTGGFSKESILPKRNSDKLIARKKDWDPKKYGGFDSPTVAYSVLVVAKVEKGKSKKLKSVKELLGITIMERSSFEKNPIDFLEAKGYKEVKKDLIIKLPKYSLFELENGRKRMLASAGELQKGNELALPSKYVNFLYLASHYEKLKGSPEDNEQKQLFVEQHKHYLDEIIEQISEFSKRVILADANLDKVLSAYNKHRDKPIREQAENIIHLFTLTNLGAPAAFKYFDTTIDRKRYTSTKEVLDATLIHQSITGLYETRIDLSQLGGDGGGGGPAPGSSGGTLQLDDEYRLYSPLVKPDQNIQFWLEQFPQAWAETAGMGLAKQVPPQVIQLKASATPVSVRQYPLSKEAQEGIRPHVQRLIQQGILVPVQSPWNTPLLPVRKPGTNDYRPVQDLREVNKRVQDIHPTVPNPYNLLCALPPQRSWYTVLDLKDAFFCLRLHPTSQPLFAFEWRDPGTGRTGQLTWTRLPQGFKNSPTIFDEALHRDLANFRIQHPQVTLLQYVDDLLLAGATKQDCLEGTKALLLELSDLGYRASAKKAQICRREVTYLGYSLRDGQRWLTEARKKTVVQIPAPTTAKQVREFLGTAGFCRLWIPGFATLAAPLYPLTKEKGEFSWAPEHQKAFDAIKKALLSAPALALPDVTKPFTLYVDERKGVARGVLTQTLGPWRRPVAYLSKKLDPVASGWPVCLKAIAAVAILVKDADKLTLGQNITVIAPHALENIVRQPPDRWMTNARMTHYQSLLLTERVTFAPPAALNPATLLPEETDEPVTHDCHQLLIEETGVRKDLTDIPLTGEVLTWFTDGSSYVVEGKRMAGAAVVDGTRTIWASSLPEGTSAQKAELMALTQALRLAEGKSINIYTDSRYAFATAHVHGAIYKQRGLLTSAGREIKNKEEILSLLEALHLPKRLAIIHCPGHQKAKDPISRGNQMADRVAKQAAQGVNLLAGKRTADGSEFEKRTADGSEFESPKKKAKVE

SEQ ID NO: 108 - protein, 2090 aa, synthetic construct
MPAAKRVKLDGGDKKYSIGLDIGTNSVGWAVITDEYKVPSKKFKVLGNTDRHSIKKNLIGALLFDSGETAEATRLKRTARRRYTRRKNRICYLQEIFSNEMAKVDDSFFHRLEESFLVEEDKKHERHPIFGNIVDEVAYHEKYPTIYHLRKKLVDSTDKADLRLIYLALAHMIKFRGHFLIEGDLNPDNSDVDKLFIQLVQTYNQLFEENPINASGVDAKAILSARLSKSRRLENLIAQLPGEKKNGLFGNLIALSLGLTPNFKSNFDLAEDAKLQLSKDTYDDDLDNLLAQIGDQYADLFLAAKNLSDAILLSDILRVNTEITKAPLSASMIKRYDEHHQDLTLLKALVRQQLPEKYKEIFFDQSKNGYAGYIDGGASQEEFYKFIKPILEKMDGTEELLVKLNREDLLRKQRTFDNGSIPHQIHLGELHAILRRQEDFYPFLKDNREKIEKILTFRIPYYVGPLARGNSRFAWMTRKSEETITPWNFEEVVDKGASAQSFIERMTNFDKNLPNEKVLPKHSLLYEYFTVYNELTKVKYVTEGMRKPAFLSGEQKKAIVDLLFKTNRKVTVKQLKEDYFKKIECFDSVEISGVEDRFNASLGTYHDLLKIIKDKDFLDNEENEDILEDIVLTLTLFEDREMIEERLKTYAHLFDDKVMKQLKRRRYTGWGRLSRKLINGIRDKQSGKTILDFLKSDGFANRNFMQLIHDDSLTFKEDIQKAQVSGQGDSLHEHIANLAGSPAIKKGILQTVKVVDELVKVMGRHKPENIVIEMARENQTTQKGQKNSRERMKRIEEGIKELGSQILKEHPVENTQLQNEKLYLYYLQNGRDMYVDQELDINRLSDYDVDHIVPQSFLKDDSIDNKVLTRSDKARGKSDNVPSEEVVKKMKNYWRQLLNAKLITQRKFDNLTKAERGGLSELDKAGFIKRQLVETRQITKHVAQILDSRMNTKYDENDKLIREVKVITLKSKLVSDFRKDFQFYKVREINNYHHAHDAYLNAVVGTALIKKYPKLESEFVYGDYKVYDVRKMIAKSEQEIGKATAKYFFYSNIMNFFKTEITLANGEIRKRPLIETNGETGEIVWDKGRDFATVRKVLSMPQVNIVKKTEVQTGGFSKESILPKRNSDKLIARKKDWDPKKYGGFDSPTVAYSVLVVAKVEKGKSKKLKSVKELLGITIMERSSFEKNPIDFLEAKGYKEVKKDLIIKLPKYSLFELENGRKRMLASAGELQKGNELALPSKYVNFLYLASHYEKLKGSPEDNEQKQLFVEQHKHYLDEIIEQISEFSKRVILADANLDKVLSAYNKHRDKPIREQAENIIHLFTLTNLGAPAAFKYFDTTIDRKRYTSTKEVLDATLIHQSITGLYETRIDLSQLGGDGGGGGEAAAKPAPGGTLQLDDEYRLYSPLVKPDQNIQFWLEQFPQAWAETAGMGLAKQVPPQVIQLKASATPVSVRQYPLSKEAQEGIRPHVQRLIQQGILVPVQSPWNTPLLPVRKPGTNDYRPVQDLREVNKRVQDIHPTVPNPYNLLCALPPQRSWYTVLDLKDAFFCLRLHPTSQPLFAFEWRDPGTGRTGQLTWTRLPQGFKNSPTIFDEALHRDLANFRIQHPQVTLLQYVDDLLLAGATKQDCLEGTKALLLELSDLGYRASAKKAQICRREVTYLGYSLRDGQRWLTEARKKTVVQIPAPTTAKQVREFLGTAGFCRLWIPGFATLAAPLYPLTKEKGEFSWAPEHQKAFDAIKKALLSAPALALPDVTKPFTLYVDERKGVARGVLTQTLGPWRRPVAYLSKKLDPVASGWPVCLKAIAAVAILVKDADKLTLGQNITVIAPHALENIVRQPPDRWMTNARMTHYQSLLLTERVTFAPPAALNPATLLPEETDEPVTHDCHQLLIEETGVRKDLTDIPLTGEVLTWFTDGSSYVVEGKRMAGAAVVDGTRTIWASSLPEGTSAQKAELMALTQALRLAEGKSINIYTDSRYAFATAHVHGAIYKQRGLLTSAGREIKNKEEILSLLEALHLPKRLAIIHCPGHQKAKDPISRGNQMADRVAKQAAQGVNLLAGKRTADGSEFEKRTADGSEFESPKKKAKVE

SEQ ID NO: 109 - protein, 2085 aa, synthetic construct
MPAAKRVKLDGGDKKYSIGLDIGTNSVGWAVITDEYKVPSKKFKVLGNTDRHSIKKNLIGALLFDSGETAEATRLKRTARRRYTRRKNRICYLQEIFSNEMAKVDDSFFHRLEESFLVEEDKKHERHPIFGNIVDEVAYHEKYPTIYHLRKKLVDSTDKADLRLIYLALAHMIKFRGHFLIEGDLNPDNSDVDKLFIQLVQTYNQLFEENPINASGVDAKAILSARLSKSRRLENLIAQLPGEKKNGLFGNLIALSLGLTPNFKSNFDLAEDAKLQLSKDTYDDDLDNLLAQIGDQYADLFLAAKNLSDAILLSDILRVNTEITKAPLSASMIKRYDEHHQDLTLLKALVRQQLPEKYKEIFFDQSKNGYAGYIDGGASQEEFYKFIKPILEKMDGTEELLVKLNREDLLRKQRTFDNGSIPHQIHLGELHAILRRQEDFYPFLKDNREKIEKILTFRIPYYVGPLARGNSRFAWMTRKSEETITPWNFEEVVDKGASAQSFIERMTNFDKNLPNEKVLPKHSLLYEYFTVYNELTKVKYVTEGMRKPAFLSGEQKKAIVDLLFKTNRKVTVKQLKEDYFKKIECFDSVEISGVEDRFNASLGTYHDLLKIIKDKDFLDNEENEDILEDIVLTLTLFEDREMIEERLKTYAHLFDDKVMKQLKRRRYTGWGRLSRKLINGIRDKQSGKTILDFLKSDGFANRNFMQLIHDDSLTFKEDIQKAQVSGQGDSLHEHIANLAGSPAIKKGILQTVKVVDELVKVMGRHKPENIVIEMARENQTTQKGQKNSRERMKRIEEGIKELGSQILKEHPVENTQLQNEKLYLYYLQNGRDMYVDQELDINRLSDYDVDHIVPQSFLKDDSIDNKVLTRSDKARGKSDNVPSEEVVKKMKNYWRQLLNAKLITQRKFDNLTKAERGGLSELDKAGFIKRQLVETRQITKHVAQILDSRMNTKYDENDKLIREVKVITLKSKLVSDFRKDFQFYKVREINNYHHAHDAYLNAVVGTALIKKYPKLESEFVYGDYKVYDVRKMIAKSEQEIGKATAKYFFYSNIMNFFKTEITLANGEIRKRPLIETNGETGEIVWDKGRDFATVRKVLSMPQVNIVKKTEVQTGGFSKESILPKRNSDKLIARKKDWDPKKYGGFDSPTVAYSVLVVAKVEKGKSKKLKSVKELLGITIMERSSFEKNPIDFLEAKGYKEVKKDLIIKLPKYSLFELENGRKRMLASAGELQKGNELALPSKYVNFLYLASHYEKLKGSPEDNEQKQLFVEQHKHYLDEIIEQISEFSKRVILADANLDKVLSAYNKHRDKPIREQAENIIHLFTLTNLGAPAAFKYFDTTIDRKRYTSTKEVLDATLIHQSITGLYETRIDLSQLGGDGGGGSPAPGGTLQLDDEYRLYSPLVKPDQNIQFWLEQFPQAWAETAGMGLAKQVPPQVIQLKASATPVSVRQYPLSKEAQEGIRPHVQRLIQQGILVPVQSPWNTPLLPVRKPGTNDYRPVQDLREVNKRVQDIHPTVPNPYNLLCALPPQRSWYTVLDLKDAFFCLRLHPTSQPLFAFEWRDPGTGRTGQLTWTRLPQGFKNSPTIFDEALHRDLANFRIQHPQVTLLQYVDDLLLAGATKQDCLEGTKALLLELSDLGYRASAKKAQICRREVTYLGYSLRDGQRWLTEARKKTVVQIPAPTTAKQVREFLGTAGFCRLWIPGFATLAAPLYPLTKEKGEFSWAPEHQKAFDAIKKALLSAPALALPDVTKPFTLYVDERKGVARGVLTQTLGPWRRPVAYLSKKLDPVASGWPVCLKAIAAVAILVKDADKLTLGQNITVIAPHALENIVRQPPDRWMTNARMTHYQSLLLTERVTFAPPAALNPATLLPEETDEPVTHDCHQLLIEETGVRKDLTDIPLTGEVLTWFTDGSSYVVEGKRMAGAAVVDGTRTIWASSLPEGTSAQKAELMALTQALRLAEGKSINIYTDSRYAFATAHVHGAIYKQRGLLTSAGREIKNKEEILSLLEALHLPKRLAIIHCPGHQKAKDPISRGNQMADRVAKQAAQGVNLLAGKRTADGSEFEKRTADGSEFESPKKKAKVE

SEQ ID NO: 110 - protein, 2085 aa, synthetic construct
MPAAKRVKLDGGDKKYSIGLDIGTNSVGWAVITDEYKVPSKKFKVLGNTDRHSIKKNLIGALLFDSGETAEATRLKRTARRRYTRRKNRICYLQEIFSNEMAKVDDSFFHRLEESFLVEEDKKHERHPIFGNIVDEVAYHEKYPTIYHLRKKLVDSTDKADLRLIYLALAHMIKFRGHFLIEGDLNPDNSDVDKLFIQLVQTYNQLFEENPINASGVDAKAILSARLSKSRRLENLIAQLPGEKKNGLFGNLIALSLGLTPNFKSNFDLAEDAKLQLSKDTYDDDLDNLLAQIGDQYADLFLAAKNLSDAILLSDILRVNTEITKAPLSASMIKRYDEHHQDLTLLKALVRQQLPEKYKEIFFDQSKNGYAGYIDGGASQEEFYKFIKPILEKMDGTEELLVKLNREDLLRKQRTFDNGSIPHQIHLGELHAILRRQEDFYPFLKDNREKIEKILTFRIPYYVGPLARGNSRFAWMTRKSEETITPWNFEEVVDKGASAQSFIERMTNFDKNLPNEKVLPKHSLLYEYFTVYNELTKVKYVTEGMRKPAFLSGEQKKAIVDLLFKTNRKVTVKQLKEDYFKKIECFDSVEISGVEDRFNASLGTYHDLLKIIKDKDFLDNEENEDILEDIVLTLTLFEDREMIEERLKTYAHLFDDKVMKQLKRRRYTGWGRLSRKLINGIRDKQSGKTILDFLKSDGFANRNFMQLIHDDSLTFKEDIQKAQVSGQGDSLHEHIANLAGSPAIKKGILQTVKVVDELVKVMGRHKPENIVIEMARENQTTQKGQKNSRERMKRIEEGIKELGSQILKEHPVENTQLQNEKLYLYYLQNGRDMYVDQELDINRLSDYDVDHIVPQSFLKDDSIDNKVLTRSDKARGKSDNVPSEEVVKKMKNYWRQLLNAKLITQRKFDNLTKAERGGLSELDKAGFIKRQLVETRQITKHVAQILDSRMNTKYDENDKLIREVKVITLKSKLVSDFRKDFQFYKVREINNYHHAHDAYLNAVVGTALIKKYPKLESEFVYGDYKVYDVRKMIAKSEQEIGKATAKYFFYSNIMNFFKTEITLANGEIRKRPLIETNGETGEIVWDKGRDFATVRKVLSMPQVNIVKKTEVQTGGFSKESILPKRNSDKLIARKKDWDPKKYGGFDSPTVAYSVLVVAKVEKGKSKKLKSVKELLGITIMERSSFEKNPIDFLEAKGYKEVKKDLIIKLPKYSLFELENGRKRMLASAGELQKGNELALPSKYVNFLYLASHYEKLKGSPEDNEQKQLFVEQHKHYLDEIIEQISEFSKRVILADANLDKVLSAYNKHRDKPIREQAENIIHLFTLTNLGAPAAFKYFDTTIDRKRYTSTKEVLDATLIHQSITGLYETRIDLSQLGGDGGGSSGSSGGTLQLDDEYRLYSPLVKPDQNIQFWLEQFPQAWAETAGMGLAKQVPPQVIQLKASATPVSVRQYPLSKEAQEGIRPHVQRLIQQGILVPVQSPWNTPLLPVRKPGTNDYRPVQDLREVNKRVQDIHPTVPNPYNLLCALPPQRSWYTVLDLKDAFFCLRLHPTSQPLFAFEWRDPGTGRTGQLTWTRLPQGFKNSPTIFDEALHRDLANFRIQHPQVTLLQYVDDLLLAGATKQDCLEGTKALLLELSDLGYRASAKKAQICRREVTYLGYSLRDGQRWLTEARKKTVVQIPAPTTAKQVREFLGTAGFCRLWIPGFATLAAPLYPLTKEKGEFSWAPEHQKAFDAIKKALLSAPALALPDVTKPFTLYVDERKGVARGVLTQTLGPWRRPVAYLSKKLDPVASGWPVCLKAIAAVAILVKDADKLTLGQNITVIAPHALENIVRQPPDRWMTNARMTHYQSLLLTERVTFAPPAALNPATLLPEETDEPVTHDCHQLLIEETGVRKDLTDIPLTGEVLTWFTDGSSYVVEGKRMAGAAVVDGTRTIWASSLPEGTSAQKAELMALTQALRLAEGKSINIYTDSRYAFATAHVHGAIYKQRGLLTSAGREIKNKEEILSLLEALHLPKRLAIIHCPGHQKAKDPISRGNQMADRVAKQAAQGVNLLAGKRTADGSEFEKRTADGSEFESPKKKAKVE

SEQ ID NO: 111 - protein, 2091 aa, synthetic construct
MPAAKRVKLDGGDKKYSIGLDIGTNSVGWAVITDEYKVPSKKFKVLGNTDRHSIKKNLIGALLFDSGETAEATRLKRTARRRYTRRKNRICYLQEIFSNEMAKVDDSFFHRLEESFLVEEDKKHERHPIFGNIVDEVAYHEKYPTIYHLRKKLVDSTDKADLRLIYLALAHMIKFRGHFLIEGDLNPDNSDVDKLFIQLVQTYNQLFEENPINASGVDAKAILSARLSKSRRLENLIAQLPGEKKNGLFGNLIALSLGLTPNFKSNFDLAEDAKLQLSKDTYDDDLDNLLAQIGDQYADLFLAAKNLSDAILLSDILRVNTEITKAPLSASMIKRYDEHHQDLTLLKALVRQQLPEKYKEIFFDQSKNGYAGYIDGGASQEEFYKFIKPILEKMDGTEELLVKLNREDLLRKQRTFDNGSIPHQIHLGELHAILRRQEDFYPFLKDNREKIEKILTFRIPYYVGPLARGNSRFAWMTRKSEETITPWNFEEVVDKGASAQSFIERMTNFDKNLPNEKVLPKHSLLYEYFTVYNELTKVKYVTEGMRKPAFLSGEQKKAIVDLLFKTNRKVTVKQLKEDYFKKIECFDSVEISGVEDRFNASLGTYHDLLKIIKDKDFLDNEENEDILEDIVLTLTLFEDREMIEERLKTYAHLFDDKVMKQLKRRRYTGWGRLSRKLINGIRDKQSGKTILDFLKSDGFANRNFMQLIHDDSLTFKEDIQKAQVSGQGDSLHEHIANLAGSPAIKKGILQTVKVVDELVKVMGRHKPENIVIEMARENQTTQKGQKNSRERMKRIEEGIKELGSQILKEHPVENTQLQNEKLYLYYLQNGRDMYVDQELDINRLSDYDVDHIVPQSFLKDDSIDNKVLTRSDKARGKSDNVPSEEVVKKMKNYWRQLLNAKLITQRKFDNLTKAERGGLSELDKAGFIKRQLVETRQITKHVAQILDSRMNTKYDENDKLIREVKVITLKSKLVSDFRKDFQFYKVREINNYHHAHDAYLNAVVGTALIKKYPKLESEFVYGDYKVYDVRKMIAKSEQEIGKATAKYFFYSNIMNFFKTEITLANGEIRKRPLIETNGETGEIVWDKGRDFATVRKVLSMPQVNIVKKTEVQTGGFSKESILPKRNSDKLIARKKDWDPKKYGGFDSPTVAYSVLVVAKVEKGKSKKLKSVKELLGITIMERSSFEKNPIDFLEAKGYKEVKKDLIIKLPKYSLFELENGRKRMLASAGELQKGNELALPSKYVNFLYLASHYEKLKGSPEDNEQKQLFVEQHKHYLDEIIEQISEFSKRVILADANLDKVLSAYNKHRDKPIREQAENIIHLFTLTNLGAPAAFKYFDTTIDRKRYTSTKEVLDATLIHQSITGLYETRIDLSQLGGDGGGGSGGSGGSGGSGGTLQLDDEYRLYSPLVKPDQNIQFWLEQFPQAWAETAGMGLAKQVPPQVIQLKASATPVSVRQYPLSKEAQEGIRPHVQRLIQQGILVPVQSPWNTPLLPVRKPGTNDYRPVQDLREVNKRVQDIHPTVPNPYNLLCALPPQRSWYTVLDLKDAFFCLRLHPTSQPLFAFEWRDPGTGRTGQLTWTRLPQGFKNSPTIFDEALHRDLANFRIQHPQVTLLQYVDDLLLAGATKQDCLEGTKALLLELSDLGYRASAKKAQICRREVTYLGYSLRDGQRWLTEARKKTVVQIPAPTTAKQVREFLGTAGFCRLWIPGFATLAAPLYPLTKEKGEFSWAPEHQKAFDAIKKALLSAPALALPDVTKPFTLYVDERKGVARGVLTQTLGPWRRPVAYLSKKLDPVASGWPVCLKAIAAVAILVKDADKLTLGQNITVIAPHALENIVRQPPDRWMTNARMTHYQSLLLTERVTFAPPAALNPATLLPEETDEPVTHDCHQLLIEETGVRKDLTDIPLTGEVLTWFTDGSSYVVEGKRMAGAAVVDGTRTIWASSLPEGTSAQKAELMALTQALRLAEGKSINIYTDSRYAFATAHVHGAIYKQRGLLTSAGREIKNKEEILSLLEALHLPKRLAIIHCPGHQKAKDPISRGNQMADRVAKQAAQGVNLLAGKRTADGSEFEKRTADGSEFESPKKKAKVE

SEQ ID NO: 112 - protein, 2090 aa, synthetic construct
MPAAKRVKLDGGDKKYSIGLDIGTNSVGWAVITDEYKVPSKKFKVLGNTDRHSIKKNLIGALLFDSGETAEATRLKRTARRRYTRRKNRICYLQEIFSNEMAKVDDSFFHRLEESFLVEEDKKHERHPIFGNIVDEVAYHEKYPTIYHLRKKLVDSTDKADLRLIYLALAHMIKFRGHFLIEGDLNPDNSDVDKLFIQLVQTYNQLFEENPINASGVDAKAILSARLSKSRRLENLIAQLPGEKKNGLFGNLIALSLGLTPNFKSNFDLAEDAKLQLSKDTYDDDLDNLLAQIGDQYADLFLAAKNLSDAILLSDILRVNTEITKAPLSASMIKRYDEHHQDLTLLKALVRQQLPEKYKEIFFDQSKNGYAGYIDGGASQEEFYKFIKPILEKMDGTEELLVKLNREDLLRKQRTFDNGSIPHQIHLGELHAILRRQEDFYPFLKDNREKIEKILTFRIPYYVGPLARGNSRFAWMTRKSEETITPWNFEEVVDKGASAQSFIERMTNFDKNLPNEKVLPKHSLLYEYFTVYNELTKVKYVTEGMRKPAFLSGEQKKAIVDLLFKTNRKVTVKQLKEDYFKKIECFDSVEISGVEDRFNASLGTYHDLLKIIKDKDFLDNEENEDILEDIVLTLTLFEDREMIEERLKTYAHLFDDKVMKQLKRRRYTGWGRLSRKLINGIRDKQSGKTILDFLKSDGFANRNFMQLIHDDSLTFKEDIQKAQVSGQGDSLHEHIANLAGSPAIKKGILQTVKVVDELVKVMGRHKPENIVIEMARENQTTQKGQKNSRERMKRIEEGIKELGSQILKEHPVENTQLQNEKLYLYYLQNGRDMYVDQELDINRLSDYDVDHIVPQSFLKDDSIDNKVLTRSDKARGKSDNVPSEEVVKKMKNYWRQLLNAKLITQRKFDNLTKAERGGLSELDKAGFIKRQLVETRQITKHVAQILDSRMNTKYDENDKLIREVKVITLKSKLVSDFRKDFQFYKVREINNYHHAHDAYLNAVVGTALIKKYPKLESEFVYGDYKVYDVRKMIAKSEQEIGKATAKYFFYSNIMNFFKTEITLANGEIRKRPLIETNGETGEIVWDKGRDFATVRKVLSMPQVNIVKKTEVQTGGFSKESILPKRNSDKLIARKKDWDPKKYGGFDSPTVAYSVLVVAKVEKGKSKKLKSVKELLGITIMERSSFEKNPIDFLEAKGYKEVKKDLIIKLPKYSLFELENGRKRMLASAGELQKGNELALPSKYVNFLYLASHYEKLKGSPEDNEQKQLFVEQHKHYLDEIIEQISEFSKRVILADANLDKVLSAYNKHRDKPIREQAENIIHLFTLTNLGAPAAFKYFDTTIDRKRYTSTKEVLDATLIHQSITGLYETRIDLSQLGGDGGEAAAKGGGPAPGGTLQLDDEYRLYSPLVKPDQNIQFWLEQFPQAWAETAGMGLAKQVPPQVIQLKASATPVSVRQYPLSKEAQEGIRPHVQRLIQQGILVPVQSPWNTPLLPVRKPGTNDYRPVQDLREVNKRVQDIHPTVPNPYNLLCALPPQRSWYTVLDLKDAFFCLRLHPTSQPLFAFEWRDPGTGRTGQLTWTRLPQGFKNSPTIFDEALHRDLANFRIQHPQVTLLQYVDDLLLAGATKQDCLEGTKALLLELSDLGYRASAKKAQICRREVTYLGYSLRDGQRWLTEARKKTVVQIPAPTTAKQVREFLGTAGFCRLWIPGFATLAAPLYPLTKEKGEFSWAPEHQKAFDAIKKALLSAPALALPDVTKPFTLYVDERKGVARGVLTQTLGPWRRPVAYLSKKLDPVASGWPVCLKAIAAVAILVKDADKLTLGQNITVIAPHALENIVRQPPDRWMTNARMTHYQSLLLTERVTFAPPAALNPATLLPEETDEPVTHDCHQLLIEETGVRKDLTDIPLTGEVLTWFTDGSSYVVEGKRMAGAAVVDGTRTIWASSLPEGTSAQKAELMALTQALRLAEGKSINIYTDSRYAFATAHVHGAIYKQRGLLTSAGREIKNKEEILSLLEALHLPKRLAIIHCPGHQKAKDPISRGNQMADRVAKQAAQGVNLLAGKRTADGSEFEKRTADGSEFESPKKKAKVE

SEQ ID NO: 113 - protein, 2097 aa, synthetic construct
MPAAKRVKLDGGDKKYSIGLDIGTNSVGWAVITDEYKVPSKKFKVLGNTDRHSIKKNLIGALLFDSGETAEATRLKRTARRRYTRRKNRICYLQEIFSNEMAKVDDSFFHRLEESFLVEEDKKHERHPIFGNIVDEVAYHEKYPTIYHLRKKLVDSTDKADLRLIYLALAHMIKFRGHFLIEGDLNPDNSDVDKLFIQLVQTYNQLFEENPINASGVDAKAILSARLSKSRRLENLIAQLPGEKKNGLFGNLIALSLGLTPNFKSNFDLAEDAKLQLSKDTYDDDLDNLLAQIGDQYADLFLAAKNLSDAILLSDILRVNTEITKAPLSASMIKRYDEHHQDLTLLKALVRQQLPEKYKEIFFDQSKNGYAGYIDGGASQEEFYKFIKPILEKMDGTEELLVKLNREDLLRKQRTFDNGSIPHQIHLGELHAILRRQEDFYPFLKDNREKIEKILTFRIPYYVGPLARGNSRFAWMTRKSEETITPWNFEEVVDKGASAQSFIERMTNFDKNLPNEKVLPKHSLLYEYFTVYNELTKVKYVTEGMRKPAFLSGEQKKAIVDLLFKTNRKVTVKQLKEDYFKKIECFDSVEISGVEDRFNASLGTYHDLLKIIKDKDFLDNEENEDILEDIVLTLTLFEDREMIEERLKTYAHLFDDKVMKQLKRRRYTGWGRLSRKLINGIRDKQSGKTILDFLKSDGFANRNFMQLIHDDSLTFKEDIQKAQVSGQGDSLHEHIANLAGSPAIKKGILQTVKVVDELVKVMGRHKPENIVIEMARENQTTQKGQKNSRERMKRIEEGIKELGSQILKEHPVENTQLQNEKLYLYYLQNGRDMYVDQELDINRLSDYDVDHIVPQSFLKDDSIDNKVLTRSDKARGKSDNVPSEEVVKKMKNYWRQLLNAKLITQRKFDNLTKAERGGLSELDKAGFIKRQLVETRQITKHVAQILDSRMNTKYDENDKLIREVKVITLKSKLVSDFRKDFQFYKVREINNYHHAHDAYLNAVVGTALIKKYPKLESEFVYGDYKVYDVRKMIAKSEQEIGKATAKYFFYSNIMNFFKTEITLANGEIRKRPLIETNGETGEIVWDKGRDFATVRKVLSMPQVNIVKKTEVQTGGFSKESILPKRNSDKLIARKKDWDPKKYGGFDSPTVAYSVLVVAKVEKGKSKKLKSVKELLGITIMERSSFEKNPIDFLEAKGYKEVKKDLIIKLPKYSLFELENGRKRMLASAGELQKGNELALPSKYVNFLYLASHYEKLKGSPEDNEQKQLFVEQHKHYLDEIIEQISEFSKRVILADANLDKVLSAYNKHRDKPIREQAENIIHLFTLTNLGAPAAFKYFDTTIDRKRYTSTKEVLDATLIHQSITGLYETRIDLSQLGGDGGGSSGSSGSSGSSGSSGSSGGTLQLDDEYRLYSPLVKPDQNIQFWLEQFPQAWAETAGMGLAKQVPPQVIQLKASATPVSVRQYPLSKEAQEGIRPHVQRLIQQGILVPVQSPWNTPLLPVRKPGTNDYRPVQDLREVNKRVQDIHPTVPNPYNLLCALPPQRSWYTVLDLKDAFFCLRLHPTSQPLFAFEWRDPGTGRTGQLTWTRLPQGFKNSPTIFNEALHRDLANFRIQHPQVTLLQYVDDLLLAGATKQDCLEGTKALLLELSDLGYRASAKKAQICRREVTYLGYSLRDGQRWLTEARKKTVVQIPAPTTAKQVREFLGTAGFCRLWIPGFATLAAPLYPLTKPKGEFSWAPEHQKAFDAIKKALLSAPALALPDVTKPFTLYVDERKGVARGVLTQTLGPWRRPVAYLSKKLDPVASGWPVCLKAIAAVAILVKDADKLTLGQNITVIAPHALENIVRQPPDRWMTNARMTHYQSLLLTERVTFAPPAALNPATLLPEETDEPVTHDCHQLLIEETGVRKDLTDIPLTGEVLTWFTDGSSYVVEGKRMAGAAVVDGTRTIWASSLPEGTSAQKAELMALTQALRLAEGKSINIYTDSRYAFATAHVHGAIYKQRGWLTSAGREIKNKEEILSLLEALHLPKRLAIIHCPGHQKAKDPISRGNQMADRVAKQAAQGVNLLAGKRTADGSEFEKRTADGSEFESPKKKAKVE

SEQ ID NO: 114 - protein, 2087 aa, synthetic construct
MPAAKRVKLDGGDKKYSIGLDIGTNSVGWAVITDEYKVPSKKFKVLGNTDRHSIKKNLIGALLFDSGETAEATRLKRTARRRYTRRKNRICYLQEIFSNEMAKVDDSFFHRLEESFLVEEDKKHERHPIFGNIVDEVAYHEKYPTIYHLRKKLVDSTDKADLRLIYLALAHMIKFRGHFLIEGDLNPDNSDVDKLFIQLVQTYNQLFEENPINASGVDAKAILSARLSKSRRLENLIAQLPGEKKNGLFGNLIALSLGLTPNFKSNFDLAEDAKLQLSKDTYDDDLDNLLAQIGDQYADLFLAAKNLSDAILLSDILRVNTEITKAPLSASMIKRYDEHHQDLTLLKALVRQQLPEKYKEIFFDQSKNGYAGYIDGGASQEEFYKFIKPILEKMDGTEELLVKLNREDLLRKQRTFDNGSIPHQIHLGELHAILRRQEDFYPFLKDNREKIEKILTFRIPYYVGPLARGNSRFAWMTRKSEETITPWNFEEVVDKGASAQSFIERMTNFDKNLPNEKVLPKHSLLYEYFTVYNELTKVKYVTEGMRKPAFLSGEQKKAIVDLLFKTNRKVTVKQLKEDYFKKIECFDSVEISGVEDRFNASLGTYHDLLKIIKDKDFLDNEENEDILEDIVLTLTLFEDREMIEERLKTYAHLFDDKVMKQLKRRRYTGWGRLSRKLINGIRDKQSGKTILDFLKSDGFANRNFMQLIHDDSLTFKEDIQKAQVSGQGDSLHEHIANLAGSPAIKKGILQTVKVVDELVKVMGRHKPENIVIEMARENQTTQKGQKNSRERMKRIEEGIKELGSQILKEHPVENTQLQNEKLYLYYLQNGRDMYVDQELDINRLSDYDVDHIVPQSFLKDDSIDNKVLTRSDKARGKSDNVPSEEVVKKMKNYWRQLLNAKLITQRKFDNLTKAERGGLSELDKAGFIKRQLVETRQITKHVAQILDSRMNTKYDENDKLIREVKVITLKSKLVSDFRKDFQFYKVREINNYHHAHDAYLNAVVGTALIKKYPKLESEFVYGDYKVYDVRKMIAKSEQEIGKATAKYFFYSNIMNFFKTEITLANGEIRKRPLIETNGETGEIVWDKGRDFATVRKVLSMPQVNIVKKTEVQTGGFSKESILPKRNSDKLIARKKDWDPKKYGGFDSPTVAYSVLVVAKVEKGKSKKLKSVKELLGITIMERSSFEKNPIDFLEAKGYKEVKKDLIIKLPKYSLFELENGRKRMLASAGELQKGNELALPSKYVNFLYLASHYEKLKGSPEDNEQKQLFVEQHKHYLDEIIEQISEFSKRVILADANLDKVLSAYNKHRDKPIREQAENIIHLFTLTNLGAPAAFKYFDTTIDRKRYTSTKEVLDATLIHQSITGLYETRIDLSQLGGDGGGGGGGGGGGGTLQLDDEYRLYSPLVKPDQNIQFWLEQFPQAWAETAGMGLAKQVPPQVIQLKASATPVSVRQYPLSKEAQEGIRPHVQRLIQQGILVPVQSPWNTPLLPVRKPGTNDYRPVQDLREVNKRVQDIHPTVPNPYNLLCALPPQRSWYTVLDLKDAFFCLRLHPTSQPLFAFEWRDPGTGRTGQLTWTRLPQGFKNSPTIFNEALHRDLANFRIQHPQVTLLQYVDDLLLAGATKQDCLEGTKALLLELSDLGYRASAKKAQICRREVTYLGYSLRDGQRWLTEARKKTVVQIPAPTTAKQVREFLGTAGFCRLWIPGFATLAAPLYPLTKPKGEFSWAPEHQKAFDAIKKALLSAPALALPDVTKPFTLYVDERKGVARGVLTQTLGPWRRPVAYLSKKLDPVASGWPVCLKAIAAVAILVKDADKLTLGQNITVIAPHALENIVRQPPDRWMTNARMTHYQSLLLTERVTFAPPAALNPATLLPEETDEPVTHDCHQLLIEETGVRKDLTDIPLTGEVLTWFTDGSSYVVEGKRMAGAAVVDGTRTIWASSLPEGTSAQKAELMALTQALRLAEGKSINIYTDSRYAFATAHVHGAIYKQRGWLTSAGREIKNKEEILSLLEALHLPKRLAIIHCPGHQKAKDPISRGNQMADRVAKQAAQGVNLLAGKRTADGSEFEKRTADGSEFESPKKKAKVE

SEQ ID NO: 115 - protein, 2090 aa, synthetic construct
MPAAKRVKLDGGDKKYSIGLDIGTNSVGWAVITDEYKVPSKKFKVLGNTDRHSIKKNLIGALLFDSGETAEATRLKRTARRRYTRRKNRICYLQEIFSNEMAKVDDSFFHRLEESFLVEEDKKHERHPIFGNIVDEVAYHEKYPTIYHLRKKLVDSTDKADLRLIYLALAHMIKFRGHFLIEGDLNPDNSDVDKLFIQLVQTYNQLFEENPINASGVDAKAILSARLSKSRRLENLIAQLPGEKKNGLFGNLIALSLGLTPNFKSNFDLAEDAKLQLSKDTYDDDLDNLLAQIGDQYADLFLAAKNLSDAILLSDILRVNTEITKAPLSASMIKRYDEHHQDLTLLKALVRQQLPEKYKEIFFDQSKNGYAGYIDGGASQEEFYKFIKPILEKMDGTEELLVKLNREDLLRKQRTFDNGSIPHQIHLGELHAILRRQEDFYPFLKDNREKIEKILTFRIPYYVGPLARGNSRFAWMTRKSEETITPWNFEEVVDKGASAQSFIERMTNFDKNLPNEKVLPKHSLLYEYFTVYNELTKVKYVTEGMRKPAFLSGEQKKAIVDLLFKTNRKVTVKQLKEDYFKKIECFDSVEISGVEDRFNASLGTYHDLLKIIKDKDFLDNEENEDILEDIVLTLTLFEDREMIEERLKTYAHLFDDKVMKQLKRRRYTGWGRLSRKLINGIRDKQSGKTILDFLKSDGFANRNFMQLIHDDSLTFKEDIQKAQVSGQGDSLHEHIANLAGSPAIKKGILQTVKVVDELVKVMGRHKPENIVIEMARENQTTQKGQKNSRERMKRIEEGIKELGSQILKEHPVENTQLQNEKLYLYYLQNGRDMYVDQELDINRLSDYDVDHIVPQSFLKDDSIDNKVLTRSDKARGKSDNVPSEEVVKKMKNYWRQLLNAKLITQRKFDNLTKAERGGLSELDKAGFIKRQLVETRQITKHVAQILDSRMNTKYDENDKLIREVKVITLKSKLVSDFRKDFQFYKVREINNYHHAHDAYLNAVVGTALIKKYPKLESEFVYGDYKVYDVRKMIAKSEQEIGKATAKYFFYSNIMNFFKTEITLANGEIRKRPLIETNGETGEIVWDKGRDFATVRKVLSMPQVNIVKKTEVQTGGFSKESILPKRNSDKLIARKKDWDPKKYGGFDSPTVAYSVLVVAKVEKGKSKKLKSVKELLGITIMERSSFEKNPIDFLEAKGYKEVKKDLIIKLPKYSLFELENGRKRMLASAGELQKGNELALPSKYVNFLYLASHYEKLKGSPEDNEQKQLFVEQHKHYLDEIIEQISEFSKRVILADANLDKVLSAYNKHRDKPIREQAENIIHLFTLTNLGAPAAFKYFDTTIDRKRYTSTKEVLDATLIHQSITGLYETRIDLSQLGGDGGPAPAPAPAPAPGGTLQLDDEYRLYSPLVKPDQNIQFWLEQFPQAWAETAGMGLAKQVPPQVIQLKASATPVSVRQYPLSKEAQEGIRPHVQRLIQQGILVPVQSPWNTPLLPVRKPGTNDYRPVQDLREVNKRVQDIHPTVPNPYNLLCALPPQRSWYTVLDLKDAFFCLRLHPTSQPLFAFEWRDPGTGRTGQLTWTRLPQGFKNSPTIFNEALHRDLANFRIQHPQVTLLQYVDDLLLAGATKQDCLEGTKALLLELSDLGYRASAKKAQICRREVTYLGYSLRDGQRWLTEARKKTVVQIPAPTTAKQVREFLGTAGFCRLWIPGFATLAAPLYPLTKPKGEFSWAPEHQKAFDAIKKALLSAPALALPDVTKPFTLYVDERKGVARGVLTQTLGPWRRPVAYLSKKLDPVASGWPVCLKAIAAVAILVKDADKLTLGQNITVIAPHALENIVRQPPDRWMTNARMTHYQSLLLTERVTFAPPAALNPATLLPEETDEPVTHDCHQLLIEETGVRKDLTDIPLTGEVLTWFTDGSSYVVEGKRMAGAAVVDGTRTIWASSLPEGTSAQKAELMALTQALRLAEGKSINIYTDSRYAFATAHVHGAIYKQRGWLTSAGREIKNKEEILSLLEALHLPKRLAIIHCPGHQKAKDPISRGNQMADRVAKQAAQGVNLLAGKRTADGSEFEKRTADGSEFESPKKKAKVE

SEQ ID NO: 116 - protein, 2090 aa, synthetic construct
MPAAKRVKLDGGDKKYSIGLDIGTNSVGWAVITDEYKVPSKKFKVLGNTDRHSIKKNLIGALLFDSGETAEATRLKRTARRRYTRRKNRICYLQEIFSNEMAKVDDSFFHRLEESFLVEEDKKHERHPIFGNIVDEVAYHEKYPTIYHLRKKLVDSTDKADLRLIYLALAHMIKFRGHFLIEGDLNPDNSDVDKLFIQLVQTYNQLFEENPINASGVDAKAILSARLSKSRRLENLIAQLPGEKKNGLFGNLIALSLGLTPNFKSNFDLAEDAKLQLSKDTYDDDLDNLLAQIGDQYADLFLAAKNLSDAILLSDILRVNTEITKAPLSASMIKRYDEHHQDLTLLKALVRQQLPEKYKEIFFDQSKNGYAGYIDGGASQEEFYKFIKPILEKMDGTEELLVKLNREDLLRKQRTFDNGSIPHQIHLGELHAILRRQEDFYPFLKDNREKIEKILTFRIPYYVGPLARGNSRFAWMTRKSEETITPWNFEEVVDKGASAQSFIERMTNFDKNLPNEKVLPKHSLLYEYFTVYNELTKVKYVTEGMRKPAFLSGEQKKAIVDLLFKTNRKVTVKQLKEDYFKKIECFDSVEISGVEDRFNASLGTYHDLLKIIKDKDFLDNEENEDILEDIVLTLTLFEDREMIEERLKTYAHLFDDKVMKQLKRRRYTGWGRLSRKLINGIRDKQSGKTILDFLKSDGFANRNFMQLIHDDSLTFKEDIQKAQVSGQGDSLHEHIANLAGSPAIKKGILQTVKVVDELVKVMGRHKPENIVIEMARENQTTQKGQKNSRERMKRIEEGIKELGSQILKEHPVENTQLQNEKLYLYYLQNGRDMYVDQELDINRLSDYDVDHIVPQSFLKDDSIDNKVLTRSDKARGKSDNVPSEEVVKKMKNYWRQLLNAKLITQRKFDNLTKAERGGLSELDKAGFIKRQLVETRQITKHVAQILDSRMNTKYDENDKLIREVKVITLKSKLVSDFRKDFQFYKVREINNYHHAHDAYLNAVVGTALIKKYPKLESEFVYGDYKVYDVRKMIAKSEQEIGKATAKYFFYSNIMNFFKTEITLANGEIRKRPLIETNGETGEIVWDKGRDFATVRKVLSMPQVNIVKKTEVQTGGFSKESILPKRNSDKLIARKKDWDPKKYGGFDSPTVAYSVLVVAKVEKGKSKKLKSVKELLGITIMERSSFEKNPIDFLEAKGYKEVKKDLIIKLPKYSLFELENGRKRMLASAGELQKGNELALPSKYVNFLYLASHYEKLKGSPEDNEQKQLFVEQHKHYLDEIIEQISEFSKRVILADANLDKVLSAYNKHRDKPIREQAENIIHLFTLTNLGAPAAFKYFDTTIDRKRYTSTKEVLDATLIHQSITGLYETRIDLSQLGGDGGGSSEAAAKPAPGGTLQLDDEYRLYSPLVKPDQNIQFWLEQFPQAWAETAGMGLAKQVPPQVIQLKASATPVSVRQYPLSKEAQEGIRPHVQRLIQQGILVPVQSPWNTPLLPVRKPGTNDYRPVQDLREVNKRVQDIHPTVPNPYNLLCALPPQRSWYTVLDLKDAFFCLRLHPTSQPLFAFEWRDPGTGRTGQLTWTRLPQGFKNSPTIFNEALHRDLANFRIQHPQVTLLQYVDDLLLAGATKQDCLEGTKALLLELSDLGYRASAKKAQICRREVTYLGYSLRDGQRWLTEARKKTVVQIPAPTTAKQVREFLGTAGFCRLWIPGFATLAAPLYPLTKPKGEFSWAPEHQKAFDAIKKALLSAPALALPDVTKPFTLYVDERKGVARGVLTQTLGPWRRPVAYLSKKLDPVASGWPVCLKAIAAVAILVKDADKLTLGQNITVIAPHALENIVRQPPDRWMTNARMTHYQSLLLTERVTFAPPAALNPATLLPEETDEPVTHDCHQLLIEETGVRKDLTDIPLTGEVLTWFTDGSSYVVEGKRMAGAAVVDGTRTIWASSLPEGTSAQKAELMALTQALRLAEGKSINIYTDSRYAFATAHVHGAIYKQRGWLTSAGREIKNKEEILSLLEALHLPKRLAIIHCPGHQKAKDPISRGNQMADRVAKQAAQGVNLLAGKRTADGSEFEKRTADGSEFESPKKKAKVE

SEQ ID NO: 117 - protein, 2109 aa, synthetic construct
MPAAKRVKLDGGDKKYSIGLDIGTNSVGWAVITDEYKVPSKKFKVLGNTDRHSIKKNLIGALLFDSGETAEATRLKRTARRRYTRRKNRICYLQEIFSNEMAKVDDSFFHRLEESFLVEEDKKHERHPIFGNIVDEVAYHEKYPTIYHLRKKLVDSTDKADLRLIYLALAHMIKFRGHFLIEGDLNPDNSDVDKLFIQLVQTYNQLFEENPINASGVDAKAILSARLSKSRRLENLIAQLPGEKKNGLFGNLIALSLGLTPNFKSNFDLAEDAKLQLSKDTYDDDLDNLLAQIGDQYADLFLAAKNLSDAILLSDILRVNTEITKAPLSASMIKRYDEHHQDLTLLKALVRQQLPEKYKEIFFDQSKNGYAGYIDGGASQEEFYKFIKPILEKMDGTEELLVKLNREDLLRKQRTFDNGSIPHQIHLGELHAILRRQEDFYPFLKDNREKIEKILTFRIPYYVGPLARGNSRFAWMTRKSEETITPWNFEEVVDKGASAQSFIERMTNFDKNLPNEKVLPKHSLLYEYFTVYNELTKVKYVTEGMRKPAFLSGEQKKAIVDLLFKTNRKVTVKQLKEDYFKKIECFDSVEISGVEDRFNASLGTYHDLLKIIKDKDFLDNEENEDILEDIVLTLTLFEDREMIEERLKTYAHLFDDKVMKQLKRRRYTGWGRLSRKLINGIRDKQSGKTILDFLKSDGFANRNFMQLIHDDSLTFKEDIQKAQVSGQGDSLHEHIANLAGSPAIKKGILQTVKVVDELVKVMGRHKPENIVIEMARENQTTQKGQKNSRERMKRIEEGIKELGSQILKEHPVENTQLQNEKLYLYYLQNGRDMYVDQELDINRLSDYDVDHIVPQSFLKDDSIDNKVLTRSDKARGKSDNVPSEEVVKKMKNYWRQLLNAKLITQRKFDNLTKAERGGLSELDKAGFIKRQLVETRQITKHVAQILDSRMNTKYDENDKLIREVKVITLKSKLVSDFRKDFQFYKVREINNYHHAHDAYLNAVVGTALIKKYPKLESEFVYGDYKVYDVRKMIAKSEQEIGKATAKYFFYSNIMNFFKTEITLANGEIRKRPLIETNGETGEIVWDKGRDFATVRKVLSMPQVNIVKKTEVQTGGFSKESILPKRNSDKLIARKKDWDPKKYGGFDSPTVAYSVLVVAKVEKGKSKKLKSVKELLGITIMERSSFEKNPIDFLEAKGYKEVKKDLIIKLPKYSLFELENGRKRMLASAGELQKGNELALPSKYVNFLYLASHYEKLKGSPEDNEQKQLFVEQHKHYLDEIIEQISEFSKRVILADANLDKVLSAYNKHRDKPIREQAENIIHLFTLTNLGAPAAFKYFDTTIDRKRYTSTKEVLDATLIHQSITGLYETRIDLSQLGGDGGEAAAKEAAAKEAAAKEAAAKEAAAKEAAAKGGTLQLDDEYRLYSPLVKPDQNIQFWLEQFPQAWAETAGMGLAKQVPPQVIQLKASATPVSVRQYPLSKEAQEGIRPHVQRLIQQGILVPVQSPWNTPLLPVRKPGTNDYRPVQDLREVNKRVQDIHPTVPNPYNLLCALPPQRSWYTVLDLKDAFFCLRLHPTSQPLFAFEWRDPGTGRTGQLTWTRLPQGFKNSPTIFNEALHRDLANFRIQHPQVTLLQYVDDLLLAGATKQDCLEGTKALLLELSDLGYRASAKKAQICRREVTYLGYSLRDGQRWLTEARKKTVVQIPAPTTAKQVREFLGTAGFCRLWIPGFATLAAPLYPLTKPKGEFSWAPEHQKAFDAIKKALLSAPALALPDVTKPFTLYVDERKGVARGVLTQTLGPWRRPVAYLSKKLDPVASGWPVCLKAIAAVAILVKDADKLTLGQNITVIAPHALENIVRQPPDRWMTNARMTHYQSLLLTERVTFAPPAALNPATLLPEETDEPVTHDCHQLLIEETGVRKDLTDIPLTGEVLTWFTDGSSYVVEGKRMAGAAVVDGTRTIWASSLPEGTSAQKAELMALTQALRLAEGKSINIYTDSRYAFATAHVHGAIYKQRGWLTSAGREIKNKEEILSLLEALHLPKRLAIIHCPGHQKAKDPISRGNQMADRVAKQAAQGVNLLAGKRTADGSEFEKRTADGSEFESPKKKAKVE

SEQ ID NO: 118 - protein, 2094 aa, synthetic construct
MPAAKRVKLDGGDKKYSIGLDIGTNSVGWAVITDEYKVPSKKFKVLGNTDRHSIKKNLIGALLFDSGETAEATRLKRTARRRYTRRKNRICYLQEIFSNEMAKVDDSFFHRLEESFLVEEDKKHERHPIFGNIVDEVAYHEKYPTIYHLRKKLVDSTDKADLRLIYLALAHMIKFRGHFLIEGDLNPDNSDVDKLFIQLVQTYNQLFEENPINASGVDAKAILSARLSKSRRLENLIAQLPGEKKNGLFGNLIALSLGLTPNFKSNFDLAEDAKLQLSKDTYDDDLDNLLAQIGDQYADLFLAAKNLSDAILLSDILRVNTEITKAPLSASMIKRYDEHHQDLTLLKALVRQQLPEKYKEIFFDQSKNGYAGYIDGGASQEEFYKFIKPILEKMDGTEELLVKLNREDLLRKQRTFDNGSIPHQIHLGELHAILRRQEDFYPFLKDNREKIEKILTFRIPYYVGPLARGNSRFAWMTRKSEETITPWNFEEVVDKGASAQSFIERMTNFDKNLPNEKVLPKHSLLYEYFTVYNELTKVKYVTEGMRKPAFLSGEQKKAIVDLLFKTNRKVTVKQLKEDYFKKIECFDSVEISGVEDRFNASLGTYHDLLKIIKDKDFLDNEENEDILEDIVLTLTLFEDREMIEERLKTYAHLFDDKVMKQLKRRRYTGWGRLSRKLINGIRDKQSGKTILDFLKSDGFANRNFMQLIHDDSLTFKEDIQKAQVSGQGDSLHEHIANLAGSPAIKKGILQTVKVVDELVKVMGRHKPENIVIEMARENQTTQKGQKNSRERMKRIEEGIKELGSQILKEHPVENTQLQNEKLYLYYLQNGRDMYVDQELDINRLSDYDVDHIVPQSFLKDDSIDNKVLTRSDKARGKSDNVPSEEVVKKMKNYWRQLLNAKLITQRKFDNLTKAERGGLSELDKAGFIKRQLVETRQITKHVAQILDSRMNTKYDENDKLIREVKVITLKSKLVSDFRKDFQFYKVREINNYHHAHDAYLNAVVGTALIKKYPKLESEFVYGDYKVYDVRKMIAKSEQEIGKATAKYFFYSNIMNFFKTEITLANGEIRKRPLIETNGETGEIVWDKGRDFATVRKVLSMPQVNIVKKTEVQTGGFSKESILPKRNSDKLIARKKDWDPKKYGGFDSPTVAYSVLVVAKVEKGKSKKLKSVKELLGITIMERSSFEKNPIDFLEAKGYKEVKKDLIIKLPKYSLFELENGRKRMLASAGELQKGNELALPSKYVNFLYLASHYEKLKGSPEDNEQKQLFVEQHKHYLDEIIEQISEFSKRVILADANLDKVLSAYNKHRDKPIREQAENIIHLFTLTNLGAPAAFKYFDTTIDRKRYTSTKEVLDATLIHQSITGLYETRIDLSQLGGDGGGSSGSSGSSGSSGSSGGTLQLDDEYRLYSPLVKPDQNIQFWLEQFPQAWAETAGMGLAKQVPPQVIQLKASATPVSVRQYPLSKEAQEGIRPHVQRLIQQGILVPVQSPWNTPLLPVRKPGTNDYRPVQDLREVNKRVQDIHPTVPNPYNLLCALPPQRSWYTVLDLKDAFFCLRLHPTSQPLFAFEWRDPGTGRTGQLTWTRLPQGFKNSPTIFNEALHRDLANFRIQHPQVTLLQYVDDLLLAGATKQDCLEGTKALLLELSDLGYRASAKKAQICRREVTYLGYSLRDGQRWLTEARKKTVVQIPAPTTAKQVREFLGTAGFCRLWIPGFATLAAPLYPLTKPKGEFSWAPEHQKAFDAIKKALLSAPALALPDVTKPFTLYVDERKGVARGVLTQTLGPWRRPVAYLSKKLDPVASGWPVCLKAIAAVAILVKDADKLTLGQNITVIAPHALENIVRQPPDRWMTNARMTHYQSLLLTERVTFAPPAALNPATLLPEETDEPVTHDCHQLLIEETGVRKDLTDIPLTGEVLTWFTDGSSYVVEGKRMAGAAVVDGTRTIWASSLPEGTSAQKAELMALTQALRLAEGKSINIYTDSRYAFATAHVHGAIYKQRGWLTSAGREIKNKEEILSLLEALHLPKRLAIIHCPGHQKAKDPISRGNQMADRVAKQAAQGVNLLAGKRTADGSEFEKRTADGSEFESPKKKAKVE

SEQ ID NO: 119 - protein, 2090 aa, synthetic construct
MPAAKRVKLDGGDKKYSIGLDIGTNSVGWAVITDEYKVPSKKFKVLGNTDRHSIKKNLIGALLFDSGETAEATRLKRTARRRYTRRKNRICYLQEIFSNEMAKVDDSFFHRLEESFLVEEDKKHERHPIFGNIVDEVAYHEKYPTIYHLRKKLVDSTDKADLRLIYLALAHMIKFRGHFLIEGDLNPDNSDVDKLFIQLVQTYNQLFEENPINASGVDAKAILSARLSKSRRLENLIAQLPGEKKNGLFGNLIALSLGLTPNFKSNFDLAEDAKLQLSKDTYDDDLDNLLAQIGDQYADLFLAAKNLSDAILLSDILRVNTEITKAPLSASMIKRYDEHHQDLTLLKALVRQQLPEKYKEIFFDQSKNGYAGYIDGGASQEEFYKFIKPILEKMDGTEELLVKLNREDLLRKQRTFDNGSIPHQIHLGELHAILRRQEDFYPFLKDNREKIEKILTFRIPYYVGPLARGNSRFAWMTRKSEETITPWNFEEVVDKGASAQSFIERMTNFDKNLPNEKVLPKHSLLYEYFTVYNELTKVKYVTEGMRKPAFLSGEQKKAIVDLLFKTNRKVTVKQLKEDYFKKIECFDSVEISGVEDRFNASLGTYHDLLKIIKDKDFLDNEENEDILEDIVLTLTLFEDREMIEERLKTYAHLFDDKVMKQLKRRRYTGWGRLSRKLINGIRDKQSGKTILDFLKSDGFANRNFMQLIHDDSLTFKEDIQKAQVSGQGDSLHEHIANLAGSPAIKKGILQTVKVVDELVKVMGRHKPENIVIEMARENQTTQKGQKNSRERMKRIEEGIKELGSQILKEHPVENTQLQNEKLYLYYLQNGRDMYVDQELDINRLSDYDVDHIVPQSFLKDDSIDNKVLTRSDKARGKSDNVPSEEVVKKMKNYWRQLLNAKLITQRKFDNLTKAERGGLSELDKAGFIKRQLVETRQITKHVAQILDSRMNTKYDENDKLIREVKVITLKSKLVSDFRKDFQFYKVREINNYHHAHDAYLNAVVGTALIKKYPKLESEFVYGDYKVYDVRKMIAKSEQEIGKATAKYFFYSNIMNFFKTEITLANGEIRKRPLIETNGETGEIVWDKGRDFATVRKVLSMPQVNIVKKTEVQTGGFSKESILPKRNSDKLIARKKDWDPKKYGGFDSPTVAYSVLVVAKVEKGKSKKLKSVKELLGITIMERSSFEKNPIDFLEAKGYKEVKKDLIIKLPKYSLFELENGRKRMLASAGELQKGNELALPSKYVNFLYLASHYEKLKGSPEDNEQKQLFVEQHKHYLDEIIEQISEFSKRVILADANLDKVLSAYNKHRDKPIREQAENIIHLFTLTNLGAPAAFKYFDTTIDRKRYTSTKEVLDATLIHQSITGLYETRIDLSQLGGDGGEAAAKGSSGGSGGTLQLDDEYRLYSPLVKPDQNIQFWLEQFPQAWAETAGMGLAKQVPPQVIQLKASATPVSVRQYPLSKEAQEGIRPHVQRLIQQGILVPVQSPWNTPLLPVRKPGTNDYRPVQDLREVNKRVQDIHPTVPNPYNLLCALPPQRSWYTVLDLKDAFFCLRLHPTSQPLFAFEWRDPGTGRTGQLTWTRLPQGFKNSPTIFNEALHRDLANFRIQHPQVTLLQYVDDLLLAGATKQDCLEGTKALLLELSDLGYRASAKKAQICRREVTYLGYSLRDGQRWLTEARKKTVVQIPAPTTAKQVREFLGTAGFCRLWIPGFATLAAPLYPLTKPKGEFSWAPEHQKAFDAIKKALLSAPALALPDVTKPFTLYVDERKGVARGVLTQTLGPWRRPVAYLSKKLDPVASGWPVCLKAIAAVAILVKDADKLTLGQNITVIAPHALENIVRQPPDRWMTNARMTHYQSLLLTERVTFAPPAALNPATLLPEETDEPVTHDCHQLLIEETGVRKDLTDIPLTGEVLTWFTDGSSYVVEGKRMAGAAVVDGTRTIWASSLPEGTSAQKAELMALTQALRLAEGKSINIYTDSRYAFATAHVHGAIYKQRGWLTSAGREIKNKEEILSLLEALHLPKRLAIIHCPGHQKAKDPISRGNQMADRVAKQAAQGVNLLAGKRTADGSEFEKRTADGSEFESPKKKAKVE

SEQ ID NO: 120 - protein, 2082 aa, synthetic construct
MPAAKRVKLDGGDKKYSIGLDIGTNSVGWAVITDEYKVPSKKFKVLGNTDRHSIKKNLIGALLFDSGETAEATRLKRTARRRYTRRKNRICYLQEIFSNEMAKVDDSFFHRLEESFLVEEDKKHERHPIFGNIVDEVAYHEKYPTIYHLRKKLVDSTDKADLRLIYLALAHMIKFRGHFLIEGDLNPDNSDVDKLFIQLVQTYNQLFEENPINASGVDAKAILSARLSKSRRLENLIAQLPGEKKNGLFGNLIALSLGLTPNFKSNFDLAEDAKLQLSKDTYDDDLDNLLAQIGDQYADLFLAAKNLSDAILLSDILRVNTEITKAPLSASMIKRYDEHHQDLTLLKALVRQQLPEKYKEIFFDQSKNGYAGYIDGGASQEEFYKFIKPILEKMDGTEELLVKLNREDLLRKQRTFDNGSIPHQIHLGELHAILRRQEDFYPFLKDNREKIEKILTFRIPYYVGPLARGNSRFAWMTRKSEETITPWNFEEVVDKGASAQSFIERMTNFDKNLPNEKVLPKHSLLYEYFTVYNELTKVKYVTEGMRKPAFLSGEQKKAIVDLLFKTNRKVTVKQLKEDYFKKIECFDSVEISGVEDRFNASLGTYHDLLKIIKDKDFLDNEENEDILEDIVLTLTLFEDREMIEERLKTYAHLFDDKVMKQLKRRRYTGWGRLSRKLINGIRDKQSGKTILDFLKSDGFANRNFMQLIHDDSLTFKEDIQKAQVSGQGDSLHEHIANLAGSPAIKKGILQTVKVVDELVKVMGRHKPENIVIEMARENQTTQKGQKNSRERMKRIEEGIKELGSQILKEHPVENTQLQNEKLYLYYLQNGRDMYVDQELDINRLSDYDVDHIVPQSFLKDDSIDNKVLTRSDKARGKSDNVPSEEVVKKMKNYWRQLLNAKLITQRKFDNLTKAERGGLSELDKAGFIKRQLVETRQITKHVAQILDSRMNTKYDENDKLIREVKVITLKSKLVSDFRKDFQFYKVREINNYHHAHDAYLNAVVGTALIKKYPKLESEFVYGDYKVYDVRKMIAKSEQEIGKATAKYFFYSNIMNFFKTEITLANGEIRKRPLIETNGETGEIVWDKGRDFATVRKVLSMPQVNIVKKTEVQTGGFSKESILPKRNSDKLIARKKDWDPKKYGGFDSPTVAYSVLVVAKVEKGKSKKLKSVKELLGITIMERSSFEKNPIDFLEAKGYKEVKKDLIIKLPKYSLFELENGRKRMLASAGELQKGNELALPSKYVNFLYLASHYEKLKGSPEDNEQKQLFVEQHKHYLDEIIEQISEFSKRVILADANLDKVLSAYNKHRDKPIREQAENIIHLFTLTNLGAPAAFKYFDTTIDRKRYTSTKEVLDATLIHQSITGLYETRIDLSQLGGDGGGSSGGTLQLDDEYRLYSPLVKPDQNIQFWLEQFPQAWAETAGMGLAKQVPPQVIQLKASATPVSVRQYPLSKEAQEGIRPHVQRLIQQGILVPVQSPWNTPLLPVRKPGTNDYRPVQDLREVNKRVQDIHPTVPNPYNLLCALPPQRSWYTVLDLKDAFFCLRLHPTSQPLFAFEWRDPGTGRTGQLTWTRLPQGFKNSPTIFNEALHRDLANFRIQHPQVTLLQYVDDLLLAGATKQDCLEGTKALLLELSDLGYRASAKKAQICRREVTYLGYSLRDGQRWLTEARKKTVVQIPAPTTAKQVREFLGTAGFCRLWIPGFATLAAPLYPLTKPKGEFSWAPEHQKAFDAIKKALLSAPALALPDVTKPFTLYVDERKGVARGVLTQTLGPWRRPVAYLSKKLDPVASGWPVCLKAIAAVAILVKDADKLTLGQNITVIAPHALENIVRQPPDRWMTNARMTHYQSLLLTERVTFAPPAALNPATLLPEETDEPVTHDCHQLLIEETGVRKDLTDIPLTGEVLTWFTDGSSYVVEGKRMAGAAVVDGTRTIWASSLPEGTSAQKAELMALTQALRLAEGKSINIYTDSRYAFATAHVHGAIYKQRGWLTSAGREIKNKEEILSLLEALHLPKRLAIIHCPGHQKAKDPISRGNQMADRVAKQAAQGVNLLAGKRTADGSEFEKRTADGSEFESPKKKAKVE

SEQ ID NO: 121 - protein, 2090 aa, synthetic construct
MPAAKRVKLDGGDKKYSIGLDIGTNSVGWAVITDEYKVPSKKFKVLGNTDRHSIKKNLIGALLFDSGETAEATRLKRTARRRYTRRKNRICYLQEIFSNEMAKVDDSFFHRLEESFLVEEDKKHERHPIFGNIVDEVAYHEKYPTIYHLRKKLVDSTDKADLRLIYLALAHMIKFRGHFLIEGDLNPDNSDVDKLFIQLVQTYNQLFEENPINASGVDAKAILSARLSKSRRLENLIAQLPGEKKNGLFGNLIALSLGLTPNFKSNFDLAEDAKLQLSKDTYDDDLDNLLAQIGDQYADLFLAAKNLSDAILLSDILRVNTEITKAPLSASMIKRYDEHHQDLTLLKALVRQQLPEKYKEIFFDQSKNGYAGYIDGGASQEEFYKFIKPILEKMDGTEELLVKLNREDLLRKQRTFDNGSIPHQIHLGELHAILRRQEDFYPFLKDNREKIEKILTFRIPYYVGPLARGNSRFAWMTRKSEETITPWNFEEVVDKGASAQSFIERMTNFDKNLPNEKVLPKHSLLYEYFTVYNELTKVKYVTEGMRKPAFLSGEQKKAIVDLLFKTNRKVTVKQLKEDYFKKIECFDSVEISGVEDRFNASLGTYHDLLKIIKDKDFLDNEENEDILEDIVLTLTLFEDREMIEERLKTYAHLFDDKVMKQLKRRRYTGWGRLSRKLINGIRDKQSGKTILDFLKSDGFANRNFMQLIHDDSLTFKEDIQKAQVSGQGDSLHEHIANLAGSPAIKKGILQTVKVVDELVKVMGRHKPENIVIEMARENQTTQKGQKNSRERMKRIEEGIKELGSQILKEHPVENTQLQNEKLYLYYLQNGRDMYVDQELDINRLSDYDVDHIVPQSFLKDDSIDNKVLTRSDKARGKSDNVPSEEVVKKMKNYWRQLLNAKLITQRKFDNLTKAERGGLSELDKAGFIKRQLVETRQITKHVAQILDSRMNTKYDENDKLIREVKVITLKSKLVSDFRKDFQFYKVREINNYHHAHDAYLNAVVGTALIKKYPKLESEFVYGDYKVYDVRKMIAKSEQEIGKATAKYFFYSNIMNFFKTEITLANGEIRKRPLIETNGETGEIVWDKGRDFATVRKVLSMPQVNIVKKTEVQTGGFSKESILPKRNSDKLIARKKDWDPKKYGGFDSPTVAYSVLVVAKVEKGKSKKLKSVKELLGITIMERSSFEKNPIDFLEAKGYKEVKKDLIIKLPKYSLFELENGRKRMLASAGELQKGNELALPSKYVNFLYLASHYEKLKGSPEDNEQKQLFVEQHKHYLDEIIEQISEFSKRVILADANLDKVLSAYNKHRDKPIREQAENIIHLFTLTNLGAPAAFKYFDTTIDRKRYTSTKEVLDATLIHQSITGLYETRIDLSQLGGDGGGGGGSSEAAAKGGTLQLDDEYRLYSPLVKPDQNIQFWLEQFPQAWAETAGMGLAKQVPPQVIQLKASATPVSVRQYPLSKEAQEGIRPHVQRLIQQGILVPVQSPWNTPLLPVRKPGTNDYRPVQDLREVNKRVQDIHPTVPNPYNLLCALPPQRSWYTVLDLKDAFFCLRLHPTSQPLFAFEWRDPGTGRTGQLTWTRLPQGFKNSPTIFNEALHRDLANFRIQHPQVTLLQYVDDLLLAGATKQDCLEGTKALLLELSDLGYRASAKKAQICRREVTYLGYSLRDGQRWLTEARKKTVVQIPAPTTAKQVREFLGTAGFCRLWIPGFATLAAPLYPLTKPKGEFSWAPEHQKAFDAIKKALLSAPALALPDVTKPFTLYVDERKGVARGVLTQTLGPWRRPVAYLSKKLDPVASGWPVCLKAIAAVAILVKDADKLTLGQNITVIAPHALENIVRQPPDRWMTNARMTHYQSLLLTERVTFAPPAALNPATLLPEETDEPVTHDCHQLLIEETGVRKDLTDIPLTGEVLTWFTDGSSYVVEGKRMAGAAVVDGTRTIWASSLPEGTSAQKAELMALTQALRLAEGKSINIYTDSRYAFATAHVHGAIYKQRGWLTSAGREIKNKEEILSLLEALHLPKRLAIIHCPGHQKAKDPISRGNQMADRVAKQAAQGVNLLAGKRTADGSEFEKRTADGSEFESPKKKAKVE

SEQ ID NO: 122 - protein, 2095 aa, synthetic construct
MPAAKRVKLDGGDKKYSIGLDIGTNSVGWAVITDEYKVPSKKFKVLGNTDRHSIKKNLIGALLFDSGETAEATRLKRTARRRYTRRKNRICYLQEIFSNEMAKVDDSFFHRLEESFLVEEDKKHERHPIFGNIVDEVAYHEKYPTIYHLRKKLVDSTDKADLRLIYLALAHMIKFRGHFLIEGDLNPDNSDVDKLFIQLVQTYNQLFEENPINASGVDAKAILSARLSKSRRLENLIAQLPGEKKNGLFGNLIALSLGLTPNFKSNFDLAEDAKLQLSKDTYDDDLDNLLAQIGDQYADLFLAAKNLSDAILLSDILRVNTEITKAPLSASMIKRYDEHHQDLTLLKALVRQQLPEKYKEIFFDQSKNGYAGYIDGGASQEEFYKFIKPILEKMDGTEELLVKLNREDLLRKQRTFDNGSIPHQIHLGELHAILRRQEDFYPFLKDNREKIEKILTFRIPYYVGPLARGNSRFAWMTRKSEETITPWNFEEVVDKGASAQSFIERMTNFDKNLPNEKVLPKHSLLYEYFTVYNELTKVKYVTEGMRKPAFLSGEQKKAIVDLLFKTNRKVTVKQLKEDYFKKIECFDSVEISGVEDRFNASLGTYHDLLKIIKDKDFLDNEENEDILEDIVLTLTLFEDREMIEERLKTYAHLFDDKVMKQLKRRRYTGWGRLSRKLINGIRDKQSGKTILDFLKSDGFANRNFMQLIHDDSLTFKEDIQKAQVSGQGDSLHEHIANLAGSPAIKKGILQTVKVVDELVKVMGRHKPENIVIEMARENQTTQKGQKNSRERMKRIEEGIKELGSQILKEHPVENTQLQNEKLYLYYLQNGRDMYVDQELDINRLSDYDVDHIVPQSFLKDDSIDNKVLTRSDKARGKSDNVPSEEVVKKMKNYWRQLLNAKLITQRKFDNLTKAERGGLSELDKAGFIKRQLVETRQITKHVAQILDSRMNTKYDENDKLIREVKVITLKSKLVSDFRKDFQFYKVREINNYHHAHDAYLNAVVGTALIKKYPKLESEFVYGDYKVYDVRKMIAKSEQEIGKATAKYFFYSNIMNFFKTEITLANGEIRKRPLIETNGETGEIVWDKGRDFATVRKVLSMPQVNIVKKTEVQTGGFSKESILPKRNSDKLIARKKDWDPKKYGGFDSPTVAYSVLVVAKVEKGKSKKLKSVKELLGITIMERSSFEKNPIDFLEAKGYKEVKKDLIIKLPKYSLFELENGRKRMLASAGELQKGNELALPSKYVNFLYLASHYEKLKGSPEDNEQKQLFVEQHKHYLDEIIEQISEFSKRVILADANLDKVLSAYNKHRDKPIREQAENIIHLFTLTNLGAPAAFKYFDTTIDRKRYTSTKEVLDATLIHQSITGLYETRIDLSQLGGDGGSGSETPGTSESATPESGGTLQLDDEYRLYSPLVKPDQNIQFWLEQFPQAWAETAGMGLAKQVPPQVIQLKASATPVSVRQYPLSKEAQEGIRPHVQRLIQQGILVPVQSPWNTPLLPVRKPGTNDYRPVQDLREVNKRVQDIHPTVPNPYNLLCALPPQRSWYTVLDLKDAFFCLRLHPTSQPLFAFEWRDPGTGRTGQLTWTRLPQGFKNSPTIFNEALHRDLANFRIQHPQVTLLQYVDDLLLAGATKQDCLEGTKALLLELSDLGYRASAKKAQICRREVTYLGYSLRDGQRWLTEARKKTVVQIPAPTTAKQVREFLGTAGFCRLWIPGFATLAAPLYPLTKPKGEFSWAPEHQKAFDAIKKALLSAPALALPDVTKPFTLYVDERKGVARGVLTQTLGPWRRPVAYLSKKLDPVASGWPVCLKAIAAVAILVKDADKLTLGQNITVIAPHALENIVRQPPDRWMTNARMTHYQSLLLTERVTFAPPAALNPATLLPEETDEPVTHDCHQLLIEETGVRKDLTDIPLTGEVLTWFTDGSSYVVEGKRMAGAAVVDGTRTIWASSLPEGTSAQKAELMALTQALRLAEGKSINIYTDSRYAFATAHVHGAIYKQRGWLTSAGREIKNKEEILSLLEALHLPKRLAIIHCPGHQKAKDPISRGNQMADRVAKQAAQGVNLLAGKRTADGSEFEKRTADGSEFESPKKKAKVE

SEQ ID NO: 123 - protein, 2085 aa, synthetic construct
MPAAKRVKLDGGDKKYSIGLDIGTNSVGWAVITDEYKVPSKKFKVLGNTDRHSIKKNLIGALLFDSGETAEATRLKRTARRRYTRRKNRICYLQEIFSNEMAKVDDSFFHRLEESFLVEEDKKHERHPIFGNIVDEVAYHEKYPTIYHLRKKLVDSTDKADLRLIYLALAHMIKFRGHFLIEGDLNPDNSDVDKLFIQLVQTYNQLFEENPINASGVDAKAILSARLSKSRRLENLIAQLPGEKKNGLFGNLIALSLGLTPNFKSNFDLAEDAKLQLSKDTYDDDLDNLLAQIGDQYADLFLAAKNLSDAILLSDILRVNTEITKAPLSASMIKRYDEHHQDLTLLKALVRQQLPEKYKEIFFDQSKNGYAGYIDGGASQEEFYKFIKPILEKMDGTEELLVKLNREDLLRKQRTFDNGSIPHQIHLGELHAILRRQEDFYPFLKDNREKIEKILTFRIPYYVGPLARGNSRFAWMTRKSEETITPWNFEEVVDKGASAQSFIERMTNFDKNLPNEKVLPKHSLLYEYFTVYNELTKVKYVTEGMRKPAFLSGEQKKAIVDLLFKTNRKVTVKQLKEDYFKKIECFDSVEISGVEDRFNASLGTYHDLLKIIKDKDFLDNEENEDILEDIVLTLTLFEDREMIEERLKTYAHLFDDKVMKQLKRRRYTGWGRLSRKLINGIRDKQSGKTILDFLKSDGFANRNFMQLIHDDSLTFKEDIQKAQVSGQGDSLHEHIANLAGSPAIKKGILQTVKVVDELVKVMGRHKPENIVIEMARENQTTQKGQKNSRERMKRIEEGIKELGSQILKEHPVENTQLQNEKLYLYYLQNGRDMYVDQELDINRLSDYDVDHIVPQSFLKDDSIDNKVLTRSDKARGKSDNVPSEEVVKKMKNYWRQLLNAKLITQRKFDNLTKAERGGLSELDKAGFIKRQLVETRQITKHVAQILDSRMNTKYDENDKLIREVKVITLKSKLVSDFRKDFQFYKVREINNYHHAHDAYLNAVVGTALIKKYPKLESEFVYGDYKVYDVRKMIAKSEQEIGKATAKYFFYSNIMNFFKTEITLANGEIRKRPLIETNGETGEIVWDKGRDFATVRKVLSMPQVNIVKKTEVQTGGFSKESILPKRNSDKLIARKKDWDPKKYGGFDSPTVAYSVLVVAKVEKGKSKKLKSVKELLGITIMERSSFEKNPIDFLEAKGYKEVKKDLIIKLPKYSLFELENGRKRMLASAGELQKGNELALPSKYVNFLYLASHYEKLKGSPEDNEQKQLFVEQHKHYLDEIIEQISEFSKRVILADANLDKVLSAYNKHRDKPIREQAENIIHLFTLTNLGAPAAFKYFDTTIDRKRYTSTKEVLDATLIHQSITGLYETRIDLSQLGGDGGPAPGSSGGTLQLDDEYRLYSPLVKPDQNIQFWLEQFPQAWAETAGMGLAKQVPPQVIQLKASATPVSVRQYPLSKEAQEGIRPHVQRLIQQGILVPVQSPWNTPLLPVRKPGTNDYRPVQDLREVNKRVQDIHPTVPNPYNLLCALPPQRSWYTVLDLKDAFFCLRLHPTSQPLFAFEWRDPGTGRTGQLTWTRLPQGFKNSPTIFNEALHRDLANFRIQHPQVTLLQYVDDLLLAGATKQDCLEGTKALLLELSDLGYRASAKKAQICRREVTYLGYSLRDGQRWLTEARKKTVVQIPAPTTAKQVREFLGTAGFCRLWIPGFATLAAPLYPLTKPKGEFSWAPEHQKAFDAIKKALLSAPALALPDVTKPFTLYVDERKGVARGVLTQTLGPWRRPVAYLSKKLDPVASGWPVCLKAIAAVAILVKDADKLTLGQNITVIAPHALENIVRQPPDRWMTNARMTHYQSLLLTERVTFAPPAALNPATLLPEETDEPVTHDCHQLLIEETGVRKDLTDIPLTGEVLTWFTDGSSYVVEGKRMAGAAVVDGTRTIWASSLPEGTSAQKAELMALTQALRLAEGKSINIYTDSRYAFATAHVHGAIYKQRGWLTSAGREIKNKEEILSLLEALHLPKRLAIIHCPGHQKAKDPISRGNQMADRVAKQAAQGVNLLAGKRTADGSEFEKRTADGSEFESPKKKAKVE

SEQ ID NO: 124 - protein, 2090 aa, synthetic construct
MPAAKRVKLDGGDKKYSIGLDIGTNSVGWAVITDEYKVPSKKFKVLGNTDRHSIKKNLIGALLFDSGETAEATRLKRTARRRYTRRKNRICYLQEIFSNEMAKVDDSFFHRLEESFLVEEDKKHERHPIFGNIVDEVAYHEKYPTIYHLRKKLVDSTDKADLRLIYLALAHMIKFRGHFLIEGDLNPDNSDVDKLFIQLVQTYNQLFEENPINASGVDAKAILSARLSKSRRLENLIAQLPGEKKNGLFGNLIALSLGLTPNFKSNFDLAEDAKLQLSKDTYDDDLDNLLAQIGDQYADLFLAAKNLSDAILLSDILRVNTEITKAPLSASMIKRYDEHHQDLTLLKALVRQQLPEKYKEIFFDQSKNGYAGYIDGGASQEEFYKFIKPILEKMDGTEELLVKLNREDLLRKQRTFDNGSIPHQIHLGELHAILRRQEDFYPFLKDNREKIEKILTFRIPYYVGPLARGNSRFAWMTRKSEETITPWNFEEVVDKGASAQSFIERMTNFDKNLPNEKVLPKHSLLYEYFTVYNELTKVKYVTEGMRKPAFLSGEQKKAIVDLLFKTNRKVTVKQLKEDYFKKIECFDSVEISGVEDRFNASLGTYHDLLKIIKDKDFLDNEENEDILEDIVLTLTLFEDREMIEERLKTYAHLFDDKVMKQLKRRRYTGWGRLSRKLINGIRDKQSGKTILDFLKSDGFANRNFMQLIHDDSLTFKEDIQKAQVSGQGDSLHEHIANLAGSPAIKKGILQTVKVVDELVKVMGRHKPENIVIEMARENQTTQKGQKNSRERMKRIEEGIKELGSQILKEHPVENTQLQNEKLYLYYLQNGRDMYVDQELDINRLSDYDVDHIVPQSFLKDDSIDNKVLTRSDKARGKSDNVPSEEVVKKMKNYWRQLLNAKLITQRKFDNLTKAERGGLSELDKAGFIKRQLVETRQITKHVAQILDSRMNTKYDENDKLIREVKVITLKSKLVSDFRKDFQFYKVREINNYHHAHDAYLNAVVGTALIKKYPKLESEFVYGDYKVYDVRKMIAKSEQEIGKATAKYFFYSNIMNFFKTEITLANGEIRKRPLIETNGETGEIVWDKGRDFATVRKVLSMPQVNIVKKTEVQTGGFSKESILPKRNSDKLIARKKDWDPKKYGGFDSPTVAYSVLVVAKVEKGKSKKLKSVKELLGITIMERSSFEKNPIDFLEAKGYKEVKKDLIIKLPKYSLFELENGRKRMLASAGELQKGNELALPSKYVNFLYLASHYEKLKGSPEDNEQKQLFVEQHKHYLDEIIEQISEFSKRVILADANLDKVLSAYNKHRDKPIREQAENIIHLFTLTNLGAPAAFKYFDTTIDRKRYTSTKEVLDATLIHQSITGLYETRIDLSQLGGDGGPAPEAAAKGGGGGTLQLDDEYRLYSPLVKPDQNIQFWLEQFPQAWAETAGMGLAKQVPPQVIQLKASATPVSVRQYPLSKEAQEGIRPHVQRLIQQGILVPVQSPWNTPLLPVRKPGTNDYRPVQDLREVNKRVQDIHPTVPNPYNLLCALPPQRSWYTVLDLKDAFFCLRLHPTSQPLFAFEWRDPGTGRTGQLTWTRLPQGFKNSPTIFNEALHRDLANFRIQHPQVTLLQYVDDLLLAGATKQDCLEGTKALLLELSDLGYRASAKKAQICRREVTYLGYSLRDGQRWLTEARKKTVVQIPAPTTAKQVREFLGTAGFCRLWIPGFATLAAPLYPLTKPKGEFSWAPEHQKAFDAIKKALLSAPALALPDVTKPFTLYVDERKGVARGVLTQTLGPWRRPVAYLSKKLDPVASGWPVCLKAIAAVAILVKDADKLTLGQNITVIAPHALENIVRQPPDRWMTNARMTHYQSLLLTERVTFAPPAALNPATLLPEETDEPVTHDCHQLLIEETGVRKDLTDIPLTGEVLTWFTDGSSYVVEGKRMAGAAVVDGTRTIWASSLPEGTSAQKAELMALTQALRLAEGKSINIYTDSRYAFATAHVHGAIYKQRGWLTSAGREIKNKEEILSLLEALHLPKRLAIIHCPGHQKAKDPISRGNQMADRVAKQAAQGVNLLAGKRTADGSEFEKRTADGSEFESPKKKAKVE

SEQ ID NO: 125 - protein, 2085 aa, synthetic construct
MPAAKRVKLDGGDKKYSIGLDIGTNSVGWAVITDEYKVPSKKFKVLGNTDRHSIKKNLIGALLFDSGETAEATRLKRTARRRYTRRKNRICYLQEIFSNEMAKVDDSFFHRLEESFLVEEDKKHERHPIFGNIVDEVAYHEKYPTIYHLRKKLVDSTDKADLRLIYLALAHMIKFRGHFLIEGDLNPDNSDVDKLFIQLVQTYNQLFEENPINASGVDAKAILSARLSKSRRLENLIAQLPGEKKNGLFGNLIALSLGLTPNFKSNFDLAEDAKLQLSKDTYDDDLDNLLAQIGDQYADLFLAAKNLSDAILLSDILRVNTEITKAPLSASMIKRYDEHHQDLTLLKALVRQQLPEKYKEIFFDQSKNGYAGYIDGGASQEEFYKFIKPILEKMDGTEELLVKLNREDLLRKQRTFDNGSIPHQIHLGELHAILRRQEDFYPFLKDNREKIEKILTFRIPYYVGPLARGNSRFAWMTRKSEETITPWNFEEVVDKGASAQSFIERMTNFDKNLPNEKVLPKHSLLYEYFTVYNELTKVKYVTEGMRKPAFLSGEQKKAIVDLLFKTNRKVTVKQLKEDYFKKIECFDSVEISGVEDRFNASLGTYHDLLKIIKDKDFLDNEENEDILEDIVLTLTLFEDREMIEERLKTYAHLFDDKVMKQLKRRRYTGWGRLSRKLINGIRDKQSGKTILDFLKSDGFANRNFMQLIHDDSLTFKEDIQKAQVSGQGDSLHEHIANLAGSPAIKKGILQTVKVVDELVKVMGRHKPENIVIEMARENQTTQKGQKNSRERMKRIEEGIKELGSQILKEHPVENTQLQNEKLYLYYLQNGRDMYVDQELDINRLSDYDVDHIVPQSFLKDDSIDNKVLTRSDKARGKSDNVPSEEVVKKMKNYWRQLLNAKLITQRKFDNLTKAERGGLSELDKAGFIKRQLVETRQITKHVAQILDSRMNTKYDENDKLIREVKVITLKSKLVSDFRKDFQFYKVREINNYHHAHDAYLNAVVGTALIKKYPKLESEFVYGDYKVYDVRKMIAKSEQEIGKATAKYFFYSNIMNFFKTEITLANGEIRKRPLIETNGETGEIVWDKGRDFATVRKVLSMPQVNIVKKTEVQTGGFSKESILPKRNSDKLIARKKDWDPKKYGGFDSPTVAYSVLVVAKVEKGKSKKLKSVKELLGITIMERSSFEKNPIDFLEAKGYKEVKKDLIIKLPKYSLFELENGRKRMLASAGELQKGNELALPSKYVNFLYLASHYEKLKGSPEDNEQKQLFVEQHKHYLDEIIEQISEFSKRVILADANLDKVLSAYNKHRDKPIREQAENIIHLFTLTNLGAPAAFKYFDTTIDRKRYTSTKEVLDATLIHQSITGLYETRIDLSQLGGDGGPAPGGSGGTLQLDDEYRLYSPLVKPDQNIQFWLEQFPQAWAETAGMGLAKQVPPQVIQLKASATPVSVRQYPLSKEAQEGIRPHVQRLIQQGILVPVQSPWNTPLLPVRKPGTNDYRPVQDLREVNKRVQDIHPTVPNPYNLLCALPPQRSWYTVLDLKDAFFCLRLHPTSQPLFAFEWRDPGTGRTGQLTWTRLPQGFKNSPTIFNEALHRDLANFRIQHPQVTLLQYVDDLLLAGATKQDCLEGTKALLLELSDLGYRASAKKAQICRREVTYLGYSLRDGQRWLTEARKKTVVQIPAPTTAKQVREFLGTAGFCRLWIPGFATLAAPLYPLTKPKGEFSWAPEHQKAFDAIKKALLSAPALALPDVTKPFTLYVDERKGVARGVLTQTLGPWRRPVAYLSKKLDPVASGWPVCLKAIAAVAILVKDADKLTLGQNITVIAPHALENIVRQPPDRWMTNARMTHYQSLLLTERVTFAPPAALNPATLLPEETDEPVTHDCHQLLIEETGVRKDLTDIPLTGEVLTWFTDGSSYVVEGKRMAGAAVVDGTRTIWASSLPEGTSAQKAELMALTQALRLAEGKSINIYTDSRYAFATAHVHGAIYKQRGWLTSAGREIKNKEEILSLLEALHLPKRLAIIHCPGHQKAKDPISRGNQMADRVAKQAAQGVNLLAGKRTADGSEFEKRTADGSEFESPKKKAKVE

SEQ ID NO: 126 - protein, 2087 aa, synthetic construct
MPAAKRVKLDGGDKKYSIGLDIGTNSVGWAVITDEYKVPSKKFKVLGNTDRHSIKKNLIGALLFDSGETAEATRLKRTARRRYTRRKNRICYLQEIFSNEMAKVDDSFFHRLEESFLVEEDKKHERHPIFGNIVDEVAYHEKYPTIYHLRKKLVDSTDKADLRLIYLALAHMIKFRGHFLIEGDLNPDNSDVDKLFIQLVQTYNQLFEENPINASGVDAKAILSARLSKSRRLENLIAQLPGEKKNGLFGNLIALSLGLTPNFKSNFDLAEDAKLQLSKDTYDDDLDNLLAQIGDQYADLFLAAKNLSDAILLSDILRVNTEITKAPLSASMIKRYDEHHQDLTLLKALVRQQLPEKYKEIFFDQSKNGYAGYIDGGASQEEFYKFIKPILEKMDGTEELLVKLNREDLLRKQRTFDNGSIPHQIHLGELHAILRRQEDFYPFLKDNREKIEKILTFRIPYYVGPLARGNSRFAWMTRKSEETITPWNFEEVVDKGASAQSFIERMTNFDKNLPNEKVLPKHSLLYEYFTVYNELTKVKYVTEGMRKPAFLSGEQKKAIVDLLFKTNRKVTVKQLKEDYFKKIECFDSVEISGVEDRFNASLGTYHDLLKIIKDKDFLDNEENEDILEDIVLTLTLFEDREMIEERLKTYAHLFDDKVMKQLKRRRYTGWGRLSRKLINGIRDKQSGKTILDFLKSDGFANRNFMQLIHDDSLTFKEDIQKAQVSGQGDSLHEHIANLAGSPAIKKGILQTVKVVDELVKVMGRHKPENIVIEMARENQTTQKGQKNSRERMKRIEEGIKELGSQILKEHPVENTQLQNEKLYLYYLQNGRDMYVDQELDINRLSDYDVDHIVPQSFLKDDSIDNKVLTRSDKARGKSDNVPSEEVVKKMKNYWRQLLNAKLITQRKFDNLTKAERGGLSELDKAGFIKRQLVETRQITKHVAQILDSRMNTKYDENDKLIREVKVITLKSKLVSDFRKDFQFYKVREINNYHHAHDAYLNAVVGTALIKKYPKLESEFVYGDYKVYDVRKMIAKSEQEIGKATAKYFFYSNIMNFFKTEITLANGEIRKRPLIETNGETGEIVWDKGRDFATVRKVLSMPQVNIVKKTEVQTGGFSKESILPKRNSDKLIARKKDWDPKKYGGFDSPTVAYSVLVVAKVEKGKSKKLKSVKELLGITIMERSSFEKNPIDFLEAKGYKEVKKDLIIKLPKYSLFELENGRKRMLASAGELQKGNELALPSKYVNFLYLASHYEKLKGSPEDNEQKQLFVEQHKHYLDEIIEQISEFSKRVILADANLDKVLSAYNKHRDKPIREQAENIIHLFTLTNLGAPAAFKYFDTTIDRKRYTSTKEVLDATLIHQSITGLYETRIDLSQLGGDGGEAAAKGGGGGTLQLDDEYRLYSPLVKPDQNIQFWLEQFPQAWAETAGMGLAKQVPPQVIQLKASATPVSVRQYPLSKEAQEGIRPHVQRLIQQGILVPVQSPWNTPLLPVRKPGTNDYRPVQDLREVNKRVQDIHPTVPNPYNLLCALPPQRSWYTVLDLKDAFFCLRLHPTSQPLFAFEWRDPGTGRTGQLTWTRLPQGFKNSPTIFNEALHRDLANFRIQHPQVTLLQYVDDLLLAGATKQDCLEGTKALLLELSDLGYRASAKKAQICRREVTYLGYSLRDGQRWLTEARKKTVVQIPAPTTAKQVREFLGTAGFCRLWIPGFATLAAPLYPLTKPKGEFSWAPEHQKAFDAIKKALLSAPALALPDVTKPFTLYVDERKGVARGVLTQTLGPWRRPVAYLSKKLDPVASGWPVCLKAIAAVAILVKDADKLTLGQNITVIAPHALENIVRQPPDRWMTNARMTHYQSLLLTERVTFAPPAALNPATLLPEETDEPVTHDCHQLLIEETGVRKDLTDIPLTGEVLTWFTDGSSYVVEGKRMAGAAVVDGTRTIWASSLPEGTSAQKAELMALTQALRLAEGKSINIYTDSRYAFATAHVHGAIYKQRGWLTSAGREIKNKEEILSLLEALHLPKRLAIIHCPGHQKAKDPISRGNQMADRVAKQAAQGVNLLAGKRTADGSEFEKRTADGSEFESPKKKAKVE

SEQ ID NO: 127 - protein, 2090 aa, synthetic construct
MPAAKRVKLDGGDKKYSIGLDIGTNSVGWAVITDEYKVPSKKFKVLGNTDRHSIKKNLIGALLFDSGETAEATRLKRTARRRYTRRKNRICYLQEIFSNEMAKVDDSFFHRLEESFLVEEDKKHERHPIFGNIVDEVAYHEKYPTIYHLRKKLVDSTDKADLRLIYLALAHMIKFRGHFLIEGDLNPDNSDVDKLFIQLVQTYNQLFEENPINASGVDAKAILSARLSKSRRLENLIAQLPGEKKNGLFGNLIALSLGLTPNFKSNFDLAEDAKLQLSKDTYDDDLDNLLAQIGDQYADLFLAAKNLSDAILLSDILRVNTEITKAPLSASMIKRYDEHHQDLTLLKALVRQQLPEKYKEIFFDQSKNGYAGYIDGGASQEEFYKFIKPILEKMDGTEELLVKLNREDLLRKQRTFDNGSIPHQIHLGELHAILRRQEDFYPFLKDNREKIEKILTFRIPYYVGPLARGNSRFAWMTRKSEETITPWNFEEVVDKGASAQSFIERMTNFDKNLPNEKVLPKHSLLYEYFTVYNELTKVKYVTEGMRKPAFLSGEQKKAIVDLLFKTNRKVTVKQLKEDYFKKIECFDSVEISGVEDRFNASLGTYHDLLKIIKDKDFLDNEENEDILEDIVLTLTLFEDREMIEERLKTYAHLFDDKVMKQLKRRRYTGWGRLSRKLINGIRDKQSGKTILDFLKSDGFANRNFMQLIHDDSLTFKEDIQKAQVSGQGDSLHEHIANLAGSPAIKKGILQTVKVVDELVKVMGRHKPENIVIEMARENQTTQKGQKNSRERMKRIEEGIKELGSQILKEHPVENTQLQNEKLYLYYLQNGRDMYVDQELDINRLSDYDVDHIVPQSFLKDDSIDNKVLTRSDKARGKSDNVPSEEVVKKMKNYWRQLLNAKLITQRKFDNLTKAERGGLSELDKAGFIKRQLVETRQITKHVAQILDSRMNTKYDENDKLIREVKVITLKSKLVSDFRKDFQFYKVREINNYHHAHDAYLNAVVGTALIKKYPKLESEFVYGDYKVYDVRKMIAKSEQEIGKATAKYFFYSNIMNFFKTEITLANGEIRKRPLIETNGETGEIVWDKGRDFATVRKVLSMPQVNIVKKTEVQTGGFSKESILPKRNSDKLIARKKDWDPKKYGGFDSPTVAYSVLVVAKVEKGKSKKLKSVKELLGITIMERSSFEKNPIDFLEAKGYKEVKKDLIIKLPKYSLFELENGRKRMLASAGELQKGNELALPSKYVNFLYLASHYEKLKGSPEDNEQKQLFVEQHKHYLDEIIEQISEFSKRVILADANLDKVLSAYNKHRDKPIREQAENIIHLFTLTNLGAPAAFKYFDTTIDRKRYTSTKEVLDATLIHQSITGLYETRIDLSQLGGDGGPAPGGGEAAAKGGTLQLDDEYRLYSPLVKPDQNIQFWLEQFPQAWAETAGMGLAKQVPPQVIQLKASATPVSVRQYPLSKEAQEGIRPHVQRLIQQGILVPVQSPWNTPLLPVRKPGTNDYRPVQDLREVNKRVQDIHPTVPNPYNLLCALPPQRSWYTVLDLKDAFFCLRLHPTSQPLFAFEWRDPGTGRTGQLTWTRLPQGFKNSPTIFNEALHRDLANFRIQHPQVTLLQYVDDLLLAGATKQDCLEGTKALLLELSDLGYRASAKKAQICRREVTYLGYSLRDGQRWLTEARKKTVVQIPAPTTAKQVREFLGTAGFCRLWIPGFATLAAPLYPLTKPKGEFSWAPEHQKAFDAIKKALLSAPALALPDVTKPFTLYVDERKGVARGVLTQTLGPWRRPVAYLSKKLDPVASGWPVCLKAIAAVAILVKDADKLTLGQNITVIAPHALENIVRQPPDRWMTNARMTHYQSLLLTERVTFAPPAALNPATLLPEETDEPVTHDCHQLLIEETGVRKDLTDIPLTGEVLTWFTDGSSYVVEGKRMAGAAVVDGTRTIWASSLPEGTSAQKAELMALTQALRLAEGKSINIYTDSRYAFATAHVHGAIYKQRGWLTSAGREIKNKEEILSLLEALHLPKRLAIIHCPGHQKAKDPISRGNQMADRVAKQAAQGVNLLAGKRTADGSEFEKRTADGSEFESPKKKAKVE

SEQ ID NO: 128 - protein, 2087 aa, synthetic construct
MPAAKRVKLDGGDKKYSIGLDIGTNSVGWAVITDEYKVPSKKFKVLGNTDRHSIKKNLIGALLFDSGETAEATRLKRTARRRYTRRKNRICYLQEIFSNEMAKVDDSFFHRLEESFLVEEDKKHERHPIFGNIVDEVAYHEKYPTIYHLRKKLVDSTDKADLRLIYLALAHMIKFRGHFLIEGDLNPDNSDVDKLFIQLVQTYNQLFEENPINASGVDAKAILSARLSKSRRLENLIAQLPGEKKNGLFGNLIALSLGLTPNFKSNFDLAEDAKLQLSKDTYDDDLDNLLAQIGDQYADLFLAAKNLSDAILLSDILRVNTEITKAPLSASMIKRYDEHHQDLTLLKALVRQQLPEKYKEIFFDQSKNGYAGYIDGGASQEEFYKFIKPILEKMDGTEELLVKLNREDLLRKQRTFDNGSIPHQIHLGELHAILRRQEDFYPFLKDNREKIEKILTFRIPYYVGPLARGNSRFAWMTRKSEETITPWNFEEVVDKGASAQSFIERMTNFDKNLPNEKVLPKHSLLYEYFTVYNELTKVKYVTEGMRKPAFLSGEQKKAIVDLLFKTNRKVTVKQLKEDYFKKIECFDSVEISGVEDRFNASLGTYHDLLKIIKDKDFLDNEENEDILEDIVLTLTLFEDREMIEERLKTYAHLFDDKVMKQLKRRRYTGWGRLSRKLINGIRDKQSGKTILDFLKSDGFANRNFMQLIHDDSLTFKEDIQKAQVSGQGDSLHEHIANLAGSPAIKKGILQTVKVVDELVKVMGRHKPENIVIEMARENQTTQKGQKNSRERMKRIEEGIKELGSQILKEHPVENTQLQNEKLYLYYLQNGRDMYVDQELDINRLSDYDVDHIVPQSFLKDDSIDNKVLTRSDKARGKSDNVPSEEVVKKMKNYWRQLLNAKLITQRKFDNLTKAERGGLSELDKAGFIKRQLVETRQITKHVAQILDSRMNTKYDENDKLIREVKVITLKSKLVSDFRKDFQFYKVREINNYHHAHDAYLNAVVGTALIKKYPKLESEFVYGDYKVYDVRKMIAKSEQEIGKATAKYFFYSNIMNFFKTEITLANGEIRKRPLIETNGETGEIVWDKGRDFATVRKVLSMPQVNIVKKTEVQTGGFSKESILPKRNSDKLIARKKDWDPKKYGGFDSPTVAYSVLVVAKVEKGKSKKLKSVKELLGITIMERSSFEKNPIDFLEAKGYKEVKKDLIIKLPKYSLFELENGRKRMLASAGELQKGNELALPSKYVNFLYLASHYEKLKGSPEDNEQKQLFVEQHKHYLDEIIEQISEFSKRVILADANLDKVLSAYNKHRDKPIREQAENIIHLFTLTNLGAPAAFKYFDTTIDRKRYTSTKEVLDATLIHQSITGLYETRIDLSQLGGDGGGSSEAAAKGGTLQLDDEYRLYSPLVKPDQNIQFWLEQFPQAWAETAGMGLAKQVPPQVIQLKASATPVSVRQYPLSKEAQEGIRPHVQRLIQQGILVPVQSPWNTPLLPVRKPGTNDYRPVQDLREVNKRVQDIHPTVPNPYNLLCALPPQRSWYTVLDLKDAFFCLRLHPTSQPLFAFEWRDPGTGRTGQLTWTRLPQGFKNSPTIFNEALHRDLANFRIQHPQVTLLQYVDDLLLAGATKQDCLEGTKALLLELSDLGYRASAKKAQICRREVTYLGYSLRDGQRWLTEARKKTVVQIPAPTTAKQVREFLGTAGFCRLWIPGFATLAAPLYPLTKPKGEFSWAPEHQKAFDAIKKALLSAPALALPDVTKPFTLYVDERKGVARGVLTQTLGPWRRPVAYLSKKLDPVASGWPVCLKAIAAVAILVKDADKLTLGQNITVIAPHALENIVRQPPDRWMTNARMTHYQSLLLTERVTFAPPAALNPATLLPEETDEPVTHDCHQLLIEETGVRKDLTDIPLTGEVLTWFTDGSSYVVEGKRMAGAAVVDGTRTIWASSLPEGTSAQKAELMALTQALRLAEGKSINIYTDSRYAFATAHVHGAIYKQRGWLTSAGREIKNKEEILSLLEALHLPKRLAIIHCPGHQKAKDPISRGNQMADRVAKQAAQGVNLLAGKRTADGSEFEKRTADGSEFESPKKKAKVE

SEQ ID NO: 129 - protein, 2088 aa, synthetic construct
MPAAKRVKLDGGDKKYSIGLDIGTNSVGWAVITDEYKVPSKKFKVLGNTDRHSIKKNLIGALLFDSGETAEATRLKRTARRRYTRRKNRICYLQEIFSNEMAKVDDSFFHRLEESFLVEEDKKHERHPIFGNIVDEVAYHEKYPTIYHLRKKLVDSTDKADLRLIYLALAHMIKFRGHFLIEGDLNPDNSDVDKLFIQLVQTYNQLFEENPINASGVDAKAILSARLSKSRRLENLIAQLPGEKKNGLFGNLIALSLGLTPNFKSNFDLAEDAKLQLSKDTYDDDLDNLLAQIGDQYADLFLAAKNLSDAILLSDILRVNTEITKAPLSASMIKRYDEHHQDLTLLKALVRQQLPEKYKEIFFDQSKNGYAGYIDGGASQEEFYKFIKPILEKMDGTEELLVKLNREDLLRKQRTFDNGSIPHQIHLGELHAILRRQEDFYPFLKDNREKIEKILTFRIPYYVGPLARGNSRFAWMTRKSEETITPWNFEEVVDKGASAQSFIERMTNFDKNLPNEKVLPKHSLLYEYFTVYNELTKVKYVTEGMRKPAFLSGEQKKAIVDLLFKTNRKVTVKQLKEDYFKKIECFDSVEISGVEDRFNASLGTYHDLLKIIKDKDFLDNEENEDILEDIVLTLTLFEDREMIEERLKTYAHLFDDKVMKQLKRRRYTGWGRLSRKLINGIRDKQSGKTILDFLKSDGFANRNFMQLIHDDSLTFKEDIQKAQVSGQGDSLHEHIANLAGSPAIKKGILQTVKVVDELVKVMGRHKPENIVIEMARENQTTQKGQKNSRERMKRIEEGIKELGSQILKEHPVENTQLQNEKLYLYYLQNGRDMYVDQELDINRLSDYDVDHIVPQSFLKDDSIDNKVLTRSDKARGKSDNVPSEEVVKKMKNYWRQLLNAKLITQRKFDNLTKAERGGLSELDKAGFIKRQLVETRQITKHVAQILDSRMNTKYDENDKLIREVKVITLKSKLVSDFRKDFQFYKVREINNYHHAHDAYLNAVVGTALIKKYPKLESEFVYGDYKVYDVRKMIAKSEQEIGKATAKYFFYSNIMNFFKTEITLANGEIRKRPLIETNGETGEIVWDKGRDFATVRKVLSMPQVNIVKKTEVQTGGFSKESILPKRNSDKLIARKKDWDPKKYGGFDSPTVAYSVLVVAKVEKGKSKKLKSVKELLGITIMERSSFEKNPIDFLEAKGYKEVKKDLIIKLPKYSLFELENGRKRMLASAGELQKGNELALPSKYVNFLYLASHYEKLKGSPEDNEQKQLFVEQHKHYLDEIIEQISEFSKRVILADANLDKVLSAYNKHRDKPIREQAENIIHLFTLTNLGAPAAFKYFDTTIDRKRYTSTKEVLDATLIHQSITGLYETRIDLSQLGGDGGPAPGSSGGGGGTLQLDDEYRLYSPLVKPDQNIQFWLEQFPQAWAETAGMGLAKQVPPQVIQLKASATPVSVRQYPLSKEAQEGIRPHVQRLIQQGILVPVQSPWNTPLLPVRKPGTNDYRPVQDLREVNKRVQDIHPTVPNPYNLLCALPPQRSWYTVLDLKDAFFCLRLHPTSQPLFAFEWRDPGTGRTGQLTWTRLPQGFKNSPTIFNEALHRDLANFRIQHPQVTLLQYVDDLLLAGATKQDCLEGTKALLLELSDLGYRASAKKAQICRREVTYLGYSLRDGQRWLTEARKKTVVQIPAPTTAKQVREFLGTAGFCRLWIPGFATLAAPLYPLTKPKGEFSWAPEHQKAFDAIKKALLSAPALALPDVTKPFTLYVDERKGVARGVLTQTLGPWRRPVAYLSKKLDPVASGWPVCLKAIAAVAILVKDADKLTLGQNITVIAPHALENIVRQPPDRWMTNARMTHYQSLLLTERVTFAPPAALNPATLLPEETDEPVTHDCHQLLIEETGVRKDLTDIPLTGEVLTWFTDGSSYVVEGKRMAGAAVVDGTRTIWASSLPEGTSAQKAELMALTQALRLAEGKSINIYTDSRYAFATAHVHGAIYKQRGWLTSAGREIKNKEEILSLLEALHLPKRLAIIHCPGHQKAKDPISRGNQMADRVAKQAAQGVNLLAGKRTADGSEFEKRTADGSEFESPKKKAKVE

SEQ ID NO: 130 - protein, 2088 aa, synthetic construct
MPAAKRVKLDGGDKKYSIGLDIGTNSVGWAVITDEYKVPSKKFKVLGNTDRHSIKKNLIGALLFDSGETAEATRLKRTARRRYTRRKNRICYLQEIFSNEMAKVDDSFFHRLEESFLVEEDKKHERHPIFGNIVDEVAYHEKYPTIYHLRKKLVDSTDKADLRLIYLALAHMIKFRGHFLIEGDLNPDNSDVDKLFIQLVQTYNQLFEENPINASGVDAKAILSARLSKSRRLENLIAQLPGEKKNGLFGNLIALSLGLTPNFKSNFDLAEDAKLQLSKDTYDDDLDNLLAQIGDQYADLFLAAKNLSDAILLSDILRVNTEITKAPLSASMIKRYDEHHQDLTLLKALVRQQLPEKYKEIFFDQSKNGYAGYIDGGASQEEFYKFIKPILEKMDGTEELLVKLNREDLLRKQRTFDNGSIPHQIHLGELHAILRRQEDFYPFLKDNREKIEKILTFRIPYYVGPLARGNSRFAWMTRKSEETITPWNFEEVVDKGASAQSFIERMTNFDKNLPNEKVLPKHSLLYEYFTVYNELTKVKYVTEGMRKPAFLSGEQKKAIVDLLFKTNRKVTVKQLKEDYFKKIECFDSVEISGVEDRFNASLGTYHDLLKIIKDKDFLDNEENEDILEDIVLTLTLFEDREMIEERLKTYAHLFDDKVMKQLKRRRYTGWGRLSRKLINGIRDKQSGKTILDFLKSDGFANRNFMQLIHDDSLTFKEDIQKAQVSGQGDSLHEHIANLAGSPAIKKGILQTVKVVDELVKVMGRHKPENIVIEMARENQTTQKGQKNSRERMKRIEEGIKELGSQILKEHPVENTQLQNEKLYLYYLQNGRDMYVDQELDINRLSDYDVDHIVPQSFLKDDSIDNKVLTRSDKARGKSDNVPSEEVVKKMKNYWRQLLNAKLITQRKFDNLTKAERGGLSELDKAGFIKRQLVETRQITKHVAQILDSRMNTKYDENDKLIREVKVITLKSKLVSDFRKDFQFYKVREINNYHHAHDAYLNAVVGTALIKKYPKLESEFVYGDYKVYDVRKMIAKSEQEIGKATAKYFFYSNIMNFFKTEITLANGEIRKRPLIETNGETGEIVWDKGRDFATVRKVLSMPQVNIVKKTEVQTGGFSKESILPKRNSDKLIARKKDWDPKKYGGFDSPTVAYSVLVVAKVEKGKSKKLKSVKELLGITIMERSSFEKNPIDFLEAKGYKEVKKDLIIKLPKYSLFELENGRKRMLASAGELQKGNELALPSKYVNFLYLASHYEKLKGSPEDNEQKQLFVEQHKHYLDEIIEQISEFSKRVILADANLDKVLSAYNKHRDKPIREQAENIIHLFTLTNLGAPAAFKYFDTTIDRKRYTSTKEVLDATLIHQSITGLYETRIDLSQLGGDGGGGSGGSGGSGGTLQLDDEYRLYSPLVKPDQNIQFWLEQFPQAWAETAGMGLAKQVPPQVIQLKASATPVSVRQYPLSKEAQEGIRPHVQRLIQQGILVPVQSPWNTPLLPVRKPGTNDYRPVQDLREVNKRVQDIHPTVPNPYNLLCALPPQRSWYTVLDLKDAFFCLRLHPTSQPLFAFEWRDPGTGRTGQLTWTRLPQGFKNSPTIFNEALHRDLANFRIQHPQVTLLQYVDDLLLAGATKQDCLEGTKALLLELSDLGYRASAKKAQICRREVTYLGYSLRDGQRWLTEARKKTVVQIPAPTTAKQVREFLGTAGFCRLWIPGFATLAAPLYPLTKPKGEFSWAPEHQKAFDAIKKALLSAPALALPDVTKPFTLYVDERKGVARGVLTQTLGPWRRPVAYLSKKLDPVASGWPVCLKAIAAVAILVKDADKLTLGQNITVIAPHALENIVRQPPDRWMTNARMTHYQSLLLTERVTFAPPAALNPATLLPEETDEPVTHDCHQLLIEETGVRKDLTDIPLTGEVLTWFTDGSSYVVEGKRMAGAAVVDGTRTIWASSLPEGTSAQKAELMALTQALRLAEGKSINIYTDSRYAFATAHVHGAIYKQRGWLTSAGREIKNKEEILSLLEALHLPKRLAIIHCPGHQKAKDPISRGNQMADRVAKQAAQGVNLLAGKRTADGSEFEKRTADGSEFESPKKKAKVE

SEQ ID NO: 131 - protein, 2088 aa, synthetic construct
MPAAKRVKLDGGDKKYSIGLDIGTNSVGWAVITDEYKVPSKKFKVLGNTDRHSIKKNLIGALLFDSGETAEATRLKRTARRRYTRRKNRICYLQEIFSNEMAKVDDSFFHRLEESFLVEEDKKHERHPIFGNIVDEVAYHEKYPTIYHLRKKLVDSTDKADLRLIYLALAHMIKFRGHFLIEGDLNPDNSDVDKLFIQLVQTYNQLFEENPINASGVDAKAILSARLSKSRRLENLIAQLPGEKKNGLFGNLIALSLGLTPNFKSNFDLAEDAKLQLSKDTYDDDLDNLLAQIGDQYADLFLAAKNLSDAILLSDILRVNTEITKAPLSASMIKRYDEHHQDLTLLKALVRQQLPEKYKEIFFDQSKNGYAGYIDGGASQEEFYKFIKPILEKMDGTEELLVKLNREDLLRKQRTFDNGSIPHQIHLGELHAILRRQEDFYPFLKDNREKIEKILTFRIPYYVGPLARGNSRFAWMTRKSEETITPWNFEEVVDKGASAQSFIERMTNFDKNLPNEKVLPKHSLLYEYFTVYNELTKVKYVTEGMRKPAFLSGEQKKAIVDLLFKTNRKVTVKQLKEDYFKKIECFDSVEISGVEDRFNASLGTYHDLLKIIKDKDFLDNEENEDILEDIVLTLTLFEDREMIEERLKTYAHLFDDKVMKQLKRRRYTGWGRLSRKLINGIRDKQSGKTILDFLKSDGFANRNFMQLIHDDSLTFKEDIQKAQVSGQGDSLHEHIANLAGSPAIKKGILQTVKVVDELVKVMGRHKPENIVIEMARENQTTQKGQKNSRERMKRIEEGIKELGSQILKEHPVENTQLQNEKLYLYYLQNGRDMYVDQELDINRLSDYDVDHIVPQSFLKDDSIDNKVLTRSDKARGKSDNVPSEEVVKKMKNYWRQLLNAKLITQRKFDNLTKAERGGLSELDKAGFIKRQLVETRQITKHVAQILDSRMNTKYDENDKLIREVKVITLKSKLVSDFRKDFQFYKVREINNYHHAHDAYLNAVVGTALIKKYPKLESEFVYGDYKVYDVRKMIAKSEQEIGKATAKYFFYSNIMNFFKTEITLANGEIRKRPLIETNGETGEIVWDKGRDFATVRKVLSMPQVNIVKKTEVQTGGFSKESILPKRNSDKLIARKKDWDPKKYGGFDSPTVAYSVLVVAKVEKGKSKKLKSVKELLGITIMERSSFEKNPIDFLEAKGYKEVKKDLIIKLPKYSLFELENGRKRMLASAGELQKGNELALPSKYVNFLYLASHYEKLKGSPEDNEQKQLFVEQHKHYLDEIIEQISEFSKRVILADANLDKVLSAYNKHRDKPIREQAENIIHLFTLTNLGAPAAFKYFDTTIDRKRYTSTKEVLDATLIHQSITGLYETRIDLSQLGGDGGGGSPAPGGGGGTLQLDDEYRLYSPLVKPDQNIQFWLEQFPQAWAETAGMGLAKQVPPQVIQLKASATPVSVRQYPLSKEAQEGIRPHVQRLIQQGILVPVQSPWNTPLLPVRKPGTNDYRPVQDLREVNKRVQDIHPTVPNPYNLLCALPPQRSWYTVLDLKDAFFCLRLHPTSQPLFAFEWRDPGTGRTGQLTWTRLPQGFKNSPTIFNEALHRDLANFRIQHPQVTLLQYVDDLLLAGATKQDCLEGTKALLLELSDLGYRASAKKAQICRREVTYLGYSLRDGQRWLTEARKKTVVQIPAPTTAKQVREFLGTAGFCRLWIPGFATLAAPLYPLTKPKGEFSWAPEHQKAFDAIKKALLSAPALALPDVTKPFTLYVDERKGVARGVLTQTLGPWRRPVAYLSKKLDPVASGWPVCLKAIAAVAILVKDADKLTLGQNITVIAPHALENIVRQPPDRWMTNARMTHYQSLLLTERVTFAPPAALNPATLLPEETDEPVTHDCHQLLIEETGVRKDLTDIPLTGEVLTWFTDGSSYVVEGKRMAGAAVVDGTRTIWASSLPEGTSAQKAELMALTQALRLAEGKSINIYTDSRYAFATAHVHGAIYKQRGWLTSAGREIKNKEEILSLLEALHLPKRLAIIHCPGHQKAKDPISRGNQMADRVAKQAAQGVNLLAGKRTADGSEFEKRTADGSEFESPKKKAKVE

SEQ ID NO: 132 - protein, 2090 aa, synthetic construct
MPAAKRVKLDGGDKKYSIGLDIGTNSVGWAVITDEYKVPSKKFKVLGNTDRHSIKKNLIGALLFDSGETAEATRLKRTARRRYTRRKNRICYLQEIFSNEMAKVDDSFFHRLEESFLVEEDKKHERHPIFGNIVDEVAYHEKYPTIYHLRKKLVDSTDKADLRLIYLALAHMIKFRGHFLIEGDLNPDNSDVDKLFIQLVQTYNQLFEENPINASGVDAKAILSARLSKSRRLENLIAQLPGEKKNGLFGNLIALSLGLTPNFKSNFDLAEDAKLQLSKDTYDDDLDNLLAQIGDQYADLFLAAKNLSDAILLSDILRVNTEITKAPLSASMIKRYDEHHQDLTLLKALVRQQLPEKYKEIFFDQSKNGYAGYIDGGASQEEFYKFIKPILEKMDGTEELLVKLNREDLLRKQRTFDNGSIPHQIHLGELHAILRRQEDFYPFLKDNREKIEKILTFRIPYYVGPLARGNSRFAWMTRKSEETITPWNFEEVVDKGASAQSFIERMTNFDKNLPNEKVLPKHSLLYEYFTVYNELTKVKYVTEGMRKPAFLSGEQKKAIVDLLFKTNRKVTVKQLKEDYFKKIECFDSVEISGVEDRFNASLGTYHDLLKIIKDKDFLDNEENEDILEDIVLTLTLFEDREMIEERLKTYAHLFDDKVMKQLKRRRYTGWGRLSRKLINGIRDKQSGKTILDFLKSDGFANRNFMQLIHDDSLTFKEDIQKAQVSGQGDSLHEHIANLAGSPAIKKGILQTVKVVDELVKVMGRHKPENIVIEMARENQTTQKGQKNSRERMKRIEEGIKELGSQILKEHPVENTQLQNEKLYLYYLQNGRDMYVDQELDINRLSDYDVDHIVPQSFLKDDSIDNKVLTRSDKARGKSDNVPSEEVVKKMKNYWRQLLNAKLITQRKFDNLTKAERGGLSELDKAGFIKRQLVETRQITKHVAQILDSRMNTKYDENDKLIREVKVITLKSKLVSDFRKDFQFYKVREINNYHHAHDAYLNAVVGTALIKKYPKLESEFVYGDYKVYDVRKMIAKSEQEIGKATAKYFFYSNIMNFFKTEITLANGEIRKRPLIETNGETGEIVWDKGRDFATVRKVLSMPQVNIVKKTEVQTGGFSKESILPKRNSDKLIARKKDWDPKKYGGFDSPTVAYSVLVVAKVEKGKSKKLKSVKELLGITIMERSSFEKNPIDFLEAKGYKEVKKDLIIKLPKYSLFELENGRKRMLASAGELQKGNELALPSKYVNFLYLASHYEKLKGSPEDNEQKQLFVEQHKHYLDEIIEQISEFSKRVILADANLDKVLSAYNKHRDKPIREQAENIIHLFTLTNLGAPAAFKYFDTTIDRKRYTSTKEVLDATLIHQSITGLYETRIDLSQLGGDGGPAPEAAAKGSSGGTLQLDDEYRLYSPLVKPDQNIQFWLEQFPQAWAETAGMGLAKQVPPQVIQLKASATPVSVRQYPLSKEAQEGIRPHVQRLIQQGILVPVQSPWNTPLLPVRKPGTNDYRPVQDLREVNKRVQDIHPTVPNPYNLLCALPPQRSWYTVLDLKDAFFCLRLHPTSQPLFAFEWRDPGTGRTGQLTWTRLPQGFKNSPTIFNEALHRDLANFRIQHPQVTLLQYVDDLLLAGATKQDCLEGTKALLLELSDLGYRASAKKAQICRREVTYLGYSLRDGQRWLTEARKKTVVQIPAPTTAKQVREFLGTAGFCRLWIPGFATLAAPLYPLTKPKGEFSWAPEHQKAFDAIKKALLSAPALALPDVTKPFTLYVDERKGVARGVLTQTLGPWRRPVAYLSKKLDPVASGWPVCLKAIAAVAILVKDADKLTLGQNITVIAPHALENIVRQPPDRWMTNARMTHYQSLLLTERVTFAPPAALNPATLLPEETDEPVTHDCHQLLIEETGVRKDLTDIPLTGEVLTWFTDGSSYVVEGKRMAGAAVVDGTRTIWASSLPEGTSAQKAELMALTQALRLAEGKSINIYTDSRYAFATAHVHGAIYKQRGWLTSAGREIKNKEEILSLLEALHLPKRLAIIHCPGHQKAKDPISRGNQMADRVAKQAAQGVNLLAGKRTADGSEFEKRTADGSEFESPKKKAKVE

SEQ ID NO: 133 - protein, 2090 aa, synthetic construct
MPAAKRVKLDGGDKKYSIGLDIGTNSVGWAVITDEYKVPSKKFKVLGNTDRHSIKKNLIGALLFDSGETAEATRLKRTARRRYTRRKNRICYLQEIFSNEMAKVDDSFFHRLEESFLVEEDKKHERHPIFGNIVDEVAYHEKYPTIYHLRKKLVDSTDKADLRLIYLALAHMIKFRGHFLIEGDLNPDNSDVDKLFIQLVQTYNQLFEENPINASGVDAKAILSARLSKSRRLENLIAQLPGEKKNGLFGNLIALSLGLTPNFKSNFDLAEDAKLQLSKDTYDDDLDNLLAQIGDQYADLFLAAKNLSDAILLSDILRVNTEITKAPLSASMIKRYDEHHQDLTLLKALVRQQLPEKYKEIFFDQSKNGYAGYIDGGASQEEFYKFIKPILEKMDGTEELLVKLNREDLLRKQRTFDNGSIPHQIHLGELHAILRRQEDFYPFLKDNREKIEKILTFRIPYYVGPLARGNSRFAWMTRKSEETITPWNFEEVVDKGASAQSFIERMTNFDKNLPNEKVLPKHSLLYEYFTVYNELTKVKYVTEGMRKPAFLSGEQKKAIVDLLFKTNRKVTVKQLKEDYFKKIECFDSVEISGVEDRFNASLGTYHDLLKIIKDKDFLDNEENEDILEDIVLTLTLFEDREMIEERLKTYAHLFDDKVMKQLKRRRYTGWGRLSRKLINGIRDKQSGKTILDFLKSDGFANRNFMQLIHDDSLTFKEDIQKAQVSGQGDSLHEHIANLAGSPAIKKGILQTVKVVDELVKVMGRHKPENIVIEMARENQTTQKGQKNSRERMKRIEEGIKELGSQILKEHPVENTQLQNEKLYLYYLQNGRDMYVDQELDINRLSDYDVDHIVPQSFLKDDSIDNKVLTRSDKARGKSDNVPSEEVVKKMKNYWRQLLNAKLITQRKFDNLTKAERGGLSELDKAGFIKRQLVETRQITKHVAQILDSRMNTKYDENDKLIREVKVITLKSKLVSDFRKDFQFYKVREINNYHHAHDAYLNAVVGTALIKKYPKLESEFVYGDYKVYDVRKMIAKSEQEIGKATAKYFFYSNIMNFFKTEITLANGEIRKRPLIETNGETGEIVWDKGRDFATVRKVLSMPQVNIVKKTEVQTGGFSKESILPKRNSDKLIARKKDWDPKKYGGFDSPTVAYSVLVVAKVEKGKSKKLKSVKELLGITIMERSSFEKNPIDFLEAKGYKEVKKDLIIKLPKYSLFELENGRKRMLASAGELQKGNELALPSKYVNFLYLASHYEKLKGSPEDNEQKQLFVEQHKHYLDEIIEQISEFSKRVILADANLDKVLSAYNKHRDKPIREQAENIIHLFTLTNLGAPAAFKYFDTTIDRKRYTSTKEVLDATLIHQSITGLYETRIDLSQLGGDGGGSSEAAAKGGGGGTLQLDDEYRLYSPLVKPDQNIQFWLEQFPQAWAETAGMGLAKQVPPQVIQLKASATPVSVRQYPLSKEAQEGIRPHVQRLIQQGILVPVQSPWNTPLLPVRKPGTNDYRPVQDLREVNKRVQDIHPTVPNPYNLLCALPPQRSWYTVLDLKDAFFCLRLHPTSQPLFAFEWRDPGTGRTGQLTWTRLPQGFKNSPTIFNEALHRDLANFRIQHPQVTLLQYVDDLLLAGATKQDCLEGTKALLLELSDLGYRASAKKAQICRREVTYLGYSLRDGQRWLTEARKKTVVQIPAPTTAKQVREFLGTAGFCRLWIPGFATLAAPLYPLTKPKGEFSWAPEHQKAFDAIKKALLSAPALALPDVTKPFTLYVDERKGVARGVLTQTLGPWRRPVAYLSKKLDPVASGWPVCLKAIAAVAILVKDADKLTLGQNITVIAPHALENIVRQPPDRWMTNARMTHYQSLLLTERVTFAPPAALNPATLLPEETDEPVTHDCHQLLIEETGVRKDLTDIPLTGEVLTWFTDGSSYVVEGKRMAGAAVVDGTRTIWASSLPEGTSAQKAELMALTQALRLAEGKSINIYTDSRYAFATAHVHGAIYKQRGWLTSAGREIKNKEEILSLLEALHLPKRLAIIHCPGHQKAKDPISRGNQMADRVAKQAAQGVNLLAGKRTADGSEFEKRTADGSEFESPKKKAKVE

SEQ ID NO: 134 - protein, 2088 aa, synthetic construct
MPAAKRVKLDGGDKKYSIGLDIGTNSVGWAVITDEYKVPSKKFKVLGNTDRHSIKKNLIGALLFDSGETAEATRLKRTARRRYTRRKNRICYLQEIFSNEMAKVDDSFFHRLEESFLVEEDKKHERHPIFGNIVDEVAYHEKYPTIYHLRKKLVDSTDKADLRLIYLALAHMIKFRGHFLIEGDLNPDNSDVDKLFIQLVQTYNQLFEENPINASGVDAKAILSARLSKSRRLENLIAQLPGEKKNGLFGNLIALSLGLTPNFKSNFDLAEDAKLQLSKDTYDDDLDNLLAQIGDQYADLFLAAKNLSDAILLSDILRVNTEITKAPLSASMIKRYDEHHQDLTLLKALVRQQLPEKYKEIFFDQSKNGYAGYIDGGASQEEFYKFIKPILEKMDGTEELLVKLNREDLLRKQRTFDNGSIPHQIHLGELHAILRRQEDFYPFLKDNREKIEKILTFRIPYYVGPLARGNSRFAWMTRKSEETITPWNFEEVVDKGASAQSFIERMTNFDKNLPNEKVLPKHSLLYEYFTVYNELTKVKYVTEGMRKPAFLSGEQKKAIVDLLFKTNRKVTVKQLKEDYFKKIECFDSVEISGVEDRFNASLGTYHDLLKIIKDKDFLDNEENEDILEDIVLTLTLFEDREMIEERLKTYAHLFDDKVMKQLKRRRYTGWGRLSRKLINGIRDKQSGKTILDFLKSDGFANRNFMQLIHDDSLTFKEDIQKAQVSGQGDSLHEHIANLAGSPAIKKGILQTVKVVDELVKVMGRHKPENIVIEMARENQTTQKGQKNSRERMKRIEEGIKELGSQILKEHPVENTQLQNEKLYLYYLQNGRDMYVDQELDINRLSDYDVDHIVPQSFLKDDSIDNKVLTRSDKARGKSDNVPSEEVVKKMKNYWRQLLNAKLITQRKFDNLTKAERGGLSELDKAGFIKRQLVETRQITKHVAQILDSRMNTKYDENDKLIREVKVITLKSKLVSDFRKDFQFYKVREINNYHHAHDAYLNAVVGTALIKKYPKLESEFVYGDYKVYDVRKMIAKSEQEIGKATAKYFFYSNIMNFFKTEITLANGEIRKRPLIETNGETGEIVWDKGRDFATVRKVLSMPQVNIVKKTEVQTGGFSKESILPKRNSDKLIARKKDWDPKKYGGFDSPTVAYSVLVVAKVEKGKSKKLKSVKELLGITIMERSSFEKNPIDFLEAKGYKEVKKDLIIKLPKYSLFELENGRKRMLASAGELQKGNELALPSKYVNFLYLASHYEKLKGSPEDNEQKQLFVEQHKHYLDEIIEQISEFSKRVILADANLDKVLSAYNKHRDKPIREQAENIIHLFTLTNLGAPAAFKYFDTTIDRKRYTSTKEVLDATLIHQSITGLYETRIDLSQLGGDGGPAPGSSGGSGGTLQLDDEYRLYSPLVKPDQNIQFWLEQFPQAWAETAGMGLAKQVPPQVIQLKASATPVSVRQYPLSKEAQEGIRPHVQRLIQQGILVPVQSPWNTPLLPVRKPGTNDYRPVQDLREVNKRVQDIHPTVPNPYNLLCALPPQRSWYTVLDLKDAFFCLRLHPTSQPLFAFEWRDPGTGRTGQLTWTRLPQGFKNSPTIFNEALHRDLANFRIQHPQVTLLQYVDDLLLAGATKQDCLEGTKALLLELSDLGYRASAKKAQICRREVTYLGYSLRDGQRWLTEARKKTVVQIPAPTTAKQVREFLGTAGFCRLWIPGFATLAAPLYPLTKPKGEFSWAPEHQKAFDAIKKALLSAPALALPDVTKPFTLYVDERKGVARGVLTQTLGPWRRPVAYLSKKLDPVASGWPVCLKAIAAVAILVKDADKLTLGQNITVIAPHALENIVRQPPDRWMTNARMTHYQSLLLTERVTFAPPAALNPATLLPEETDEPVTHDCHQLLIEETGVRKDLTDIPLTGEVLTWFTDGSSYVVEGKRMAGAAVVDGTRTIWASSLPEGTSAQKAELMALTQALRLAEGKSINIYTDSRYAFATAHVHGAIYKQRGWLTSAGREIKNKEEILSLLEALHLPKRLAIIHCPGHQKAKDPISRGNQMADRVAKQAAQGVNLLAGKRTADGSEFEKRTADGSEFESPKKKAKVE

SEQ ID NO: 135 - protein, 2088 aa, synthetic construct
MPAAKRVKLDGGDKKYSIGLDIGTNSVGWAVITDEYKVPSKKFKVLGNTDRHSIKKNLIGALLFDSGETAEATRLKRTARRRYTRRKNRICYLQEIFSNEMAKVDDSFFHRLEESFLVEEDKKHERHPIFGNIVDEVAYHEKYPTIYHLRKKLVDSTDKADLRLIYLALAHMIKFRGHFLIEGDLNPDNSDVDKLFIQLVQTYNQLFEENPINASGVDAKAILSARLSKSRRLENLIAQLPGEKKNGLFGNLIALSLGLTPNFKSNFDLAEDAKLQLSKDTYDDDLDNLLAQIGDQYADLFLAAKNLSDAILLSDILRVNTEITKAPLSASMIKRYDEHHQDLTLLKALVRQQLPEKYKEIFFDQSKNGYAGYIDGGASQEEFYKFIKPILEKMDGTEELLVKLNREDLLRKQRTFDNGSIPHQIHLGELHAILRRQEDFYPFLKDNREKIEKILTFRIPYYVGPLARGNSRFAWMTRKSEETITPWNFEEVVDKGASAQSFIERMTNFDKNLPNEKVLPKHSLLYEYFTVYNELTKVKYVTEGMRKPAFLSGEQKKAIVDLLFKTNRKVTVKQLKEDYFKKIECFDSVEISGVEDRFNASLGTYHDLLKIIKDKDFLDNEENEDILEDIVLTLTLFEDREMIEERLKTYAHLFDDKVMKQLKRRRYTGWGRLSRKLINGIRDKQSGKTILDFLKSDGFANRNFMQLIHDDSLTFKEDIQKAQVSGQGDSLHEHIANLAGSPAIKKGILQTVKVVDELVKVMGRHKPENIVIEMARENQTTQKGQKNSRERMKRIEEGIKELGSQILKEHPVENTQLQNEKLYLYYLQNGRDMYVDQELDINRLSDYDVDHIVPQSFLKDDSIDNKVLTRSDKARGKSDNVPSEEVVKKMKNYWRQLLNAKLITQRKFDNLTKAERGGLSELDKAGFIKRQLVETRQITKHVAQILDSRMNTKYDENDKLIREVKVITLKSKLVSDFRKDFQFYKVREINNYHHAHDAYLNAVVGTALIKKYPKLESEFVYGDYKVYDVRKMIAKSEQEIGKATAKYFFYSNIMNFFKTEITLANGEIRKRPLIETNGETGEIVWDKGRDFATVRKVLSMPQVNIVKKTEVQTGGFSKESILPKRNSDKLIARKKDWDPKKYGGFDSPTVAYSVLVVAKVEKGKSKKLKSVKELLGITIMERSSFEKNPIDFLEAKGYKEVKKDLIIKLPKYSLFELENGRKRMLASAGELQKGNELALPSKYVNFLYLASHYEKLKGSPEDNEQKQLFVEQHKHYLDEIIEQISEFSKRVILADANLDKVLSAYNKHRDKPIREQAENIIHLFTLTNLGAPAAFKYFDTTIDRKRYTSTKEVLDATLIHQSITGLYETRIDLSQLGGDGGPAPGGSGSSGGTLQLDDEYRLYSPLVKPDQNIQFWLEQFPQAWAETAGMGLAKQVPPQVIQLKASATPVSVRQYPLSKEAQEGIRPHVQRLIQQGILVPVQSPWNTPLLPVRKPGTNDYRPVQDLREVNKRVQDIHPTVPNPYNLLCALPPQRSWYTVLDLKDAFFCLRLHPTSQPLFAFEWRDPGTGRTGQLTWTRLPQGFKNSPTIFNEALHRDLANFRIQHPQVTLLQYVDDLLLAGATKQDCLEGTKALLLELSDLGYRASAKKAQICRREVTYLGYSLRDGQRWLTEARKKTVVQIPAPTTAKQVREFLGTAGFCRLWIPGFATLAAPLYPLTKPKGEFSWAPEHQKAFDAIKKALLSAPALALPDVTKPFTLYVDERKGVARGVLTQTLGPWRRPVAYLSKKLDPVASGWPVCLKAIAAVAILVKDADKLTLGQNITVIAPHALENIVRQPPDRWMTNARMTHYQSLLLTERVTFAPPAALNPATLLPEETDEPVTHDCHQLLIEETGVRKDLTDIPLTGEVLTWFTDGSSYVVEGKRMAGAAVVDGTRTIWASSLPEGTSAQKAELMALTQALRLAEGKSINIYTDSRYAFATAHVHGAIYKQRGWLTSAGREIKNKEEILSLLEALHLPKRLAIIHCPGHQKAKDPISRGNQMADRVAKQAAQGVNLLAGKRTADGSEFEKRTADGSEFESPKKKAKVE

SEQ ID NO: 136 - protein, 2090 aa, synthetic construct
MPAAKRVKLDGGDKKYSIGLDIGTNSVGWAVITDEYKVPSKKFKVLGNTDRHSIKKNLIGALLFDSGETAEATRLKRTARRRYTRRKNRICYLQEIFSNEMAKVDDSFFHRLEESFLVEEDKKHERHPIFGNIVDEVAYHEKYPTIYHLRKKLVDSTDKADLRLIYLALAHMIKFRGHFLIEGDLNPDNSDVDKLFIQLVQTYNQLFEENPINASGVDAKAILSARLSKSRRLENLIAQLPGEKKNGLFGNLIALSLGLTPNFKSNFDLAEDAKLQLSKDTYDDDLDNLLAQIGDQYADLFLAAKNLSDAILLSDILRVNTEITKAPLSASMIKRYDEHHQDLTLLKALVRQQLPEKYKEIFFDQSKNGYAGYIDGGASQEEFYKFIKPILEKMDGTEELLVKLNREDLLRKQRTFDNGSIPHQIHLGELHAILRRQEDFYPFLKDNREKIEKILTFRIPYYVGPLARGNSRFAWMTRKSEETITPWNFEEVVDKGASAQSFIERMTNFDKNLPNEKVLPKHSLLYEYFTVYNELTKVKYVTEGMRKPAFLSGEQKKAIVDLLFKTNRKVTVKQLKEDYFKKIECFDSVEISGVEDRFNASLGTYHDLLKIIKDKDFLDNEENEDILEDIVLTLTLFEDREMIEERLKTYAHLFDDKVMKQLKRRRYTGWGRLSRKLINGIRDKQSGKTILDFLKSDGFANRNFMQLIHDDSLTFKEDIQKAQVSGQGDSLHEHIANLAGSPAIKKGILQTVKVVDELVKVMGRHKPENIVIEMARENQTTQKGQKNSRERMKRIEEGIKELGSQILKEHPVENTQLQNEKLYLYYLQNGRDMYVDQELDINRLSDYDVDHIVPQSFLKDDSIDNKVLTRSDKARGKSDNVPSEEVVKKMKNYWRQLLNAKLITQRKFDNLTKAERGGLSELDKAGFIKRQLVETRQITKHVAQILDSRMNTKYDENDKLIREVKVITLKSKLVSDFRKDFQFYKVREINNYHHAHDAYLNAVVGTALIKKYPKLESEFVYGDYKVYDVRKMIAKSEQEIGKATAKYFFYSNIMNFFKTEITLANGEIRKRPLIETNGETGEIVWDKGRDFATVRKVLSMPQVNIVKKTEVQTGGFSKESILPKRNSDKLIARKKDWDPKKYGGFDSPTVAYSVLVVAKVEKGKSKKLKSVKELLGITIMERSSFEKNPIDFLEAKGYKEVKKDLIIKLPKYSLFELENGRKRMLASAGELQKGNELALPSKYVNFLYLASHYEKLKGSPEDNEQKQLFVEQHKHYLDEIIEQISEFSKRVILADANLDKVLSAYNKHRDKPIREQAENIIHLFTLTNLGAPAAFKYFDTTIDRKRYTSTKEVLDATLIHQSITGLYETRIDLSQLGGDGGEAAAKGGSGSSGGTLQLDDEYRLYSPLVKPDQNIQFWLEQFPQAWAETAGMGLAKQVPPQVIQLKASATPVSVRQYPLSKEAQEGIRPHVQRLIQQGILVPVQSPWNTPLLPVRKPGTNDYRPVQDLREVNKRVQDIHPTVPNPYNLLCALPPQRSWYTVLDLKDAFFCLRLHPTSQPLFAFEWRDPGTGRTGQLTWTRLPQGFKNSPTIFNEALHRDLANFRIQHPQVTLLQYVDDLLLAGATKQDCLEGTKALLLELSDLGYRASAKKAQICRREVTYLGYSLRDGQRWLTEARKKTVVQIPAPTTAKQVREFLGTAGFCRLWIPGFATLAAPLYPLTKPKGEFSWAPEHQKAFDAIKKALLSAPALALPDVTKPFTLYVDERKGVARGVLTQTLGPWRRPVAYLSKKLDPVASGWPVCLKAIAAVAILVKDADKLTLGQNITVIAPHALENIVRQPPDRWMTNARMTHYQSLLLTERVTFAPPAALNPATLLPEETDEPVTHDCHQLLIEETGVRKDLTDIPLTGEVLTWFTDGSSYVVEGKRMAGAAVVDGTRTIWASSLPEGTSAQKAELMALTQALRLAEGKSINIYTDSRYAFATAHVHGAIYKQRGWLTSAGREIKNKEEILSLLEALHLPKRLAIIHCPGHQKAKDPISRGNQMADRVAKQAAQGVNLLAGKRTADGSEFEKRTADGSEFESPKKKAKVE

SEQ ID NO: 137 - protein, 2099 aa, synthetic construct
MPAAKRVKLDGGDKKYSIGLDIGTNSVGWAVITDEYKVPSKKFKVLGNTDRHSIKKNLIGALLFDSGETAEATRLKRTARRRYTRRKNRICYLQEIFSNEMAKVDDSFFHRLEESFLVEEDKKHERHPIFGNIVDEVAYHEKYPTIYHLRKKLVDSTDKADLRLIYLALAHMIKFRGHFLIEGDLNPDNSDVDKLFIQLVQTYNQLFEENPINASGVDAKAILSARLSKSRRLENLIAQLPGEKKNGLFGNLIALSLGLTPNFKSNFDLAEDAKLQLSKDTYDDDLDNLLAQIGDQYADLFLAAKNLSDAILLSDILRVNTEITKAPLSASMIKRYDEHHQDLTLLKALVRQQLPEKYKEIFFDQSKNGYAGYIDGGASQEEFYKFIKPILEKMDGTEELLVKLNREDLLRKQRTFDNGSIPHQIHLGELHAILRRQEDFYPFLKDNREKIEKILTFRIPYYVGPLARGNSRFAWMTRKSEETITPWNFEEVVDKGASAQSFIERMTNFDKNLPNEKVLPKHSLLYEYFTVYNELTKVKYVTEGMRKPAFLSGEQKKAIVDLLFKTNRKVTVKQLKEDYFKKIECFDSVEISGVEDRFNASLGTYHDLLKIIKDKDFLDNEENEDILEDIVLTLTLFEDREMIEERLKTYAHLFDDKVMKQLKRRRYTGWGRLSRKLINGIRDKQSGKTILDFLKSDGFANRNFMQLIHDDSLTFKEDIQKAQVSGQGDSLHEHIANLAGSPAIKKGILQTVKVVDELVKVMGRHKPENIVIEMARENQTTQKGQKNSRERMKRIEEGIKELGSQILKEHPVENTQLQNEKLYLYYLQNGRDMYVDQELDINRLSDYDVDHIVPQSFLKDDSIDNKVLTRSDKARGKSDNVPSEEVVKKMKNYWRQLLNAKLITQRKFDNLTKAERGGLSELDKAGFIKRQLVETRQITKHVAQILDSRMNTKYDENDKLIREVKVITLKSKLVSDFRKDFQFYKVREINNYHHAHDAYLNAVVGTALIKKYPKLESEFVYGDYKVYDVRKMIAKSEQEIGKATAKYFFYSNIMNFFKTEITLANGEIRKRPLIETNGETGEIVWDKGRDFATVRKVLSMPQVNIVKKTEVQTGGFSKESILPKRNSDKLIARKKDWDPKKYGGFDSPTVAYSVLVVAKVEKGKSKKLKSVKELLGITIMERSSFEKNPIDFLEAKGYKEVKKDLIIKLPKYSLFELENGRKRMLASAGELQKGNELALPSKYVNFLYLASHYEKLKGSPEDNEQKQLFVEQHKHYLDEIIEQISEFSKRVILADANLDKVLSAYNKHRDKPIREQAENIIHLFTLTNLGAPAAFKYFDTTIDRKRYTSTKEVLDATLIHQSITGLYETRIDLSQLGGDGGEAAAKEAAAKEAAAKEAAAKGGTLQLDDEYRLYSPLVKPDQNIQFWLEQFPQAWAETAGMGLAKQVPPQVIQLKASATPVSVRQYPLSKEAQEGIRPHVQRLIQQGILVPVQSPWNTPLLPVRKPGTNDYRPVQDLREVNKRVQDIHPTVPNPYNLLCALPPQRSWYTVLDLKDAFFCLRLHPTSQPLFAFEWRDPGTGRTGQLTWTRLPQGFKNSPTIFNEALHRDLANFRIQHPQVTLLQYVDDLLLAGATKQDCLEGTKALLLELSDLGYRASAKKAQICRREVTYLGYSLRDGQRWLTEARKKTVVQIPAPTTAKQVREFLGTAGFCRLWIPGFATLAAPLYPLTKPKGEFSWAPEHQKAFDAIKKALLSAPALALPDVTKPFTLYVDERKGVARGVLTQTLGPWRRPVAYLSKKLDPVASGWPVCLKAIAAVAILVKDADKLTLGQNITVIAPHALENIVRQPPDRWMTNARMTHYQSLLLTERVTFAPPAALNPATLLPEETDEPVTHDCHQLLIEETGVRKDLTDIPLTGEVLTWFTDGSSYVVEGKRMAGAAVVDGTRTIWASSLPEGTSAQKAELMALTQALRLAEGKSINIYTDSRYAFATAHVHGAIYKQRGWLTSAGREIKNKEEILSLLEALHLPKRLAIIHCPGHQKAKDPISRGNQMADRVAKQAAQGVNLLAGKRTADGSEFEKRTADGSEFESPKKKAKVE

SEQ ID NO: 138 - protein, 2090 aa, synthetic construct
MPAAKRVKLDGGDKKYSIGLDIGTNSVGWAVITDEYKVPSKKFKVLGNTDRHSIKKNLIGALLFDSGETAEATRLKRTARRRYTRRKNRICYLQEIFSNEMAKVDDSFFHRLEESFLVEEDKKHERHPIFGNIVDEVAYHEKYPTIYHLRKKLVDSTDKADLRLIYLALAHMIKFRGHFLIEGDLNPDNSDVDKLFIQLVQTYNQLFEENPINASGVDAKAILSARLSKSRRLENLIAQLPGEKKNGLFGNLIALSLGLTPNFKSNFDLAEDAKLQLSKDTYDDDLDNLLAQIGDQYADLFLAAKNLSDAILLSDILRVNTEITKAPLSASMIKRYDEHHQDLTLLKALVRQQLPEKYKEIFFDQSKNGYAGYIDGGASQEEFYKFIKPILEKMDGTEELLVKLNREDLLRKQRTFDNGSIPHQIHLGELHAILRRQEDFYPFLKDNREKIEKILTFRIPYYVGPLARGNSRFAWMTRKSEETITPWNFEEVVDKGASAQSFIERMTNFDKNLPNEKVLPKHSLLYEYFTVYNELTKVKYVTEGMRKPAFLSGEQKKAIVDLLFKTNRKVTVKQLKEDYFKKIECFDSVEISGVEDRFNASLGTYHDLLKIIKDKDFLDNEENEDILEDIVLTLTLFEDREMIEERLKTYAHLFDDKVMKQLKRRRYTGWGRLSRKLINGIRDKQSGKTILDFLKSDGFANRNFMQLIHDDSLTFKEDIQKAQVSGQGDSLHEHIANLAGSPAIKKGILQTVKVVDELVKVMGRHKPENIVIEMARENQTTQKGQKNSRERMKRIEEGIKELGSQILKEHPVENTQLQNEKLYLYYLQNGRDMYVDQELDINRLSDYDVDHIVPQSFLKDDSIDNKVLTRSDKARGKSDNVPSEEVVKKMKNYWRQLLNAKLITQRKFDNLTKAERGGLSELDKAGFIKRQLVETRQITKHVAQILDSRMNTKYDENDKLIREVKVITLKSKLVSDFRKDFQFYKVREINNYHHAHDAYLNAVVGTALIKKYPKLESEFVYGDYKVYDVRKMIAKSEQEIGKATAKYFFYSNIMNFFKTEITLANGEIRKRPLIETNGETGEIVWDKGRDFATVRKVLSMPQVNIVKKTEVQTGGFSKESILPKRNSDKLIARKKDWDPKKYGGFDSPTVAYSVLVVAKVEKGKSKKLKSVKELLGITIMERSSFEKNPIDFLEAKGYKEVKKDLIIKLPKYSLFELENGRKRMLASAGELQKGNELALPSKYVNFLYLASHYEKLKGSPEDNEQKQLFVEQHKHYLDEIIEQISEFSKRVILADANLDKVLSAYNKHRDKPIREQAENIIHLFTLTNLGAPAAFKYFDTTIDRKRYTSTKEVLDATLIHQSITGLYETRIDLSQLGGDGGPAPGGSEAAAKGGTLQLDDEYRLYSPLVKPDQNIQFWLEQFPQAWAETAGMGLAKQVPPQVIQLKASATPVSVRQYPLSKEAQEGIRPHVQRLIQQGILVPVQSPWNTPLLPVRKPGTNDYRPVQDLREVNKRVQDIHPTVPNPYNLLCALPPQRSWYTVLDLKDAFFCLRLHPTSQPLFAFEWRDPGTGRTGQLTWTRLPQGFKNSPTIFNEALHRDLANFRIQHPQVTLLQYVDDLLLAGATKQDCLEGTKALLLELSDLGYRASAKKAQICRREVTYLGYSLRDGQRWLTEARKKTVVQIPAPTTAKQVREFLGTAGFCRLWIPGFATLAAPLYPLTKPKGEFSWAPEHQKAFDAIKKALLSAPALALPDVTKPFTLYVDERKGVARGVLTQTLGPWRRPVAYLSKKLDPVASGWPVCLKAIAAVAILVKDADKLTLGQNITVIAPHALENIVRQPPDRWMTNARMTHYQSLLLTERVTFAPPAALNPATLLPEETDEPVTHDCHQLLIEETGVRKDLTDIPLTGEVLTWFTDGSSYVVEGKRMAGAAVVDGTRTIWASSLPEGTSAQKAELMALTQALRLAEGKSINIYTDSRYAFATAHVHGAIYKQRGWLTSAGREIKNKEEILSLLEALHLPKRLAIIHCPGHQKAKDPISRGNQMADRVAKQAAQGVNLLAGKRTADGSEFEKRTADGSEFESPKKKAKVE

SEQ ID NO: 139 - protein, 2090 aa, synthetic construct
MPAAKRVKLDGGDKKYSIGLDIGTNSVGWAVITDEYKVPSKKFKVLGNTDRHSIKKNLIGALLFDSGETAEATRLKRTARRRYTRRKNRICYLQEIFSNEMAKVDDSFFHRLEESFLVEEDKKHERHPIFGNIVDEVAYHEKYPTIYHLRKKLVDSTDKADLRLIYLALAHMIKFRGHFLIEGDLNPDNSDVDKLFIQLVQTYNQLFEENPINASGVDAKAILSARLSKSRRLENLIAQLPGEKKNGLFGNLIALSLGLTPNFKSNFDLAEDAKLQLSKDTYDDDLDNLLAQIGDQYADLFLAAKNLSDAILLSDILRVNTEITKAPLSASMIKRYDEHHQDLTLLKALVRQQLPEKYKEIFFDQSKNGYAGYIDGGASQEEFYKFIKPILEKMDGTEELLVKLNREDLLRKQRTFDNGSIPHQIHLGELHAILRRQEDFYPFLKDNREKIEKILTFRIPYYVGPLARGNSRFAWMTRKSEETITPWNFEEVVDKGASAQSFIERMTNFDKNLPNEKVLPKHSLLYEYFTVYNELTKVKYVTEGMRKPAFLSGEQKKAIVDLLFKTNRKVTVKQLKEDYFKKIECFDSVEISGVEDRFNASLGTYHDLLKIIKDKDFLDNEENEDILEDIVLTLTLFEDREMIEERLKTYAHLFDDKVMKQLKRRRYTGWGRLSRKLINGIRDKQSGKTILDFLKSDGFANRNFMQLIHDDSLTFKEDIQKAQVSGQGDSLHEHIANLAGSPAIKKGILQTVKVVDELVKVMGRHKPENIVIEMARENQTTQKGQKNSRERMKRIEEGIKELGSQILKEHPVENTQLQNEKLYLYYLQNGRDMYVDQELDINRLSDYDVDHIVPQSFLKDDSIDNKVLTRSDKARGKSDNVPSEEVVKKMKNYWRQLLNAKLITQRKFDNLTKAERGGLSELDKAGFIKRQLVETRQITKHVAQILDSRMNTKYDENDKLIREVKVITLKSKLVSDFRKDFQFYKVREINNYHHAHDAYLNAVVGTALIKKYPKLESEFVYGDYKVYDVRKMIAKSEQEIGKATAKYFFYSNIMNFFKTEITLANGEIRKRPLIETNGETGEIVWDKGRDFATVRKVLSMPQVNIVKKTEVQTGGFSKESILPKRNSDKLIARKKDWDPKKYGGFDSPTVAYSVLVVAKVEKGKSKKLKSVKELLGITIMERSSFEKNPIDFLEAKGYKEVKKDLIIKLPKYSLFELENGRKRMLASAGELQKGNELALPSKYVNFLYLASHYEKLKGSPEDNEQKQLFVEQHKHYLDEIIEQISEFSKRVILADANLDKVLSAYNKHRDKPIREQAENIIHLFTLTNLGAPAAFKYFDTTIDRKRYTSTKEVLDATLIHQSITGLYETRIDLSQLGGDGGGGSGSSEAAAKGGTLQLDDEYRLYSPLVKPDQNIQFWLEQFPQAWAETAGMGLAKQVPPQVIQLKASATPVSVRQYPLSKEAQEGIRPHVQRLIQQGILVPVQSPWNTPLLPVRKPGTNDYRPVQDLREVNKRVQDIHPTVPNPYNLLCALPPQRSWYTVLDLKDAFFCLRLHPTSQPLFAFEWRDPGTGRTGQLTWTRLPQGFKNSPTIFNEALHRDLANFRIQHPQVTLLQYVDDLLLAGATKQDCLEGTKALLLELSDLGYRASAKKAQICRREVTYLGYSLRDGQRWLTEARKKTVVQIPAPTTAKQVREFLGTAGFCRLWIPGFATLAAPLYPLTKPKGEFSWAPEHQKAFDAIKKALLSAPALALPDVTKPFTLYVDERKGVARGVLTQTLGPWRRPVAYLSKKLDPVASGWPVCLKAIAAVAILVKDADKLTLGQNITVIAPHALENIVRQPPDRWMTNARMTHYQSLLLTERVTFAPPAALNPATLLPEETDEPVTHDCHQLLIEETGVRKDLTDIPLTGEVLTWFTDGSSYVVEGKRMAGAAVVDGTRTIWASSLPEGTSAQKAELMALTQALRLAEGKSINIYTDSRYAFATAHVHGAIYKQRGWLTSAGREIKNKEEILSLLEALHLPKRLAIIHCPGHQKAKDPISRGNQMADRVAKQAAQGVNLLAGKRTADGSEFEKRTADGSEFESPKKKAKVE

SEQ ID NO: 140 - protein, 2112 aa, synthetic construct
MPAAKRVKLDGGDKKYSIGLDIGTNSVGWAVITDEYKVPSKKFKVLGNTDRHSIKKNLIGALLFDSGETAEATRLKRTARRRYTRRKNRICYLQEIFSNEMAKVDDSFFHRLEESFLVEEDKKHERHPIFGNIVDEVAYHEKYPTIYHLRKKLVDSTDKADLRLIYLALAHMIKFRGHFLIEGDLNPDNSDVDKLFIQLVQTYNQLFEENPINASGVDAKAILSARLSKSRRLENLIAQLPGEKKNGLFGNLIALSLGLTPNFKSNFDLAEDAKLQLSKDTYDDDLDNLLAQIGDQYADLFLAAKNLSDAILLSDILRVNTEITKAPLSASMIKRYDEHHQDLTLLKALVRQQLPEKYKEIFFDQSKNGYAGYIDGGASQEEFYKFIKPILEKMDGTEELLVKLNREDLLRKQRTFDNGSIPHQIHLGELHAILRRQEDFYPFLKDNREKIEKILTFRIPYYVGPLARGNSRFAWMTRKSEETITPWNFEEVVDKGASAQSFIERMTNFDKNLPNEKVLPKHSLLYEYFTVYNELTKVKYVTEGMRKPAFLSGEQKKAIVDLLFKTNRKVTVKQLKEDYFKKIECFDSVEISGVEDRFNASLGTYHDLLKIIKDKDFLDNEENEDILEDIVLTLTLFEDREMIEERLKTYAHLFDDKVMKQLKRRRYTGWGRLSRKLINGIRDKQSGKTILDFLKSDGFANRNFMQLIHDDSLTFKEDIQKAQVSGQGDSLHEHIANLAGSPAIKKGILQTVKVVDELVKVMGRHKPENIVIEMARENQTTQKGQKNSRERMKRIEEGIKELGSQILKEHPVENTQLQNEKLYLYYLQNGRDMYVDQELDINRLSDYDVDHIVPQSFLKDDSIDNKVLTRSDKARGKSDNVPSEEVVKKMKNYWRQLLNAKLITQRKFDNLTKAERGGLSELDKAGFIKRQLVETRQITKHVAQILDSRMNTKYDENDKLIREVKVITLKSKLVSDFRKDFQFYKVREINNYHHAHDAYLNAVVGTALIKKYPKLESEFVYGDYKVYDVRKMIAKSEQEIGKATAKYFFYSNIMNFFKTEITLANGEIRKRPLIETNGETGEIVWDKGRDFATVRKVLSMPQVNIVKKTEVQTGGFSKESILPKRNSDKLIARKKDWDPKKYGGFDSPTVAYSVLVVAKVEKGKSKKLKSVKELLGITIMERSSFEKNPIDFLEAKGYKEVKKDLIIKLPKYSLFELENGRKRMLASAGELQKGNELALPSKYVNFLYLASHYEKLKGSPEDNEQKQLFVEQHKHYLDEIIEQISEFSKRVILADANLDKVLSAYNKHRDKPIREQAENIIHLFTLTNLGAPAAFKYFDTTIDRKRYTSTKEVLDATLIHQSITGLYETRIDLSQLGGDGGSGGSSGGSSGSETPGTSESATPESSGGSSGGSSGGTLQLDDEYRLYSPLVKPDQNIQFWLEQFPQAWAETAGMGLAKQVPPQVIQLKASATPVSVRQYPLSKEAQEGIRPHVQRLIQQGILVPVQSPWNTPLLPVRKPGTNDYRPVQDLREVNKRVQDIHPTVPNPYNLLCALPPQRSWYTVLDLKDAFFCLRLHPTSQPLFAFEWRDPGTGRTGQLTWTRLPQGFKNSPTIFNEALHRDLANFRIQHPQVTLLQYVDDLLLAGATKQDCLEGTKALLLELSDLGYRASAKKAQICRREVTYLGYSLRDGQRWLTEARKKTVVQIPAPTTAKQVREFLGTAGFCRLWIPGFATLAAPLYPLTKPKGEFSWAPEHQKAFDAIKKALLSAPALALPDVTKPFTLYVDERKGVARGVLTQTLGPWRRPVAYLSKKLDPVASGWPVCLKAIAAVAILVKDADKLTLGQNITVIAPHALENIVRQPPDRWMTNARMTHYQSLLLTERVTFAPPAALNPATLLPEETDEPVTHDCHQLLIEETGVRKDLTDIPLTGEVLTWFTDGSSYVVEGKRMAGAAVVDGTRTIWASSLPEGTSAQKAELMALTQALRLAEGKSINIYTDSRYAFATAHVHGAIYKQRGWLTSAGREIKNKEEILSLLEALHLPKRLAIIHCPGHQKAKDPISRGNQMADRVAKQAAQGVNLLAGKRTADGSEFEKRTADGSEFESPKKKAKVE

SEQ ID NO: 141 - protein, 2090 aa, synthetic construct
MPAAKRVKLDGGDKKYSIGLDIGTNSVGWAVITDEYKVPSKKFKVLGNTDRHSIKKNLIGALLFDSGETAEATRLKRTARRRYTRRKNRICYLQEIFSNEMAKVDDSFFHRLEESFLVEEDKKHERHPIFGNIVDEVAYHEKYPTIYHLRKKLVDSTDKADLRLIYLALAHMIKFRGHFLIEGDLNPDNSDVDKLFIQLVQTYNQLFEENPINASGVDAKAILSARLSKSRRLENLIAQLPGEKKNGLFGNLIALSLGLTPNFKSNFDLAEDAKLQLSKDTYDDDLDNLLAQIGDQYADLFLAAKNLSDAILLSDILRVNTEITKAPLSASMIKRYDEHHQDLTLLKALVRQQLPEKYKEIFFDQSKNGYAGYIDGGASQEEFYKFIKPILEKMDGTEELLVKLNREDLLRKQRTFDNGSIPHQIHLGELHAILRRQEDFYPFLKDNREKIEKILTFRIPYYVGPLARGNSRFAWMTRKSEETITPWNFEEVVDKGASAQSFIERMTNFDKNLPNEKVLPKHSLLYEYFTVYNELTKVKYVTEGMRKPAFLSGEQKKAIVDLLFKTNRKVTVKQLKEDYFKKIECFDSVEISGVEDRFNASLGTYHDLLKIIKDKDFLDNEENEDILEDIVLTLTLFEDREMIEERLKTYAHLFDDKVMKQLKRRRYTGWGRLSRKLINGIRDKQSGKTILDFLKSDGFANRNFMQLIHDDSLTFKEDIQKAQVSGQGDSLHEHIANLAGSPAIKKGILQTVKVVDELVKVMGRHKPENIVIEMARENQTTQKGQKNSRERMKRIEEGIKELGSQILKEHPVENTQLQNEKLYLYYLQNGRDMYVDQELDINRLSDYDVDHIVPQSFLKDDSIDNKVLTRSDKARGKSDNVPSEEVVKKMKNYWRQLLNAKLITQRKFDNLTKAERGGLSELDKAGFIKRQLVETRQITKHVAQILDSRMNTKYDENDKLIREVKVITLKSKLVSDFRKDFQFYKVREINNYHHAHDAYLNAVVGTALIKKYPKLESEFVYGDYKVYDVRKMIAKSEQEIGKATAKYFFYSNIMNFFKTEITLANGEIRKRPLIETNGETGEIVWDKGRDFATVRKVLSMPQVNIVKKTEVQTGGFSKESILPKRNSDKLIARKKDWDPKKYGGFDSPTVAYSVLVVAKVEKGKSKKLKSVKELLGITIMERSSFEKNPIDFLEAKGYKEVKKDLIIKLPKYSLFELENGRKRMLASAGELQKGNELALPSKYVNFLYLASHYEKLKGSPEDNEQKQLFVEQHKHYLDEIIEQISEFSKRVILADANLDKVLSAYNKHRDKPIREQAENIIHLFTLTNLGAPAAFKYFDTTIDRKRYTSTKEVLDATLIHQSITGLYETRIDLSQLGGDGGEAAAKGGSPAPGGTLQLDDEYRLYSPLVKPDQNIQFWLEQFPQAWAETAGMGLAKQVPPQVIQLKASATPVSVRQYPLSKEAQEGIRPHVQRLIQQGILVPVQSPWNTPLLPVRKPGTNDYRPVQDLREVNKRVQDIHPTVPNPYNLLCALPPQRSWYTVLDLKDAFFCLRLHPTSQPLFAFEWRDPGTGRTGQLTWTRLPQGFKNSPTIFNEALHRDLANFRIQHPQVTLLQYVDDLLLAGATKQDCLEGTKALLLELSDLGYRASAKKAQICRREVTYLGYSLRDGQRWLTEARKKTVVQIPAPTTAKQVREFLGTAGFCRLWIPGFATLAAPLYPLTKPKGEFSWAPEHQKAFDAIKKALLSAPALALPDVTKPFTLYVDERKGVARGVLTQTLGPWRRPVAYLSKKLDPVASGWPVCLKAIAAVAILVKDADKLTLGQNITVIAPHALENIVRQPPDRWMTNARMTHYQSLLLTERVTFAPPAALNPATLLPEETDEPVTHDCHQLLIEETGVRKDLTDIPLTGEVLTWFTDGSSYVVEGKRMAGAAVVDGTRTIWASSLPEGTSAQKAELMALTQALRLAEGKSINIYTDSRYAFATAHVHGAIYKQRGWLTSAGREIKNKEEILSLLEALHLPKRLAIIHCPGHQKAKDPISRGNQMADRVAKQAAQGVNLLAGKRTADGSEFEKRTADGSEFESPKKKAKVE

SEQ ID NO: 142 - protein, 2097 aa, synthetic construct
MPAAKRVKLDGGDKKYSIGLDIGTNSVGWAVITDEYKVPSKKFKVLGNTDRHSIKKNLIGALLFDSGETAEATRLKRTARRRYTRRKNRICYLQEIFSNEMAKVDDSFFHRLEESFLVEEDKKHERHPIFGNIVDEVAYHEKYPTIYHLRKKLVDSTDKADLRLIYLALAHMIKFRGHFLIEGDLNPDNSDVDKLFIQLVQTYNQLFEENPINASGVDAKAILSARLSKSRRLENLIAQLPGEKKNGLFGNLIALSLGLTPNFKSNFDLAEDAKLQLSKDTYDDDLDNLLAQIGDQYADLFLAAKNLSDAILLSDILRVNTEITKAPLSASMIKRYDEHHQDLTLLKALVRQQLPEKYKEIFFDQSKNGYAGYIDGGASQEEFYKFIKPILEKMDGTEELLVKLNREDLLRKQRTFDNGSIPHQIHLGELHAILRRQEDFYPFLKDNREKIEKILTFRIPYYVGPLARGNSRFAWMTRKSEETITPWNFEEVVDKGASAQSFIERMTNFDKNLPNEKVLPKHSLLYEYFTVYNELTKVKYVTEGMRKPAFLSGEQKKAIVDLLFKTNRKVTVKQLKEDYFKKIECFDSVEISGVEDRFNASLGTYHDLLKIIKDKDFLDNEENEDILEDIVLTLTLFEDREMIEERLKTYAHLFDDKVMKQLKRRRYTGWGRLSRKLINGIRDKQSGKTILDFLKSDGFANRNFMQLIHDDSLTFKEDIQKAQVSGQGDSLHEHIANLAGSPAIKKGILQTVKVVDELVKVMGRHKPENIVIEMARENQTTQKGQKNSRERMKRIEEGIKELGSQILKEHPVENTQLQNEKLYLYYLQNGRDMYVDQELDINRLSDYDVDHIVPQSFLKDDSIDNKVLTRSDKARGKSDNVPSEEVVKKMKNYWRQLLNAKLITQRKFDNLTKAERGGLSELDKAGFIKRQLVETRQITKHVAQILDSRMNTKYDENDKLIREVKVITLKSKLVSDFRKDFQFYKVREINNYHHAHDAYLNAVVGTALIKKYPKLESEFVYGDYKVYDVRKMIAKSEQEIGKATAKYFFYSNIMNFFKTEITLANGEIRKRPLIETNGETGEIVWDKGRDFATVRKVLSMPQVNIVKKTEVQTGGFSKESILPKRNSDKLIARKKDWDPKKYGGFDSPTVAYSVLVVAKVEKGKSKKLKSVKELLGITIMERSSFEKNPIDFLEAKGYKEVKKDLIIKLPKYSLFELENGRKRMLASAGELQKGNELALPSKYVNFLYLASHYEKLKGSPEDNEQKQLFVEQHKHYLDEIIEQISEFSKRVILADANLDKVLSAYNKHRDKPIREQAENIIHLFTLTNLGAPAAFKYFDTTIDRKRYTSTKEVLDATLIHQSITGLYETRIDLSQLGGDGGGGSGGSGGSGGSGGSGGSGGTLQLDDEYRLYSPLVKPDQNIQFWLEQFPQAWAETAGMGLAKQVPPQVIQLKASATPVSVRQYPLSKEAQEGIRPHVQRLIQQGILVPVQSPWNTPLLPVRKPGTNDYRPVQDLREVNKRVQDIHPTVPNPYNLLCALPPQRSWYTVLDLKDAFFCLRLHPTSQPLFAFEWRDPGTGRTGQLTWTRLPQGFKNSPTIFNEALHRDLANFRIQHPQVTLLQYVDDLLLAGATKQDCLEGTKALLLELSDLGYRASAKKAQICRREVTYLGYSLRDGQRWLTEARKKTVVQIPAPTTAKQVREFLGTAGFCRLWIPGFATLAAPLYPLTKPKGEFSWAPEHQKAFDAIKKALLSAPALALPDVTKPFTLYVDERKGVARGVLTQTLGPWRRPVAYLSKKLDPVASGWPVCLKAIAAVAILVKDADKLTLGQNITVIAPHALENIVRQPPDRWMTNARMTHYQSLLLTERVTFAPPAALNPATLLPEETDEPVTHDCHQLLIEETGVRKDLTDIPLTGEVLTWFTDGSSYVVEGKRMAGAAVVDGTRTIWASSLPEGTSAQKAELMALTQALRLAEGKSINIYTDSRYAFATAHVHGAIYKQRGWLTSAGREIKNKEEILSLLEALHLPKRLAIIHCPGHQKAKDPISRGNQMADRVAKQAAQGVNLLAGKRTADGSEFEKRTADGSEFESPKKKAKVE

SEQ ID NO: 143 - protein, 2085 aa, synthetic construct
MPAAKRVKLDGGDKKYSIGLDIGTNSVGWAVITDEYKVPSKKFKVLGNTDRHSIKKNLIGALLFDSGETAEATRLKRTARRRYTRRKNRICYLQEIFSNEMAKVDDSFFHRLEESFLVEEDKKHERHPIFGNIVDEVAYHEKYPTIYHLRKKLVDSTDKADLRLIYLALAHMIKFRGHFLIEGDLNPDNSDVDKLFIQLVQTYNQLFEENPINASGVDAKAILSARLSKSRRLENLIAQLPGEKKNGLFGNLIALSLGLTPNFKSNFDLAEDAKLQLSKDTYDDDLDNLLAQIGDQYADLFLAAKNLSDAILLSDILRVNTEITKAPLSASMIKRYDEHHQDLTLLKALVRQQLPEKYKEIFFDQSKNGYAGYIDGGASQEEFYKFIKPILEKMDGTEELLVKLNREDLLRKQRTFDNGSIPHQIHLGELHAILRRQEDFYPFLKDNREKIEKILTFRIPYYVGPLARGNSRFAWMTRKSEETITPWNFEEVVDKGASAQSFIERMTNFDKNLPNEKVLPKHSLLYEYFTVYNELTKVKYVTEGMRKPAFLSGEQKKAIVDLLFKTNRKVTVKQLKEDYFKKIECFDSVEISGVEDRFNASLGTYHDLLKIIKDKDFLDNEENEDILEDIVLTLTLFEDREMIEERLKTYAHLFDDKVMKQLKRRRYTGWGRLSRKLINGIRDKQSGKTILDFLKSDGFANRNFMQLIHDDSLTFKEDIQKAQVSGQGDSLHEHIANLAGSPAIKKGILQTVKVVDELVKVMGRHKPENIVIEMARENQTTQKGQKNSRERMKRIEEGIKELGSQILKEHPVENTQLQNEKLYLYYLQNGRDMYVDQELDINRLSDYDVDHIVPQSFLKDDSIDNKVLTRSDKARGKSDNVPSEEVVKKMKNYWRQLLNAKLITQRKFDNLTKAERGGLSELDKAGFIKRQLVETRQITKHVAQILDSRMNTKYDENDKLIREVKVITLKSKLVSDFRKDFQFYKVREINNYHHAHDAYLNAVVGTALIKKYPKLESEFVYGDYKVYDVRKMIAKSEQEIGKATAKYFFYSNIMNFFKTEITLANGEIRKRPLIETNGETGEIVWDKGRDFATVRKVLSMPQVNIVKKTEVQTGGFSKESILPKRNSDKLIARKKDWDPKKYGGFDSPTVAYSVLVVAKVEKGKSKKLKSVKELLGITIMERSSFEKNPIDFLEAKGYKEVKKDLIIKLPKYSLFELENGRKRMLASAGELQKGNELALPSKYVNFLYLASHYEKLKGSPEDNEQKQLFVEQHKHYLDEIIEQISEFSKRVILADANLDKVLSAYNKHRDKPIREQAENIIHLFTLTNLGAPAAFKYFDTTIDRKRYTSTKEVLDATLIHQSITGLYETRIDLSQLGGDGGGGGPAPGGTLQLDDEYRLYSPLVKPDQNIQFWLEQFPQAWAETAGMGLAKQVPPQVIQLKASATPVSVRQYPLSKEAQEGIRPHVQRLIQQGILVPVQSPWNTPLLPVRKPGTNDYRPVQDLREVNKRVQDIHPTVPNPYNLLCALPPQRSWYTVLDLKDAFFCLRLHPTSQPLFAFEWRDPGTGRTGQLTWTRLPQGFKNSPTIFNEALHRDLANFRIQHPQVTLLQYVDDLLLAGATKQDCLEGTKALLLELSDLGYRASAKKAQICRREVTYLGYSLRDGQRWLTEARKKTVVQIPAPTTAKQVREFLGTAGFCRLWIPGFATLAAPLYPLTKPKGEFSWAPEHQKAFDAIKKALLSAPALALPDVTKPFTLYVDERKGVARGVLTQTLGPWRRPVAYLSKKLDPVASGWPVCLKAIAAVAILVKDADKLTLGQNITVIAPHALENIVRQPPDRWMTNARMTHYQSLLLTERVTFAPPAALNPATLLPEETDEPVTHDCHQLLIEETGVRKDLTDIPLTGEVLTWFTDGSSYVVEGKRMAGAAVVDGTRTIWASSLPEGTSAQKAELMALTQALRLAEGKSINIYTDSRYAFATAHVHGAIYKQRGWLTSAGREIKNKEEILSLLEALHLPKRLAIIHCPGHQKAKDPISRGNQMADRVAKQAAQGVNLLAGKRTADGSEFEKRTADGSEFESPKKKAKVE

SEQ ID NO: 144 - protein, 2088 aa, synthetic construct
MPAAKRVKLDGGDKKYSIGLDIGTNSVGWAVITDEYKVPSKKFKVLGNTDRHSIKKNLIGALLFDSGETAEATRLKRTARRRYTRRKNRICYLQEIFSNEMAKVDDSFFHRLEESFLVEEDKKHERHPIFGNIVDEVAYHEKYPTIYHLRKKLVDSTDKADLRLIYLALAHMIKFRGHFLIEGDLNPDNSDVDKLFIQLVQTYNQLFEENPINASGVDAKAILSARLSKSRRLENLIAQLPGEKKNGLFGNLIALSLGLTPNFKSNFDLAEDAKLQLSKDTYDDDLDNLLAQIGDQYADLFLAAKNLSDAILLSDILRVNTEITKAPLSASMIKRYDEHHQDLTLLKALVRQQLPEKYKEIFFDQSKNGYAGYIDGGASQEEFYKFIKPILEKMDGTEELLVKLNREDLLRKQRTFDNGSIPHQIHLGELHAILRRQEDFYPFLKDNREKIEKILTFRIPYYVGPLARGNSRFAWMTRKSEETITPWNFEEVVDKGASAQSFIERMTNFDKNLPNEKVLPKHSLLYEYFTVYNELTKVKYVTEGMRKPAFLSGEQKKAIVDLLFKTNRKVTVKQLKEDYFKKIECFDSVEISGVEDRFNASLGTYHDLLKIIKDKDFLDNEENEDILEDIVLTLTLFEDREMIEERLKTYAHLFDDKVMKQLKRRRYTGWGRLSRKLINGIRDKQSGKTILDFLKSDGFANRNFMQLIHDDSLTFKEDIQKAQVSGQGDSLHEHIANLAGSPAIKKGILQTVKVVDELVKVMGRHKPENIVIEMARENQTTQKGQKNSRERMKRIEEGIKELGSQILKEHPVENTQLQNEKLYLYYLQNGRDMYVDQELDINRLSDYDVDHIVPQSFLKDDSIDNKVLTRSDKARGKSDNVPSEEVVKKMKNYWRQLLNAKLITQRKFDNLTKAERGGLSELDKAGFIKRQLVETRQITKHVAQILDSRMNTKYDENDKLIREVKVITLKSKLVSDFRKDFQFYKVREINNYHHAHDAYLNAVVGTALIKKYPKLESEFVYGDYKVYDVRKMIAKSEQEIGKATAKYFFYSNIMNFFKTEITLANGEIRKRPLIETNGETGEIVWDKGRDFATVRKVLSMPQVNIVKKTEVQTGGFSKESILPKRNSDKLIARKKDWDPKKYGGFDSPTVAYSVLVVAKVEKGKSKKLKSVKELLGITIMERSSFEKNPIDFLEAKGYKEVKKDLIIKLPKYSLFELENGRKRMLASAGELQKGNELALPSKYVNFLYLASHYEKLKGSPEDNEQKQLFVEQHKHYLDEIIEQISEFSKRVILADANLDKVLSAYNKHRDKPIREQAENIIHLFTLTNLGAPAAFKYFDTTIDRKRYTSTKEVLDATLIHQSITGLYETRIDLSQLGGDGGGGSGSSGGGGGTLQLDDEYRLYSPLVKPDQNIQFWLEQFPQAWAETAGMGLAKQVPPQVIQLKASATPVSVRQYPLSKEAQEGIRPHVQRLIQQGILVPVQSPWNTPLLPVRKPGTNDYRPVQDLREVNKRVQDIHPTVPNPYNLLCALPPQRSWYTVLDLKDAFFCLRLHPTSQPLFAFEWRDPGTGRTGQLTWTRLPQGFKNSPTIFNEALHRDLANFRIQHPQVTLLQYVDDLLLAGATKQDCLEGTKALLLELSDLGYRASAKKAQICRREVTYLGYSLRDGQRWLTEARKKTVVQIPAPTTAKQVREFLGTAGFCRLWIPGFATLAAPLYPLTKPKGEFSWAPEHQKAFDAIKKALLSAPALALPDVTKPFTLYVDERKGVARGVLTQTLGPWRRPVAYLSKKLDPVASGWPVCLKAIAAVAILVKDADKLTLGQNITVIAPHALENIVRQPPDRWMTNARMTHYQSLLLTERVTFAPPAALNPATLLPEETDEPVTHDCHQLLIEETGVRKDLTDIPLTGEVLTWFTDGSSYVVEGKRMAGAAVVDGTRTIWASSLPEGTSAQKAELMALTQALRLAEGKSINIYTDSRYAFATAHVHGAIYKQRGWLTSAGREIKNKEEILSLLEALHLPKRLAIIHCPGHQKAKDPISRGNQMADRVAKQAAQGVNLLAGKRTADGSEFEKRTADGSEFESPKKKAKVE

SEQ ID NO: 145 - protein, 2091 aa, synthetic construct
MPAAKRVKLDGGDKKYSIGLDIGTNSVGWAVITDEYKVPSKKFKVLGNTDRHSIKKNLIGALLFDSGETAEATRLKRTARRRYTRRKNRICYLQEIFSNEMAKVDDSFFHRLEESFLVEEDKKHERHPIFGNIVDEVAYHEKYPTIYHLRKKLVDSTDKADLRLIYLALAHMIKFRGHFLIEGDLNPDNSDVDKLFIQLVQTYNQLFEENPINASGVDAKAILSARLSKSRRLENLIAQLPGEKKNGLFGNLIALSLGLTPNFKSNFDLAEDAKLQLSKDTYDDDLDNLLAQIGDQYADLFLAAKNLSDAILLSDILRVNTEITKAPLSASMIKRYDEHHQDLTLLKALVRQQLPEKYKEIFFDQSKNGYAGYIDGGASQEEFYKFIKPILEKMDGTEELLVKLNREDLLRKQRTFDNGSIPHQIHLGELHAILRRQEDFYPFLKDNREKIEKILTFRIPYYVGPLARGNSRFAWMTRKSEETITPWNFEEVVDKGASAQSFIERMTNFDKNLPNEKVLPKHSLLYEYFTVYNELTKVKYVTEGMRKPAFLSGEQKKAIVDLLFKTNRKVTVKQLKEDYFKKIECFDSVEISGVEDRFNASLGTYHDLLKIIKDKDFLDNEENEDILEDIVLTLTLFEDREMIEERLKTYAHLFDDKVMKQLKRRRYTGWGRLSRKLINGIRDKQSGKTILDFLKSDGFANRNFMQLIHDDSLTFKEDIQKAQVSGQGDSLHEHIANLAGSPAIKKGILQTVKVVDELVKVMGRHKPENIVIEMARENQTTQKGQKNSRERMKRIEEGIKELGSQILKEHPVENTQLQNEKLYLYYLQNGRDMYVDQELDINRLSDYDVDHIVPQSFLKDDSIDNKVLTRSDKARGKSDNVPSEEVVKKMKNYWRQLLNAKLITQRKFDNLTKAERGGLSELDKAGFIKRQLVETRQITKHVAQILDSRMNTKYDENDKLIREVKVITLKSKLVSDFRKDFQFYKVREINNYHHAHDAYLNAVVGTALIKKYPKLESEFVYGDYKVYDVRKMIAKSEQEIGKATAKYFFYSNIMNFFKTEITLANGEIRKRPLIETNGETGEIVWDKGRDFATVRKVLSMPQVNIVKKTEVQTGGFSKESILPKRNSDKLIARKKDWDPKKYGGFDSPTVAYSVLVVAKVEKGKSKKLKSVKELLGITIMERSSFEKNPIDFLEAKGYKEVKKDLIIKLPKYSLFELENGRKRMLASAGELQKGNELALPSKYVNFLYLASHYEKLKGSPEDNEQKQLFVEQHKHYLDEIIEQISEFSKRVILADANLDKVLSAYNKHRDKPIREQAENIIHLFTLTNLGAPAAFKYFDTTIDRKRYTSTKEVLDATLIHQSITGLYETRIDLSQLGGDGGGGSGGSGGSGGSGGTLQLDDEYRLYSPLVKPDQNIQFWLEQFPQAWAETAGMGLAKQVPPQVIQLKASATPVSVRQYPLSKEAQEGIRPHVQRLIQQGILVPVQSPWNTPLLPVRKPGTNDYRPVQDLREVNKRVQDIHPTVPNPYNLLCALPPQRSWYTVLDLKDAFFCLRLHPTSQPLFAFEWRDPGTGRTGQLTWTRLPQGFKNSPTIFNEALHRDLANFRIQHPQVTLLQYVDDLLLAGATKQDCLEGTKALLLELSDLGYRASAKKAQICRREVTYLGYSLRDGQRWLTEARKKTVVQIPAPTTAKQVREFLGTAGFCRLWIPGFATLAAPLYPLTKPKGEFSWAPEHQKAFDAIKKALLSAPALALPDVTKPFTLYVDERKGVARGVLTQTLGPWRRPVAYLSKKLDPVASGWPVCLKAIAAVAILVKDADKLTLGQNITVIAPHALENIVRQPPDRWMTNARMTHYQSLLLTERVTFAPPAALNPATLLPEETDEPVTHDCHQLLIEETGVRKDLTDIPLTGEVLTWFTDGSSYVVEGKRMAGAAVVDGTRTIWASSLPEGTSAQKAELMALTQALRLAEGKSINIYTDSRYAFATAHVHGAIYKQRGWLTSAGREIKNKEEILSLLEALHLPKRLAIIHCPGHQKAKDPISRGNQMADRVAKQAAQGVNLLAGKRTADGSEFEKRTADGSEFESPKKKAKVE

SEQ ID NO: 146 - protein, 2090 aa, synthetic construct
MPAAKRVKLDGGDKKYSIGLDIGTNSVGWAVITDEYKVPSKKFKVLGNTDRHSIKKNLIGALLFDSGETAEATRLKRTARRRYTRRKNRICYLQEIFSNEMAKVDDSFFHRLEESFLVEEDKKHERHPIFGNIVDEVAYHEKYPTIYHLRKKLVDSTDKADLRLIYLALAHMIKFRGHFLIEGDLNPDNSDVDKLFIQLVQTYNQLFEENPINASGVDAKAILSARLSKSRRLENLIAQLPGEKKNGLFGNLIALSLGLTPNFKSNFDLAEDAKLQLSKDTYDDDLDNLLAQIGDQYADLFLAAKNLSDAILLSDILRVNTEITKAPLSASMIKRYDEHHQDLTLLKALVRQQLPEKYKEIFFDQSKNGYAGYIDGGASQEEFYKFIKPILEKMDGTEELLVKLNREDLLRKQRTFDNGSIPHQIHLGELHAILRRQEDFYPFLKDNREKIEKILTFRIPYYVGPLARGNSRFAWMTRKSEETITPWNFEEVVDKGASAQSFIERMTNFDKNLPNEKVLPKHSLLYEYFTVYNELTKVKYVTEGMRKPAFLSGEQKKAIVDLLFKTNRKVTVKQLKEDYFKKIECFDSVEISGVEDRFNASLGTYHDLLKIIKDKDFLDNEENEDILEDIVLTLTLFEDREMIEERLKTYAHLFDDKVMKQLKRRRYTGWGRLSRKLINGIRDKQSGKTILDFLKSDGFANRNFMQLIHDDSLTFKEDIQKAQVSGQGDSLHEHIANLAGSPAIKKGILQTVKVVDELVKVMGRHKPENIVIEMARENQTTQKGQKNSRERMKRIEEGIKELGSQILKEHPVENTQLQNEKLYLYYLQNGRDMYVDQELDINRLSDYDVDHIVPQSFLKDDSIDNKVLTRSDKARGKSDNVPSEEVVKKMKNYWRQLLNAKLITQRKFDNLTKAERGGLSELDKAGFIKRQLVETRQITKHVAQILDSRMNTKYDENDKLIREVKVITLKSKLVSDFRKDFQFYKVREINNYHHAHDAYLNAVVGTALIKKYPKLESEFVYGDYKVYDVRKMIAKSEQEIGKATAKYFFYSNIMNFFKTEITLANGEIRKRPLIETNGETGEIVWDKGRDFATVRKVLSMPQVNIVKKTEVQTGGFSKESILPKRNSDKLIARKKDWDPKKYGGFDSPTVAYSVLVVAKVEKGKSKKLKSVKELLGITIMERSSFEKNPIDFLEAKGYKEVKKDLIIKLPKYSLFELENGRKRMLASAGELQKGNELALPSKYVNFLYLASHYEKLKGSPEDNEQKQLFVEQHKHYLDEIIEQISEFSKRVILADANLDKVLSAYNKHRDKPIREQAENIIHLFTLTNLGAPAAFKYFDTTIDRKRYTSTKEVLDATLIHQSITGLYETRIDLSQLGGDGGEAAAKGGGGSSGGTLQLDDEYRLYSPLVKPDQNIQFWLEQFPQAWAETAGMGLAKQVPPQVIQLKASATPVSVRQYPLSKEAQEGIRPHVQRLIQQGILVPVQSPWNTPLLPVRKPGTNDYRPVQDLREVNKRVQDIHPTVPNPYNLLCALPPQRSWYTVLDLKDAFFCLRLHPTSQPLFAFEWRDPGTGRTGQLTWTRLPQGFKNSPTIFNEALHRDLANFRIQHPQVTLLQYVDDLLLAGATKQDCLEGTKALLLELSDLGYRASAKKAQICRREVTYLGYSLRDGQRWLTEARKKTVVQIPAPTTAKQVREFLGTAGFCRLWIPGFATLAAPLYPLTKPKGEFSWAPEHQKAFDAIKKALLSAPALALPDVTKPFTLYVDERKGVARGVLTQTLGPWRRPVAYLSKKLDPVASGWPVCLKAIAAVAILVKDADKLTLGQNITVIAPHALENIVRQPPDRWMTNARMTHYQSLLLTERVTFAPPAALNPATLLPEETDEPVTHDCHQLLIEETGVRKDLTDIPLTGEVLTWFTDGSSYVVEGKRMAGAAVVDGTRTIWASSLPEGTSAQKAELMALTQALRLAEGKSINIYTDSRYAFATAHVHGAIYKQRGWLTSAGREIKNKEEILSLLEALHLPKRLAIIHCPGHQKAKDPISRGNQMADRVAKQAAQGVNLLAGKRTADGSEFEKRTADGSEFESPKKKAKVE

SEQ ID NO: 147 - protein, 2084 aa, synthetic construct
MPAAKRVKLDGGDKKYSIGLDIGTNSVGWAVITDEYKVPSKKFKVLGNTDRHSIKKNLIGALLFDSGETAEATRLKRTARRRYTRRKNRICYLQEIFSNEMAKVDDSFFHRLEESFLVEEDKKHERHPIFGNIVDEVAYHEKYPTIYHLRKKLVDSTDKADLRLIYLALAHMIKFRGHFLIEGDLNPDNSDVDKLFIQLVQTYNQLFEENPINASGVDAKAILSARLSKSRRLENLIAQLPGEKKNGLFGNLIALSLGLTPNFKSNFDLAEDAKLQLSKDTYDDDLDNLLAQIGDQYADLFLAAKNLSDAILLSDILRVNTEITKAPLSASMIKRYDEHHQDLTLLKALVRQQLPEKYKEIFFDQSKNGYAGYIDGGASQEEFYKFIKPILEKMDGTEELLVKLNREDLLRKQRTFDNGSIPHQIHLGELHAILRRQEDFYPFLKDNREKIEKILTFRIPYYVGPLARGNSRFAWMTRKSEETITPWNFEEVVDKGASAQSFIERMTNFDKNLPNEKVLPKHSLLYEYFTVYNELTKVKYVTEGMRKPAFLSGEQKKAIVDLLFKTNRKVTVKQLKEDYFKKIECFDSVEISGVEDRFNASLGTYHDLLKIIKDKDFLDNEENEDILEDIVLTLTLFEDREMIEERLKTYAHLFDDKVMKQLKRRRYTGWGRLSRKLINGIRDKQSGKTILDFLKSDGFANRNFMQLIHDDSLTFKEDIQKAQVSGQGDSLHEHIANLAGSPAIKKGILQTVKVVDELVKVMGRHKPENIVIEMARENQTTQKGQKNSRERMKRIEEGIKELGSQILKEHPVENTQLQNEKLYLYYLQNGRDMYVDQELDINRLSDYDVDHIVPQSFLKDDSIDNKVLTRSDKARGKSDNVPSEEVVKKMKNYWRQLLNAKLITQRKFDNLTKAERGGLSELDKAGFIKRQLVETRQITKHVAQILDSRMNTKYDENDKLIREVKVITLKSKLVSDFRKDFQFYKVREINNYHHAHDAYLNAVVGTALIKKYPKLESEFVYGDYKVYDVRKMIAKSEQEIGKATAKYFFYSNIMNFFKTEITLANGEIRKRPLIETNGETGEIVWDKGRDFATVRKVLSMPQVNIVKKTEVQTGGFSKESILPKRNSDKLIARKKDWDPKKYGGFDSPTVAYSVLVVAKVEKGKSKKLKSVKELLGITIMERSSFEKNPIDFLEAKGYKEVKKDLIIKLPKYSLFELENGRKRMLASAGELQKGNELALPSKYVNFLYLASHYEKLKGSPEDNEQKQLFVEQHKHYLDEIIEQISEFSKRVILADANLDKVLSAYNKHRDKPIREQAENIIHLFTLTNLGAPAAFKYFDTTIDRKRYTSTKEVLDATLIHQSITGLYETRIDLSQLGGDGGGGGGSGGTLQLDDEYRLYSPLVKPDQNIQFWLEQFPQAWAETAGMGLAKQVPPQVIQLKASATPVSVRQYPLSKEAQEGIRPHVQRLIQQGILVPVQSPWNTPLLPVRKPGTNDYRPVQDLREVNKRVQDIHPTVPNPYNLLCALPPQRSWYTVLDLKDAFFCLRLHPTSQPLFAFEWRDPGTGRTGQLTWTRLPQGFKNSPTIFNEALHRDLANFRIQHPQVTLLQYVDDLLLAGATKQDCLEGTKALLLELSDLGYRASAKKAQICRREVTYLGYSLRDGQRWLTEARKKTVVQIPAPTTAKQVREFLGTAGFCRLWIPGFATLAAPLYPLTKPKGEFSWAPEHQKAFDAIKKALLSAPALALPDVTKPFTLYVDERKGVARGVLTQTLGPWRRPVAYLSKKLDPVASGWPVCLKAIAAVAILVKDADKLTLGQNITVIAPHALENIVRQPPDRWMTNARMTHYQSLLLTERVTFAPPAALNPATLLPEETDEPVTHDCHQLLIEETGVRKDLTDIPLTGEVLTWFTDGSSYVVEGKRMAGAAVVDGTRTIWASSLPEGTSAQKAELMALTQALRLAEGKSINIYTDSRYAFATAHVHGAIYKQRGWLTSAGREIKNKEEILSLLEALHLPKRLAIIHCPGHQKAKDPISRGNQMADRVAKQAAQGVNLLAGKRTADGSEFEKRTADGSEFESPKKKAKVE

SEQ ID NO: 148 - protein, 2085 aa, synthetic construct
MPAAKRVKLDGGDKKYSIGLDIGTNSVGWAVITDEYKVPSKKFKVLGNTDRHSIKKNLIGALLFDSGETAEATRLKRTARRRYTRRKNRICYLQEIFSNEMAKVDDSFFHRLEESFLVEEDKKHERHPIFGNIVDEVAYHEKYPTIYHLRKKLVDSTDKADLRLIYLALAHMIKFRGHFLIEGDLNPDNSDVDKLFIQLVQTYNQLFEENPINASGVDAKAILSARLSKSRRLENLIAQLPGEKKNGLFGNLIALSLGLTPNFKSNFDLAEDAKLQLSKDTYDDDLDNLLAQIGDQYADLFLAAKNLSDAILLSDILRVNTEITKAPLSASMIKRYDEHHQDLTLLKALVRQQLPEKYKEIFFDQSKNGYAGYIDGGASQEEFYKFIKPILEKMDGTEELLVKLNREDLLRKQRTFDNGSIPHQIHLGELHAILRRQEDFYPFLKDNREKIEKILTFRIPYYVGPLARGNSRFAWMTRKSEETITPWNFEEVVDKGASAQSFIERMTNFDKNLPNEKVLPKHSLLYEYFTVYNELTKVKYVTEGMRKPAFLSGEQKKAIVDLLFKTNRKVTVKQLKEDYFKKIECFDSVEISGVEDRFNASLGTYHDLLKIIKDKDFLDNEENEDILEDIVLTLTLFEDREMIEERLKTYAHLFDDKVMKQLKRRRYTGWGRLSRKLINGIRDKQSGKTILDFLKSDGFANRNFMQLIHDDSLTFKEDIQKAQVSGQGDSLHEHIANLAGSPAIKKGILQTVKVVDELVKVMGRHKPENIVIEMARENQTTQKGQKNSRERMKRIEEGIKELGSQILKEHPVENTQLQNEKLYLYYLQNGRDMYVDQELDINRLSDYDVDHIVPQSFLKDDSIDNKVLTRSDKARGKSDNVPSEEVVKKMKNYWRQLLNAKLITQRKFDNLTKAERGGLSELDKAGFIKRQLVETRQITKHVAQILDSRMNTKYDENDKLIREVKVITLKSKLVSDFRKDFQFYKVREINNYHHAHDAYLNAVVGTALIKKYPKLESEFVYGDYKVYDVRKMIAKSEQEIGKATAKYFFYSNIMNFFKTEITLANGEIRKRPLIETNGETGEIVWDKGRDFATVRKVLSMPQVNIVKKTEVQTGGFSKESILPKRNSDKLIARKKDWDPKKYGGFDSPTVAYSVLVVAKVEKGKSKKLKSVKELLGITIMERSSFEKNPIDFLEAKGYKEVKKDLIIKLPKYSLFELENGRKRMLASAGELQKGNELALPSKYVNFLYLASHYEKLKGSPEDNEQKQLFVEQHKHYLDEIIEQISEFSKRVILADANLDKVLSAYNKHRDKPIREQAENIIHLFTLTNLGAPAAFKYFDTTIDRKRYTSTKEVLDATLIHQSITGLYETRIDLSQLGGDGGGSSPAPGGTLQLDDEYRLYSPLVKPDQNIQFWLEQFPQAWAETAGMGLAKQVPPQVIQLKASATPVSVRQYPLSKEAQEGIRPHVQRLIQQGILVPVQSPWNTPLLPVRKPGTNDYRPVQDLREVNKRVQDIHPTVPNPYNLLCALPPQRSWYTVLDLKDAFFCLRLHPTSQPLFAFEWRDPGTGRTGQLTWTRLPQGFKNSPTIFNEALHRDLANFRIQHPQVTLLQYVDDLLLAGATKQDCLEGTKALLLELSDLGYRASAKKAQICRREVTYLGYSLRDGQRWLTEARKKTVVQIPAPTTAKQVREFLGTAGFCRLWIPGFATLAAPLYPLTKPKGEFSWAPEHQKAFDAIKKALLSAPALALPDVTKPFTLYVDERKGVARGVLTQTLGPWRRPVAYLSKKLDPVASGWPVCLKAIAAVAILVKDADKLTLGQNITVIAPHALENIVRQPPDRWMTNARMTHYQSLLLTERVTFAPPAALNPATLLPEETDEPVTHDCHQLLIEETGVRKDLTDIPLTGEVLTWFTDGSSYVVEGKRMAGAAVVDGTRTIWASSLPEGTSAQKAELMALTQALRLAEGKSINIYTDSRYAFATAHVHGAIYKQRGWLTSAGREIKNKEEILSLLEALHLPKRLAIIHCPGHQKAKDPISRGNQMADRVAKQAAQGVNLLAGKRTADGSEFEKRTADGSEFESPKKKAKVE

SEQ ID NO: 149 - protein, 2083 aa, synthetic construct
MPAAKRVKLDGGDKKYSIGLDIGTNSVGWAVITDEYKVPSKKFKVLGNTDRHSIKKNLIGALLFDSGETAEATRLKRTARRRYTRRKNRICYLQEIFSNEMAKVDDSFFHRLEESFLVEEDKKHERHPIFGNIVDEVAYHEKYPTIYHLRKKLVDSTDKADLRLIYLALAHMIKFRGHFLIEGDLNPDNSDVDKLFIQLVQTYNQLFEENPINASGVDAKAILSARLSKSRRLENLIAQLPGEKKNGLFGNLIALSLGLTPNFKSNFDLAEDAKLQLSKDTYDDDLDNLLAQIGDQYADLFLAAKNLSDAILLSDILRVNTEITKAPLSASMIKRYDEHHQDLTLLKALVRQQLPEKYKEIFFDQSKNGYAGYIDGGASQEEFYKFIKPILEKMDGTEELLVKLNREDLLRKQRTFDNGSIPHQIHLGELHAILRRQEDFYPFLKDNREKIEKILTFRIPYYVGPLARGNSRFAWMTRKSEETITPWNFEEVVDKGASAQSFIERMTNFDKNLPNEKVLPKHSLLYEYFTVYNELTKVKYVTEGMRKPAFLSGEQKKAIVDLLFKTNRKVTVKQLKEDYFKKIECFDSVEISGVEDRFNASLGTYHDLLKIIKDKDFLDNEENEDILEDIVLTLTLFEDREMIEERLKTYAHLFDDKVMKQLKRRRYTGWGRLSRKLINGIRDKQSGKTILDFLKSDGFANRNFMQLIHDDSLTFKEDIQKAQVSGQGDSLHEHIANLAGSPAIKKGILQTVKVVDELVKVMGRHKPENIVIEMARENQTTQKGQKNSRERMKRIEEGIKELGSQILKEHPVENTQLQNEKLYLYYLQNGRDMYVDQELDINRLSDYDVDHIVPQSFLKDDSIDNKVLTRSDKARGKSDNVPSEEVVKKMKNYWRQLLNAKLITQRKFDNLTKAERGGLSELDKAGFIKRQLVETRQITKHVAQILDSRMNTKYDENDKLIREVKVITLKSKLVSDFRKDFQFYKVREINNYHHAHDAYLNAVVGTALIKKYPKLESEFVYGDYKVYDVRKMIAKSEQEIGKATAKYFFYSNIMNFFKTEITLANGEIRKRPLIETNGETGEIVWDKGRDFATVRKVLSMPQVNIVKKTEVQTGGFSKESILPKRNSDKLIARKKDWDPKKYGGFDSPTVAYSVLVVAKVEKGKSKKLKSVKELLGITIMERSSFEKNPIDFLEAKGYKEVKKDLIIKLPKYSLFELENGRKRMLASAGELQKGNELALPSKYVNFLYLASHYEKLKGSPEDNEQKQLFVEQHKHYLDEIIEQISEFSKRVILADANLDKVLSAYNKHRDKPIREQAENIIHLFTLTNLGAPAAFKYFDTTIDRKRYTSTKEVLDATLIHQSITGLYETRIDLSQLGGDGGGGGGGGTLQLDDEYRLYSPLVKPDQNIQFWLEQFPQAWAETAGMGLAKQVPPQVIQLKASATPVSVRQYPLSKEAQEGIRPHVQRLIQQGILVPVQSPWNTPLLPVRKPGTNDYRPVQDLREVNKRVQDIHPTVPNPYNLLCALPPQRSWYTVLDLKDAFFCLRLHPTSQPLFAFEWRDPGTGRTGQLTWTRLPQGFKNSPTIFNEALHRDLANFRIQHPQVTLLQYVDDLLLAGATKQDCLEGTKALLLELSDLGYRASAKKAQICRREVTYLGYSLRDGQRWLTEARKKTVVQIPAPTTAKQVREFLGTAGFCRLWIPGFATLAAPLYPLTKPKGEFSWAPEHQKAFDAIKKALLSAPALALPDVTKPFTLYVDERKGVARGVLTQTLGPWRRPVAYLSKKLDPVASGWPVCLKAIAAVAILVKDADKLTLGQNITVIAPHALENIVRQPPDRWMTNARMTHYQSLLLTERVTFAPPAALNPATLLPEETDEPVTHDCHQLLIEETGVRKDLTDIPLTGEVLTWFTDGSSYVVEGKRMAGAAVVDGTRTIWASSLPEGTSAQKAELMALTQALRLAEGKSINIYTDSRYAFATAHVHGAIYKQRGWLTSAGREIKNKEEILSLLEALHLPKRLAIIHCPGHQKAKDPISRGNQMADRVAKQAAQGVNLLAGKRTADGSEFEKRTADGSEFESPKKKAKVE

SEQ ID NO: 150 - protein, 2104 aa, synthetic construct
MPAAKRVKLDGGDKKYSIGLDIGTNSVGWAVITDEYKVPSKKFKVLGNTDRHSIKKNLIGALLFDSGETAEATRLKRTARRRYTRRKNRICYLQEIFSNEMAKVDDSFFHRLEESFLVEEDKKHERHPIFGNIVDEVAYHEKYPTIYHLRKKLVDSTDKADLRLIYLALAHMIKFRGHFLIEGDLNPDNSDVDKLFIQLVQTYNQLFEENPINASGVDAKAILSARLSKSRRLENLIAQLPGEKKNGLFGNLIALSLGLTPNFKSNFDLAEDAKLQLSKDTYDDDLDNLLAQIGDQYADLFLAAKNLSDAILLSDILRVNTEITKAPLSASMIKRYDEHHQDLTLLKALVRQQLPEKYKEIFFDQSKNGYAGYIDGGASQEEFYKFIKPILEKMDGTEELLVKLNREDLLRKQRTFDNGSIPHQIHLGELHAILRRQEDFYPFLKDNREKIEKILTFRIPYYVGPLARGNSRFAWMTRKSEETITPWNFEEVVDKGASAQSFIERMTNFDKNLPNEKVLPKHSLLYEYFTVYNELTKVKYVTEGMRKPAFLSGEQKKAIVDLLFKTNRKVTVKQLKEDYFKKIECFDSVEISGVEDRFNASLGTYHDLLKIIKDKDFLDNEENEDILEDIVLTLTLFEDREMIEERLKTYAHLFDDKVMKQLKRRRYTGWGRLSRKLINGIRDKQSGKTILDFLKSDGFANRNFMQLIHDDSLTFKEDIQKAQVSGQGDSLHEHIANLAGSPAIKKGILQTVKVVDELVKVMGRHKPENIVIEMARENQTTQKGQKNSRERMKRIEEGIKELGSQILKEHPVENTQLQNEKLYLYYLQNGRDMYVDQELDINRLSDYDVDHIVPQSFLKDDSIDNKVLTRSDKARGKSDNVPSEEVVKKMKNYWRQLLNAKLITQRKFDNLTKAERGGLSELDKAGFIKRQLVETRQITKHVAQILDSRMNTKYDENDKLIREVKVITLKSKLVSDFRKDFQFYKVREINNYHHAHDAYLNAVVGTALIKKYPKLESEFVYGDYKVYDVRKMIAKSEQEIGKATAKYFFYSNIMNFFKTEITLANGEIRKRPLIETNGETGEIVWDKGRDFATVRKVLSMPQVNIVKKTEVQTGGFSKESILPKRNSDKLIARKKDWDPKKYGGFDSPTVAYSVLVVAKVEKGKSKKLKSVKELLGITIMERSSFEKNPIDFLEAKGYKEVKKDLIIKLPKYSLFELENGRKRMLASAGELQKGNELALPSKYVNFLYLASHYEKLKGSPEDNEQKQLFVEQHKHYLDEIIEQISEFSKRVILADANLDKVLSAYNKHRDKPIREQAENIIHLFTLTNLGAPAAFKYFDTTIDRKRYTSTKEVLDATLIHQSITGLYETRIDLSQLGGDGGEAAAKEAAAKEAAAKEAAAKEAAAKGGTLQLDDEYRLYSPLVKPDQNIQFWLEQFPQAWAETAGMGLAKQVPPQVIQLKASATPVSVRQYPLSKEAQEGIRPHVQRLIQQGILVPVQSPWNTPLLPVRKPGTNDYRPVQDLREVNKRVQDIHPTVPNPYNLLCALPPQRSWYTVLDLKDAFFCLRLHPTSQPLFAFEWRDPGTGRTGQLTWTRLPQGFKNSPTIFNEALHRDLANFRIQHPQVTLLQYVDDLLLAGATKQDCLEGTKALLLELSDLGYRASAKKAQICRREVTYLGYSLRDGQRWLTEARKKTVVQIPAPTTAKQVREFLGTAGFCRLWIPGFATLAAPLYPLTKPKGEFSWAPEHQKAFDAIKKALLSAPALALPDVTKPFTLYVDERKGVARGVLTQTLGPWRRPVAYLSKKLDPVASGWPVCLKAIAAVAILVKDADKLTLGQNITVIAPHALENIVRQPPDRWMTNARMTHYQSLLLTERVTFAPPAALNPATLLPEETDEPVTHDCHQLLIEETGVRKDLTDIPLTGEVLTWFTDGSSYVVEGKRMAGAAVVDGTRTIWASSLPEGTSAQKAELMALTQALRLAEGKSINIYTDSRYAFATAHVHGAIYKQRGWLTSAGREIKNKEEILSLLEALHLPKRLAIIHCPGHQKAKDPISRGNQMADRVAKQAAQGVNLLAGKRTADGSEFEKRTADGSEFESPKKKAKVE

SEQ ID NO: 151 - protein, 2084 aa, synthetic construct
MPAAKRVKLDGGDKKYSIGLDIGTNSVGWAVITDEYKVPSKKFKVLGNTDRHSIKKNLIGALLFDSGETAEATRLKRTARRRYTRRKNRICYLQEIFSNEMAKVDDSFFHRLEESFLVEEDKKHERHPIFGNIVDEVAYHEKYPTIYHLRKKLVDSTDKADLRLIYLALAHMIKFRGHFLIEGDLNPDNSDVDKLFIQLVQTYNQLFEENPINASGVDAKAILSARLSKSRRLENLIAQLPGEKKNGLFGNLIALSLGLTPNFKSNFDLAEDAKLQLSKDTYDDDLDNLLAQIGDQYADLFLAAKNLSDAILLSDILRVNTEITKAPLSASMIKRYDEHHQDLTLLKALVRQQLPEKYKEIFFDQSKNGYAGYIDGGASQEEFYKFIKPILEKMDGTEELLVKLNREDLLRKQRTFDNGSIPHQIHLGELHAILRRQEDFYPFLKDNREKIEKILTFRIPYYVGPLARGNSRFAWMTRKSEETITPWNFEEVVDKGASAQSFIERMTNFDKNLPNEKVLPKHSLLYEYFTVYNELTKVKYVTEGMRKPAFLSGEQKKAIVDLLFKTNRKVTVKQLKEDYFKKIECFDSVEISGVEDRFNASLGTYHDLLKIIKDKDFLDNEENEDILEDIVLTLTLFEDREMIEERLKTYAHLFDDKVMKQLKRRRYTGWGRLSRKLINGIRDKQSGKTILDFLKSDGFANRNFMQLIHDDSLTFKEDIQKAQVSGQGDSLHEHIANLAGSPAIKKGILQTVKVVDELVKVMGRHKPENIVIEMARENQTTQKGQKNSRERMKRIEEGIKELGSQILKEHPVENTQLQNEKLYLYYLQNGRDMYVDQELDINRLSDYDVDHIVPQSFLKDDSIDNKVLTRSDKARGKSDNVPSEEVVKKMKNYWRQLLNAKLITQRKFDNLTKAERGGLSELDKAGFIKRQLVETRQITKHVAQILDSRMNTKYDENDKLIREVKVITLKSKLVSDFRKDFQFYKVREINNYHHAHDAYLNAVVGTALIKKYPKLESEFVYGDYKVYDVRKMIAKSEQEIGKATAKYFFYSNIMNFFKTEITLANGEIRKRPLIETNGETGEIVWDKGRDFATVRKVLSMPQVNIVKKTEVQTGGFSKESILPKRNSDKLIARKKDWDPKKYGGFDSPTVAYSVLVVAKVEKGKSKKLKSVKELLGITIMERSSFEKNPIDFLEAKGYKEVKKDLIIKLPKYSLFELENGRKRMLASAGELQKGNELALPSKYVNFLYLASHYEKLKGSPEDNEQKQLFVEQHKHYLDEIIEQISEFSKRVILADANLDKVLSAYNKHRDKPIREQAENIIHLFTLTNLGAPAAFKYFDTTIDRKRYTSTKEVLDATLIHQSITGLYETRIDLSQLGGDGGEAAAKGGTLQLDDEYRLYSPLVKPDQNIQFWLEQFPQAWAETAGMGLAKQVPPQVIQLKASATPVSVRQYPLSKEAQEGIRPHVQRLIQQGILVPVQSPWNTPLLPVRKPGTNDYRPVQDLREVNKRVQDIHPTVPNPYNLLCALPPQRSWYTVLDLKDAFFCLRLHPTSQPLFAFEWRDPGTGRTGQLTWTRLPQGFKNSPTIFNEALHRDLANFRIQHPQVTLLQYVDDLLLAGATKQDCLEGTKALLLELSDLGYRASAKKAQICRREVTYLGYSLRDGQRWLTEARKKTVVQIPAPTTAKQVREFLGTAGFCRLWIPGFATLAAPLYPLTKPKGEFSWAPEHQKAFDAIKKALLSAPALALPDVTKPFTLYVDERKGVARGVLTQTLGPWRRPVAYLSKKLDPVASGWPVCLKAIAAVAILVKDADKLTLGQNITVIAPHALENIVRQPPDRWMTNARMTHYQSLLLTERVTFAPPAALNPATLLPEETDEPVTHDCHQLLIEETGVRKDLTDIPLTGEVLTWFTDGSSYVVEGKRMAGAAVVDGTRTIWASSLPEGTSAQKAELMALTQALRLAEGKSINIYTDSRYAFATAHVHGAIYKQRGWLTSAGREIKNKEEILSLLEALHLPKRLAIIHCPGHQKAKDPISRGNQMADRVAKQAAQGVNLLAGKRTADGSEFEKRTADGSEFESPKKKAKVE

SEQ ID NO: 152 - protein, 2086 aa, synthetic construct
MPAAKRVKLDGGDKKYSIGLDIGTNSVGWAVITDEYKVPSKKFKVLGNTDRHSIKKNLIGALLFDSGETAEATRLKRTARRRYTRRKNRICYLQEIFSNEMAKVDDSFFHRLEESFLVEEDKKHERHPIFGNIVDEVAYHEKYPTIYHLRKKLVDSTDKADLRLIYLALAHMIKFRGHFLIEGDLNPDNSDVDKLFIQLVQTYNQLFEENPINASGVDAKAILSARLSKSRRLENLIAQLPGEKKNGLFGNLIALSLGLTPNFKSNFDLAEDAKLQLSKDTYDDDLDNLLAQIGDQYADLFLAAKNLSDAILLSDILRVNTEITKAPLSASMIKRYDEHHQDLTLLKALVRQQLPEKYKEIFFDQSKNGYAGYIDGGASQEEFYKFIKPILEKMDGTEELLVKLNREDLLRKQRTFDNGSIPHQIHLGELHAILRRQEDFYPFLKDNREKIEKILTFRIPYYVGPLARGNSRFAWMTRKSEETITPWNFEEVVDKGASAQSFIERMTNFDKNLPNEKVLPKHSLLYEYFTVYNELTKVKYVTEGMRKPAFLSGEQKKAIVDLLFKTNRKVTVKQLKEDYFKKIECFDSVEISGVEDRFNASLGTYHDLLKIIKDKDFLDNEENEDILEDIVLTLTLFEDREMIEERLKTYAHLFDDKVMKQLKRRRYTGWGRLSRKLINGIRDKQSGKTILDFLKSDGFANRNFMQLIHDDSLTFKEDIQKAQVSGQGDSLHEHIANLAGSPAIKKGILQTVKVVDELVKVMGRHKPENIVIEMARENQTTQKGQKNSRERMKRIEEGIKELGSQILKEHPVENTQLQNEKLYLYYLQNGRDMYVDQELDINRLSDYDVDHIVPQSFLKDDSIDNKVLTRSDKARGKSDNVPSEEVVKKMKNYWRQLLNAKLITQRKFDNLTKAERGGLSELDKAGFIKRQLVETRQITKHVAQILDSRMNTKYDENDKLIREVKVITLKSKLVSDFRKDFQFYKVREINNYHHAHDAYLNAVVGTALIKKYPKLESEFVYGDYKVYDVRKMIAKSEQEIGKATAKYFFYSNIMNFFKTEITLANGEIRKRPLIETNGETGEIVWDKGRDFATVRKVLSMPQVNIVKKTEVQTGGFSKESILPKRNSDKLIARKKDWDPKKYGGFDSPTVAYSVLVVAKVEKGKSKKLKSVKELLGITIMERSSFEKNPIDFLEAKGYKEVKKDLIIKLPKYSLFELENGRKRMLASAGELQKGNELALPSKYVNFLYLASHYEKLKGSPEDNEQKQLFVEQHKHYLDEIIEQISEFSKRVILADANLDKVLSAYNKHRDKPIREQAENIIHLFTLTNLGAPAAFKYFDTTIDRKRYTSTKEVLDATLIHQSITGLYETRIDLSQLGGDGGGGGGGGGGGTLQLDDEYRLYSPLVKPDQNIQFWLEQFPQAWAETAGMGLAKQVPPQVIQLKASATPVSVRQYPLSKEAQEGIRPHVQRLIQQGILVPVQSPWNTPLLPVRKPGTNDYRPVQDLREVNKRVQDIHPTVPNPYNLLCALPPQRSWYTVLDLKDAFFCLRLHPTSQPLFAFEWRDPGTGRTGQLTWTRLPQGFKNSPTIFNEALHRDLANFRIQHPQVTLLQYVDDLLLAGATKQDCLEGTKALLLELSDLGYRASAKKAQICRREVTYLGYSLRDGQRWLTEARKKTVVQIPAPTTAKQVREFLGTAGFCRLWIPGFATLAAPLYPLTKPKGEFSWAPEHQKAFDAIKKALLSAPALALPDVTKPFTLYVDERKGVARGVLTQTLGPWRRPVAYLSKKLDPVASGWPVCLKAIAAVAILVKDADKLTLGQNITVIAPHALENIVRQPPDRWMTNARMTHYQSLLLTERVTFAPPAALNPATLLPEETDEPVTHDCHQLLIEETGVRKDLTDIPLTGEVLTWFTDGSSYVVEGKRMAGAAVVDGTRTIWASSLPEGTSAQKAELMALTQALRLAEGKSINIYTDSRYAFATAHVHGAIYKQRGWLTSAGREIKNKEEILSLLEALHLPKRLAIIHCPGHQKAKDPISRGNQMADRVAKQAAQGVNLLAGKRTADGSEFEKRTADGSEFESPKKKAKVE

SEQ ID NO: 153 - protein, 2091 aa, synthetic construct
MPAAKRVKLDGGDKKYSIGLDIGTNSVGWAVITDEYKVPSKKFKVLGNTDRHSIKKNLIGALLFDSGETAEATRLKRTARRRYTRRKNRICYLQEIFSNEMAKVDDSFFHRLEESFLVEEDKKHERHPIFGNIVDEVAYHEKYPTIYHLRKKLVDSTDKADLRLIYLALAHMIKFRGHFLIEGDLNPDNSDVDKLFIQLVQTYNQLFEENPINASGVDAKAILSARLSKSRRLENLIAQLPGEKKNGLFGNLIALSLGLTPNFKSNFDLAEDAKLQLSKDTYDDDLDNLLAQIGDQYADLFLAAKNLSDAILLSDILRVNTEITKAPLSASMIKRYDEHHQDLTLLKALVRQQLPEKYKEIFFDQSKNGYAGYIDGGASQEEFYKFIKPILEKMDGTEELLVKLNREDLLRKQRTFDNGSIPHQIHLGELHAILRRQEDFYPFLKDNREKIEKILTFRIPYYVGPLARGNSRFAWMTRKSEETITPWNFEEVVDKGASAQSFIERMTNFDKNLPNEKVLPKHSLLYEYFTVYNELTKVKYVTEGMRKPAFLSGEQKKAIVDLLFKTNRKVTVKQLKEDYFKKIECFDSVEISGVEDRFNASLGTYHDLLKIIKDKDFLDNEENEDILEDIVLTLTLFEDREMIEERLKTYAHLFDDKVMKQLKRRRYTGWGRLSRKLINGIRDKQSGKTILDFLKSDGFANRNFMQLIHDDSLTFKEDIQKAQVSGQGDSLHEHIANLAGSPAIKKGILQTVKVVDELVKVMGRHKPENIVIEMARENQTTQKGQKNSRERMKRIEEGIKELGSQILKEHPVENTQLQNEKLYLYYLQNGRDMYVDQELDINRLSDYDVDHIVPQSFLKDDSIDNKVLTRSDKARGKSDNVPSEEVVKKMKNYWRQLLNAKLITQRKFDNLTKAERGGLSELDKAGFIKRQLVETRQITKHVAQILDSRMNTKYDENDKLIREVKVITLKSKLVSDFRKDFQFYKVREINNYHHAHDAYLNAVVGTALIKKYPKLESEFVYGDYKVYDVRKMIAKSEQEIGKATAKYFFYSNIMNFFKTEITLANGEIRKRPLIETNGETGEIVWDKGRDFATVRKVLSMPQVNIVKKTEVQTGGFSKESILPKRNSDKLIARKKDWDPKKYGGFDSPTVAYSVLVVAKVEKGKSKKLKSVKELLGITIMERSSFEKNPIDFLEAKGYKEVKKDLIIKLPKYSLFELENGRKRMLASAGELQKGNELALPSKYVNFLYLASHYEKLKGSPEDNEQKQLFVEQHKHYLDEIIEQISEFSKRVILADANLDKVLSAYNKHRDKPIREQAENIIHLFTLTNLGAPAAFKYFDTTIDRKRYTSTKEVLDATLIHQSITGLYETRIDLSQLGGDGGGSAGSAAGSGEFGGTLQLDDEYRLYSPLVKPDQNIQFWLEQFPQAWAETAGMGLAKQVPPQVIQLKASATPVSVRQYPLSKEAQEGIRPHVQRLIQQGILVPVQSPWNTPLLPVRKPGTNDYRPVQDLREVNKRVQDIHPTVPNPYNLLCALPPQRSWYTVLDLKDAFFCLRLHPTSQPLFAFEWRDPGTGRTGQLTWTRLPQGFKNSPTIFNEALHRDLANFRIQHPQVTLLQYVDDLLLAGATKQDCLEGTKALLLELSDLGYRASAKKAQICRREVTYLGYSLRDGQRWLTEARKKTVVQIPAPTTAKQVREFLGTAGFCRLWIPGFATLAAPLYPLTKPKGEFSWAPEHQKAFDAIKKALLSAPALALPDVTKPFTLYVDERKGVARGVLTQTLGPWRRPVAYLSKKLDPVASGWPVCLKAIAAVAILVKDADKLTLGQNITVIAPHALENIVRQPPDRWMTNARMTHYQSLLLTERVTFAPPAALNPATLLPEETDEPVTHDCHQLLIEETGVRKDLTDIPLTGEVLTWFTDGSSYVVEGKRMAGAAVVDGTRTIWASSLPEGTSAQKAELMALTQALRLAEGKSINIYTDSRYAFATAHVHGAIYKQRGWLTSAGREIKNKEEILSLLEALHLPKRLAIIHCPGHQKAKDPISRGNQMADRVAKQAAQGVNLLAGKRTADGSEFEKRTADGSEFESPKKKAKVE

SEQ ID NO: 154 - protein, 2090 aa, synthetic construct
MPAAKRVKLDGGDKKYSIGLDIGTNSVGWAVITDEYKVPSKKFKVLGNTDRHSIKKNLIGALLFDSGETAEATRLKRTARRRYTRRKNRICYLQEIFSNEMAKVDDSFFHRLEESFLVEEDKKHERHPIFGNIVDEVAYHEKYPTIYHLRKKLVDSTDKADLRLIYLALAHMIKFRGHFLIEGDLNPDNSDVDKLFIQLVQTYNQLFEENPINASGVDAKAILSARLSKSRRLENLIAQLPGEKKNGLFGNLIALSLGLTPNFKSNFDLAEDAKLQLSKDTYDDDLDNLLAQIGDQYADLFLAAKNLSDAILLSDILRVNTEITKAPLSASMIKRYDEHHQDLTLLKALVRQQLPEKYKEIFFDQSKNGYAGYIDGGASQEEFYKFIKPILEKMDGTEELLVKLNREDLLRKQRTFDNGSIPHQIHLGELHAILRRQEDFYPFLKDNREKIEKILTFRIPYYVGPLARGNSRFAWMTRKSEETITPWNFEEVVDKGASAQSFIERMTNFDKNLPNEKVLPKHSLLYEYFTVYNELTKVKYVTEGMRKPAFLSGEQKKAIVDLLFKTNRKVTVKQLKEDYFKKIECFDSVEISGVEDRFNASLGTYHDLLKIIKDKDFLDNEENEDILEDIVLTLTLFEDREMIEERLKTYAHLFDDKVMKQLKRRRYTGWGRLSRKLINGIRDKQSGKTILDFLKSDGFANRNFMQLIHDDSLTFKEDIQKAQVSGQGDSLHEHIANLAGSPAIKKGILQTVKVVDELVKVMGRHKPENIVIEMARENQTTQKGQKNSRERMKRIEEGIKELGSQILKEHPVENTQLQNEKLYLYYLQNGRDMYVDQELDINRLSDYDVDHIVPQSFLKDDSIDNKVLTRSDKARGKSDNVPSEEVVKKMKNYWRQLLNAKLITQRKFDNLTKAERGGLSELDKAGFIKRQLVETRQITKHVAQILDSRMNTKYDENDKLIREVKVITLKSKLVSDFRKDFQFYKVREINNYHHAHDAYLNAVVGTALIKKYPKLESEFVYGDYKVYDVRKMIAKSEQEIGKATAKYFFYSNIMNFFKTEITLANGEIRKRPLIETNGETGEIVWDKGRDFATVRKVLSMPQVNIVKKTEVQTGGFSKESILPKRNSDKLIARKKDWDPKKYGGFDSPTVAYSVLVVAKVEKGKSKKLKSVKELLGITIMERSSFEKNPIDFLEAKGYKEVKKDLIIKLPKYSLFELENGRKRMLASAGELQKGNELALPSKYVNFLYLASHYEKLKGSPEDNEQKQLFVEQHKHYLDEIIEQISEFSKRVILADANLDKVLSAYNKHRDKPIREQAENIIHLFTLTNLGAPAAFKYFDTTIDRKRYTSTKEVLDATLIHQSITGLYETRIDLSQLGGDGGGGSEAAAKPAPGGTLQLDDEYRLYSPLVKPDQNIQFWLEQFPQAWAETAGMGLAKQVPPQVIQLKASATPVSVRQYPLSKEAQEGIRPHVQRLIQQGILVPVQSPWNTPLLPVRKPGTNDYRPVQDLREVNKRVQDIHPTVPNPYNLLCALPPQRSWYTVLDLKDAFFCLRLHPTSQPLFAFEWRDPGTGRTGQLTWTRLPQGFKNSPTIFNEALHRDLANFRIQHPQVTLLQYVDDLLLAGATKQDCLEGTKALLLELSDLGYRASAKKAQICRREVTYLGYSLRDGQRWLTEARKKTVVQIPAPTTAKQVREFLGTAGFCRLWIPGFATLAAPLYPLTKPKGEFSWAPEHQKAFDAIKKALLSAPALALPDVTKPFTLYVDERKGVARGVLTQTLGPWRRPVAYLSKKLDPVASGWPVCLKAIAAVAILVKDADKLTLGQNITVIAPHALENIVRQPPDRWMTNARMTHYQSLLLTERVTFAPPAALNPATLLPEETDEPVTHDCHQLLIEETGVRKDLTDIPLTGEVLTWFTDGSSYVVEGKRMAGAAVVDGTRTIWASSLPEGTSAQKAELMALTQALRLAEGKSINIYTDSRYAFATAHVHGAIYKQRGWLTSAGREIKNKEEILSLLEALHLPKRLAIIHCPGHQKAKDPISRGNQMADRVAKQAAQGVNLLAGKRTADGSEFEKRTADGSEFESPKKKAKVE

SEQ ID NO: 155 - protein, 2088 aa, synthetic construct
MPAAKRVKLDGGDKKYSIGLDIGTNSVGWAVITDEYKVPSKKFKVLGNTDRHSIKKNLIGALLFDSGETAEATRLKRTARRRYTRRKNRICYLQEIFSNEMAKVDDSFFHRLEESFLVEEDKKHERHPIFGNIVDEVAYHEKYPTIYHLRKKLVDSTDKADLRLIYLALAHMIKFRGHFLIEGDLNPDNSDVDKLFIQLVQTYNQLFEENPINASGVDAKAILSARLSKSRRLENLIAQLPGEKKNGLFGNLIALSLGLTPNFKSNFDLAEDAKLQLSKDTYDDDLDNLLAQIGDQYADLFLAAKNLSDAILLSDILRVNTEITKAPLSASMIKRYDEHHQDLTLLKALVRQQLPEKYKEIFFDQSKNGYAGYIDGGASQEEFYKFIKPILEKMDGTEELLVKLNREDLLRKQRTFDNGSIPHQIHLGELHAILRRQEDFYPFLKDNREKIEKILTFRIPYYVGPLARGNSRFAWMTRKSEETITPWNFEEVVDKGASAQSFIERMTNFDKNLPNEKVLPKHSLLYEYFTVYNELTKVKYVTEGMRKPAFLSGEQKKAIVDLLFKTNRKVTVKQLKEDYFKKIECFDSVEISGVEDRFNASLGTYHDLLKIIKDKDFLDNEENEDILEDIVLTLTLFEDREMIEERLKTYAHLFDDKVMKQLKRRRYTGWGRLSRKLINGIRDKQSGKTILDFLKSDGFANRNFMQLIHDDSLTFKEDIQKAQVSGQGDSLHEHIANLAGSPAIKKGILQTVKVVDELVKVMGRHKPENIVIEMARENQTTQKGQKNSRERMKRIEEGIKELGSQILKEHPVENTQLQNEKLYLYYLQNGRDMYVDQELDINRLSDYDVDHIVPQSFLKDDSIDNKVLTRSDKARGKSDNVPSEEVVKKMKNYWRQLLNAKLITQRKFDNLTKAERGGLSELDKAGFIKRQLVETRQITKHVAQILDSRMNTKYDENDKLIREVKVITLKSKLVSDFRKDFQFYKVREINNYHHAHDAYLNAVVGTALIKKYPKLESEFVYGDYKVYDVRKMIAKSEQEIGKATAKYFFYSNIMNFFKTEITLANGEIRKRPLIETNGETGEIVWDKGRDFATVRKVLSMPQVNIVKKTEVQTGGFSKESILPKRNSDKLIARKKDWDPKKYGGFDSPTVAYSVLVVAKVEKGKSKKLKSVKELLGITIMERSSFEKNPIDFLEAKGYKEVKKDLIIKLPKYSLFELENGRKRMLASAGELQKGNELALPSKYVNFLYLASHYEKLKGSPEDNEQKQLFVEQHKHYLDEIIEQISEFSKRVILADANLDKVLSAYNKHRDKPIREQAENIIHLFTLTNLGAPAAFKYFDTTIDRKRYTSTKEVLDATLIHQSITGLYETRIDLSQLGGDGGGGSGSSPAPGGTLQLDDEYRLYSPLVKPDQNIQFWLEQFPQAWAETAGMGLAKQVPPQVIQLKASATPVSVRQYPLSKEAQEGIRPHVQRLIQQGILVPVQSPWNTPLLPVRKPGTNDYRPVQDLREVNKRVQDIHPTVPNPYNLLCALPPQRSWYTVLDLKDAFFCLRLHPTSQPLFAFEWRDPGTGRTGQLTWTRLPQGFKNSPTIFNEALHRDLANFRIQHPQVTLLQYVDDLLLAGATKQDCLEGTKALLLELSDLGYRASAKKAQICRREVTYLGYSLRDGQRWLTEARKKTVVQIPAPTTAKQVREFLGTAGFCRLWIPGFATLAAPLYPLTKPKGEFSWAPEHQKAFDAIKKALLSAPALALPDVTKPFTLYVDERKGVARGVLTQTLGPWRRPVAYLSKKLDPVASGWPVCLKAIAAVAILVKDADKLTLGQNITVIAPHALENIVRQPPDRWMTNARMTHYQSLLLTERVTFAPPAALNPATLLPEETDEPVTHDCHQLLIEETGVRKDLTDIPLTGEVLTWFTDGSSYVVEGKRMAGAAVVDGTRTIWASSLPEGTSAQKAELMALTQALRLAEGKSINIYTDSRYAFATAHVHGAIYKQRGWLTSAGREIKNKEEILSLLEALHLPKRLAIIHCPGHQKAKDPISRGNQMADRVAKQAAQGVNLLAGKRTADGSEFEKRTADGSEFESPKKKAKVE

SEQ ID NO: 156 - protein, 2125 aa, synthetic construct
MPAAKRVKLDGGDKKYSIGLDIGTNSVGWAVITDEYKVPSKKFKVLGNTDRHSIKKNLIGALLFDSGETAEATRLKRTARRRYTRRKNRICYLQEIFSNEMAKVDDSFFHRLEESFLVEEDKKHERHPIFGNIVDEVAYHEKYPTIYHLRKKLVDSTDKADLRLIYLALAHMIKFRGHFLIEGDLNPDNSDVDKLFIQLVQTYNQLFEENPINASGVDAKAILSARLSKSRRLENLIAQLPGEKKNGLFGNLIALSLGLTPNFKSNFDLAEDAKLQLSKDTYDDDLDNLLAQIGDQYADLFLAAKNLSDAILLSDILRVNTEITKAPLSASMIKRYDEHHQDLTLLKALVRQQLPEKYKEIFFDQSKNGYAGYIDGGASQEEFYKFIKPILEKMDGTEELLVKLNREDLLRKQRTFDNGSIPHQIHLGELHAILRRQEDFYPFLKDNREKIEKILTFRIPYYVGPLARGNSRFAWMTRKSEETITPWNFEEVVDKGASAQSFIERMTNFDKNLPNEKVLPKHSLLYEYFTVYNELTKVKYVTEGMRKPAFLSGEQKKAIVDLLFKTNRKVTVKQLKEDYFKKIECFDSVEISGVEDRFNASLGTYHDLLKIIKDKDFLDNEENEDILEDIVLTLTLFEDREMIEERLKTYAHLFDDKVMKQLKRRRYTGWGRLSRKLINGIRDKQSGKTILDFLKSDGFANRNFMQLIHDDSLTFKEDIQKAQVSGQGDSLHEHIANLAGSPAIKKGILQTVKVVDELVKVMGRHKPENIVIEMARENQTTQKGQKNSRERMKRIEEGIKELGSQILKEHPVENTQLQNEKLYLYYLQNGRDMYVDQELDINRLSDYDVDHIVPQSFLKDDSIDNKVLTRSDKARGKSDNVPSEEVVKKMKNYWRQLLNAKLITQRKFDNLTKAERGGLSELDKAGFIKRQLVETRQITKHVAQILDSRMNTKYDENDKLIREVKVITLKSKLVSDFRKDFQFYKVREINNYHHAHDAYLNAVVGTALIKKYPKLESEFVYGDYKVYDVRKMIAKSEQEIGKATAKYFFYSNIMNFFKTEITLANGEIRKRPLIETNGETGEIVWDKGRDFATVRKVLSMPQVNIVKKTEVQTGGFSKESILPKRNSDKLIARKKDWDPKKYGGFDSPTVAYSVLVVAKVEKGKSKKLKSVKELLGITIMERSSFEKNPIDFLEAKGYKEVKKDLIIKLPKYSLFELENGRKRMLASAGELQKGNELALPSKYVNFLYLASHYEKLKGSPEDNEQKQLFVEQHKHYLDEIIEQISEFSKRVILADANLDKVLSAYNKHRDKPIREQAENIIHLFTLTNLGAPAAFKYFDTTIDRKRYTSTKEVLDATLIHQSITGLYETRIDLSQLGGDGGAEAAAKEAAAKEAAAKEAAAKALEAEAAAKEAAAKEAAAKEAAAKAGGTLQLDDEYRLYSPLVKPDQNIQFWLEQFPQAWAETAGMGLAKQVPPQVIQLKASATPVSVRQYPLSKEAQEGIRPHVQRLIQQGILVPVQSPWNTPLLPVRKPGTNDYRPVQDLREVNKRVQDIHPTVPNPYNLLCALPPQRSWYTVLDLKDAFFCLRLHPTSQPLFAFEWRDPGTGRTGQLTWTRLPQGFKNSPTIFNEALHRDLANFRIQHPQVTLLQYVDDLLLAGATKQDCLEGTKALLLELSDLGYRASAKKAQICRREVTYLGYSLRDGQRWLTEARKKTVVQIPAPTTAKQVREFLGTAGFCRLWIPGFATLAAPLYPLTKPKGEFSWAPEHQKAFDAIKKALLSAPALALPDVTKPFTLYVDERKGVARGVLTQTLGPWRRPVAYLSKKLDPVASGWPVCLKAIAAVAILVKDADKLTLGQNITVIAPHALENIVRQPPDRWMTNARMTHYQSLLLTERVTFAPPAALNPATLLPEETDEPVTHDCHQLLIEETGVRKDLTDIPLTGEVLTWFTDGSSYVVEGKRMAGAAVVDGTRTIWASSLPEGTSAQKAELMALTQALRLAEGKSINIYTDSRYAFATAHVHGAIYKQRGWLTSAGREIKNKEEILSLLEALHLPKRLAIIHCPGHQKAKDPISRGNQMADRVAKQAAQGVNLLAGKRTADGSEFEKRTADGSEFESPKKKAKVE

SEQ ID NO: 157 - protein, 2092 aa, synthetic construct
MPAAKRVKLDGGDKKYSIGLDIGTNSVGWAVITDEYKVPSKKFKVLGNTDRHSIKKNLIGALLFDSGETAEATRLKRTARRRYTRRKNRICYLQEIFSNEMAKVDDSFFHRLEESFLVEEDKKHERHPIFGNIVDEVAYHEKYPTIYHLRKKLVDSTDKADLRLIYLALAHMIKFRGHFLIEGDLNPDNSDVDKLFIQLVQTYNQLFEENPINASGVDAKAILSARLSKSRRLENLIAQLPGEKKNGLFGNLIALSLGLTPNFKSNFDLAEDAKLQLSKDTYDDDLDNLLAQIGDQYADLFLAAKNLSDAILLSDILRVNTEITKAPLSASMIKRYDEHHQDLTLLKALVRQQLPEKYKEIFFDQSKNGYAGYIDGGASQEEFYKFIKPILEKMDGTEELLVKLNREDLLRKQRTFDNGSIPHQIHLGELHAILRRQEDFYPFLKDNREKIEKILTFRIPYYVGPLARGNSRFAWMTRKSEETITPWNFEEVVDKGASAQSFIERMTNFDKNLPNEKVLPKHSLLYEYFTVYNELTKVKYVTEGMRKPAFLSGEQKKAIVDLLFKTNRKVTVKQLKEDYFKKIECFDSVEISGVEDRFNASLGTYHDLLKIIKDKDFLDNEENEDILEDIVLTLTLFEDREMIEERLKTYAHLFDDKVMKQLKRRRYTGWGRLSRKLINGIRDKQSGKTILDFLKSDGFANRNFMQLIHDDSLTFKEDIQKAQVSGQGDSLHEHIANLAGSPAIKKGILQTVKVVDELVKVMGRHKPENIVIEMARENQTTQKGQKNSRERMKRIEEGIKELGSQILKEHPVENTQLQNEKLYLYYLQNGRDMYVDQELDINRLSDYDVDHIVPQSFLKDDSIDNKVLTRSDKARGKSDNVPSEEVVKKMKNYWRQLLNAKLITQRKFDNLTKAERGGLSELDKAGFIKRQLVETRQITKHVAQILDSRMNTKYDENDKLIREVKVITLKSKLVSDFRKDFQFYKVREINNYHHAHDAYLNAVVGTALIKKYPKLESEFVYGDYKVYDVRKMIAKSEQEIGKATAKYFFYSNIMNFFKTEITLANGEIRKRPLIETNGETGEIVWDKGRDFATVRKVLSMPQVNIVKKTEVQTGGFSKESILPKRNSDKLIARKKDWDPKKYGGFDSPTVAYSVLVVAKVEKGKSKKLKSVKELLGITIMERSSFEKNPIDFLEAKGYKEVKKDLIIKLPKYSLFELENGRKRMLASAGELQKGNELALPSKYVNFLYLASHYEKLKGSPEDNEQKQLFVEQHKHYLDEIIEQISEFSKRVILADANLDKVLSAYNKHRDKPIREQAENIIHLFTLTNLGAPAAFKYFDTTIDRKRYTSTKEVLDATLIHQSITGLYETRIDLSQLGGDGGPAPAPAPAPAPAPGGTLQLDDEYRLYSPLVKPDQNIQFWLEQFPQAWAETAGMGLAKQVPPQVIQLKASATPVSVRQYPLSKEAQEGIRPHVQRLIQQGILVPVQSPWNTPLLPVRKPGTNDYRPVQDLREVNKRVQDIHPTVPNPYNLLCALPPQRSWYTVLDLKDAFFCLRLHPTSQPLFAFEWRDPGTGRTGQLTWTRLPQGFKNSPTIFNEALHRDLANFRIQHPQVTLLQYVDDLLLAGATKQDCLEGTKALLLELSDLGYRASAKKAQICRREVTYLGYSLRDGQRWLTEARKKTVVQIPAPTTAKQVREFLGTAGFCRLWIPGFATLAAPLYPLTKPKGEFSWAPEHQKAFDAIKKALLSAPALALPDVTKPFTLYVDERKGVARGVLTQTLGPWRRPVAYLSKKLDPVASGWPVCLKAIAAVAILVKDADKLTLGQNITVIAPHALENIVRQPPDRWMTNARMTHYQSLLLTERVTFAPPAALNPATLLPEETDEPVTHDCHQLLIEETGVRKDLTDIPLTGEVLTWFTDGSSYVVEGKRMAGAAVVDGTRTIWASSLPEGTSAQKAELMALTQALRLAEGKSINIYTDSRYAFATAHVHGAIYKQRGWLTSAGREIKNKEEILSLLEALHLPKRLAIIHCPGHQKAKDPISRGNQMADRVAKQAAQGVNLLAGKRTADGSEFEKRTADGSEFESPKKKAKVE

SEQ ID NO: 158 - protein, 2087 aa, synthetic construct
MPAAKRVKLDGGDKKYSIGLDIGTNSVGWAVITDEYKVPSKKFKVLGNTDRHSIKKNLIGALLFDSGETAEATRLKRTARRRYTRRKNRICYLQEIFSNEMAKVDDSFFHRLEESFLVEEDKKHERHPIFGNIVDEVAYHEKYPTIYHLRKKLVDSTDKADLRLIYLALAHMIKFRGHFLIEGDLNPDNSDVDKLFIQLVQTYNQLFEENPINASGVDAKAILSARLSKSRRLENLIAQLPGEKKNGLFGNLIALSLGLTPNFKSNFDLAEDAKLQLSKDTYDDDLDNLLAQIGDQYADLFLAAKNLSDAILLSDILRVNTEITKAPLSASMIKRYDEHHQDLTLLKALVRQQLPEKYKEIFFDQSKNGYAGYIDGGASQEEFYKFIKPILEKMDGTEELLVKLNREDLLRKQRTFDNGSIPHQIHLGELHAILRRQEDFYPFLKDNREKIEKILTFRIPYYVGPLARGNSRFAWMTRKSEETITPWNFEEVVDKGASAQSFIERMTNFDKNLPNEKVLPKHSLLYEYFTVYNELTKVKYVTEGMRKPAFLSGEQKKAIVDLLFKTNRKVTVKQLKEDYFKKIECFDSVEISGVEDRFNASLGTYHDLLKIIKDKDFLDNEENEDILEDIVLTLTLFEDREMIEERLKTYAHLFDDKVMKQLKRRRYTGWGRLSRKLINGIRDKQSGKTILDFLKSDGFANRNFMQLIHDDSLTFKEDIQKAQVSGQGDSLHEHIANLAGSPAIKKGILQTVKVVDELVKVMGRHKPENIVIEMARENQTTQKGQKNSRERMKRIEEGIKELGSQILKEHPVENTQLQNEKLYLYYLQNGRDMYVDQELDINRLSDYDVDHIVPQSFLKDDSIDNKVLTRSDKARGKSDNVPSEEVVKKMKNYWRQLLNAKLITQRKFDNLTKAERGGLSELDKAGFIKRQLVETRQITKHVAQILDSRMNTKYDENDKLIREVKVITLKSKLVSDFRKDFQFYKVREINNYHHAHDAYLNAVVGTALIKKYPKLESEFVYGDYKVYDVRKMIAKSEQEIGKATAKYFFYSNIMNFFKTEITLANGEIRKRPLIETNGETGEIVWDKGRDFATVRKVLSMPQVNIVKKTEVQTGGFSKESILPKRNSDKLIARKKDWDPKKYGGFDSPTVAYSVLVVAKVEKGKSKKLKSVKELLGITIMERSSFEKNPIDFLEAKGYKEVKKDLIIKLPKYSLFELENGRKRMLASAGELQKGNELALPSKYVNFLYLASHYEKLKGSPEDNEQKQLFVEQHKHYLDEIIEQISEFSKRVILADANLDKVLSAYNKHRDKPIREQAENIIHLFTLTNLGAPAAFKYFDTTIDRKRYTSTKEVLDATLIHQSITGLYETRIDLSQLGGDGGEAAAKGGSGGTLQLDDEYRLYSPLVKPDQNIQFWLEQFPQAWAETAGMGLAKQVPPQVIQLKASATPVSVRQYPLSKEAQEGIRPHVQRLIQQGILVPVQSPWNTPLLPVRKPGTNDYRPVQDLREVNKRVQDIHPTVPNPYNLLCALPPQRSWYTVLDLKDAFFCLRLHPTSQPLFAFEWRDPGTGRTGQLTWTRLPQGFKNSPTIFNEALHRDLANFRIQHPQVTLLQYVDDLLLAGATKQDCLEGTKALLLELSDLGYRASAKKAQICRREVTYLGYSLRDGQRWLTEARKKTVVQIPAPTTAKQVREFLGTAGFCRLWIPGFATLAAPLYPLTKPKGEFSWAPEHQKAFDAIKKALLSAPALALPDVTKPFTLYVDERKGVARGVLTQTLGPWRRPVAYLSKKLDPVASGWPVCLKAIAAVAILVKDADKLTLGQNITVIAPHALENIVRQPPDRWMTNARMTHYQSLLLTERVTFAPPAALNPATLLPEETDEPVTHDCHQLLIEETGVRKDLTDIPLTGEVLTWFTDGSSYVVEGKRMAGAAVVDGTRTIWASSLPEGTSAQKAELMALTQALRLAEGKSINIYTDSRYAFATAHVHGAIYKQRGWLTSAGREIKNKEEILSLLEALHLPKRLAIIHCPGHQKAKDPISRGNQMADRVAKQAAQGVNLLAGKRTADGSEFEKRTADGSEFESPKKKAKVE

SEQ ID NO: 159 - protein, 2094 aa, synthetic construct
MPAAKRVKLDGGDKKYSIGLDIGTNSVGWAVITDEYKVPSKKFKVLGNTDRHSIKKNLIGALLFDSGETAEATRLKRTARRRYTRRKNRICYLQEIFSNEMAKVDDSFFHRLEESFLVEEDKKHERHPIFGNIVDEVAYHEKYPTIYHLRKKLVDSTDKADLRLIYLALAHMIKFRGHFLIEGDLNPDNSDVDKLFIQLVQTYNQLFEENPINASGVDAKAILSARLSKSRRLENLIAQLPGEKKNGLFGNLIALSLGLTPNFKSNFDLAEDAKLQLSKDTYDDDLDNLLAQIGDQYADLFLAAKNLSDAILLSDILRVNTEITKAPLSASMIKRYDEHHQDLTLLKALVRQQLPEKYKEIFFDQSKNGYAGYIDGGASQEEFYKFIKPILEKMDGTEELLVKLNREDLLRKQRTFDNGSIPHQIHLGELHAILRRQEDFYPFLKDNREKIEKILTFRIPYYVGPLARGNSRFAWMTRKSEETITPWNFEEVVDKGASAQSFIERMTNFDKNLPNEKVLPKHSLLYEYFTVYNELTKVKYVTEGMRKPAFLSGEQKKAIVDLLFKTNRKVTVKQLKEDYFKKIECFDSVEISGVEDRFNASLGTYHDLLKIIKDKDFLDNEENEDILEDIVLTLTLFEDREMIEERLKTYAHLFDDKVMKQLKRRRYTGWGRLSRKLINGIRDKQSGKTILDFLKSDGFANRNFMQLIHDDSLTFKEDIQKAQVSGQGDSLHEHIANLAGSPAIKKGILQTVKVVDELVKVMGRHKPENIVIEMARENQTTQKGQKNSRERMKRIEEGIKELGSQILKEHPVENTQLQNEKLYLYYLQNGRDMYVDQELDINRLSDYDVDHIVPQSFLKDDSIDNKVLTRSDKARGKSDNVPSEEVVKKMKNYWRQLLNAKLITQRKFDNLTKAERGGLSELDKAGFIKRQLVETRQITKHVAQILDSRMNTKYDENDKLIREVKVITLKSKLVSDFRKDFQFYKVREINNYHHAHDAYLNAVVGTALIKKYPKLESEFVYGDYKVYDVRKMIAKSEQEIGKATAKYFFYSNIMNFFKTEITLANGEIRKRPLIETNGETGEIVWDKGRDFATVRKVLSMPQVNIVKKTEVQTGGFSKESILPKRNSDKLIARKKDWDPKKYGGFDSPTVAYSVLVVAKVEKGKSKKLKSVKELLGITIMERSSFEKNPIDFLEAKGYKEVKKDLIIKLPKYSLFELENGRKRMLASAGELQKGNELALPSKYVNFLYLASHYEKLKGSPEDNEQKQLFVEQHKHYLDEIIEQISEFSKRVILADANLDKVLSAYNKHRDKPIREQAENIIHLFTLTNLGAPAAFKYFDTTIDRKRYTSTKEVLDATLIHQSITGLYETRIDLSQLGGDGGGGGGSGGGGSGGGGSGGTLQLDDEYRLYSPLVKPDQNIQFWLEQFPQAWAETAGMGLAKQVPPQVIQLKASATPVSVRQYPLSKEAQEGIRPHVQRLIQQGILVPVQSPWNTPLLPVRKPGTNDYRPVQDLREVNKRVQDIHPTVPNPYNLLCALPPQRSWYTVLDLKDAFFCLRLHPTSQPLFAFEWRDPGTGRTGQLTWTRLPQGFKNSPTIFNEALHRDLANFRIQHPQVTLLQYVDDLLLAGATKQDCLEGTKALLLELSDLGYRASAKKAQICRREVTYLGYSLRDGQRWLTEARKKTVVQIPAPTTAKQVREFLGTAGFCRLWIPGFATLAAPLYPLTKPKGEFSWAPEHQKAFDAIKKALLSAPALALPDVTKPFTLYVDERKGVARGVLTQTLGPWRRPVAYLSKKLDPVASGWPVCLKAIAAVAILVKDADKLTLGQNITVIAPHALENIVRQPPDRWMTNARMTHYQSLLLTERVTFAPPAALNPATLLPEETDEPVTHDCHQLLIEETGVRKDLTDIPLTGEVLTWFTDGSSYVVEGKRMAGAAVVDGTRTIWASSLPEGTSAQKAELMALTQALRLAEGKSINIYTDSRYAFATAHVHGAIYKQRGWLTSAGREIKNKEEILSLLEALHLPKRLAIIHCPGHQKAKDPISRGNQMADRVAKQAAQGVNLLAGKRTADGSEFEKRTADGSEFESPKKKAKVE

SEQ ID NO: 160 - protein, 2090 aa, synthetic construct
MPAAKRVKLDGGDKKYSIGLDIGTNSVGWAVITDEYKVPSKKFKVLGNTDRHSIKKNLIGALLFDSGETAEATRLKRTARRRYTRRKNRICYLQEIFSNEMAKVDDSFFHRLEESFLVEEDKKHERHPIFGNIVDEVAYHEKYPTIYHLRKKLVDSTDKADLRLIYLALAHMIKFRGHFLIEGDLNPDNSDVDKLFIQLVQTYNQLFEENPINASGVDAKAILSARLSKSRRLENLIAQLPGEKKNGLFGNLIALSLGLTPNFKSNFDLAEDAKLQLSKDTYDDDLDNLLAQIGDQYADLFLAAKNLSDAILLSDILRVNTEITKAPLSASMIKRYDEHHQDLTLLKALVRQQLPEKYKEIFFDQSKNGYAGYIDGGASQEEFYKFIKPILEKMDGTEELLVKLNREDLLRKQRTFDNGSIPHQIHLGELHAILRRQEDFYPFLKDNREKIEKILTFRIPYYVGPLARGNSRFAWMTRKSEETITPWNFEEVVDKGASAQSFIERMTNFDKNLPNEKVLPKHSLLYEYFTVYNELTKVKYVTEGMRKPAFLSGEQKKAIVDLLFKTNRKVTVKQLKEDYFKKIECFDSVEISGVEDRFNASLGTYHDLLKIIKDKDFLDNEENEDILEDIVLTLTLFEDREMIEERLKTYAHLFDDKVMKQLKRRRYTGWGRLSRKLINGIRDKQSGKTILDFLKSDGFANRNFMQLIHDDSLTFKEDIQKAQVSGQGDSLHEHIANLAGSPAIKKGILQTVKVVDELVKVMGRHKPENIVIEMARENQTTQKGQKNSRERMKRIEEGIKELGSQILKEHPVENTQLQNEKLYLYYLQNGRDMYVDQELDINRLSDYDVDHIVPQSFLKDDSIDNKVLTRSDKARGKSDNVPSEEVVKKMKNYWRQLLNAKLITQRKFDNLTKAERGGLSELDKAGFIKRQLVETRQITKHVAQILDSRMNTKYDENDKLIREVKVITLKSKLVSDFRKDFQFYKVREINNYHHAHDAYLNAVVGTALIKKYPKLESEFVYGDYKVYDVRKMIAKSEQEIGKATAKYFFYSNIMNFFKTEITLANGEIRKRPLIETNGETGEIVWDKGRDFATVRKVLSMPQVNIVKKTEVQTGGFSKESILPKRNSDKLIARKKDWDPKKYGGFDSPTVAYSVLVVAKVEKGKSKKLKSVKELLGITIMERSSFEKNPIDFLEAKGYKEVKKDLIIKLPKYSLFELENGRKRMLASAGELQKGNELALPSKYVNFLYLASHYEKLKGSPEDNEQKQLFVEQHKHYLDEIIEQISEFSKRVILADANLDKVLSAYNKHRDKPIREQAENIIHLFTLTNLGAPAAFKYFDTTIDRKRYTSTKEVLDATLIHQSITGLYETRIDLSQLGGDGGEAAAKGSSGGGGGTLQLDDEYRLYSPLVKPDQNIQFWLEQFPQAWAETAGMGLAKQVPPQVIQLKASATPVSVRQYPLSKEAQEGIRPHVQRLIQQGILVPVQSPWNTPLLPVRKPGTNDYRPVQDLREVNKRVQDIHPTVPNPYNLLCALPPQRSWYTVLDLKDAFFCLRLHPTSQPLFAFEWRDPGTGRTGQLTWTRLPQGFKNSPTIFNEALHRDLANFRIQHPQVTLLQYVDDLLLAGATKQDCLEGTKALLLELSDLGYRASAKKAQICRREVTYLGYSLRDGQRWLTEARKKTVVQIPAPTTAKQVREFLGTAGFCRLWIPGFATLAAPLYPLTKPKGEFSWAPEHQKAFDAIKKALLSAPALALPDVTKPFTLYVDERKGVARGVLTQTLGPWRRPVAYLSKKLDPVASGWPVCLKAIAAVAILVKDADKLTLGQNITVIAPHALENIVRQPPDRWMTNARMTHYQSLLLTERVTFAPPAALNPATLLPEETDEPVTHDCHQLLIEETGVRKDLTDIPLTGEVLTWFTDGSSYVVEGKRMAGAAVVDGTRTIWASSLPEGTSAQKAELMALTQALRLAEGKSINIYTDSRYAFATAHVHGAIYKQRGWLTSAGREIKNKEEILSLLEALHLPKRLAIIHCPGHQKAKDPISRGNQMADRVAKQAAQGVNLLAGKRTADGSEFEKRTADGSEFESPKKKAKVE

SEQ ID NO: 161 - protein, 2094 aa, synthetic construct
MPAAKRVKLDGGDKKYSIGLDIGTNSVGWAVITDEYKVPSKKFKVLGNTDRHSIKKNLIGALLFDSGETAEATRLKRTARRRYTRRKNRICYLQEIFSNEMAKVDDSFFHRLEESFLVEEDKKHERHPIFGNIVDEVAYHEKYPTIYHLRKKLVDSTDKADLRLIYLALAHMIKFRGHFLIEGDLNPDNSDVDKLFIQLVQTYNQLFEENPINASGVDAKAILSARLSKSRRLENLIAQLPGEKKNGLFGNLIALSLGLTPNFKSNFDLAEDAKLQLSKDTYDDDLDNLLAQIGDQYADLFLAAKNLSDAILLSDILRVNTEITKAPLSASMIKRYDEHHQDLTLLKALVRQQLPEKYKEIFFDQSKNGYAGYIDGGASQEEFYKFIKPILEKMDGTEELLVKLNREDLLRKQRTFDNGSIPHQIHLGELHAILRRQEDFYPFLKDNREKIEKILTFRIPYYVGPLARGNSRFAWMTRKSEETITPWNFEEVVDKGASAQSFIERMTNFDKNLPNEKVLPKHSLLYEYFTVYNELTKVKYVTEGMRKPAFLSGEQKKAIVDLLFKTNRKVTVKQLKEDYFKKIECFDSVEISGVEDRFNASLGTYHDLLKIIKDKDFLDNEENEDILEDIVLTLTLFEDREMIEERLKTYAHLFDDKVMKQLKRRRYTGWGRLSRKLINGIRDKQSGKTILDFLKSDGFANRNFMQLIHDDSLTFKEDIQKAQVSGQGDSLHEHIANLAGSPAIKKGILQTVKVVDELVKVMGRHKPENIVIEMARENQTTQKGQKNSRERMKRIEEGIKELGSQILKEHPVENTQLQNEKLYLYYLQNGRDMYVDQELDINRLSDYDVDHIVPQSFLKDDSIDNKVLTRSDKARGKSDNVPSEEVVKKMKNYWRQLLNAKLITQRKFDNLTKAERGGLSELDKAGFIKRQLVETRQITKHVAQILDSRMNTKYDENDKLIREVKVITLKSKLVSDFRKDFQFYKVREINNYHHAHDAYLNAVVGTALIKKYPKLESEFVYGDYKVYDVRKMIAKSEQEIGKATAKYFFYSNIMNFFKTEITLANGEIRKRPLIETNGETGEIVWDKGRDFATVRKVLSMPQVNIVKKTEVQTGGFSKESILPKRNSDKLIARKKDWDPKKYGGFDSPTVAYSVLVVAKVEKGKSKKLKSVKELLGITIMERSSFEKNPIDFLEAKGYKEVKKDLIIKLPKYSLFELENGRKRMLASAGELQKGNELALPSKYVNFLYLASHYEKLKGSPEDNEQKQLFVEQHKHYLDEIIEQISEFSKRVILADANLDKVLSAYNKHRDKPIREQAENIIHLFTLTNLGAPAAFKYFDTTIDRKRYTSTKEVLDATLIHQSITGLYETRIDLSQLGGDGGGGGGSEAAAKGGGGSGGTLQLDDEYRLYSPLVKPDQNIQFWLEQFPQAWAETAGMGLAKQVPPQVIQLKASATPVSVRQYPLSKEAQEGIRPHVQRLIQQGILVPVQSPWNTPLLPVRKPGTNDYRPVQDLREVNKRVQDIHPTVPNPYNLLCALPPQRSWYTVLDLKDAFFCLRLHPTSQPLFAFEWRDPGTGRTGQLTWTRLPQGFKNSPTIFNEALHRDLANFRIQHPQVTLLQYVDDLLLAGATKQDCLEGTKALLLELSDLGYRASAKKAQICRREVTYLGYSLRDGQRWLTEARKKTVVQIPAPTTAKQVREFLGTAGFCRLWIPGFATLAAPLYPLTKPKGEFSWAPEHQKAFDAIKKALLSAPALALPDVTKPFTLYVDERKGVARGVLTQTLGPWRRPVAYLSKKLDPVASGWPVCLKAIAAVAILVKDADKLTLGQNITVIAPHALENIVRQPPDRWMTNARMTHYQSLLLTERVTFAPPAALNPATLLPEETDEPVTHDCHQLLIEETGVRKDLTDIPLTGEVLTWFTDGSSYVVEGKRMAGAAVVDGTRTIWASSLPEGTSAQKAELMALTQALRLAEGKSINIYTDSRYAFATAHVHGAIYKQRGWLTSAGREIKNKEEILSLLEALHLPKRLAIIHCPGHQKAKDPISRGNQMADRVAKQAAQGVNLLAGKRTADGSEFEKRTADGSEFESPKKKAKVE

SEQ ID NO: 162 - protein, 2088 aa, synthetic construct
MPAAKRVKLDGGDKKYSIGLDIGTNSVGWAVITDEYKVPSKKFKVLGNTDRHSIKKNLIGALLFDSGETAEATRLKRTARRRYTRRKNRICYLQEIFSNEMAKVDDSFFHRLEESFLVEEDKKHERHPIFGNIVDEVAYHEKYPTIYHLRKKLVDSTDKADLRLIYLALAHMIKFRGHFLIEGDLNPDNSDVDKLFIQLVQTYNQLFEENPINASGVDAKAILSARLSKSRRLENLIAQLPGEKKNGLFGNLIALSLGLTPNFKSNFDLAEDAKLQLSKDTYDDDLDNLLAQIGDQYADLFLAAKNLSDAILLSDILRVNTEITKAPLSASMIKRYDEHHQDLTLLKALVRQQLPEKYKEIFFDQSKNGYAGYIDGGASQEEFYKFIKPILEKMDGTEELLVKLNREDLLRKQRTFDNGSIPHQIHLGELHAILRRQEDFYPFLKDNREKIEKILTFRIPYYVGPLARGNSRFAWMTRKSEETITPWNFEEVVDKGASAQSFIERMTNFDKNLPNEKVLPKHSLLYEYFTVYNELTKVKYVTEGMRKPAFLSGEQKKAIVDLLFKTNRKVTVKQLKEDYFKKIECFDSVEISGVEDRFNASLGTYHDLLKIIKDKDFLDNEENEDILEDIVLTLTLFEDREMIEERLKTYAHLFDDKVMKQLKRRRYTGWGRLSRKLINGIRDKQSGKTILDFLKSDGFANRNFMQLIHDDSLTFKEDIQKAQVSGQGDSLHEHIANLAGSPAIKKGILQTVKVVDELVKVMGRHKPENIVIEMARENQTTQKGQKNSRERMKRIEEGIKELGSQILKEHPVENTQLQNEKLYLYYLQNGRDMYVDQELDINRLSDYDVDHIVPQSFLKDDSIDNKVLTRSDKARGKSDNVPSEEVVKKMKNYWRQLLNAKLITQRKFDNLTKAERGGLSELDKAGFIKRQLVETRQITKHVAQILDSRMNTKYDENDKLIREVKVITLKSKLVSDFRKDFQFYKVREINNYHHAHDAYLNAVVGTALIKKYPKLESEFVYGDYKVYDVRKMIAKSEQEIGKATAKYFFYSNIMNFFKTEITLANGEIRKRPLIETNGETGEIVWDKGRDFATVRKVLSMPQVNIVKKTEVQTGGFSKESILPKRNSDKLIARKKDWDPKKYGGFDSPTVAYSVLVVAKVEKGKSKKLKSVKELLGITIMERSSFEKNPIDFLEAKGYKEVKKDLIIKLPKYSLFELENGRKRMLASAGELQKGNELALPSKYVNFLYLASHYEKLKGSPEDNEQKQLFVEQHKHYLDEIIEQISEFSKRVILADANLDKVLSAYNKHRDKPIREQAENIIHLFTLTNLGAPAAFKYFDTTIDRKRYTSTKEVLDATLIHQSITGLYETRIDLSQLGGDGGGSSGGGGGSGGTLQLDDEYRLYSPLVKPDQNIQFWLEQFPQAWAETAGMGLAKQVPPQVIQLKASATPVSVRQYPLSKEAQEGIRPHVQRLIQQGILVPVQSPWNTPLLPVRKPGTNDYRPVQDLREVNKRVQDIHPTVPNPYNLLCALPPQRSWYTVLDLKDAFFCLRLHPTSQPLFAFEWRDPGTGRTGQLTWTRLPQGFKNSPTIFNEALHRDLANFRIQHPQVTLLQYVDDLLLAGATKQDCLEGTKALLLELSDLGYRASAKKAQICRREVTYLGYSLRDGQRWLTEARKKTVVQIPAPTTAKQVREFLGTAGFCRLWIPGFATLAAPLYPLTKPKGEFSWAPEHQKAFDAIKKALLSAPALALPDVTKPFTLYVDERKGVARGVLTQTLGPWRRPVAYLSKKLDPVASGWPVCLKAIAAVAILVKDADKLTLGQNITVIAPHALENIVRQPPDRWMTNARMTHYQSLLLTERVTFAPPAALNPATLLPEETDEPVTHDCHQLLIEETGVRKDLTDIPLTGEVLTWFTDGSSYVVEGKRMAGAAVVDGTRTIWASSLPEGTSAQKAELMALTQALRLAEGKSINIYTDSRYAFATAHVHGAIYKQRGWLTSAGREIKNKEEILSLLEALHLPKRLAIIHCPGHQKAKDPISRGNQMADRVAKQAAQGVNLLAGKRTADGSEFEKRTADGSEFESPKKKAKVE

SEQ ID NO: 163 - protein, 2084 aa, synthetic construct
MPAAKRVKLDGGDKKYSIGLDIGTNSVGWAVITDEYKVPSKKFKVLGNTDRHSIKKNLIGALLFDSGETAEATRLKRTARRRYTRRKNRICYLQEIFSNEMAKVDDSFFHRLEESFLVEEDKKHERHPIFGNIVDEVAYHEKYPTIYHLRKKLVDSTDKADLRLIYLALAHMIKFRGHFLIEGDLNPDNSDVDKLFIQLVQTYNQLFEENPINASGVDAKAILSARLSKSRRLENLIAQLPGEKKNGLFGNLIALSLGLTPNFKSNFDLAEDAKLQLSKDTYDDDLDNLLAQIGDQYADLFLAAKNLSDAILLSDILRVNTEITKAPLSASMIKRYDEHHQDLTLLKALVRQQLPEKYKEIFFDQSKNGYAGYIDGGASQEEFYKFIKPILEKMDGTEELLVKLNREDLLRKQRTFDNGSIPHQIHLGELHAILRRQEDFYPFLKDNREKIEKILTFRIPYYVGPLARGNSRFAWMTRKSEETITPWNFEEVVDKGASAQSFIERMTNFDKNLPNEKVLPKHSLLYEYFTVYNELTKVKYVTEGMRKPAFLSGEQKKAIVDLLFKTNRKVTVKQLKEDYFKKIECFDSVEISGVEDRFNASLGTYHDLLKIIKDKDFLDNEENEDILEDIVLTLTLFEDREMIEERLKTYAHLFDDKVMKQLKRRRYTGWGRLSRKLINGIRDKQSGKTILDFLKSDGFANRNFMQLIHDDSLTFKEDIQKAQVSGQGDSLHEHIANLAGSPAIKKGILQTVKVVDELVKVMGRHKPENIVIEMARENQTTQKGQKNSRERMKRIEEGIKELGSQILKEHPVENTQLQNEKLYLYYLQNGRDMYVDQELDINRLSDYDVDHIVPQSFLKDDSIDNKVLTRSDKARGKSDNVPSEEVVKKMKNYWRQLLNAKLITQRKFDNLTKAERGGLSELDKAGFIKRQLVETRQITKHVAQILDSRMNTKYDENDKLIREVKVITLKSKLVSDFRKDFQFYKVREINNYHHAHDAYLNAVVGTALIKKYPKLESEFVYGDYKVYDVRKMIAKSEQEIGKATAKYFFYSNIMNFFKTEITLANGEIRKRPLIETNGETGEIVWDKGRDFATVRKVLSMPQVNIVKKTEVQTGGFSKESILPKRNSDKLIARKKDWDPKKYGGFDSPTVAYSVLVVAKVEKGKSKKLKSVKELLGITIMERSSFEKNPIDFLEAKGYKEVKKDLIIKLPKYSLFELENGRKRMLASAGELQKGNELALPSKYVNFLYLASHYEKLKGSPEDNEQKQLFVEQHKHYLDEIIEQISEFSKRVILADANLDKVLSAYNKHRDKPIREQAENIIHLFTLTNLGAPAAFKYFDTTIDRKRYTSTKEVLDATLIHQSITGLYETRIDLSQLGGDGGPAPAPGGTLQLDDEYRLYSPLVKPDQNIQFWLEQFPQAWAETAGMGLAKQVPPQVIQLKASATPVSVRQYPLSKEAQEGIRPHVQRLIQQGILVPVQSPWNTPLLPVRKPGTNDYRPVQDLREVNKRVQDIHPTVPNPYNLLCALPPQRSWYTVLDLKDAFFCLRLHPTSQPLFAFEWRDPGTGRTGQLTWTRLPQGFKNSPTIFNEALHRDLANFRIQHPQVTLLQYVDDLLLAGATKQDCLEGTKALLLELSDLGYRASAKKAQICRREVTYLGYSLRDGQRWLTEARKKTVVQIPAPTTAKQVREFLGTAGFCRLWIPGFATLAAPLYPLTKPKGEFSWAPEHQKAFDAIKKALLSAPALALPDVTKPFTLYVDERKGVARGVLTQTLGPWRRPVAYLSKKLDPVASGWPVCLKAIAAVAILVKDADKLTLGQNITVIAPHALENIVRQPPDRWMTNARMTHYQSLLLTERVTFAPPAALNPATLLPEETDEPVTHDCHQLLIEETGVRKDLTDIPLTGEVLTWFTDGSSYVVEGKRMAGAAVVDGTRTIWASSLPEGTSAQKAELMALTQALRLAEGKSINIYTDSRYAFATAHVHGAIYKQRGWLTSAGREIKNKEEILSLLEALHLPKRLAIIHCPGHQKAKDPISRGNQMADRVAKQAAQGVNLLAGKRTADGSEFEKRTADGSEFESPKKKAKVE

SEQ ID NO: 164 - protein, 2090 aa, synthetic construct
MPAAKRVKLDGGDKKYSIGLDIGTNSVGWAVITDEYKVPSKKFKVLGNTDRHSIKKNLIGALLFDSGETAEATRLKRTARRRYTRRKNRICYLQEIFSNEMAKVDDSFFHRLEESFLVEEDKKHERHPIFGNIVDEVAYHEKYPTIYHLRKKLVDSTDKADLRLIYLALAHMIKFRGHFLIEGDLNPDNSDVDKLFIQLVQTYNQLFEENPINASGVDAKAILSARLSKSRRLENLIAQLPGEKKNGLFGNLIALSLGLTPNFKSNFDLAEDAKLQLSKDTYDDDLDNLLAQIGDQYADLFLAAKNLSDAILLSDILRVNTEITKAPLSASMIKRYDEHHQDLTLLKALVRQQLPEKYKEIFFDQSKNGYAGYIDGGASQEEFYKFIKPILEKMDGTEELLVKLNREDLLRKQRTFDNGSIPHQIHLGELHAILRRQEDFYPFLKDNREKIEKILTFRIPYYVGPLARGNSRFAWMTRKSEETITPWNFEEVVDKGASAQSFIERMTNFDKNLPNEKVLPKHSLLYEYFTVYNELTKVKYVTEGMRKPAFLSGEQKKAIVDLLFKTNRKVTVKQLKEDYFKKIECFDSVEISGVEDRFNASLGTYHDLLKIIKDKDFLDNEENEDILEDIVLTLTLFEDREMIEERLKTYAHLFDDKVMKQLKRRRYTGWGRLSRKLINGIRDKQSGKTILDFLKSDGFANRNFMQLIHDDSLTFKEDIQKAQVSGQGDSLHEHIANLAGSPAIKKGILQTVKVVDELVKVMGRHKPENIVIEMARENQTTQKGQKNSRERMKRIEEGIKELGSQILKEHPVENTQLQNEKLYLYYLQNGRDMYVDQELDINRLSDYDVDHIVPQSFLKDDSIDNKVLTRSDKARGKSDNVPSEEVVKKMKNYWRQLLNAKLITQRKFDNLTKAERGGLSELDKAGFIKRQLVETRQITKHVAQILDSRMNTKYDENDKLIREVKVITLKSKLVSDFRKDFQFYKVREINNYHHAHDAYLNAVVGTALIKKYPKLESEFVYGDYKVYDVRKMIAKSEQEIGKATAKYFFYSNIMNFFKTEITLANGEIRKRPLIETNGETGEIVWDKGRDFATVRKVLSMPQVNIVKKTEVQTGGFSKESILPKRNSDKLIARKKDWDPKKYGGFDSPTVAYSVLVVAKVEKGKSKKLKSVKELLGITIMERSSFEKNPIDFLEAKGYKEVKKDLIIKLPKYSLFELENGRKRMLASAGELQKGNELALPSKYVNFLYLASHYEKLKGSPEDNEQKQLFVEQHKHYLDEIIEQISEFSKRVILADANLDKVLSAYNKHRDKPIREQAENIIHLFTLTNLGAPAAFKYFDTTIDRKRYTSTKEVLDATLIHQSITGLYETRIDLSQLGGDGGGGSPAPEAAAKGGTLQLDDEYRLYSPLVKPDQNIQFWLEQFPQAWAETAGMGLAKQVPPQVIQLKASATPVSVRQYPLSKEAQEGIRPHVQRLIQQGILVPVQSPWNTPLLPVRKPGTNDYRPVQDLREVNKRVQDIHPTVPNPYNLLCALPPQRSWYTVLDLKDAFFCLRLHPTSQPLFAFEWRDPGTGRTGQLTWTRLPQGFKNSPTIFNEALHRDLANFRIQHPQVTLLQYVDDLLLAGATKQDCLEGTKALLLELSDLGYRASAKKAQICRREVTYLGYSLRDGQRWLTEARKKTVVQIPAPTTAKQVREFLGTAGFCRLWIPGFATLAAPLYPLTKPKGEFSWAPEHQKAFDAIKKALLSAPALALPDVTKPFTLYVDERKGVARGVLTQTLGPWRRPVAYLSKKLDPVASGWPVCLKAIAAVAILVKDADKLTLGQNITVIAPHALENIVRQPPDRWMTNARMTHYQSLLLTERVTFAPPAALNPATLLPEETDEPVTHDCHQLLIEETGVRKDLTDIPLTGEVLTWFTDGSSYVVEGKRMAGAAVVDGTRTIWASSLPEGTSAQKAELMALTQALRLAEGKSINIYTDSRYAFATAHVHGAIYKQRGWLTSAGREIKNKEEILSLLEALHLPKRLAIIHCPGHQKAKDPISRGNQMADRVAKQAAQGVNLLAGKRTADGSEFEKRTADGSEFESPKKKAKVE

SEQ ID NO: 165 - protein, 2085 aa, synthetic construct
MPAAKRVKLDGGDKKYSIGLDIGTNSVGWAVITDEYKVPSKKFKVLGNTDRHSIKKNLIGALLFDSGETAEATRLKRTARRRYTRRKNRICYLQEIFSNEMAKVDDSFFHRLEESFLVEEDKKHERHPIFGNIVDEVAYHEKYPTIYHLRKKLVDSTDKADLRLIYLALAHMIKFRGHFLIEGDLNPDNSDVDKLFIQLVQTYNQLFEENPINASGVDAKAILSARLSKSRRLENLIAQLPGEKKNGLFGNLIALSLGLTPNFKSNFDLAEDAKLQLSKDTYDDDLDNLLAQIGDQYADLFLAAKNLSDAILLSDILRVNTEITKAPLSASMIKRYDEHHQDLTLLKALVRQQLPEKYKEIFFDQSKNGYAGYIDGGASQEEFYKFIKPILEKMDGTEELLVKLNREDLLRKQRTFDNGSIPHQIHLGELHAILRRQEDFYPFLKDNREKIEKILTFRIPYYVGPLARGNSRFAWMTRKSEETITPWNFEEVVDKGASAQSFIERMTNFDKNLPNEKVLPKHSLLYEYFTVYNELTKVKYVTEGMRKPAFLSGEQKKAIVDLLFKTNRKVTVKQLKEDYFKKIECFDSVEISGVEDRFNASLGTYHDLLKIIKDKDFLDNEENEDILEDIVLTLTLFEDREMIEERLKTYAHLFDDKVMKQLKRRRYTGWGRLSRKLINGIRDKQSGKTILDFLKSDGFANRNFMQLIHDDSLTFKEDIQKAQVSGQGDSLHEHIANLAGSPAIKKGILQTVKVVDELVKVMGRHKPENIVIEMARENQTTQKGQKNSRERMKRIEEGIKELGSQILKEHPVENTQLQNEKLYLYYLQNGRDMYVDQELDINRLSDYDVDHIVPQSFLKDDSIDNKVLTRSDKARGKSDNVPSEEVVKKMKNYWRQLLNAKLITQRKFDNLTKAERGGLSELDKAGFIKRQLVETRQITKHVAQILDSRMNTKYDENDKLIREVKVITLKSKLVSDFRKDFQFYKVREINNYHHAHDAYLNAVVGTALIKKYPKLESEFVYGDYKVYDVRKMIAKSEQEIGKATAKYFFYSNIMNFFKTEITLANGEIRKRPLIETNGETGEIVWDKGRDFATVRKVLSMPQVNIVKKTEVQTGGFSKESILPKRNSDKLIARKKDWDPKKYGGFDSPTVAYSVLVVAKVEKGKSKKLKSVKELLGITIMERSSFEKNPIDFLEAKGYKEVKKDLIIKLPKYSLFELENGRKRMLASAGELQKGNELALPSKYVNFLYLASHYEKLKGSPEDNEQKQLFVEQHKHYLDEIIEQISEFSKRVILADANLDKVLSAYNKHRDKPIREQAENIIHLFTLTNLGAPAAFKYFDTTIDRKRYTSTKEVLDATLIHQSITGLYETRIDLSQLGGDGGGSSGGSGGTLQLDDEYRLYSPLVKPDQNIQFWLEQFPQAWAETAGMGLAKQVPPQVIQLKASATPVSVRQYPLSKEAQEGIRPHVQRLIQQGILVPVQSPWNTPLLPVRKPGTNDYRPVQDLREVNKRVQDIHPTVPNPYNLLCALPPQRSWYTVLDLKDAFFCLRLHPTSQPLFAFEWRDPGTGRTGQLTWTRLPQGFKNSPTIFNEALHRDLANFRIQHPQVTLLQYVDDLLLAGATKQDCLEGTKALLLELSDLGYRASAKKAQICRREVTYLGYSLRDGQRWLTEARKKTVVQIPAPTTAKQVREFLGTAGFCRLWIPGFATLAAPLYPLTKPKGEFSWAPEHQKAFDAIKKALLSAPALALPDVTKPFTLYVDERKGVARGVLTQTLGPWRRPVAYLSKKLDPVASGWPVCLKAIAAVAILVKDADKLTLGQNITVIAPHALENIVRQPPDRWMTNARMTHYQSLLLTERVTFAPPAALNPATLLPEETDEPVTHDCHQLLIEETGVRKDLTDIPLTGEVLTWFTDGSSYVVEGKRMAGAAVVDGTRTIWASSLPEGTSAQKAELMALTQALRLAEGKSINIYTDSRYAFATAHVHGAIYKQRGWLTSAGREIKNKEEILSLLEALHLPKRLAIIHCPGHQKAKDPISRGNQMADRVAKQAAQGVNLLAGKRTADGSEFEKRTADGSEFESPKKKAKVE

SEQ ID NO: 166 - protein, 2084 aa, synthetic construct
MPAAKRVKLDGGDKKYSIGLDIGTNSVGWAVITDEYKVPSKKFKVLGNTDRHSIKKNLIGALLFDSGETAEATRLKRTARRRYTRRKNRICYLQEIFSNEMAKVDDSFFHRLEESFLVEEDKKHERHPIFGNIVDEVAYHEKYPTIYHLRKKLVDSTDKADLRLIYLALAHMIKFRGHFLIEGDLNPDNSDVDKLFIQLVQTYNQLFEENPINASGVDAKAILSARLSKSRRLENLIAQLPGEKKNGLFGNLIALSLGLTPNFKSNFDLAEDAKLQLSKDTYDDDLDNLLAQIGDQYADLFLAAKNLSDAILLSDILRVNTEITKAPLSASMIKRYDEHHQDLTLLKALVRQQLPEKYKEIFFDQSKNGYAGYIDGGASQEEFYKFIKPILEKMDGTEELLVKLNREDLLRKQRTFDNGSIPHQIHLGELHAILRRQEDFYPFLKDNREKIEKILTFRIPYYVGPLARGNSRFAWMTRKSEETITPWNFEEVVDKGASAQSFIERMTNFDKNLPNEKVLPKHSLLYEYFTVYNELTKVKYVTEGMRKPAFLSGEQKKAIVDLLFKTNRKVTVKQLKEDYFKKIECFDSVEISGVEDRFNASLGTYHDLLKIIKDKDFLDNEENEDILEDIVLTLTLFEDREMIEERLKTYAHLFDDKVMKQLKRRRYTGWGRLSRKLINGIRDKQSGKTILDFLKSDGFANRNFMQLIHDDSLTFKEDIQKAQVSGQGDSLHEHIANLAGSPAIKKGILQTVKVVDELVKVMGRHKPENIVIEMARENQTTQKGQKNSRERMKRIEEGIKELGSQILKEHPVENTQLQNEKLYLYYLQNGRDMYVDQELDINRLSDYDVDHIVPQSFLKDDSIDNKVLTRSDKARGKSDNVPSEEVVKKMKNYWRQLLNAKLITQRKFDNLTKAERGGLSELDKAGFIKRQLVETRQITKHVAQILDSRMNTKYDENDKLIREVKVITLKSKLVSDFRKDFQFYKVREINNYHHAHDAYLNAVVGTALIKKYPKLESEFVYGDYKVYDVRKMIAKSEQEIGKATAKYFFYSNIMNFFKTEITLANGEIRKRPLIETNGETGEIVWDKGRDFATVRKVLSMPQVNIVKKTEVQTGGFSKESILPKRNSDKLIARKKDWDPKKYGGFDSPTVAYSVLVVAKVEKGKSKKLKSVKELLGITIMERSSFEKNPIDFLEAKGYKEVKKDLIIKLPKYSLFELENGRKRMLASAGELQKGNELALPSKYVNFLYLASHYEKLKGSPEDNEQKQLFVEQHKHYLDEIIEQISEFSKRVILADANLDKVLSAYNKHRDKPIREQAENIIHLFTLTNLGAPAAFKYFDTTIDRKRYTSTKEVLDATLIHQSITGLYETRIDLSQLGGDGGGGGGGGGTLQLDDEYRLYSPLVKPDQNIQFWLEQFPQAWAETAGMGLAKQVPPQVIQLKASATPVSVRQYPLSKEAQEGIRPHVQRLIQQGILVPVQSPWNTPLLPVRKPGTNDYRPVQDLREVNKRVQDIHPTVPNPYNLLCALPPQRSWYTVLDLKDAFFCLRLHPTSQPLFAFEWRDPGTGRTGQLTWTRLPQGFKNSPTIFNEALHRDLANFRIQHPQVTLLQYVDDLLLAGATKQDCLEGTKALLLELSDLGYRASAKKAQICRREVTYLGYSLRDGQRWLTEARKKTVVQIPAPTTAKQVREFLGTAGFCRLWIPGFATLAAPLYPLTKPKGEFSWAPEHQKAFDAIKKALLSAPALALPDVTKPFTLYVDERKGVARGVLTQTLGPWRRPVAYLSKKLDPVASGWPVCLKAIAAVAILVKDADKLTLGQNITVIAPHALENIVRQPPDRWMTNARMTHYQSLLLTERVTFAPPAALNPATLLPEETDEPVTHDCHQLLIEETGVRKDLTDIPLTGEVLTWFTDGSSYVVEGKRMAGAAVVDGTRTIWASSLPEGTSAQKAELMALTQALRLAEGKSINIYTDSRYAFATAHVHGAIYKQRGWLTSAGREIKNKEEILSLLEALHLPKRLAIIHCPGHQKAKDPISRGNQMADRVAKQAAQGVNLLAGKRTADGSEFEKRTADGSEFESPKKKAKVE

SEQ ID NO: 167 - protein, 2088 aa, synthetic construct
MPAAKRVKLDGGDKKYSIGLDIGTNSVGWAVITDEYKVPSKKFKVLGNTDRHSIKKNLIGALLFDSGETAEATRLKRTARRRYTRRKNRICYLQEIFSNEMAKVDDSFFHRLEESFLVEEDKKHERHPIFGNIVDEVAYHEKYPTIYHLRKKLVDSTDKADLRLIYLALAHMIKFRGHFLIEGDLNPDNSDVDKLFIQLVQTYNQLFEENPINASGVDAKAILSARLSKSRRLENLIAQLPGEKKNGLFGNLIALSLGLTPNFKSNFDLAEDAKLQLSKDTYDDDLDNLLAQIGDQYADLFLAAKNLSDAILLSDILRVNTEITKAPLSASMIKRYDEHHQDLTLLKALVRQQLPEKYKEIFFDQSKNGYAGYIDGGASQEEFYKFIKPILEKMDGTEELLVKLNREDLLRKQRTFDNGSIPHQIHLGELHAILRRQEDFYPFLKDNREKIEKILTFRIPYYVGPLARGNSRFAWMTRKSEETITPWNFEEVVDKGASAQSFIERMTNFDKNLPNEKVLPKHSLLYEYFTVYNELTKVKYVTEGMRKPAFLSGEQKKAIVDLLFKTNRKVTVKQLKEDYFKKIECFDSVEISGVEDRFNASLGTYHDLLKIIKDKDFLDNEENEDILEDIVLTLTLFEDREMIEERLKTYAHLFDDKVMKQLKRRRYTGWGRLSRKLINGIRDKQSGKTILDFLKSDGFANRNFMQLIHDDSLTFKEDIQKAQVSGQGDSLHEHIANLAGSPAIKKGILQTVKVVDELVKVMGRHKPENIVIEMARENQTTQKGQKNSRERMKRIEEGIKELGSQILKEHPVENTQLQNEKLYLYYLQNGRDMYVDQELDINRLSDYDVDHIVPQSFLKDDSIDNKVLTRSDKARGKSDNVPSEEVVKKMKNYWRQLLNAKLITQRKFDNLTKAERGGLSELDKAGFIKRQLVETRQITKHVAQILDSRMNTKYDENDKLIREVKVITLKSKLVSDFRKDFQFYKVREINNYHHAHDAYLNAVVGTALIKKYPKLESEFVYGDYKVYDVRKMIAKSEQEIGKATAKYFFYSNIMNFFKTEITLANGEIRKRPLIETNGETGEIVWDKGRDFATVRKVLSMPQVNIVKKTEVQTGGFSKESILPKRNSDKLIARKKDWDPKKYGGFDSPTVAYSVLVVAKVEKGKSKKLKSVKELLGITIMERSSFEKNPIDFLEAKGYKEVKKDLIIKLPKYSLFELENGRKRMLASAGELQKGNELALPSKYVNFLYLASHYEKLKGSPEDNEQKQLFVEQHKHYLDEIIEQISEFSKRVILADANLDKVLSAYNKHRDKPIREQAENIIHLFTLTNLGAPAAFKYFDTTIDRKRYTSTKEVLDATLIHQSITGLYETRIDLSQLGGDGGPAPGGSGGGGGTLQLDDEYRLYSPLVKPDQNIQFWLEQFPQAWAETAGMGLAKQVPPQVIQLKASATPVSVRQYPLSKEAQEGIRPHVQRLIQQGILVPVQSPWNTPLLPVRKPGTNDYRPVQDLREVNKRVQDIHPTVPNPYNLLCALPPQRSWYTVLDLKDAFFCLRLHPTSQPLFAFEWRDPGTGRTGQLTWTRLPQGFKNSPTIFNEALHRDLANFRIQHPQVTLLQYVDDLLLAGATKQDCLEGTKALLLELSDLGYRASAKKAQICRREVTYLGYSLRDGQRWLTEARKKTVVQIPAPTTAKQVREFLGTAGFCRLWIPGFATLAAPLYPLTKPKGEFSWAPEHQKAFDAIKKALLSAPALALPDVTKPFTLYVDERKGVARGVLTQTLGPWRRPVAYLSKKLDPVASGWPVCLKAIAAVAILVKDADKLTLGQNITVIAPHALENIVRQPPDRWMTNARMTHYQSLLLTERVTFAPPAALNPATLLPEETDEPVTHDCHQLLIEETGVRKDLTDIPLTGEVLTWFTDGSSYVVEGKRMAGAAVVDGTRTIWASSLPEGTSAQKAELMALTQALRLAEGKSINIYTDSRYAFATAHVHGAIYKQRGWLTSAGREIKNKEEILSLLEALHLPKRLAIIHCPGHQKAKDPISRGNQMADRVAKQAAQGVNLLAGKRTADGSEFEKRTADGSEFESPKKKAKVE

SEQ ID NO: 168 - protein, 2090 aa, synthetic construct
MPAAKRVKLDGGDKKYSIGLDIGTNSVGWAVITDEYKVPSKKFKVLGNTDRHSIKKNLIGALLFDSGETAEATRLKRTARRRYTRRKNRICYLQEIFSNEMAKVDDSFFHRLEESFLVEEDKKHERHPIFGNIVDEVAYHEKYPTIYHLRKKLVDSTDKADLRLIYLALAHMIKFRGHFLIEGDLNPDNSDVDKLFIQLVQTYNQLFEENPINASGVDAKAILSARLSKSRRLENLIAQLPGEKKNGLFGNLIALSLGLTPNFKSNFDLAEDAKLQLSKDTYDDDLDNLLAQIGDQYADLFLAAKNLSDAILLSDILRVNTEITKAPLSASMIKRYDEHHQDLTLLKALVRQQLPEKYKEIFFDQSKNGYAGYIDGGASQEEFYKFIKPILEKMDGTEELLVKLNREDLLRKQRTFDNGSIPHQIHLGELHAILRRQEDFYPFLKDNREKIEKILTFRIPYYVGPLARGNSRFAWMTRKSEETITPWNFEEVVDKGASAQSFIERMTNFDKNLPNEKVLPKHSLLYEYFTVYNELTKVKYVTEGMRKPAFLSGEQKKAIVDLLFKTNRKVTVKQLKEDYFKKIECFDSVEISGVEDRFNASLGTYHDLLKIIKDKDFLDNEENEDILEDIVLTLTLFEDREMIEERLKTYAHLFDDKVMKQLKRRRYTGWGRLSRKLINGIRDKQSGKTILDFLKSDGFANRNFMQLIHDDSLTFKEDIQKAQVSGQGDSLHEHIANLAGSPAIKKGILQTVKVVDELVKVMGRHKPENIVIEMARENQTTQKGQKNSRERMKRIEEGIKELGSQILKEHPVENTQLQNEKLYLYYLQNGRDMYVDQELDINRLSDYDVDHIVPQSFLKDDSIDNKVLTRSDKARGKSDNVPSEEVVKKMKNYWRQLLNAKLITQRKFDNLTKAERGGLSELDKAGFIKRQLVETRQITKHVAQILDSRMNTKYDENDKLIREVKVITLKSKLVSDFRKDFQFYKVREINNYHHAHDAYLNAVVGTALIKKYPKLESEFVYGDYKVYDVRKMIAKSEQEIGKATAKYFFYSNIMNFFKTEITLANGEIRKRPLIETNGETGEIVWDKGRDFATVRKVLSMPQVNIVKKTEVQTGGFSKESILPKRNSDKLIARKKDWDPKKYGGFDSPTVAYSVLVVAKVEKGKSKKLKSVKELLGITIMERSSFEKNPIDFLEAKGYKEVKKDLIIKLPKYSLFELENGRKRMLASAGELQKGNELALPSKYVNFLYLASHYEKLKGSPEDNEQKQLFVEQHKHYLDEIIEQISEFSKRVILADANLDKVLSAYNKHRDKPIREQAENIIHLFTLTNLGAPAAFKYFDTTIDRKRYTSTKEVLDATLIHQSITGLYETRIDLSQLGGDGGEAAAKPAPGGSGGTLQLDDEYRLYSPLVKPDQNIQFWLEQFPQAWAETAGMGLAKQVPPQVIQLKASATPVSVRQYPLSKEAQEGIRPHVQRLIQQGILVPVQSPWNTPLLPVRKPGTNDYRPVQDLREVNKRVQDIHPTVPNPYNLLCALPPQRSWYTVLDLKDAFFCLRLHPTSQPLFAFEWRDPGTGRTGQLTWTRLPQGFKNSPTIFNEALHRDLANFRIQHPQVTLLQYVDDLLLAGATKQDCLEGTKALLLELSDLGYRASAKKAQICRREVTYLGYSLRDGQRWLTEARKKTVVQIPAPTTAKQVREFLGTAGFCRLWIPGFATLAAPLYPLTKPKGEFSWAPEHQKAFDAIKKALLSAPALALPDVTKPFTLYVDERKGVARGVLTQTLGPWRRPVAYLSKKLDPVASGWPVCLKAIAAVAILVKDADKLTLGQNITVIAPHALENIVRQPPDRWMTNARMTHYQSLLLTERVTFAPPAALNPATLLPEETDEPVTHDCHQLLIEETGVRKDLTDIPLTGEVLTWFTDGSSYVVEGKRMAGAAVVDGTRTIWASSLPEGTSAQKAELMALTQALRLAEGKSINIYTDSRYAFATAHVHGAIYKQRGWLTSAGREIKNKEEILSLLEALHLPKRLAIIHCPGHQKAKDPISRGNQMADRVAKQAAQGVNLLAGKRTADGSEFEKRTADGSEFESPKKKAKVE

SEQ ID NO: 169 - protein, 2088 aa, synthetic construct
MPAAKRVKLDGGDKKYSIGLDIGTNSVGWAVITDEYKVPSKKFKVLGNTDRHSIKKNLIGALLFDSGETAEATRLKRTARRRYTRRKNRICYLQEIFSNEMAKVDDSFFHRLEESFLVEEDKKHERHPIFGNIVDEVAYHEKYPTIYHLRKKLVDSTDKADLRLIYLALAHMIKFRGHFLIEGDLNPDNSDVDKLFIQLVQTYNQLFEENPINASGVDAKAILSARLSKSRRLENLIAQLPGEKKNGLFGNLIALSLGLTPNFKSNFDLAEDAKLQLSKDTYDDDLDNLLAQIGDQYADLFLAAKNLSDAILLSDILRVNTEITKAPLSASMIKRYDEHHQDLTLLKALVRQQLPEKYKEIFFDQSKNGYAGYIDGGASQEEFYKFIKPILEKMDGTEELLVKLNREDLLRKQRTFDNGSIPHQIHLGELHAILRRQEDFYPFLKDNREKIEKILTFRIPYYVGPLARGNSRFAWMTRKSEETITPWNFEEVVDKGASAQSFIERMTNFDKNLPNEKVLPKHSLLYEYFTVYNELTKVKYVTEGMRKPAFLSGEQKKAIVDLLFKTNRKVTVKQLKEDYFKKIECFDSVEISGVEDRFNASLGTYHDLLKIIKDKDFLDNEENEDILEDIVLTLTLFEDREMIEERLKTYAHLFDDKVMKQLKRRRYTGWGRLSRKLINGIRDKQSGKTILDFLKSDGFANRNFMQLIHDDSLTFKEDIQKAQVSGQGDSLHEHIANLAGSPAIKKGILQTVKVVDELVKVMGRHKPENIVIEMARENQTTQKGQKNSRERMKRIEEGIKELGSQILKEHPVENTQLQNEKLYLYYLQNGRDMYVDQELDINRLSDYDVDHIVPQSFLKDDSIDNKVLTRSDKARGKSDNVPSEEVVKKMKNYWRQLLNAKLITQRKFDNLTKAERGGLSELDKAGFIKRQLVETRQITKHVAQILDSRMNTKYDENDKLIREVKVITLKSKLVSDFRKDFQFYKVREINNYHHAHDAYLNAVVGTALIKKYPKLESEFVYGDYKVYDVRKMIAKSEQEIGKATAKYFFYSNIMNFFKTEITLANGEIRKRPLIETNGETGEIVWDKGRDFATVRKVLSMPQVNIVKKTEVQTGGFSKESILPKRNSDKLIARKKDWDPKKYGGFDSPTVAYSVLVVAKVEKGKSKKLKSVKELLGITIMERSSFEKNPIDFLEAKGYKEVKKDLIIKLPKYSLFELENGRKRMLASAGELQKGNELALPSKYVNFLYLASHYEKLKGSPEDNEQKQLFVEQHKHYLDEIIEQISEFSKRVILADANLDKVLSAYNKHRDKPIREQAENIIHLFTLTNLGAPAAFKYFDTTIDRKRYTSTKEVLDATLIHQSITGLYETRIDLSQLGGDGGGGGPAPGGSGGTLQLDDEYRLYSPLVKPDQNIQFWLEQFPQAWAETAGMGLAKQVPPQVIQLKASATPVSVRQYPLSKEAQEGIRPHVQRLIQQGILVPVQSPWNTPLLPVRKPGTNDYRPVQDLREVNKRVQDIHPTVPNPYNLLCALPPQRSWYTVLDLKDAFFCLRLHPTSQPLFAFEWRDPGTGRTGQLTWTRLPQGFKNSPTIFNEALHRDLANFRIQHPQVTLLQYVDDLLLAGATKQDCLEGTKALLLELSDLGYRASAKKAQICRREVTYLGYSLRDGQRWLTEARKKTVVQIPAPTTAKQVREFLGTAGFCRLWIPGFATLAAPLYPLTKPKGEFSWAPEHQKAFDAIKKALLSAPALALPDVTKPFTLYVDERKGVARGVLTQTLGPWRRPVAYLSKKLDPVASGWPVCLKAIAAVAILVKDADKLTLGQNITVIAPHALENIVRQPPDRWMTNARMTHYQSLLLTERVTFAPPAALNPATLLPEETDEPVTHDCHQLLIEETGVRKDLTDIPLTGEVLTWFTDGSSYVVEGKRMAGAAVVDGTRTIWASSLPEGTSAQKAELMALTQALRLAEGKSINIYTDSRYAFATAHVHGAIYKQRGWLTSAGREIKNKEEILSLLEALHLPKRLAIIHCPGHQKAKDPISRGNQMADRVAKQAAQGVNLLAGKRTADGSEFEKRTADGSEFESPKKKAKVE

SEQ ID NO: 170 - protein, 2090 aa, synthetic construct
MPAAKRVKLDGGDKKYSIGLDIGTNSVGWAVITDEYKVPSKKFKVLGNTDRHSIKKNLIGALLFDSGETAEATRLKRTARRRYTRRKNRICYLQEIFSNEMAKVDDSFFHRLEESFLVEEDKKHERHPIFGNIVDEVAYHEKYPTIYHLRKKLVDSTDKADLRLIYLALAHMIKFRGHFLIEGDLNPDNSDVDKLFIQLVQTYNQLFEENPINASGVDAKAILSARLSKSRRLENLIAQLPGEKKNGLFGNLIALSLGLTPNFKSNFDLAEDAKLQLSKDTYDDDLDNLLAQIGDQYADLFLAAKNLSDAILLSDILRVNTEITKAPLSASMIKRYDEHHQDLTLLKALVRQQLPEKYKEIFFDQSKNGYAGYIDGGASQEEFYKFIKPILEKMDGTEELLVKLNREDLLRKQRTFDNGSIPHQIHLGELHAILRRQEDFYPFLKDNREKIEKILTFRIPYYVGPLARGNSRFAWMTRKSEETITPWNFEEVVDKGASAQSFIERMTNFDKNLPNEKVLPKHSLLYEYFTVYNELTKVKYVTEGMRKPAFLSGEQKKAIVDLLFKTNRKVTVKQLKEDYFKKIECFDSVEISGVEDRFNASLGTYHDLLKIIKDKDFLDNEENEDILEDIVLTLTLFEDREMIEERLKTYAHLFDDKVMKQLKRRRYTGWGRLSRKLINGIRDKQSGKTILDFLKSDGFANRNFMQLIHDDSLTFKEDIQKAQVSGQGDSLHEHIANLAGSPAIKKGILQTVKVVDELVKVMGRHKPENIVIEMARENQTTQKGQKNSRERMKRIEEGIKELGSQILKEHPVENTQLQNEKLYLYYLQNGRDMYVDQELDINRLSDYDVDHIVPQSFLKDDSIDNKVLTRSDKARGKSDNVPSEEVVKKMKNYWRQLLNAKLITQRKFDNLTKAERGGLSELDKAGFIKRQLVETRQITKHVAQILDSRMNTKYDENDKLIREVKVITLKSKLVSDFRKDFQFYKVREINNYHHAHDAYLNAVVGTALIKKYPKLESEFVYGDYKVYDVRKMIAKSEQEIGKATAKYFFYSNIMNFFKTEITLANGEIRKRPLIETNGETGEIVWDKGRDFATVRKVLSMPQVNIVKKTEVQTGGFSKESILPKRNSDKLIARKKDWDPKKYGGFDSPTVAYSVLVVAKVEKGKSKKLKSVKELLGITIMERSSFEKNPIDFLEAKGYKEVKKDLIIKLPKYSLFELENGRKRMLASAGELQKGNELALPSKYVNFLYLASHYEKLKGSPEDNEQKQLFVEQHKHYLDEIIEQISEFSKRVILADANLDKVLSAYNKHRDKPIREQAENIIHLFTLTNLGAPAAFKYFDTTIDRKRYTSTKEVLDATLIHQSITGLYETRIDLSQLGGDGGGSSGGSEAAAKGGTLQLDDEYRLYSPLVKPDQNIQFWLEQFPQAWAETAGMGLAKQVPPQVIQLKASATPVSVRQYPLSKEAQEGIRPHVQRLIQQGILVPVQSPWNTPLLPVRKPGTNDYRPVQDLREVNKRVQDIHPTVPNPYNLLCALPPQRSWYTVLDLKDAFFCLRLHPTSQPLFAFEWRDPGTGRTGQLTWTRLPQGFKNSPTIFNEALHRDLANFRIQHPQVTLLQYVDDLLLAGATKQDCLEGTKALLLELSDLGYRASAKKAQICRREVTYLGYSLRDGQRWLTEARKKTVVQIPAPTTAKQVREFLGTAGFCRLWIPGFATLAAPLYPLTKPKGEFSWAPEHQKAFDAIKKALLSAPALALPDVTKPFTLYVDERKGVARGVLTQTLGPWRRPVAYLSKKLDPVASGWPVCLKAIAAVAILVKDADKLTLGQNITVIAPHALENIVRQPPDRWMTNARMTHYQSLLLTERVTFAPPAALNPATLLPEETDEPVTHDCHQLLIEETGVRKDLTDIPLTGEVLTWFTDGSSYVVEGKRMAGAAVVDGTRTIWASSLPEGTSAQKAELMALTQALRLAEGKSINIYTDSRYAFATAHVHGAIYKQRGWLTSAGREIKNKEEILSLLEALHLPKRLAIIHCPGHQKAKDPISRGNQMADRVAKQAAQGVNLLAGKRTADGSEFEKRTADGSEFESPKKKAKVE

SEQ ID NO: 171 - protein, 2088 aa, synthetic construct
MPAAKRVKLDGGDKKYSIGLDIGTNSVGWAVITDEYKVPSKKFKVLGNTDRHSIKKNLIGALLFDSGETAEATRLKRTARRRYTRRKNRICYLQEIFSNEMAKVDDSFFHRLEESFLVEEDKKHERHPIFGNIVDEVAYHEKYPTIYHLRKKLVDSTDKADLRLIYLALAHMIKFRGHFLIEGDLNPDNSDVDKLFIQLVQTYNQLFEENPINASGVDAKAILSARLSKSRRLENLIAQLPGEKKNGLFGNLIALSLGLTPNFKSNFDLAEDAKLQLSKDTYDDDLDNLLAQIGDQYADLFLAAKNLSDAILLSDILRVNTEITKAPLSASMIKRYDEHHQDLTLLKALVRQQLPEKYKEIFFDQSKNGYAGYIDGGASQEEFYKFIKPILEKMDGTEELLVKLNREDLLRKQRTFDNGSIPHQIHLGELHAILRRQEDFYPFLKDNREKIEKILTFRIPYYVGPLARGNSRFAWMTRKSEETITPWNFEEVVDKGASAQSFIERMTNFDKNLPNEKVLPKHSLLYEYFTVYNELTKVKYVTEGMRKPAFLSGEQKKAIVDLLFKTNRKVTVKQLKEDYFKKIECFDSVEISGVEDRFNASLGTYHDLLKIIKDKDFLDNEENEDILEDIVLTLTLFEDREMIEERLKTYAHLFDDKVMKQLKRRRYTGWGRLSRKLINGIRDKQSGKTILDFLKSDGFANRNFMQLIHDDSLTFKEDIQKAQVSGQGDSLHEHIANLAGSPAIKKGILQTVKVVDELVKVMGRHKPENIVIEMARENQTTQKGQKNSRERMKRIEEGIKELGSQILKEHPVENTQLQNEKLYLYYLQNGRDMYVDQELDINRLSDYDVDHIVPQSFLKDDSIDNKVLTRSDKARGKSDNVPSEEVVKKMKNYWRQLLNAKLITQRKFDNLTKAERGGLSELDKAGFIKRQLVETRQITKHVAQILDSRMNTKYDENDKLIREVKVITLKSKLVSDFRKDFQFYKVREINNYHHAHDAYLNAVVGTALIKKYPKLESEFVYGDYKVYDVRKMIAKSEQEIGKATAKYFFYSNIMNFFKTEITLANGEIRKRPLIETNGETGEIVWDKGRDFATVRKVLSMPQVNIVKKTEVQTGGFSKESILPKRNSDKLIARKKDWDPKKYGGFDSPTVAYSVLVVAKVEKGKSKKLKSVKELLGITIMERSSFEKNPIDFLEAKGYKEVKKDLIIKLPKYSLFELENGRKRMLASAGELQKGNELALPSKYVNFLYLASHYEKLKGSPEDNEQKQLFVEQHKHYLDEIIEQISEFSKRVILADANLDKVLSAYNKHRDKPIREQAENIIHLFTLTNLGAPAAFKYFDTTIDRKRYTSTKEVLDATLIHQSITGLYETRIDLSQLGGDGGGSSPAPGGSGGTLQLDDEYRLYSPLVKPDQNIQFWLEQFPQAWAETAGMGLAKQVPPQVIQLKASATPVSVRQYPLSKEAQEGIRPHVQRLIQQGILVPVQSPWNTPLLPVRKPGTNDYRPVQDLREVNKRVQDIHPTVPNPYNLLCALPPQRSWYTVLDLKDAFFCLRLHPTSQPLFAFEWRDPGTGRTGQLTWTRLPQGFKNSPTIFNEALHRDLANFRIQHPQVTLLQYVDDLLLAGATKQDCLEGTKALLLELSDLGYRASAKKAQICRREVTYLGYSLRDGQRWLTEARKKTVVQIPAPTTAKQVREFLGTAGFCRLWIPGFATLAAPLYPLTKPKGEFSWAPEHQKAFDAIKKALLSAPALALPDVTKPFTLYVDERKGVARGVLTQTLGPWRRPVAYLSKKLDPVASGWPVCLKAIAAVAILVKDADKLTLGQNITVIAPHALENIVRQPPDRWMTNARMTHYQSLLLTERVTFAPPAALNPATLLPEETDEPVTHDCHQLLIEETGVRKDLTDIPLTGEVLTWFTDGSSYVVEGKRMAGAAVVDGTRTIWASSLPEGTSAQKAELMALTQALRLAEGKSINIYTDSRYAFATAHVHGAIYKQRGWLTSAGREIKNKEEILSLLEALHLPKRLAIIHCPGHQKAKDPISRGNQMADRVAKQAAQGVNLLAGKRTADGSEFEKRTADGSEFESPKKKAKVE

SEQ ID NO: 172 - protein, 2090 aa, synthetic construct
MPAAKRVKLDGGDKKYSIGLDIGTNSVGWAVITDEYKVPSKKFKVLGNTDRHSIKKNLIGALLFDSGETAEATRLKRTARRRYTRRKNRICYLQEIFSNEMAKVDDSFFHRLEESFLVEEDKKHERHPIFGNIVDEVAYHEKYPTIYHLRKKLVDSTDKADLRLIYLALAHMIKFRGHFLIEGDLNPDNSDVDKLFIQLVQTYNQLFEENPINASGVDAKAILSARLSKSRRLENLIAQLPGEKKNGLFGNLIALSLGLTPNFKSNFDLAEDAKLQLSKDTYDDDLDNLLAQIGDQYADLFLAAKNLSDAILLSDILRVNTEITKAPLSASMIKRYDEHHQDLTLLKALVRQQLPEKYKEIFFDQSKNGYAGYIDGGASQEEFYKFIKPILEKMDGTEELLVKLNREDLLRKQRTFDNGSIPHQIHLGELHAILRRQEDFYPFLKDNREKIEKILTFRIPYYVGPLARGNSRFAWMTRKSEETITPWNFEEVVDKGASAQSFIERMTNFDKNLPNEKVLPKHSLLYEYFTVYNELTKVKYVTEGMRKPAFLSGEQKKAIVDLLFKTNRKVTVKQLKEDYFKKIECFDSVEISGVEDRFNASLGTYHDLLKIIKDKDFLDNEENEDILEDIVLTLTLFEDREMIEERLKTYAHLFDDKVMKQLKRRRYTGWGRLSRKLINGIRDKQSGKTILDFLKSDGFANRNFMQLIHDDSLTFKEDIQKAQVSGQGDSLHEHIANLAGSPAIKKGILQTVKVVDELVKVMGRHKPENIVIEMARENQTTQKGQKNSRERMKRIEEGIKELGSQILKEHPVENTQLQNEKLYLYYLQNGRDMYVDQELDINRLSDYDVDHIVPQSFLKDDSIDNKVLTRSDKARGKSDNVPSEEVVKKMKNYWRQLLNAKLITQRKFDNLTKAERGGLSELDKAGFIKRQLVETRQITKHVAQILDSRMNTKYDENDKLIREVKVITLKSKLVSDFRKDFQFYKVREINNYHHAHDAYLNAVVGTALIKKYPKLESEFVYGDYKVYDVRKMIAKSEQEIGKATAKYFFYSNIMNFFKTEITLANGEIRKRPLIETNGETGEIVWDKGRDFATVRKVLSMPQVNIVKKTEVQTGGFSKESILPKRNSDKLIARKKDWDPKKYGGFDSPTVAYSVLVVAKVEKGKSKKLKSVKELLGITIMERSSFEKNPIDFLEAKGYKEVKKDLIIKLPKYSLFELENGRKRMLASAGELQKGNELALPSKYVNFLYLASHYEKLKGSPEDNEQKQLFVEQHKHYLDEIIEQISEFSKRVILADANLDKVLSAYNKHRDKPIREQAENIIHLFTLTNLGAPAAFKYFDTTIDRKRYTSTKEVLDATLIHQSITGLYETRIDLSQLGGDGGGGSGGGEAAAKGGTLQLDDEYRLYSPLVKPDQNIQFWLEQFPQAWAETAGMGLAKQVPPQVIQLKASATPVSVRQYPLSKEAQEGIRPHVQRLIQQGILVPVQSPWNTPLLPVRKPGTNDYRPVQDLREVNKRVQDIHPTVPNPYNLLCALPPQRSWYTVLDLKDAFFCLRLHPTSQPLFAFEWRDPGTGRTGQLTWTRLPQGFKNSPTIFNEALHRDLANFRIQHPQVTLLQYVDDLLLAGATKQDCLEGTKALLLELSDLGYRASAKKAQICRREVTYLGYSLRDGQRWLTEARKKTVVQIPAPTTAKQVREFLGTAGFCRLWIPGFATLAAPLYPLTKPKGEFSWAPEHQKAFDAIKKALLSAPALALPDVTKPFTLYVDERKGVARGVLTQTLGPWRRPVAYLSKKLDPVASGWPVCLKAIAAVAILVKDADKLTLGQNITVIAPHALENIVRQPPDRWMTNARMTHYQSLLLTERVTFAPPAALNPATLLPEETDEPVTHDCHQLLIEETGVRKDLTDIPLTGEVLTWFTDGSSYVVEGKRMAGAAVVDGTRTIWASSLPEGTSAQKAELMALTQALRLAEGKSINIYTDSRYAFATAHVHGAIYKQRGWLTSAGREIKNKEEILSLLEALHLPKRLAIIHCPGHQKAKDPISRGNQMADRVAKQAAQGVNLLAGKRTADGSEFEKRTADGSEFESPKKKAKVE

SEQ ID NO: 173 - protein, 2088 aa, synthetic construct
MPAAKRVKLDGGDKKYSIGLDIGTNSVGWAVITDEYKVPSKKFKVLGNTDRHSIKKNLIGALLFDSGETAEATRLKRTARRRYTRRKNRICYLQEIFSNEMAKVDDSFFHRLEESFLVEEDKKHERHPIFGNIVDEVAYHEKYPTIYHLRKKLVDSTDKADLRLIYLALAHMIKFRGHFLIEGDLNPDNSDVDKLFIQLVQTYNQLFEENPINASGVDAKAILSARLSKSRRLENLIAQLPGEKKNGLFGNLIALSLGLTPNFKSNFDLAEDAKLQLSKDTYDDDLDNLLAQIGDQYADLFLAAKNLSDAILLSDILRVNTEITKAPLSASMIKRYDEHHQDLTLLKALVRQQLPEKYKEIFFDQSKNGYAGYIDGGASQEEFYKFIKPILEKMDGTEELLVKLNREDLLRKQRTFDNGSIPHQIHLGELHAILRRQEDFYPFLKDNREKIEKILTFRIPYYVGPLARGNSRFAWMTRKSEETITPWNFEEVVDKGASAQSFIERMTNFDKNLPNEKVLPKHSLLYEYFTVYNELTKVKYVTEGMRKPAFLSGEQKKAIVDLLFKTNRKVTVKQLKEDYFKKIECFDSVEISGVEDRFNASLGTYHDLLKIIKDKDFLDNEENEDILEDIVLTLTLFEDREMIEERLKTYAHLFDDKVMKQLKRRRYTGWGRLSRKLINGIRDKQSGKTILDFLKSDGFANRNFMQLIHDDSLTFKEDIQKAQVSGQGDSLHEHIANLAGSPAIKKGILQTVKVVDELVKVMGRHKPENIVIEMARENQTTQKGQKNSRERMKRIEEGIKELGSQILKEHPVENTQLQNEKLYLYYLQNGRDMYVDQELDINRLSDYDVDHIVPQSFLKDDSIDNKVLTRSDKARGKSDNVPSEEVVKKMKNYWRQLLNAKLITQRKFDNLTKAERGGLSELDKAGFIKRQLVETRQITKHVAQILDSRMNTKYDENDKLIREVKVITLKSKLVSDFRKDFQFYKVREINNYHHAHDAYLNAVVGTALIKKYPKLESEFVYGDYKVYDVRKMIAKSEQEIGKATAKYFFYSNIMNFFKTEITLANGEIRKRPLIETNGETGEIVWDKGRDFATVRKVLSMPQVNIVKKTEVQTGGFSKESILPKRNSDKLIARKKDWDPKKYGGFDSPTVAYSVLVVAKVEKGKSKKLKSVKELLGITIMERSSFEKNPIDFLEAKGYKEVKKDLIIKLPKYSLFELENGRKRMLASAGELQKGNELALPSKYVNFLYLASHYEKLKGSPEDNEQKQLFVEQHKHYLDEIIEQISEFSKRVILADANLDKVLSAYNKHRDKPIREQAENIIHLFTLTNLGAPAAFKYFDTTIDRKRYTSTKEVLDATLIHQSITGLYETRIDLSQLGGDGGPAPGGGGGSGGTLQLDDEYRLYSPLVKPDQNIQFWLEQFPQAWAETAGMGLAKQVPPQVIQLKASATPVSVRQYPLSKEAQEGIRPHVQRLIQQGILVPVQSPWNTPLLPVRKPGTNDYRPVQDLREVNKRVQDIHPTVPNPYNLLCALPPQRSWYTVLDLKDAFFCLRLHPTSQPLFAFEWRDPGTGRTGQLTWTRLPQGFKNSPTIFNEALHRDLANFRIQHPQVTLLQYVDDLLLAGATKQDCLEGTKALLLELSDLGYRASAKKAQICRREVTYLGYSLRDGQRWLTEARKKTVVQIPAPTTAKQVREFLGTAGFCRLWIPGFATLAAPLYPLTKPKGEFSWAPEHQKAFDAIKKALLSAPALALPDVTKPFTLYVDERKGVARGVLTQTLGPWRRPVAYLSKKLDPVASGWPVCLKAIAAVAILVKDADKLTLGQNITVIAPHALENIVRQPPDRWMTNARMTHYQSLLLTERVTFAPPAALNPATLLPEETDEPVTHDCHQLLIEETGVRKDLTDIPLTGEVLTWFTDGSSYVVEGKRMAGAAVVDGTRTIWASSLPEGTSAQKAELMALTQALRLAEGKSINIYTDSRYAFATAHVHGAIYKQRGWLTSAGREIKNKEEILSLLEALHLPKRLAIIHCPGHQKAKDPISRGNQMADRVAKQAAQGVNLLAGKRTADGSEFEKRTADGSEFESPKKKAKVE

SEQ ID NO: 174 - protein, 2085 aa, synthetic construct
MPAAKRVKLDGGDKKYSIGLDIGTNSVGWAVITDEYKVPSKKFKVLGNTDRHSIKKNLIGALLFDSGETAEATRLKRTARRRYTRRKNRICYLQEIFSNEMAKVDDSFFHRLEESFLVEEDKKHERHPIFGNIVDEVAYHEKYPTIYHLRKKLVDSTDKADLRLIYLALAHMIKFRGHFLIEGDLNPDNSDVDKLFIQLVQTYNQLFEENPINASGVDAKAILSARLSKSRRLENLIAQLPGEKKNGLFGNLIALSLGLTPNFKSNFDLAEDAKLQLSKDTYDDDLDNLLAQIGDQYADLFLAAKNLSDAILLSDILRVNTEITKAPLSASMIKRYDEHHQDLTLLKALVRQQLPEKYKEIFFDQSKNGYAGYIDGGASQEEFYKFIKPILEKMDGTEELLVKLNREDLLRKQRTFDNGSIPHQIHLGELHAILRRQEDFYPFLKDNREKIEKILTFRIPYYVGPLARGNSRFAWMTRKSEETITPWNFEEVVDKGASAQSFIERMTNFDKNLPNEKVLPKHSLLYEYFTVYNELTKVKYVTEGMRKPAFLSGEQKKAIVDLLFKTNRKVTVKQLKEDYFKKIECFDSVEISGVEDRFNASLGTYHDLLKIIKDKDFLDNEENEDILEDIVLTLTLFEDREMIEERLKTYAHLFDDKVMKQLKRRRYTGWGRLSRKLINGIRDKQSGKTILDFLKSDGFANRNFMQLIHDDSLTFKEDIQKAQVSGQGDSLHEHIANLAGSPAIKKGILQTVKVVDELVKVMGRHKPENIVIEMARENQTTQKGQKNSRERMKRIEEGIKELGSQILKEHPVENTQLQNEKLYLYYLQNGRDMYVDQELDINRLSDYDVDHIVPQSFLKDDSIDNKVLTRSDKARGKSDNVPSEEVVKKMKNYWRQLLNAKLITQRKFDNLTKAERGGLSELDKAGFIKRQLVETRQITKHVAQILDSRMNTKYDENDKLIREVKVITLKSKLVSDFRKDFQFYKVREINNYHHAHDAYLNAVVGTALIKKYPKLESEFVYGDYKVYDVRKMIAKSEQEIGKATAKYFFYSNIMNFFKTEITLANGEIRKRPLIETNGETGEIVWDKGRDFATVRKVLSMPQVNIVKKTEVQTGGFSKESILPKRNSDKLIARKKDWDPKKYGGFDSPTVAYSVLVVAKVEKGKSKKLKSVKELLGITIMERSSFEKNPIDFLEAKGYKEVKKDLIIKLPKYSLFELENGRKRMLASAGELQKGNELALPSKYVNFLYLASHYEKLKGSPEDNEQKQLFVEQHKHYLDEIIEQISEFSKRVILADANLDKVLSAYNKHRDKPIREQAENIIHLFTLTNLGAPAAFKYFDTTIDRKRYTSTKEVLDATLIHQSITGLYETRIDLSQLGGDGGGSSGGGGGTLQLDDEYRLYSPLVKPDQNIQFWLEQFPQAWAETAGMGLAKQVPPQVIQLKASATPVSVRQYPLSKEAQEGIRPHVQRLIQQGILVPVQSPWNTPLLPVRKPGTNDYRPVQDLREVNKRVQDIHPTVPNPYNLLCALPPQRSWYTVLDLKDAFFCLRLHPTSQPLFAFEWRDPGTGRTGQLTWTRLPQGFKNSPTIFNEALHRDLANFRIQHPQVTLLQYVDDLLLAGATKQDCLEGTKALLLELSDLGYRASAKKAQICRREVTYLGYSLRDGQRWLTEARKKTVVQIPAPTTAKQVREFLGTAGFCRLWIPGFATLAAPLYPLTKPKGEFSWAPEHQKAFDAIKKALLSAPALALPDVTKPFTLYVDERKGVARGVLTQTLGPWRRPVAYLSKKLDPVASGWPVCLKAIAAVAILVKDADKLTLGQNITVIAPHALENIVRQPPDRWMTNARMTHYQSLLLTERVTFAPPAALNPATLLPEETDEPVTHDCHQLLIEETGVRKDLTDIPLTGEVLTWFTDGSSYVVEGKRMAGAAVVDGTRTIWASSLPEGTSAQKAELMALTQALRLAEGKSINIYTDSRYAFATAHVHGAIYKQRGWLTSAGREIKNKEEILSLLEALHLPKRLAIIHCPGHQKAKDPISRGNQMADRVAKQAAQGVNLLAGKRTADGSEFEKRTADGSEFESPKKKAKVE

SEQ ID NO: 175 - protein, 2088 aa, synthetic construct
MPAAKRVKLDGGDKKYSIGLDIGTNSVGWAVITDEYKVPSKKFKVLGNTDRHSIKKNLIGALLFDSGETAEATRLKRTARRRYTRRKNRICYLQEIFSNEMAKVDDSFFHRLEESFLVEEDKKHERHPIFGNIVDEVAYHEKYPTIYHLRKKLVDSTDKADLRLIYLALAHMIKFRGHFLIEGDLNPDNSDVDKLFIQLVQTYNQLFEENPINASGVDAKAILSARLSKSRRLENLIAQLPGEKKNGLFGNLIALSLGLTPNFKSNFDLAEDAKLQLSKDTYDDDLDNLLAQIGDQYADLFLAAKNLSDAILLSDILRVNTEITKAPLSASMIKRYDEHHQDLTLLKALVRQQLPEKYKEIFFDQSKNGYAGYIDGGASQEEFYKFIKPILEKMDGTEELLVKLNREDLLRKQRTFDNGSIPHQIHLGELHAILRRQEDFYPFLKDNREKIEKILTFRIPYYVGPLARGNSRFAWMTRKSEETITPWNFEEVVDKGASAQSFIERMTNFDKNLPNEKVLPKHSLLYEYFTVYNELTKVKYVTEGMRKPAFLSGEQKKAIVDLLFKTNRKVTVKQLKEDYFKKIECFDSVEISGVEDRFNASLGTYHDLLKIIKDKDFLDNEENEDILEDIVLTLTLFEDREMIEERLKTYAHLFDDKVMKQLKRRRYTGWGRLSRKLINGIRDKQSGKTILDFLKSDGFANRNFMQLIHDDSLTFKEDIQKAQVSGQGDSLHEHIANLAGSPAIKKGILQTVKVVDELVKVMGRHKPENIVIEMARENQTTQKGQKNSRERMKRIEEGIKELGSQILKEHPVENTQLQNEKLYLYYLQNGRDMYVDQELDINRLSDYDVDHIVPQSFLKDDSIDNKVLTRSDKARGKSDNVPSEEVVKKMKNYWRQLLNAKLITQRKFDNLTKAERGGLSELDKAGFIKRQLVETRQITKHVAQILDSRMNTKYDENDKLIREVKVITLKSKLVSDFRKDFQFYKVREINNYHHAHDAYLNAVVGTALIKKYPKLESEFVYGDYKVYDVRKMIAKSEQEIGKATAKYFFYSNIMNFFKTEITLANGEIRKRPLIETNGETGEIVWDKGRDFATVRKVLSMPQVNIVKKTEVQTGGFSKESILPKRNSDKLIARKKDWDPKKYGGFDSPTVAYSVLVVAKVEKGKSKKLKSVKELLGITIMERSSFEKNPIDFLEAKGYKEVKKDLIIKLPKYSLFELENGRKRMLASAGELQKGNELALPSKYVNFLYLASHYEKLKGSPEDNEQKQLFVEQHKHYLDEIIEQISEFSKRVILADANLDKVLSAYNKHRDKPIREQAENIIHLFTLTNLGAPAAFKYFDTTIDRKRYTSTKEVLDATLIHQSITGLYETRIDLSQLGGDGGGGSPAPGSSGGTLQLDDEYRLYSPLVKPDQNIQFWLEQFPQAWAETAGMGLAKQVPPQVIQLKASATPVSVRQYPLSKEAQEGIRPHVQRLIQQGILVPVQSPWNTPLLPVRKPGTNDYRPVQDLREVNKRVQDIHPTVPNPYNLLCALPPQRSWYTVLDLKDAFFCLRLHPTSQPLFAFEWRDPGTGRTGQLTWTRLPQGFKNSPTIFNEALHRDLANFRIQHPQVTLLQYVDDLLLAGATKQDCLEGTKALLLELSDLGYRASAKKAQICRREVTYLGYSLRDGQRWLTEARKKTVVQIPAPTTAKQVREFLGTAGFCRLWIPGFATLAAPLYPLTKPKGEFSWAPEHQKAFDAIKKALLSAPALALPDVTKPFTLYVDERKGVARGVLTQTLGPWRRPVAYLSKKLDPVASGWPVCLKAIAAVAILVKDADKLTLGQNITVIAPHALENIVRQPPDRWMTNARMTHYQSLLLTERVTFAPPAALNPATLLPEETDEPVTHDCHQLLIEETGVRKDLTDIPLTGEVLTWFTDGSSYVVEGKRMAGAAVVDGTRTIWASSLPEGTSAQKAELMALTQALRLAEGKSINIYTDSRYAFATAHVHGAIYKQRGWLTSAGREIKNKEEILSLLEALHLPKRLAIIHCPGHQKAKDPISRGNQMADRVAKQAAQGVNLLAGKRTADGSEFEKRTADGSEFESPKKKAKVE

SEQ ID NO: 176 - protein, 2085 aa, synthetic construct
MPAAKRVKLDGGDKKYSIGLDIGTNSVGWAVITDEYKVPSKKFKVLGNTDRHSIKKNLIGALLFDSGETAEATRLKRTARRRYTRRKNRICYLQEIFSNEMAKVDDSFFHRLEESFLVEEDKKHERHPIFGNIVDEVAYHEKYPTIYHLRKKLVDSTDKADLRLIYLALAHMIKFRGHFLIEGDLNPDNSDVDKLFIQLVQTYNQLFEENPINASGVDAKAILSARLSKSRRLENLIAQLPGEKKNGLFGNLIALSLGLTPNFKSNFDLAEDAKLQLSKDTYDDDLDNLLAQIGDQYADLFLAAKNLSDAILLSDILRVNTEITKAPLSASMIKRYDEHHQDLTLLKALVRQQLPEKYKEIFFDQSKNGYAGYIDGGASQEEFYKFIKPILEKMDGTEELLVKLNREDLLRKQRTFDNGSIPHQIHLGELHAILRRQEDFYPFLKDNREKIEKILTFRIPYYVGPLARGNSRFAWMTRKSEETITPWNFEEVVDKGASAQSFIERMTNFDKNLPNEKVLPKHSLLYEYFTVYNELTKVKYVTEGMRKPAFLSGEQKKAIVDLLFKTNRKVTVKQLKEDYFKKIECFDSVEISGVEDRFNASLGTYHDLLKIIKDKDFLDNEENEDILEDIVLTLTLFEDREMIEERLKTYAHLFDDKVMKQLKRRRYTGWGRLSRKLINGIRDKQSGKTILDFLKSDGFANRNFMQLIHDDSLTFKEDIQKAQVSGQGDSLHEHIANLAGSPAIKKGILQTVKVVDELVKVMGRHKPENIVIEMARENQTTQKGQKNSRERMKRIEEGIKELGSQILKEHPVENTQLQNEKLYLYYLQNGRDMYVDQELDINRLSDYDVDHIVPQSFLKDDSIDNKVLTRSDKARGKSDNVPSEEVVKKMKNYWRQLLNAKLITQRKFDNLTKAERGGLSELDKAGFIKRQLVETRQITKHVAQILDSRMNTKYDENDKLIREVKVITLKSKLVSDFRKDFQFYKVREINNYHHAHDAYLNAVVGTALIKKYPKLESEFVYGDYKVYDVRKMIAKSEQEIGKATAKYFFYSNIMNFFKTEITLANGEIRKRPLIETNGETGEIVWDKGRDFATVRKVLSMPQVNIVKKTEVQTGGFSKESILPKRNSDKLIARKKDWDPKKYGGFDSPTVAYSVLVVAKVEKGKSKKLKSVKELLGITIMERSSFEKNPIDFLEAKGYKEVKKDLIIKLPKYSLFELENGRKRMLASAGELQKGNELALPSKYVNFLYLASHYEKLKGSPEDNEQKQLFVEQHKHYLDEIIEQISEFSKRVILADANLDKVLSAYNKHRDKPIREQAENIIHLFTLTNLGAPAAFKYFDTTIDRKRYTSTKEVLDATLIHQSITGLYETRIDLSQLGGDGGGGSGSSGGTLQLDDEYRLYSPLVKPDQNIQFWLEQFPQAWAETAGMGLAKQVPPQVIQLKASATPVSVRQYPLSKEAQEGIRPHVQRLIQQGILVPVQSPWNTPLLPVRKPGTNDYRPVQDLREVNKRVQDIHPTVPNPYNLLCALPPQRSWYTVLDLKDAFFCLRLHPTSQPLFAFEWRDPGTGRTGQLTWTRLPQGFKNSPTIFNEALHRDLANFRIQHPQVTLLQYVDDLLLAGATKQDCLEGTKALLLELSDLGYRASAKKAQICRREVTYLGYSLRDGQRWLTEARKKTVVQIPAPTTAKQVREFLGTAGFCRLWIPGFATLAAPLYPLTKPKGEFSWAPEHQKAFDAIKKALLSAPALALPDVTKPFTLYVDERKGVARGVLTQTLGPWRRPVAYLSKKLDPVASGWPVCLKAIAAVAILVKDADKLTLGQNITVIAPHALENIVRQPPDRWMTNARMTHYQSLLLTERVTFAPPAALNPATLLPEETDEPVTHDCHQLLIEETGVRKDLTDIPLTGEVLTWFTDGSSYVVEGKRMAGAAVVDGTRTIWASSLPEGTSAQKAELMALTQALRLAEGKSINIYTDSRYAFATAHVHGAIYKQRGWLTSAGREIKNKEEILSLLEALHLPKRLAIIHCPGHQKAKDPISRGNQMADRVAKQAAQGVNLLAGKRTADGSEFEKRTADGSEFESPKKKAKVE

SEQ ID NO: 177 - protein, 2082 aa, synthetic construct
MPAAKRVKLDGGDKKYSIGLDIGTNSVGWAVITDEYKVPSKKFKVLGNTDRHSIKKNLIGALLFDSGETAEATRLKRTARRRYTRRKNRICYLQEIFSNEMAKVDDSFFHRLEESFLVEEDKKHERHPIFGNIVDEVAYHEKYPTIYHLRKKLVDSTDKADLRLIYLALAHMIKFRGHFLIEGDLNPDNSDVDKLFIQLVQTYNQLFEENPINASGVDAKAILSARLSKSRRLENLIAQLPGEKKNGLFGNLIALSLGLTPNFKSNFDLAEDAKLQLSKDTYDDDLDNLLAQIGDQYADLFLAAKNLSDAILLSDILRVNTEITKAPLSASMIKRYDEHHQDLTLLKALVRQQLPEKYKEIFFDQSKNGYAGYIDGGASQEEFYKFIKPILEKMDGTEELLVKLNREDLLRKQRTFDNGSIPHQIHLGELHAILRRQEDFYPFLKDNREKIEKILTFRIPYYVGPLARGNSRFAWMTRKSEETITPWNFEEVVDKGASAQSFIERMTNFDKNLPNEKVLPKHSLLYEYFTVYNELTKVKYVTEGMRKPAFLSGEQKKAIVDLLFKTNRKVTVKQLKEDYFKKIECFDSVEISGVEDRFNASLGTYHDLLKIIKDKDFLDNEENEDILEDIVLTLTLFEDREMIEERLKTYAHLFDDKVMKQLKRRRYTGWGRLSRKLINGIRDKQSGKTILDFLKSDGFANRNFMQLIHDDSLTFKEDIQKAQVSGQGDSLHEHIANLAGSPAIKKGILQTVKVVDELVKVMGRHKPENIVIEMARENQTTQKGQKNSRERMKRIEEGIKELGSQILKEHPVENTQLQNEKLYLYYLQNGRDMYVDQELDINRLSDYDVDHIVPQSFLKDDSIDNKVLTRSDKARGKSDNVPSEEVVKKMKNYWRQLLNAKLITQRKFDNLTKAERGGLSELDKAGFIKRQLVETRQITKHVAQILDSRMNTKYDENDKLIREVKVITLKSKLVSDFRKDFQFYKVREINNYHHAHDAYLNAVVGTALIKKYPKLESEFVYGDYKVYDVRKMIAKSEQEIGKATAKYFFYSNIMNFFKTEITLANGEIRKRPLIETNGETGEIVWDKGRDFATVRKVLSMPQVNIVKKTEVQTGGFSKESILPKRNSDKLIARKKDWDPKKYGGFDSPTVAYSVLVVAKVEKGKSKKLKSVKELLGITIMERSSFEKNPIDFLEAKGYKEVKKDLIIKLPKYSLFELENGRKRMLASAGELQKGNELALPSKYVNFLYLASHYEKLKGSPEDNEQKQLFVEQHKHYLDEIIEQISEFSKRVILADANLDKVLSAYNKHRDKPIREQAENIIHLFTLTNLGAPAAFKYFDTTIDRKRYTSTKEVLDATLIHQSITGLYETRIDLSQLGGDGGPAPGGTLQLDDEYRLYSPLVKPDQNIQFWLEQFPQAWAETAGMGLAKQVPPQVIQLKASATPVSVRQYPLSKEAQEGIRPHVQRLIQQGILVPVQSPWNTPLLPVRKPGTNDYRPVQDLREVNKRVQDIHPTVPNPYNLLCALPPQRSWYTVLDLKDAFFCLRLHPTSQPLFAFEWRDPGTGRTGQLTWTRLPQGFKNSPTIFNEALHRDLANFRIQHPQVTLLQYVDDLLLAGATKQDCLEGTKALLLELSDLGYRASAKKAQICRREVTYLGYSLRDGQRWLTEARKKTVVQIPAPTTAKQVREFLGTAGFCRLWIPGFATLAAPLYPLTKPKGEFSWAPEHQKAFDAIKKALLSAPALALPDVTKPFTLYVDERKGVARGVLTQTLGPWRRPVAYLSKKLDPVASGWPVCLKAIAAVAILVKDADKLTLGQNITVIAPHALENIVRQPPDRWMTNARMTHYQSLLLTERVTFAPPAALNPATLLPEETDEPVTHDCHQLLIEETGVRKDLTDIPLTGEVLTWFTDGSSYVVEGKRMAGAAVVDGTRTIWASSLPEGTSAQKAELMALTQALRLAEGKSINIYTDSRYAFATAHVHGAIYKQRGWLTSAGREIKNKEEILSLLEALHLPKRLAIIHCPGHQKAKDPISRGNQMADRVAKQAAQGVNLLAGKRTADGSEFEKRTADGSEFESPKKKAKVE

SEQ ID NO: 178 - protein, 2085 aa, synthetic construct
MPAAKRVKLDGGDKKYSIGLDIGTNSVGWAVITDEYKVPSKKFKVLGNTDRHSIKKNLIGALLFDSGETAEATRLKRTARRRYTRRKNRICYLQEIFSNEMAKVDDSFFHRLEESFLVEEDKKHERHPIFGNIVDEVAYHEKYPTIYHLRKKLVDSTDKADLRLIYLALAHMIKFRGHFLIEGDLNPDNSDVDKLFIQLVQTYNQLFEENPINASGVDAKAILSARLSKSRRLENLIAQLPGEKKNGLFGNLIALSLGLTPNFKSNFDLAEDAKLQLSKDTYDDDLDNLLAQIGDQYADLFLAAKNLSDAILLSDILRVNTEITKAPLSASMIKRYDEHHQDLTLLKALVRQQLPEKYKEIFFDQSKNGYAGYIDGGASQEEFYKFIKPILEKMDGTEELLVKLNREDLLRKQRTFDNGSIPHQIHLGELHAILRRQEDFYPFLKDNREKIEKILTFRIPYYVGPLARGNSRFAWMTRKSEETITPWNFEEVVDKGASAQSFIERMTNFDKNLPNEKVLPKHSLLYEYFTVYNELTKVKYVTEGMRKPAFLSGEQKKAIVDLLFKTNRKVTVKQLKEDYFKKIECFDSVEISGVEDRFNASLGTYHDLLKIIKDKDFLDNEENEDILEDIVLTLTLFEDREMIEERLKTYAHLFDDKVMKQLKRRRYTGWGRLSRKLINGIRDKQSGKTILDFLKSDGFANRNFMQLIHDDSLTFKEDIQKAQVSGQGDSLHEHIANLAGSPAIKKGILQTVKVVDELVKVMGRHKPENIVIEMARENQTTQKGQKNSRERMKRIEEGIKELGSQILKEHPVENTQLQNEKLYLYYLQNGRDMYVDQELDINRLSDYDVDHIVPQSFLKDDSIDNKVLTRSDKARGKSDNVPSEEVVKKMKNYWRQLLNAKLITQRKFDNLTKAERGGLSELDKAGFIKRQLVETRQITKHVAQILDSRMNTKYDENDKLIREVKVITLKSKLVSDFRKDFQFYKVREINNYHHAHDAYLNAVVGTALIKKYPKLESEFVYGDYKVYDVRKMIAKSEQEIGKATAKYFFYSNIMNFFKTEITLANGEIRKRPLIETNGETGEIVWDKGRDFATVRKVLSMPQVNIVKKTEVQTGGFSKESILPKRNSDKLIARKKDWDPKKYGGFDSPTVAYSVLVVAKVEKGKSKKLKSVKELLGITIMERSSFEKNPIDFLEAKGYKEVKKDLIIKLPKYSLFELENGRKRMLASAGELQKGNELALPSKYVNFLYLASHYEKLKGSPEDNEQKQLFVEQHKHYLDEIIEQISEFSKRVILADANLDKVLSAYNKHRDKPIREQAENIIHLFTLTNLGAPAAFKYFDTTIDRKRYTSTKEVLDATLIHQSITGLYETRIDLSQLGGDGGGSSGSSGGTLQLDDEYRLYSPLVKPDQNIQFWLEQFPQAWAETAGMGLAKQVPPQVIQLKASATPVSVRQYPLSKEAQEGIRPHVQRLIQQGILVPVQSPWNTPLLPVRKPGTNDYRPVQDLREVNKRVQDIHPTVPNPYNLLCALPPQRSWYTVLDLKDAFFCLRLHPTSQPLFAFEWRDPGTGRTGQLTWTRLPQGFKNSPTIFNEALHRDLANFRIQHPQVTLLQYVDDLLLAGATKQDCLEGTKALLLELSDLGYRASAKKAQICRREVTYLGYSLRDGQRWLTEARKKTVVQIPAPTTAKQVREFLGTAGFCRLWIPGFATLAAPLYPLTKPKGEFSWAPEHQKAFDAIKKALLSAPALALPDVTKPFTLYVDERKGVARGVLTQTLGPWRRPVAYLSKKLDPVASGWPVCLKAIAAVAILVKDADKLTLGQNITVIAPHALENIVRQPPDRWMTNARMTHYQSLLLTERVTFAPPAALNPATLLPEETDEPVTHDCHQLLIEETGVRKDLTDIPLTGEVLTWFTDGSSYVVEGKRMAGAAVVDGTRTIWASSLPEGTSAQKAELMALTQALRLAEGKSINIYTDSRYAFATAHVHGAIYKQRGWLTSAGREIKNKEEILSLLEALHLPKRLAIIHCPGHQKAKDPISRGNQMADRVAKQAAQGVNLLAGKRTADGSEFEKRTADGSEFESPKKKAKVE

SEQ ID NO: 179 - protein, 2085 aa, synthetic construct
MPAAKRVKLDGGDKKYSIGLDIGTNSVGWAVITDEYKVPSKKFKVLGNTDRHSIKKNLIGALLFDSGETAEATRLKRTARRRYTRRKNRICYLQEIFSNEMAKVDDSFFHRLEESFLVEEDKKHERHPIFGNIVDEVAYHEKYPTIYHLRKKLVDSTDKADLRLIYLALAHMIKFRGHFLIEGDLNPDNSDVDKLFIQLVQTYNQLFEENPINASGVDAKAILSARLSKSRRLENLIAQLPGEKKNGLFGNLIALSLGLTPNFKSNFDLAEDAKLQLSKDTYDDDLDNLLAQIGDQYADLFLAAKNLSDAILLSDILRVNTEITKAPLSASMIKRYDEHHQDLTLLKALVRQQLPEKYKEIFFDQSKNGYAGYIDGGASQEEFYKFIKPILEKMDGTEELLVKLNREDLLRKQRTFDNGSIPHQIHLGELHAILRRQEDFYPFLKDNREKIEKILTFRIPYYVGPLARGNSRFAWMTRKSEETITPWNFEEVVDKGASAQSFIERMTNFDKNLPNEKVLPKHSLLYEYFTVYNELTKVKYVTEGMRKPAFLSGEQKKAIVDLLFKTNRKVTVKQLKEDYFKKIECFDSVEISGVEDRFNASLGTYHDLLKIIKDKDFLDNEENEDILEDIVLTLTLFEDREMIEERLKTYAHLFDDKVMKQLKRRRYTGWGRLSRKLINGIRDKQSGKTILDFLKSDGFANRNFMQLIHDDSLTFKEDIQKAQVSGQGDSLHEHIANLAGSPAIKKGILQTVKVVDELVKVMGRHKPENIVIEMARENQTTQKGQKNSRERMKRIEEGIKELGSQILKEHPVENTQLQNEKLYLYYLQNGRDMYVDQELDINRLSDYDVDHIVPQSFLKDDSIDNKVLTRSDKARGKSDNVPSEEVVKKMKNYWRQLLNAKLITQRKFDNLTKAERGGLSELDKAGFIKRQLVETRQITKHVAQILDSRMNTKYDENDKLIREVKVITLKSKLVSDFRKDFQFYKVREINNYHHAHDAYLNAVVGTALIKKYPKLESEFVYGDYKVYDVRKMIAKSEQEIGKATAKYFFYSNIMNFFKTEITLANGEIRKRPLIETNGETGEIVWDKGRDFATVRKVLSMPQVNIVKKTEVQTGGFSKESILPKRNSDKLIARKKDWDPKKYGGFDSPTVAYSVLVVAKVEKGKSKKLKSVKELLGITIMERSSFEKNPIDFLEAKGYKEVKKDLIIKLPKYSLFELENGRKRMLASAGELQKGNELALPSKYVNFLYLASHYEKLKGSPEDNEQKQLFVEQHKHYLDEIIEQISEFSKRVILADANLDKVLSAYNKHRDKPIREQAENIIHLFTLTNLGAPAAFKYFDTTIDRKRYTSTKEVLDATLIHQSITGLYETRIDLSQLGGDGGGGGGGSGGTLQLDDEYRLYSPLVKPDQNIQFWLEQFPQAWAETAGMGLAKQVPPQVIQLKASATPVSVRQYPLSKEAQEGIRPHVQRLIQQGILVPVQSPWNTPLLPVRKPGTNDYRPVQDLREVNKRVQDIHPTVPNPYNLLCALPPQRSWYTVLDLKDAFFCLRLHPTSQPLFAFEWRDPGTGRTGQLTWTRLPQGFKNSPTIFNEALHRDLANFRIQHPQVTLLQYVDDLLLAGATKQDCLEGTKALLLELSDLGYRASAKKAQICRREVTYLGYSLRDGQRWLTEARKKTVVQIPAPTTAKQVREFLGTAGFCRLWIPGFATLAAPLYPLTKPKGEFSWAPEHQKAFDAIKKALLSAPALALPDVTKPFTLYVDERKGVARGVLTQTLGPWRRPVAYLSKKLDPVASGWPVCLKAIAAVAILVKDADKLTLGQNITVIAPHALENIVRQPPDRWMTNARMTHYQSLLLTERVTFAPPAALNPATLLPEETDEPVTHDCHQLLIEETGVRKDLTDIPLTGEVLTWFTDGSSYVVEGKRMAGAAVVDGTRTIWASSLPEGTSAQKAELMALTQALRLAEGKSINIYTDSRYAFATAHVHGAIYKQRGWLTSAGREIKNKEEILSLLEALHLPKRLAIIHCPGHQKAKDPISRGNQMADRVAKQAAQGVNLLAGKRTADGSEFEKRTADGSEFESPKKKAKVE

SEQ ID NO: 180 - protein, 2088 aa, synthetic construct
MPAAKRVKLDGGDKKYSIGLDIGTNSVGWAVITDEYKVPSKKFKVLGNTDRHSIKKNLIGALLFDSGETAEATRLKRTARRRYTRRKNRICYLQEIFSNEMAKVDDSFFHRLEESFLVEEDKKHERHPIFGNIVDEVAYHEKYPTIYHLRKKLVDSTDKADLRLIYLALAHMIKFRGHFLIEGDLNPDNSDVDKLFIQLVQTYNQLFEENPINASGVDAKAILSARLSKSRRLENLIAQLPGEKKNGLFGNLIALSLGLTPNFKSNFDLAEDAKLQLSKDTYDDDLDNLLAQIGDQYADLFLAAKNLSDAILLSDILRVNTEITKAPLSASMIKRYDEHHQDLTLLKALVRQQLPEKYKEIFFDQSKNGYAGYIDGGASQEEFYKFIKPILEKMDGTEELLVKLNREDLLRKQRTFDNGSIPHQIHLGELHAILRRQEDFYPFLKDNREKIEKILTFRIPYYVGPLARGNSRFAWMTRKSEETITPWNFEEVVDKGASAQSFIERMTNFDKNLPNEKVLPKHSLLYEYFTVYNELTKVKYVTEGMRKPAFLSGEQKKAIVDLLFKTNRKVTVKQLKEDYFKKIECFDSVEISGVEDRFNASLGTYHDLLKIIKDKDFLDNEENEDILEDIVLTLTLFEDREMIEERLKTYAHLFDDKVMKQLKRRRYTGWGRLSRKLINGIRDKQSGKTILDFLKSDGFANRNFMQLIHDDSLTFKEDIQKAQVSGQGDSLHEHIANLAGSPAIKKGILQTVKVVDELVKVMGRHKPENIVIEMARENQTTQKGQKNSRERMKRIEEGIKELGSQILKEHPVENTQLQNEKLYLYYLQNGRDMYVDQELDINRLSDYDVDHIVPQSFLKDDSIDNKVLTRSDKARGKSDNVPSEEVVKKMKNYWRQLLNAKLITQRKFDNLTKAERGGLSELDKAGFIKRQLVETRQITKHVAQILDSRMNTKYDENDKLIREVKVITLKSKLVSDFRKDFQFYKVREINNYHHAHDAYLNAVVGTALIKKYPKLESEFVYGDYKVYDVRKMIAKSEQEIGKATAKYFFYSNIMNFFKTEITLANGEIRKRPLIETNGETGEIVWDKGRDFATVRKVLSMPQVNIVKKTEVQTGGFSKESILPKRNSDKLIARKKDWDPKKYGGFDSPTVAYSVLVVAKVEKGKSKKLKSVKELLGITIMERSSFEKNPIDFLEAKGYKEVKKDLIIKLPKYSLFELENGRKRMLASAGELQKGNELALPSKYVNFLYLASHYEKLKGSPEDNEQKQLFVEQHKHYLDEIIEQISEFSKRVILADANLDKVLSAYNKHRDKPIREQAENIIHLFTLTNLGAPAAFKYFDTTIDRKRYTSTKEVLDATLIHQSITGLYETRIDLSQLGGDGGGGGGSSGGSGGTLQLDDEYRLYSPLVKPDQNIQFWLEQFPQAWAETAGMGLAKQVPPQVIQLKASATPVSVRQYPLSKEAQEGIRPHVQRLIQQGILVPVQSPWNTPLLPVRKPGTNDYRPVQDLREVNKRVQDIHPTVPNPYNLLCALPPQRSWYTVLDLKDAFFCLRLHPTSQPLFAFEWRDPGTGRTGQLTWTRLPQGFKNSPTIFNEALHRDLANFRIQHPQVTLLQYVDDLLLAGATKQDCLEGTKALLLELSDLGYRASAKKAQICRREVTYLGYSLRDGQRWLTEARKKTVVQIPAPTTAKQVREFLGTAGFCRLWIPGFATLAAPLYPLTKPKGEFSWAPEHQKAFDAIKKALLSAPALALPDVTKPFTLYVDERKGVARGVLTQTLGPWRRPVAYLSKKLDPVASGWPVCLKAIAAVAILVKDADKLTLGQNITVIAPHALENIVRQPPDRWMTNARMTHYQSLLLTERVTFAPPAALNPATLLPEETDEPVTHDCHQLLIEETGVRKDLTDIPLTGEVLTWFTDGSSYVVEGKRMAGAAVVDGTRTIWASSLPEGTSAQKAELMALTQALRLAEGKSINIYTDSRYAFATAHVHGAIYKQRGWLTSAGREIKNKEEILSLLEALHLPKRLAIIHCPGHQKAKDPISRGNQMADRVAKQAAQGVNLLAGKRTADGSEFEKRTADGSEFESPKKKAKVE

SEQ ID NO: 181 - protein, 2088 aa, synthetic construct
MPAAKRVKLDGGDKKYSIGLDIGTNSVGWAVITDEYKVPSKKFKVLGNTDRHSIKKNLIGALLFDSGETAEATRLKRTARRRYTRRKNRICYLQEIFSNEMAKVDDSFFHRLEESFLVEEDKKHERHPIFGNIVDEVAYHEKYPTIYHLRKKLVDSTDKADLRLIYLALAHMIKFRGHFLIEGDLNPDNSDVDKLFIQLVQTYNQLFEENPINASGVDAKAILSARLSKSRRLENLIAQLPGEKKNGLFGNLIALSLGLTPNFKSNFDLAEDAKLQLSKDTYDDDLDNLLAQIGDQYADLFLAAKNLSDAILLSDILRVNTEITKAPLSASMIKRYDEHHQDLTLLKALVRQQLPEKYKEIFFDQSKNGYAGYIDGGASQEEFYKFIKPILEKMDGTEELLVKLNREDLLRKQRTFDNGSIPHQIHLGELHAILRRQEDFYPFLKDNREKIEKILTFRIPYYVGPLARGNSRFAWMTRKSEETITPWNFEEVVDKGASAQSFIERMTNFDKNLPNEKVLPKHSLLYEYFTVYNELTKVKYVTEGMRKPAFLSGEQKKAIVDLLFKTNRKVTVKQLKEDYFKKIECFDSVEISGVEDRFNASLGTYHDLLKIIKDKDFLDNEENEDILEDIVLTLTLFEDREMIEERLKTYAHLFDDKVMKQLKRRRYTGWGRLSRKLINGIRDKQSGKTILDFLKSDGFANRNFMQLIHDDSLTFKEDIQKAQVSGQGDSLHEHIANLAGSPAIKKGILQTVKVVDELVKVMGRHKPENIVIEMARENQTTQKGQKNSRERMKRIEEGIKELGSQILKEHPVENTQLQNEKLYLYYLQNGRDMYVDQELDINRLSDYDVDHIVPQSFLKDDSIDNKVLTRSDKARGKSDNVPSEEVVKKMKNYWRQLLNAKLITQRKFDNLTKAERGGLSELDKAGFIKRQLVETRQITKHVAQILDSRMNTKYDENDKLIREVKVITLKSKLVSDFRKDFQFYKVREINNYHHAHDAYLNAVVGTALIKKYPKLESEFVYGDYKVYDVRKMIAKSEQEIGKATAKYFFYSNIMNFFKTEITLANGEIRKRPLIETNGETGEIVWDKGRDFATVRKVLSMPQVNIVKKTEVQTGGFSKESILPKRNSDKLIARKKDWDPKKYGGFDSPTVAYSVLVVAKVEKGKSKKLKSVKELLGITIMERSSFEKNPIDFLEAKGYKEVKKDLIIKLPKYSLFELENGRKRMLASAGELQKGNELALPSKYVNFLYLASHYEKLKGSPEDNEQKQLFVEQHKHYLDEIIEQISEFSKRVILADANLDKVLSAYNKHRDKPIREQAENIIHLFTLTNLGAPAAFKYFDTTIDRKRYTSTKEVLDATLIHQSITGLYETRIDLSQLGGDGGGSSGSSGSSGGTLQLDDEYRLYSPLVKPDQNIQFWLEQFPQAWAETAGMGLAKQVPPQVIQLKASATPVSVRQYPLSKEAQEGIRPHVQRLIQQGILVPVQSPWNTPLLPVRKPGTNDYRPVQDLREVNKRVQDIHPTVPNPYNLLCALPPQRSWYTVLDLKDAFFCLRLHPTSQPLFAFEWRDPGTGRTGQLTWTRLPQGFKNSPTIFNEALHRDLANFRIQHPQVTLLQYVDDLLLAGATKQDCLEGTKALLLELSDLGYRASAKKAQICRREVTYLGYSLRDGQRWLTEARKKTVVQIPAPTTAKQVREFLGTAGFCRLWIPGFATLAAPLYPLTKPKGEFSWAPEHQKAFDAIKKALLSAPALALPDVTKPFTLYVDERKGVARGVLTQTLGPWRRPVAYLSKKLDPVASGWPVCLKAIAAVAILVKDADKLTLGQNITVIAPHALENIVRQPPDRWMTNARMTHYQSLLLTERVTFAPPAALNPATLLPEETDEPVTHDCHQLLIEETGVRKDLTDIPLTGEVLTWFTDGSSYVVEGKRMAGAAVVDGTRTIWASSLPEGTSAQKAELMALTQALRLAEGKSINIYTDSRYAFATAHVHGAIYKQRGWLTSAGREIKNKEEILSLLEALHLPKRLAIIHCPGHQKAKDPISRGNQMADRVAKQAAQGVNLLAGKRTADGSEFEKRTADGSEFESPKKKAKVE

SEQ ID NO: 182 - protein, 2088 aa, synthetic construct
MPAAKRVKLDGGDKKYSIGLDIGTNSVGWAVITDEYKVPSKKFKVLGNTDRHSIKKNLIGALLFDSGETAEATRLKRTARRRYTRRKNRICYLQEIFSNEMAKVDDSFFHRLEESFLVEEDKKHERHPIFGNIVDEVAYHEKYPTIYHLRKKLVDSTDKADLRLIYLALAHMIKFRGHFLIEGDLNPDNSDVDKLFIQLVQTYNQLFEENPINASGVDAKAILSARLSKSRRLENLIAQLPGEKKNGLFGNLIALSLGLTPNFKSNFDLAEDAKLQLSKDTYDDDLDNLLAQIGDQYADLFLAAKNLSDAILLSDILRVNTEITKAPLSASMIKRYDEHHQDLTLLKALVRQQLPEKYKEIFFDQSKNGYAGYIDGGASQEEFYKFIKPILEKMDGTEELLVKLNREDLLRKQRTFDNGSIPHQIHLGELHAILRRQEDFYPFLKDNREKIEKILTFRIPYYVGPLARGNSRFAWMTRKSEETITPWNFEEVVDKGASAQSFIERMTNFDKNLPNEKVLPKHSLLYEYFTVYNELTKVKYVTEGMRKPAFLSGEQKKAIVDLLFKTNRKVTVKQLKEDYFKKIECFDSVEISGVEDRFNASLGTYHDLLKIIKDKDFLDNEENEDILEDIVLTLTLFEDREMIEERLKTYAHLFDDKVMKQLKRRRYTGWGRLSRKLINGIRDKQSGKTILDFLKSDGFANRNFMQLIHDDSLTFKEDIQKAQVSGQGDSLHEHIANLAGSPAIKKGILQTVKVVDELVKVMGRHKPENIVIEMARENQTTQKGQKNSRERMKRIEEGIKELGSQILKEHPVENTQLQNEKLYLYYLQNGRDMYVDQELDINRLSDYDVDHIVPQSFLKDDSIDNKVLTRSDKARGKSDNVPSEEVVKKMKNYWRQLLNAKLITQRKFDNLTKAERGGLSELDKAGFIKRQLVETRQITKHVAQILDSRMNTKYDENDKLIREVKVITLKSKLVSDFRKDFQFYKVREINNYHHAHDAYLNAVVGTALIKKYPKLESEFVYGDYKVYDVRKMIAKSEQEIGKATAKYFFYSNIMNFFKTEITLANGEIRKRPLIETNGETGEIVWDKGRDFATVRKVLSMPQVNIVKKTEVQTGGFSKESILPKRNSDKLIARKKDWDPKKYGGFDSPTVAYSVLVVAKVEKGKSKKLKSVKELLGITIMERSSFEKNPIDFLEAKGYKEVKKDLIIKLPKYSLFELENGRKRMLASAGELQKGNELALPSKYVNFLYLASHYEKLKGSPEDNEQKQLFVEQHKHYLDEIIEQISEFSKRVILADANLDKVLSAYNKHRDKPIREQAENIIHLFTLTNLGAPAAFKYFDTTIDRKRYTSTKEVLDATLIHQSITGLYETRIDLSQLGGDGGGSSGGSGGGGGTLQLDDEYRLYSPLVKPDQNIQFWLEQFPQAWAETAGMGLAKQVPPQVIQLKASATPVSVRQYPLSKEAQEGIRPHVQRLIQQGILVPVQSPWNTPLLPVRKPGTNDYRPVQDLREVNKRVQDIHPTVPNPYNLLCALPPQRSWYTVLDLKDAFFCLRLHPTSQPLFAFEWRDPGTGRTGQLTWTRLPQGFKNSPTIFNEALHRDLANFRIQHPQVTLLQYVDDLLLAGATKQDCLEGTKALLLELSDLGYRASAKKAQICRREVTYLGYSLRDGQRWLTEARKKTVVQIPAPTTAKQVREFLGTAGFCRLWIPGFATLAAPLYPLTKPKGEFSWAPEHQKAFDAIKKALLSAPALALPDVTKPFTLYVDERKGVARGVLTQTLGPWRRPVAYLSKKLDPVASGWPVCLKAIAAVAILVKDADKLTLGQNITVIAPHALENIVRQPPDRWMTNARMTHYQSLLLTERVTFAPPAALNPATLLPEETDEPVTHDCHQLLIEETGVRKDLTDIPLTGEVLTWFTDGSSYVVEGKRMAGAAVVDGTRTIWASSLPEGTSAQKAELMALTQALRLAEGKSINIYTDSRYAFATAHVHGAIYKQRGWLTSAGREIKNKEEILSLLEALHLPKRLAIIHCPGHQKAKDPISRGNQMADRVAKQAAQGVNLLAGKRTADGSEFEKRTADGSEFESPKKKAKVE

SEQ ID NO: 183 - protein, 2085 aa, synthetic construct
MPAAKRVKLDGGDKKYSIGLDIGTNSVGWAVITDEYKVPSKKFKVLGNTDRHSIKKNLIGALLFDSGETAEATRLKRTARRRYTRRKNRICYLQEIFSNEMAKVDDSFFHRLEESFLVEEDKKHERHPIFGNIVDEVAYHEKYPTIYHLRKKLVDSTDKADLRLIYLALAHMIKFRGHFLIEGDLNPDNSDVDKLFIQLVQTYNQLFEENPINASGVDAKAILSARLSKSRRLENLIAQLPGEKKNGLFGNLIALSLGLTPNFKSNFDLAEDAKLQLSKDTYDDDLDNLLAQIGDQYADLFLAAKNLSDAILLSDILRVNTEITKAPLSASMIKRYDEHHQDLTLLKALVRQQLPEKYKEIFFDQSKNGYAGYIDGGASQEEFYKFIKPILEKMDGTEELLVKLNREDLLRKQRTFDNGSIPHQIHLGELHAILRRQEDFYPFLKDNREKIEKILTFRIPYYVGPLARGNSRFAWMTRKSEETITPWNFEEVVDKGASAQSFIERMTNFDKNLPNEKVLPKHSLLYEYFTVYNELTKVKYVTEGMRKPAFLSGEQKKAIVDLLFKTNRKVTVKQLKEDYFKKIECFDSVEISGVEDRFNASLGTYHDLLKIIKDKDFLDNEENEDILEDIVLTLTLFEDREMIEERLKTYAHLFDDKVMKQLKRRRYTGWGRLSRKLINGIRDKQSGKTILDFLKSDGFANRNFMQLIHDDSLTFKEDIQKAQVSGQGDSLHEHIANLAGSPAIKKGILQTVKVVDELVKVMGRHKPENIVIEMARENQTTQKGQKNSRERMKRIEEGIKELGSQILKEHPVENTQLQNEKLYLYYLQNGRDMYVDQELDINRLSDYDVDHIVPQSFLKDDSIDNKVLTRSDKARGKSDNVPSEEVVKKMKNYWRQLLNAKLITQRKFDNLTKAERGGLSELDKAGFIKRQLVETRQITKHVAQILDSRMNTKYDENDKLIREVKVITLKSKLVSDFRKDFQFYKVREINNYHHAHDAYLNAVVGTALIKKYPKLESEFVYGDYKVYDVRKMIAKSEQEIGKATAKYFFYSNIMNFFKTEITLANGEIRKRPLIETNGETGEIVWDKGRDFATVRKVLSMPQVNIVKKTEVQTGGFSKESILPKRNSDKLIARKKDWDPKKYGGFDSPTVAYSVLVVAKVEKGKSKKLKSVKELLGITIMERSSFEKNPIDFLEAKGYKEVKKDLIIKLPKYSLFELENGRKRMLASAGELQKGNELALPSKYVNFLYLASHYEKLKGSPEDNEQKQLFVEQHKHYLDEIIEQISEFSKRVILADANLDKVLSAYNKHRDKPIREQAENIIHLFTLTNLGAPAAFKYFDTTIDRKRYTSTKEVLDATLIHQSITGLYETRIDLSQLGGDGGGGGGGGGGTLQLDDEYRLYSPLVKPDQNIQFWLEQFPQAWAETAGMGLAKQVPPQVIQLKASATPVSVRQYPLSKEAQEGIRPHVQRLIQQGILVPVQSPWNTPLLPVRKPGTNDYRPVQDLREVNKRVQDIHPTVPNPYNLLCALPPQRSWYTVLDLKDAFFCLRLHPTSQPLFAFEWRDPGTGRTGQLTWTRLPQGFKNSPTIFNEALHRDLANFRIQHPQVTLLQYVDDLLLAGATKQDCLEGTKALLLELSDLGYRASAKKAQICRREVTYLGYSLRDGQRWLTEARKKTVVQIPAPTTAKQVREFLGTAGFCRLWIPGFATLAAPLYPLTKPKGEFSWAPEHQKAFDAIKKALLSAPALALPDVTKPFTLYVDERKGVARGVLTQTLGPWRRPVAYLSKKLDPVASGWPVCLKAIAAVAILVKDADKLTLGQNITVIAPHALENIVRQPPDRWMTNARMTHYQSLLLTERVTFAPPAALNPATLLPEETDEPVTHDCHQLLIEETGVRKDLTDIPLTGEVLTWFTDGSSYVVEGKRMAGAAVVDGTRTIWASSLPEGTSAQKAELMALTQALRLAEGKSINIYTDSRYAFATAHVHGAIYKQRGWLTSAGREIKNKEEILSLLEALHLPKRLAIIHCPGHQKAKDPISRGNQMADRVAKQAAQGVNLLAGKRTADGSEFEKRTADGSEFESPKKKAKVE

SEQ ID NO: 184 - protein, 2085 aa, synthetic construct
MPAAKRVKLDGGDKKYSIGLDIGTNSVGWAVITDEYKVPSKKFKVLGNTDRHSIKKNLIGALLFDSGETAEATRLKRTARRRYTRRKNRICYLQEIFSNEMAKVDDSFFHRLEESFLVEEDKKHERHPIFGNIVDEVAYHEKYPTIYHLRKKLVDSTDKADLRLIYLALAHMIKFRGHFLIEGDLNPDNSDVDKLFIQLVQTYNQLFEENPINASGVDAKAILSARLSKSRRLENLIAQLPGEKKNGLFGNLIALSLGLTPNFKSNFDLAEDAKLQLSKDTYDDDLDNLLAQIGDQYADLFLAAKNLSDAILLSDILRVNTEITKAPLSASMIKRYDEHHQDLTLLKALVRQQLPEKYKEIFFDQSKNGYAGYIDGGASQEEFYKFIKPILEKMDGTEELLVKLNREDLLRKQRTFDNGSIPHQIHLGELHAILRRQEDFYPFLKDNREKIEKILTFRIPYYVGPLARGNSRFAWMTRKSEETITPWNFEEVVDKGASAQSFIERMTNFDKNLPNEKVLPKHSLLYEYFTVYNELTKVKYVTEGMRKPAFLSGEQKKAIVDLLFKTNRKVTVKQLKEDYFKKIECFDSVEISGVEDRFNASLGTYHDLLKIIKDKDFLDNEENEDILEDIVLTLTLFEDREMIEERLKTYAHLFDDKVMKQLKRRRYTGWGRLSRKLINGIRDKQSGKTILDFLKSDGFANRNFMQLIHDDSLTFKEDIQKAQVSGQGDSLHEHIANLAGSPAIKKGILQTVKVVDELVKVMGRHKPENIVIEMARENQTTQKGQKNSRERMKRIEEGIKELGSQILKEHPVENTQLQNEKLYLYYLQNGRDMYVDQELDINRLSDYDVDHIVPQSFLKDDSIDNKVLTRSDKARGKSDNVPSEEVVKKMKNYWRQLLNAKLITQRKFDNLTKAERGGLSELDKAGFIKRQLVETRQITKHVAQILDSRMNTKYDENDKLIREVKVITLKSKLVSDFRKDFQFYKVREINNYHHAHDAYLNAVVGTALIKKYPKLESEFVYGDYKVYDVRKMIAKSEQEIGKATAKYFFYSNIMNFFKTEITLANGEIRKRPLIETNGETGEIVWDKGRDFATVRKVLSMPQVNIVKKTEVQTGGFSKESILPKRNSDKLIARKKDWDPKKYGGFDSPTVAYSVLVVAKVEKGKSKKLKSVKELLGITIMERSSFEKNPIDFLEAKGYKEVKKDLIIKLPKYSLFELENGRKRMLASAGELQKGNELALPSKYVNFLYLASHYEKLKGSPEDNEQKQLFVEQHKHYLDEIIEQISEFSKRVILADANLDKVLSAYNKHRDKPIREQAENIIHLFTLTNLGAPAAFKYFDTTIDRKRYTSTKEVLDATLIHQSITGLYETRIDLSQLGGDGGGGSGGGGGTLQLDDEYRLYSPLVKPDQNIQFWLEQFPQAWAETAGMGLAKQVPPQVIQLKASATPVSVRQYPLSKEAQEGIRPHVQRLIQQGILVPVQSPWNTPLLPVRKPGTNDYRPVQDLREVNKRVQDIHPTVPNPYNLLCALPPQRSWYTVLDLKDAFFCLRLHPTSQPLFAFEWRDPGTGRTGQLTWTRLPQGFKNSPTIFNEALHRDLANFRIQHPQVTLLQYVDDLLLAGATKQDCLEGTKALLLELSDLGYRASAKKAQICRREVTYLGYSLRDGQRWLTEARKKTVVQIPAPTTAKQVREFLGTAGFCRLWIPGFATLAAPLYPLTKPKGEFSWAPEHQKAFDAIKKALLSAPALALPDVTKPFTLYVDERKGVARGVLTQTLGPWRRPVAYLSKKLDPVASGWPVCLKAIAAVAILVKDADKLTLGQNITVIAPHALENIVRQPPDRWMTNARMTHYQSLLLTERVTFAPPAALNPATLLPEETDEPVTHDCHQLLIEETGVRKDLTDIPLTGEVLTWFTDGSSYVVEGKRMAGAAVVDGTRTIWASSLPEGTSAQKAELMALTQALRLAEGKSINIYTDSRYAFATAHVHGAIYKQRGWLTSAGREIKNKEEILSLLEALHLPKRLAIIHCPGHQKAKDPISRGNQMADRVAKQAAQGVNLLAGKRTADGSEFEKRTADGSEFESPKKKAKVE

SEQ ID NO: 185 - protein, 2087 aa, synthetic construct
MPAAKRVKLDGGDKKYSIGLDIGTNSVGWAVITDEYKVPSKKFKVLGNTDRHSIKKNLIGALLFDSGETAEATRLKRTARRRYTRRKNRICYLQEIFSNEMAKVDDSFFHRLEESFLVEEDKKHERHPIFGNIVDEVAYHEKYPTIYHLRKKLVDSTDKADLRLIYLALAHMIKFRGHFLIEGDLNPDNSDVDKLFIQLVQTYNQLFEENPINASGVDAKAILSARLSKSRRLENLIAQLPGEKKNGLFGNLIALSLGLTPNFKSNFDLAEDAKLQLSKDTYDDDLDNLLAQIGDQYADLFLAAKNLSDAILLSDILRVNTEITKAPLSASMIKRYDEHHQDLTLLKALVRQQLPEKYKEIFFDQSKNGYAGYIDGGASQEEFYKFIKPILEKMDGTEELLVKLNREDLLRKQRTFDNGSIPHQIHLGELHAILRRQEDFYPFLKDNREKIEKILTFRIPYYVGPLARGNSRFAWMTRKSEETITPWNFEEVVDKGASAQSFIERMTNFDKNLPNEKVLPKHSLLYEYFTVYNELTKVKYVTEGMRKPAFLSGEQKKAIVDLLFKTNRKVTVKQLKEDYFKKIECFDSVEISGVEDRFNASLGTYHDLLKIIKDKDFLDNEENEDILEDIVLTLTLFEDREMIEERLKTYAHLFDDKVMKQLKRRRYTGWGRLSRKLINGIRDKQSGKTILDFLKSDGFANRNFMQLIHDDSLTFKEDIQKAQVSGQGDSLHEHIANLAGSPAIKKGILQTVKVVDELVKVMGRHKPENIVIEMARENQTTQKGQKNSRERMKRIEEGIKELGSQILKEHPVENTQLQNEKLYLYYLQNGRDMYVDQELDINRLSDYDVDHIVPQSFLKDDSIDNKVLTRSDKARGKSDNVPSEEVVKKMKNYWRQLLNAKLITQRKFDNLTKAERGGLSELDKAGFIKRQLVETRQITKHVAQILDSRMNTKYDENDKLIREVKVITLKSKLVSDFRKDFQFYKVREINNYHHAHDAYLNAVVGTALIKKYPKLESEFVYGDYKVYDVRKMIAKSEQEIGKATAKYFFYSNIMNFFKTEITLANGEIRKRPLIETNGETGEIVWDKGRDFATVRKVLSMPQVNIVKKTEVQTGGFSKESILPKRNSDKLIARKKDWDPKKYGGFDSPTVAYSVLVVAKVEKGKSKKLKSVKELLGITIMERSSFEKNPIDFLEAKGYKEVKKDLIIKLPKYSLFELENGRKRMLASAGELQKGNELALPSKYVNFLYLASHYEKLKGSPEDNEQKQLFVEQHKHYLDEIIEQISEFSKRVILADANLDKVLSAYNKHRDKPIREQAENIIHLFTLTNLGAPAAFKYFDTTIDRKRYTSTKEVLDATLIHQSITGLYETRIDLSQLGGDGGGGGEAAAKGGTLQLDDEYRLYSPLVKPDQNIQFWLEQFPQAWAETAGMGLAKQVPPQVIQLKASATPVSVRQYPLSKEAQEGIRPHVQRLIQQGILVPVQSPWNTPLLPVRKPGTNDYRPVQDLREVNKRVQDIHPTVPNPYNLLCALPPQRSWYTVLDLKDAFFCLRLHPTSQPLFAFEWRDPGTGRTGQLTWTRLPQGFKNSPTIFNEALHRDLANFRIQHPQVTLLQYVDDLLLAGATKQDCLEGTKALLLELSDLGYRASAKKAQICRREVTYLGYSLRDGQRWLTEARKKTVVQIPAPTTAKQVREFLGTAGFCRLWIPGFATLAAPLYPLTKPKGEFSWAPEHQKAFDAIKKALLSAPALALPDVTKPFTLYVDERKGVARGVLTQTLGPWRRPVAYLSKKLDPVASGWPVCLKAIAAVAILVKDADKLTLGQNITVIAPHALENIVRQPPDRWMTNARMTHYQSLLLTERVTFAPPAALNPATLLPEETDEPVTHDCHQLLIEETGVRKDLTDIPLTGEVLTWFTDGSSYVVEGKRMAGAAVVDGTRTIWASSLPEGTSAQKAELMALTQALRLAEGKSINIYTDSRYAFATAHVHGAIYKQRGWLTSAGREIKNKEEILSLLEALHLPKRLAIIHCPGHQKAKDPISRGNQMADRVAKQAAQGVNLLAGKRTADGSEFEKRTADGSEFESPKKKAKVE

SEQ ID NO: 186 - protein, 2085 aa, synthetic construct
MPAAKRVKLDGGDKKYSIGLDIGTNSVGWAVITDEYKVPSKKFKVLGNTDRHSIKKNLIGALLFDSGETAEATRLKRTARRRYTRRKNRICYLQEIFSNEMAKVDDSFFHRLEESFLVEEDKKHERHPIFGNIVDEVAYHEKYPTIYHLRKKLVDSTDKADLRLIYLALAHMIKFRGHFLIEGDLNPDNSDVDKLFIQLVQTYNQLFEENPINASGVDAKAILSARLSKSRRLENLIAQLPGEKKNGLFGNLIALSLGLTPNFKSNFDLAEDAKLQLSKDTYDDDLDNLLAQIGDQYADLFLAAKNLSDAILLSDILRVNTEITKAPLSASMIKRYDEHHQDLTLLKALVRQQLPEKYKEIFFDQSKNGYAGYIDGGASQEEFYKFIKPILEKMDGTEELLVKLNREDLLRKQRTFDNGSIPHQIHLGELHAILRRQEDFYPFLKDNREKIEKILTFRIPYYVGPLARGNSRFAWMTRKSEETITPWNFEEVVDKGASAQSFIERMTNFDKNLPNEKVLPKHSLLYEYFTVYNELTKVKYVTEGMRKPAFLSGEQKKAIVDLLFKTNRKVTVKQLKEDYFKKIECFDSVEISGVEDRFNASLGTYHDLLKIIKDKDFLDNEENEDILEDIVLTLTLFEDREMIEERLKTYAHLFDDKVMKQLKRRRYTGWGRLSRKLINGIRDKQSGKTILDFLKSDGFANRNFMQLIHDDSLTFKEDIQKAQVSGQGDSLHEHIANLAGSPAIKKGILQTVKVVDELVKVMGRHKPENIVIEMARENQTTQKGQKNSRERMKRIEEGIKELGSQILKEHPVENTQLQNEKLYLYYLQNGRDMYVDQELDINRLSDYDVDHIVPQSFLKDDSIDNKVLTRSDKARGKSDNVPSEEVVKKMKNYWRQLLNAKLITQRKFDNLTKAERGGLSELDKAGFIKRQLVETRQITKHVAQILDSRMNTKYDENDKLIREVKVITLKSKLVSDFRKDFQFYKVREINNYHHAHDAYLNAVVGTALIKKYPKLESEFVYGDYKVYDVRKMIAKSEQEIGKATAKYFFYSNIMNFFKTEITLANGEIRKRPLIETNGETGEIVWDKGRDFATVRKVLSMPQVNIVKKTEVQTGGFSKESILPKRNSDKLIARKKDWDPKKYGGFDSPTVAYSVLVVAKVEKGKSKKLKSVKELLGITIMERSSFEKNPIDFLEAKGYKEVKKDLIIKLPKYSLFELENGRKRMLASAGELQKGNELALPSKYVNFLYLASHYEKLKGSPEDNEQKQLFVEQHKHYLDEIIEQISEFSKRVILADANLDKVLSAYNKHRDKPIREQAENIIHLFTLTNLGAPAAFKYFDTTIDRKRYTSTKEVLDATLIHQSITGLYETRIDLSQLGGDGGGGSGGSGGTLQLDDEYRLYSPLVKPDQNIQFWLEQFPQAWAETAGMGLAKQVPPQVIQLKASATPVSVRQYPLSKEAQEGIRPHVQRLIQQGILVPVQSPWNTPLLPVRKPGTNDYRPVQDLREVNKRVQDIHPTVPNPYNLLCALPPQRSWYTVLDLKDAFFCLRLHPTSQPLFAFEWRDPGTGRTGQLTWTRLPQGFKNSPTIFNEALHRDLANFRIQHPQVTLLQYVDDLLLAGATKQDCLEGTKALLLELSDLGYRASAKKAQICRREVTYLGYSLRDGQRWLTEARKKTVVQIPAPTTAKQVREFLGTAGFCRLWIPGFATLAAPLYPLTKPKGEFSWAPEHQKAFDAIKKALLSAPALALPDVTKPFTLYVDERKGVARGVLTQTLGPWRRPVAYLSKKLDPVASGWPVCLKAIAAVAILVKDADKLTLGQNITVIAPHALENIVRQPPDRWMTNARMTHYQSLLLTERVTFAPPAALNPATLLPEETDEPVTHDCHQLLIEETGVRKDLTDIPLTGEVLTWFTDGSSYVVEGKRMAGAAVVDGTRTIWASSLPEGTSAQKAELMALTQALRLAEGKSINIYTDSRYAFATAHVHGAIYKQRGWLTSAGREIKNKEEILSLLEALHLPKRLAIIHCPGHQKAKDPISRGNQMADRVAKQAAQGVNLLAGKRTADGSEFEKRTADGSEFESPKKKAKVE

SEQ ID NO: 187 - protein, 1999 aa, synthetic construct
MPAAKRVKLDGGDKKYSIGLDIGTNSVGWAVITDEYKVPSKKFKVLGNTDRHSIKKNLIGALLFDSGETAEATRLKRTARRRYTRRKNRICYLQEIFSNEMAKVDDSFFHRLEESFLVEEDKKHERHPIFGNIVDEVAYHEKYPTIYHLRKKLVDSTDKADLRLIYLALAHMIKFRGHFLIEGDLNPDNSDVDKLFIQLVQTYNQLFEENPINASGVDAKAILSARLSKSRRLENLIAQLPGEKKNGLFGNLIALSLGLTPNFKSNFDLAEDAKLQLSKDTYDDDLDNLLAQIGDQYADLFLAAKNLSDAILLSDILRVNTEITKAPLSASMIKRYDEHHQDLTLLKALVRQQLPEKYKEIFFDQSKNGYAGYIDGGASQEEFYKFIKPILEKMDGTEELLVKLNREDLLRKQRTFDNGSIPHQIHLGELHAILRRQEDFYPFLKDNREKIEKILTFRIPYYVGPLARGNSRFAWMTRKSEETITPWNFEEVVDKGASAQSFIERMTNFDKNLPNEKVLPKHSLLYEYFTVYNELTKVKYVTEGMRKPAFLSGEQKKAIVDLLFKTNRKVTVKQLKEDYFKKIECFDSVEISGVEDRFNASLGTYHDLLKIIKDKDFLDNEENEDILEDIVLTLTLFEDREMIEERLKTYAHLFDDKVMKQLKRRRYTGWGRLSRKLINGIRDKQSGKTILDFLKSDGFANRNFMQLIHDDSLTFKEDIQKAQVSGQGDSLHEHIANLAGSPAIKKGILQTVKVVDELVKVMGRHKPENIVIEMARENQTTQKGQKNSRERMKRIEEGIKELGSQILKEHPVENTQLQNEKLYLYYLQNGRDMYVDQELDINRLSDYDVDHIVPQSFLKDDSIDNKVLTRSDKARGKSDNVPSEEVVKKMKNYWRQLLNAKLITQRKFDNLTKAERGGLSELDKAGFIKRQLVETRQITKHVAQILDSRMNTKYDENDKLIREVKVITLKSKLVSDFRKDFQFYKVREINNYHHAHDAYLNAVVGTALIKKYPKLESEFVYGDYKVYDVRKMIAKSEQEIGKATAKYFFYSNIMNFFKTEITLANGEIRKRPLIETNGETGEIVWDKGRDFATVRKVLSMPQVNIVKKTEVQTGGFSKESILPKRNSDKLIARKKDWDPKKYGGFDSPTVAYSVLVVAKVEKGKSKKLKSVKELLGITIMERSSFEKNPIDFLEAKGYKEVKKDLIIKLPKYSLFELENGRKRMLASAGELQKGNELALPSKYVNFLYLASHYEKLKGSPEDNEQKQLFVEQHKHYLDEIIEQISEFSKRVILADANLDKVLSAYNKHRDKPIREQAENIIHLFTLTNLGAPAAFKYFDTTIDRKRYTSTKEVLDATLIHQSITGLYETRIDLSQLGGDGGGGSGGGGSSGGGVLDTPPSHIGLEHLPPPPEVPQFPLNLERLQALQDLVHRSLEAGYISPWDGPGNNPVFPVRKPNGAWRFVHDLRATNALTKPIPALSPGPPDLTAIPTHPPHIICLDLKDAFFQIPVEDRFRFYLSFTLPSPGGLQPHRRFAWRVLPQGFINSPALFNRALQEPLRQVSAAFSQSLLVSYMDDILYASPTEEQRSQCYQALAARLRDLGFQVASEKTSQTPSPVPFLGQMVHEQIVTYQSLPTLQISSPISLHQLQAVLGDLQWVSRGTPTTRRPLQLLYSSLKRHHDPRAIIQLSPEQLQGIAELRQALSHNARSRYNEQEPLLAYVHLTRAGSTLVLFQKGAQFPLAYFQTPLTDNQASPWGLLLLLGCQYLQTQALSSYAKPILKYYHNLPKTSLDNWIQSSEDPRVQELLQLWPQISSQGIQPPGPWKTLITRAEVFLTPQFSPDPIPAALCLFSDGATGRGAYCLWKDHLLDFQAVPAPESAQKGELAGLLAGLAAAPPEPVNIWVDSKYLYSLLRTWVLGAWLQPDPVPSYALLYKSLLRHPAIVVGHVRSHSSASHPIASLNNYVDQLAGKRTADGSEFEKRTADGSEFESPKKKAKVE

SEQ ID NO: 188 - protein, 2015 aa, synthetic construct
MPAAKRVKLDGGDKKYSIGLDIGTNSVGWAVITDEYKVPSKKFKVLGNTDRHSIKKNLIGALLFDSGETAEATRLKRTARRRYTRRKNRICYLQEIFSNEMAKVDDSFFHRLEESFLVEEDKKHERHPIFGNIVDEVAYHEKYPTIYHLRKKLVDSTDKADLRLIYLALAHMIKFRGHFLIEGDLNPDNSDVDKLFIQLVQTYNQLFEENPINASGVDAKAILSARLSKSRRLENLIAQLPGEKKNGLFGNLIALSLGLTPNFKSNFDLAEDAKLQLSKDTYDDDLDNLLAQIGDQYADLFLAAKNLSDAILLSDILRVNTEITKAPLSASMIKRYDEHHQDLTLLKALVRQQLPEKYKEIFFDQSKNGYAGYIDGGASQEEFYKFIKPILEKMDGTEELLVKLNREDLLRKQRTFDNGSIPHQIHLGELHAILRRQEDFYPFLKDNREKIEKILTFRIPYYVGPLARGNSRFAWMTRKSEETITPWNFEEVVDKGASAQSFIERMTNFDKNLPNEKVLPKHSLLYEYFTVYNELTKVKYVTEGMRKPAFLSGEQKKAIVDLLFKTNRKVTVKQLKEDYFKKIECFDSVEISGVEDRFNASLGTYHDLLKIIKDKDFLDNEENEDILEDIVLTLTLFEDREMIEERLKTYAHLFDDKVMKQLKRRRYTGWGRLSRKLINGIRDKQSGKTILDFLKSDGFANRNFMQLIHDDSLTFKEDIQKAQVSGQGDSLHEHIANLAGSPAIKKGILQTVKVVDELVKVMGRHKPENIVIEMARENQTTQKGQKNSRERMKRIEEGIKELGSQILKEHPVENTQLQNEKLYLYYLQNGRDMYVDQELDINRLSDYDVDHIVPQSFLKDDSIDNKVLTRSDKARGKSDNVPSEEVVKKMKNYWRQLLNAKLITQRKFDNLTKAERGGLSELDKAGFIKRQLVETRQITKHVAQILDSRMNTKYDENDKLIREVKVITLKSKLVSDFRKDFQFYKVREINNYHHAHDAYLNAVVGTALIKKYPKLESEFVYGDYKVYDVRKMIAKSEQEIGKATAKYFFYSNIMNFFKTEITLANGEIRKRPLIETNGETGEIVWDKGRDFATVRKVLSMPQVNIVKKTEVQTGGFSKESILPKRNSDKLIARKKDWDPKKYGGFDSPTVAYSVLVVAKVEKGKSKKLKSVKELLGITIMERSSFEKNPIDFLEAKGYKEVKKDLIIKLPKYSLFELENGRKRMLASAGELQKGNELALPSKYVNFLYLASHYEKLKGSPEDNEQKQLFVEQHKHYLDEIIEQISEFSKRVILADANLDKVLSAYNKHRDKPIREQAENIIHLFTLTNLGAPAAFKYFDTTIDRKRYTSTKEVLDATLIHQSITGLYETRIDLSQLGGDGGGGGGSGGGGSGGGGSGGGGSGGGGSGGGVLDTPPSHIGLEHLPPPPEVPQFPLNLERLQALQDLVHRSLEAGYISPWDGPGNNPVFPVRKPNGAWRFVHDLRATNALTKPIPALSPGPPDLTAIPTHPPHIICLDLKDAFFQIPVEDRFRFYLSFTLPSPGGLQPHRRFAWRVLPQGFINSPALFNRALQEPLRQVSAAFSQSLLVSYMDDILYASPTEEQRSQCYQALAARLRDLGFQVASEKTSQTPSPVPFLGQMVHEQIVTYQSLPTLQISSPISLHQLQAVLGDLQWVSRGTPTTRRPLQLLYSSLKRHHDPRAIIQLSPEQLQGIAELRQALSHNARSRYNEQEPLLAYVHLTRAGSTLVLFQKGAQFPLAYFQTPLTDNQASPWGLLLLLGCQYLQTQALSSYAKPILKYYHNLPKTSLDNWIQSSEDPRVQELLQLWPQISSQGIQPPGPWKTLITRAEVFLTPQFSPDPIPAALCLFSDGATGRGAYCLWKDHLLDFQAVPAPESAQKGELAGLLAGLAAAPPEPVNIWVDSKYLYSLLRTWVLGAWLQPDPVPSYALLYKSLLRHPAIVVGHVRSHSSASHPIASLNNYVDQLAGKRTADGSEFEKRTADGSEFESPKKKAKVE

SEQ ID NO: 189 - protein, 1996 aa, synthetic construct
MPAAKRVKLDGGDKKYSIGLDIGTNSVGWAVITDEYKVPSKKFKVLGNTDRHSIKKNLIGALLFDSGETAEATRLKRTARRRYTRRKNRICYLQEIFSNEMAKVDDSFFHRLEESFLVEEDKKHERHPIFGNIVDEVAYHEKYPTIYHLRKKLVDSTDKADLRLIYLALAHMIKFRGHFLIEGDLNPDNSDVDKLFIQLVQTYNQLFEENPINASGVDAKAILSARLSKSRRLENLIAQLPGEKKNGLFGNLIALSLGLTPNFKSNFDLAEDAKLQLSKDTYDDDLDNLLAQIGDQYADLFLAAKNLSDAILLSDILRVNTEITKAPLSASMIKRYDEHHQDLTLLKALVRQQLPEKYKEIFFDQSKNGYAGYIDGGASQEEFYKFIKPILEKMDGTEELLVKLNREDLLRKQRTFDNGSIPHQIHLGELHAILRRQEDFYPFLKDNREKIEKILTFRIPYYVGPLARGNSRFAWMTRKSEETITPWNFEEVVDKGASAQSFIERMTNFDKNLPNEKVLPKHSLLYEYFTVYNELTKVKYVTEGMRKPAFLSGEQKKAIVDLLFKTNRKVTVKQLKEDYFKKIECFDSVEISGVEDRFNASLGTYHDLLKIIKDKDFLDNEENEDILEDIVLTLTLFEDREMIEERLKTYAHLFDDKVMKQLKRRRYTGWGRLSRKLINGIRDKQSGKTILDFLKSDGFANRNFMQLIHDDSLTFKEDIQKAQVSGQGDSLHEHIANLAGSPAIKKGILQTVKVVDELVKVMGRHKPENIVIEMARENQTTQKGQKNSRERMKRIEEGIKELGSQILKEHPVENTQLQNEKLYLYYLQNGRDMYVDQELDINRLSDYDVDHIVPQSFLKDDSIDNKVLTRSDKARGKSDNVPSEEVVKKMKNYWRQLLNAKLITQRKFDNLTKAERGGLSELDKAGFIKRQLVETRQITKHVAQILDSRMNTKYDENDKLIREVKVITLKSKLVSDFRKDFQFYKVREINNYHHAHDAYLNAVVGTALIKKYPKLESEFVYGDYKVYDVRKMIAKSEQEIGKATAKYFFYSNIMNFFKTEITLANGEIRKRPLIETNGETGEIVWDKGRDFATVRKVLSMPQVNIVKKTEVQTGGFSKESILPKRNSDKLIARKKDWDPKKYGGFDSPTVAYSVLVVAKVEKGKSKKLKSVKELLGITIMERSSFEKNPIDFLEAKGYKEVKKDLIIKLPKYSLFELENGRKRMLASAGELQKGNELALPSKYVNFLYLASHYEKLKGSPEDNEQKQLFVEQHKHYLDEIIEQISEFSKRVILADANLDKVLSAYNKHRDKPIREQAENIIHLFTLTNLGAPAAFKYFDTTIDRKRYTSTKEVLDATLIHQSITGLYETRIDLSQLGGDGGGGGGSSGGGVLDTPPSHIGLEHLPPPPEVPQFPLNLERLQALQDLVHRSLEAGYISPWDGPGNNPVFPVRKPNGAWRFVHDLRATNALTKPIPALSPGPPDLTAIPTHPPHIICLDLKDAFFQIPVEDRFRFYLSFTLPSPGGLQPHRRFAWRVLPQGFINSPALFNRALQEPLRQVSAAFSQSLLVSYMDDILYASPTEEQRSQCYQALAARLRDLGFQVASEKTSQTPSPVPFLGQMVHEQIVTYQSLPTLQISSPISLHQLQAVLGDLQWVSRGTPTTRRPLQLLYSSLKRHHDPRAIIQLSPEQLQGIAELRQALSHNARSRYNEQEPLLAYVHLTRAGSTLVLFQKGAQFPLAYFQTPLTDNQASPWGLLLLLGCQYLQTQALSSYAKPILKYYHNLPKTSLDNWIQSSEDPRVQELLQLWPQISSQGIQPPGPWKTLITRAEVFLTPQFSPDPIPAALCLFSDGATGRGAYCLWKDHLLDFQAVPAPESAQKGELAGLLAGLAAAPPEPVNIWVDSKYLYSLLRTWVLGAWLQPDPVPSYALLYKSLLRHPAIVVGHVRSHSSASHPIASLNNYVDQLAGKRTADGSEFEKRTADGSEFESPKKKAKVE

SEQ ID NO: 190 - protein, 2123 aa, synthetic construct; identical to SEQ ID NO: 36

SEQ ID NO: 191 - protein, 2095 aa, synthetic construct
MPAAKRVKLDGGDKKYSIGLDIGTNSVGWAVITDEYKVPSKKFKVLGNTDRHSIKKNLIGALLFDSGETAEATRLKRTARRRYTRRKNRICYLQEIFSNEMAKVDDSFFHRLEESFLVEEDKKHERHPIFGNIVDEVAYHEKYPTIYHLRKKLVDSTDKADLRLIYLALAHMIKFRGHFLIEGDLNPDNSDVDKLFIQLVQTYNQLFEENPINASGVDAKAILSARLSKSRRLENLIAQLPGEKKNGLFGNLIALSLGLTPNFKSNFDLAEDAKLQLSKDTYDDDLDNLLAQIGDQYADLFLAAKNLSDAILLSDILRVNTEITKAPLSASMIKRYDEHHQDLTLLKALVRQQLPEKYKEIFFDQSKNGYAGYIDGGASQEEFYKFIKPILEKMDGTEELLVKLNREDLLRKQRTFDNGSIPHQIHLGELHAILRRQEDFYPFLKDNREKIEKILTFRIPYYVGPLARGNSRFAWMTRKSEETITPWNFEEVVDKGASAQSFIERMTNFDKNLPNEKVLPKHSLLYEYFTVYNELTKVKYVTEGMRKPAFLSGEQKKAIVDLLFKTNRKVTVKQLKEDYFKKIECFDSVEISGVEDRFNASLGTYHDLLKIIKDKDFLDNEENEDILEDIVLTLTLFEDREMIEERLKTYAHLFDDKVMKQLKRRRYTGWGRLSRKLINGIRDKQSGKTILDFLKSDGFANRNFMQLIHDDSLTFKEDIQKAQVSGQGDSLHEHIANLAGSPAIKKGILQTVKVVDELVKVMGRHKPENIVIEMARENQTTQKGQKNSRERMKRIEEGIKELGSQILKEHPVENTQLQNEKLYLYYLQNGRDMYVDQELDINRLSDYDVDHIVPQSFLKDDSIDNKVLTRSDKARGKSDNVPSEEVVKKMKNYWRQLLNAKLITQRKFDNLTKAERGGLSELDKAGFIKRQLVETRQITKHVAQILDSRMNTKYDENDKLIREVKVITLKSKLVSDFRKDFQFYKVREINNYHHAHDAYLNAVVGTALIKKYPKLESEFVYGDYKVYDVRKMIAKSEQEIGKATAKYFFYSNIMNFFKTEITLANGEIRKRPLIETNGETGEIVWDKGRDFATVRKVLSMPQVNIVKKTEVQTGGFSKESILPKRNSDKLIARKKDWDPKKYGGFDSPTVAYSVLVVAKVEKGKSKKLKSVKELLGITIMERSSFEKNPIDFLEAKGYKEVKKDLIIKLPKYSLFELENGRKRMLASAGELQKGNELALPSKYVNFLYLASHYEKLKGSPEDNEQKQLFVEQHKHYLDEIIEQISEFSKRVILADANLDKVLSAYNKHRDKPIREQAENIIHLFTLTNLGAPAAFKYFDTTIDRKRYTSTKEVLDATLIHQSITGLYETRIDLSQLGGDGGGGSGGSGGSGGSGGSGGSGGLDDEYRLYSPLVKPDQNIQFWLEQFPQAWAETAGMGLAKQVPPQVIQLKASATPVSVRQYPLSKEAQEGIRPHVQRLIQQGILVPVQSPWNTPLLPVRKPGTNDYRPVQDLREVNKRVQDIHPTVPNPYNLLCALPPQRSWYTVLDLKDAFFCLRLHPTSQPLFAFEWRDPGTGRTGQLTWTRLPQGFKNSPTIFNEALHRDLANFRIQHPQVTLLQYVDDLLLAGATKQDCLEGTKALLLELSDLGYRASAKKAQICRREVTYLGYSLRDGQRWLTEARKKTVVQIPAPTTAKQVREFLGKAGFCRLFIPGFATLAAPLYPLTKPKGEFSWAPEHQKAFDAIKKALLSAPALALPDVTKPFTLYVDERKGVARGVLTQTLGPWRRPVAYLSKKLDPVASGWPVCLKAIAAVAILVKDADKLTLGQNITVIAPHALENIVRQPPDRWMTNARMTHYQSLLLTERVTFAPPAALNPATLLPEETDEPVTHDCHQLLIEETGVRKDLTDIPLTGEVLTWFTDGSSYVVEGKRMAGAAVVDGTRTIWASSLPEGTSAQKAELMALTQALRLAEGKSINIYTDSRYAFATAHVHGAIYKQRGWLTSAGREIKNKEEILSLLEALHLPKRLAIIHCPGHQKAKDPISRGNQMADRVAKQAAQGVNLLPAGKRTADGSEFEKRTADGSEFESPKKKAKVE

SEQ ID NO: 192 - protein, 2088 aa, synthetic construct
MPAAKRVKLDGGDKKYSIGLDIGTNSVGWAVITDEYKVPSKKFKVLGNTDRHSIKKNLIGALLFDSGETAEATRLKRTARRRYTRRKNRICYLQEIFSNEMAKVDDSFFHRLEESFLVEEDKKHERHPIFGNIVDEVAYHEKYPTIYHLRKKLVDSTDKADLRLIYLALAHMIKFRGHFLIEGDLNPDNSDVDKLFIQLVQTYNQLFEENPINASGVDAKAILSARLSKSRRLENLIAQLPGEKKNGLFGNLIALSLGLTPNFKSNFDLAEDAKLQLSKDTYDDDLDNLLAQIGDQYADLFLAAKNLSDAILLSDILRVNTEITKAPLSASMIKRYDEHHQDLTLLKALVRQQLPEKYKEIFFDQSKNGYAGYIDGGASQEEFYKFIKPILEKMDGTEELLVKLNREDLLRKQRTFDNGSIPHQIHLGELHAILRRQEDFYPFLKDNREKIEKILTFRIPYYVGPLARGNSRFAWMTRKSEETITPWNFEEVVDKGASAQSFIERMTNFDKNLPNEKVLPKHSLLYEYFTVYNELTKVKYVTEGMRKPAFLSGEQKKAIVDLLFKTNRKVTVKQLKEDYFKKIECFDSVEISGVEDRFNASLGTYHDLLKIIKDKDFLDNEENEDILEDIVLTLTLFEDREMIEERLKTYAHLFDDKVMKQLKRRRYTGWGRLSRKLINGIRDKQSGKTILDFLKSDGFANRNFMQLIHDDSLTFKEDIQKAQVSGQGDSLHEHIANLAGSPAIKKGILQTVKVVDELVKVMGRHKPENIVIEMARENQTTQKGQKNSRERMKRIEEGIKELGSQILKEHPVENTQLQNEKLYLYYLQNGRDMYVDQELDINRLSDYDVDHIVPQSFLKDDSIDNKVLTRSDKARGKSDNVPSEEVVKKMKNYWRQLLNAKLITQRKFDNLTKAERGGLSELDKAGFIKRQLVETRQITKHVAQILDSRMNTKYDENDKLIREVKVITLKSKLVSDFRKDFQFYKVREINNYHHAHDAYLNAVVGTALIKKYPKLESEFVYGDYKVYDVRKMIAKSEQEIGKATAKYFFYSNIMNFFKTEITLANGEIRKRPLIETNGETGEIVWDKGRDFATVRKVLSMPQVNIVKKTEVQTGGFSKESILPKRNSDKLIARKKDWDPKKYGGFDSPTVAYSVLVVAKVEKGKSKKLKSVKELLGITIMERSSFEKNPIDFLEAKGYKEVKKDLIIKLPKYSLFELENGRKRMLASAGELQKGNELALPSKYVNFLYLASHYEKLKGSPEDNEQKQLFVEQHKHYLDEIIEQISEFSKRVILADANLDKVLSAYNKHRDKPIREQAENIIHLFTLTNLGAPAAFKYFDTTIDRKRYTSTKEVLDATLIHQSITGLYETRIDLSQLGGDGGPAPEAAAKGGGGGLDDEYRLYSPLVKPDQNIQFWLEQFPQAWAETAGMGLAKQVPPQVIQLKASATPVSVRQYPLSKEAQEGIRPHVQRLIQQGILVPVQSPWNTPLLPVRKPGTNDYRPVQDLREVNKRVQDIHPTVPNPYNLLCALPPQRSWYTVLDLKDAFFCLRLHPTSQPLFAFEWRDPGTGRTGQLTWTRLPQGFKNSPTIFNEALHRDLANFRIQHPQVTLLQYVDDLLLAGATKQDCLEGTKALLLELSDLGYRASAKKAQICRREVTYLGYSLRDGQRWLTEARKKTVVQIPAPTTAKQVREFLGKAGFCRLFIPGFATLAAPLYPLTKPKGEFSWAPEHQKAFDAIKKALLSAPALALPDVTKPFTLYVDERKGVARGVLTQTLGPWRRPVAYLSKKLDPVASGWPVCLKAIAAVAILVKDADKLTLGQNITVIAPHALENIVRQPPDRWMTNARMTHYQSLLLTERVTFAPPAALNPATLLPEETDEPVTHDCHQLLIEETGVRKDLTDIPLTGEVLTWFTDGSSYVVEGKRMAGAAVVDGTRTIWASSLPEGTSAQKAELMALTQALRLAEGKSINIYTDSRYAFATAHVHGAIYKQRGWLTSAGREIKNKEEILSLLEALHLPKRLAIIHCPGHQKAKDPISRGNQMADRVAKQAAQGVNLLPAGKRTADGSEFEKRTADGSEFESPKKKAKVE

SEQ ID NO: 193 - protein, 2107 aa, synthetic construct
MPAAKRVKLDGGDKKYSIGLDIGTNSVGWAVITDEYKVPSKKFKVLGNTDRHSIKKNLIGALLFDSGETAEATRLKRTARRRYTRRKNRICYLQEIFSNEMAKVDDSFFHRLEESFLVEEDKKHERHPIFGNIVDEVAYHEKYPTIYHLRKKLVDSTDKADLRLIYLALAHMIKFRGHFLIEGDLNPDNSDVDKLFIQLVQTYNQLFEENPINASGVDAKAILSARLSKSRRLENLIAQLPGEKKNGLFGNLIALSLGLTPNFKSNFDLAEDAKLQLSKDTYDDDLDNLLAQIGDQYADLFLAAKNLSDAILLSDILRVNTEITKAPLSASMIKRYDEHHQDLTLLKALVRQQLPEKYKEIFFDQSKNGYAGYIDGGASQEEFYKFIKPILEKMDGTEELLVKLNREDLLRKQRTFDNGSIPHQIHLGELHAILRRQEDFYPFLKDNREKIEKILTFRIPYYVGPLARGNSRFAWMTRKSEETITPWNFEEVVDKGASAQSFIERMTNFDKNLPNEKVLPKHSLLYEYFTVYNELTKVKYVTEGMRKPAFLSGEQKKAIVDLLFKTNRKVTVKQLKEDYFKKIECFDSVEISGVEDRFNASLGTYHDLLKIIKDKDFLDNEENEDILEDIVLTLTLFEDREMIEERLKTYAHLFDDKVMKQLKRRRYTGWGRLSRKLINGIRDKQSGKTILDFLKSDGFANRNFMQLIHDDSLTFKEDIQKAQVSGQGDSLHEHIANLAGSPAIKKGILQTVKVVDELVKVMGRHKPENIVIEMARENQTTQKGQKNSRERMKRIEEGIKELGSQILKEHPVENTQLQNEKLYLYYLQNGRDMYVDQELDINRLSDYDVDHIVPQSFLKDDSIDNKVLTRSDKARGKSDNVPSEEVVKKMKNYWRQLLNAKLITQRKFDNLTKAERGGLSELDKAGFIKRQLVETRQITKHVAQILDSRMNTKYDENDKLIREVKVITLKSKLVSDFRKDFQFYKVREINNYHHAHDAYLNAVVGTALIKKYPKLESEFVYGDYKVYDVRKMIAKSEQEIGKATAKYFFYSNIMNFFKTEITLANGEIRKRPLIETNGETGEIVWDKGRDFATVRKVLSMPQVNIVKKTEVQTGGFSKESILPKRNSDKLIARKKDWDPKKYGGFDSPTVAYSVLVVAKVEKGKSKKLKSVKELLGITIMERSSFEKNPIDFLEAKGYKEVKKDLIIKLPKYSLFELENGRKRMLASAGELQKGNELALPSKYVNFLYLASHYEKLKGSPEDNEQKQLFVEQHKHYLDEIIEQISEFSKRVILADANLDKVLSAYNKHRDKPIREQAENIIHLFTLTNLGAPAAFKYFDTTIDRKRYTSTKEVLDATLIHQSITGLYETRIDLSQLGGDGGEAAAKEAAAKEAAAKEAAAKEAAAKEAAAKGGLDDEYRLYSPLVKPDQNIQFWLEQFPQAWAETAGMGLAKQVPPQVIQLKASATPVSVRQYPLSKEAQEGIRPHVQRLIQQGILVPVQSPWNTPLLPVRKPGTNDYRPVQDLREVNKRVQDIHPTVPNPYNLLCALPPQRSWYTVLDLKDAFFCLRLHPTSQPLFAFEWRDPGTGRTGQLTWTRLPQGFKNSPTIFNEALHRDLANFRIQHPQVTLLQYVDDLLLAGATKQDCLEGTKALLLELSDLGYRASAKKAQICRREVTYLGYSLRDGQRWLTEARKKTVVQIPAPTTAKQVREFLGKAGFCRLFIPGFATLAAPLYPLTKPKGEFSWAPEHQKAFDAIKKALLSAPALALPDVTKPFTLYVDERKGVARGVLTQTLGPWRRPVAYLSKKLDPVASGWPVCLKAIAAVAILVKDADKLTLGQNITVIAPHALENIVRQPPDRWMTNARMTHYQSLLLTERVTFAPPAALNPATLLPEETDEPVTHDCHQLLIEETGVRKDLTDIPLTGEVLTWFTDGSSYVVEGKRMAGAAVVDGTRTIWASSLPEGTSAQKAELMALTQALRLAEGKSINIYTDSRYAFATAHVHGAIYKQRGWLTSAGREIKNKEEILSLLEALHLPKRLAIIHCPGHQKAKDPISRGNQMADRVAKQAAQGVNLLPAGKRTADGSEFEKRTADGSEFESPKKKAKVE

SEQ ID NO: 194 - protein, 2090 aa, synthetic construct; identical to SEQ ID NO: 54

SEQ ID NO: 195 - protein, 2088 aa, synthetic construct; identical to SEQ ID NO: 35

SEQ ID NO: 196 - protein, 2093 aa, synthetic construct; identical to SEQ ID NO: 90

SEQ ID NO: 197 - protein, 2086 aa, synthetic construct
MPAAKRVKLDGGDKKYSIGLDIGTNSVGWAVITDEYKVPSKKFKVLGNTDRHSIKKNLIGALLFDSGETAEATRLKRTARRRYTRRKNRICYLQEIFSNEMAKVDDSFFHRLEESFLVEEDKKHERHPIFGNIVDEVAYHEKYPTIYHLRKKLVDSTDKADLRLIYLALAHMIKFRGHFLIEGDLNPDNSDVDKLFIQLVQTYNQLFEENPINASGVDAKAILSARLSKSRRLENLIAQLPGEKKNGLFGNLIALSLGLTPNFKSNFDLAEDAKLQLSKDTYDDDLDNLLAQIGDQYADLFLAAKNLSDAILLSDILRVNTEITKAPLSASMIKRYDEHHQDLTLLKALVRQQLPEKYKEIFFDQSKNGYAGYIDGGASQEEFYKFIKPILEKMDGTEELLVKLNREDLLRKQRTFDNGSIPHQIHLGELHAILRRQEDFYPFLKDNREKIEKILTFRIPYYVGPLARGNSRFAWMTRKSEETITPWNFEEVVDKGASAQSFIERMTNFDKNLPNEKVLPKHSLLYEYFTVYNELTKVKYVTEGMRKPAFLSGEQKKAIVDLLFKTNRKVTVKQLKEDYFKKIECFDSVEISGVEDRFNASLGTYHDLLKIIKDKDFLDNEENEDILEDIVLTLTLFEDREMIEERLKTYAHLFDDKVMKQLKRRRYTGWGRLSRKLINGIRDKQSGKTILDFLKSDGFANRNFMQLIHDDSLTFKEDIQKAQVSGQGDSLHEHIANLAGSPAIKKGILQTVKVVDELVKVMGRHKPENIVIEMARENQTTQKGQKNSRERMKRIEEGIKELGSQILKEHPVENTQLQNEKLYLYYLQNGRDMYVDQELDINRLSDYDVDHIVPQSFLKDDSIDNKVLTRSDKARGKSDNVPSEEVVKKMKNYWRQLLNAKLITQRKFDNLTKAERGGLSELDKAGFIKRQLVETRQITKHVAQILDSRMNTKYDENDKLIREVKVITLKSKLVSDFRKDFQFYKVREINNYHHAHDAYLNAVVGTALIKKYPKLESEFVYGDYKVYDVRKMIAKSEQEIGKATAKYFFYSNIMNFFKTEITLANGEIRKRPLIETNGETGEIVWDKGRDFATVRKVLSMPQVNIVKKTEVQTGGFSKESILPKRNSDKLIARKKDWDPKKYGGFDSPTVAYSVLVVAKVEKGKSKKLKSVKELLGITIMERSSFEKNPIDFLEAKGYKEVKKDLIIKLPKYSLFELENGRKRMLASAGELQKGNELALPSKYVNFLYLASHYEKLKGSPEDNEQKQLFVEQHKHYLDEIIEQISEFSKRVILADANLDKVLSAYNKHRDKPIREQAENIIHLFTLTNLGAPAAFKYFDTTIDRKRYTSTKEVLDATLIHQSITGLYETRIDLSQLGGDGGGGGGGSPAPGGLDDEYRLYSPLVKPDQNIQFWLEQFPQAWAETAGMGLAKQVPPQVIQLKASATPVSVRQYPLSKEAQEGIRPHVQRLIQQGILVPVQSPWNTPLLPVRKPGTNDYRPVQDLREVNKRVQDIHPTVPNPYNLLCALPPQRSWYTVLDLKDAFFCLRLHPTSQPLFAFEWRDPGTGRTGQLTWTRLPQGFKNSPTIFNEALHRDLANFRIQHPQVTLLQYVDDLLLAGATKQDCLEGTKALLLELSDLGYRASAKKAQICRREVTYLGYSLRDGQRWLTEARKKTVVQIPAPTTAKQVREFLGKAGFCRLFIPGFATLAAPLYPLTKPKGEFSWAPEHQKAFDAIKKALLSAPALALPDVTKPFTLYVDERKGVARGVLTQTLGPWRRPVAYLSKKLDPVASGWPVCLKAIAAVAILVKDADKLTLGQNITVIAPHALENIVRQPPDRWMTNARMTHYQSLLLTERVTFAPPAALNPATLLPEETDEPVTHDCHQLLIEETGVRKDLTDIPLTGEVLTWFTDGSSYVVEGKRMAGAAVVDGTRTIWASSLPEGTSAQKAELMALTQALRLAEGKSINIYTDSRYAFATAHVHGAIYKQRGWLTSAGREIKNKEEILSLLEALHLPKRLAIIHCPGHQKAKDPISRGNQMADRVAKQAAQGVNLLPAGKRTADGSEFEKRTADGSEFESPKKKAKVE

SEQ ID NO: 198 - protein, 2086 aa, synthetic construct; identical to SEQ ID NO: 58

SEQ ID NO: 199 - protein, 2088 aa, synthetic construct; identical to SEQ ID NO: 40

SEQ ID NO: 200 - protein, 2088 aa, synthetic construct; identical to SEQ ID NO: 63

SEQ ID NO: 201 - protein, 2089 aa, synthetic construct; identical to SEQ ID NO: 74

SEQ ID NO: 202 - protein, 2092 aa, synthetic construct
MPAAKRVKLDGGDKKYSIGLDIGTNSVGWAVITDEYKVPSKKFKVLGNTDRHSIKKNLIGALLFDSGETAEATRLKRTARRRYTRRKNRICYLQEIFSNEMAKVDDSFFHRLEESFLVEEDKKHERHPIFGNIVDEVAYHEKYPTIYHLRKKLVDSTDKADLRLIYLALAHMIKFRGHFLIEGDLNPDNSDVDKLFIQLVQTYNQLFEENPINASGVDAKAILSARLSKSRRLENLIAQLPGEKKNGLFGNLIALSLGLTPNFKSNFDLAEDAKLQLSKDTYDDDLDNLLAQIGDQYADLFLAAKNLSDAILLSDILRVNTEITKAPLSASMIKRYDEHHQDLTLLKALVRQQLPEKYKEIFFDQSKNGYAGYIDGGASQEEFYKFIKPILEKMDGTEELLVKLNREDLLRKQRTFDNGSIPHQIHLGELHAILRRQEDFYPFLKDNREKIEKILTFRIPYYVGPLARGNSRFAWMTRKSEETITPWNFEEVVDKGASAQSFIERMTNFDKNLPNEKVLPKHSLLYEYFTVYNELTKVKYVTEGMRKPAFLSGEQKKAIVDLLFKTNRKVTVKQLKEDYFKKIECFDSVEISGVEDRFNASLGTYHDLLKIIKDKDFLDNEENEDILEDIVLTLTLFEDREMIEERLKTYAHLFDDKVMKQLKRRRYTGWGRLSRKLINGIRDKQSGKTILDFLKSDGFANRNFMQLIHDDSLTFKEDIQKAQVSGQGDSLHEHIANLAGSPAIKKGILQTVKVVDELVKVMGRHKPENIVIEMARENQTTQKGQKNSRERMKRIEEGIKELGSQILKEHPVENTQLQNEKLYLYYLQNGRDMYVDQELDINRLSDYDVDHIVPQSFLKDDSIDNKVLTRSDKARGKSDNVPSEEVVKKMKNYWRQLLNAKLITQRKFDNLTKAERGGLSELDKAGFIKRQLVETRQITKHVAQILDSRMNTKYDENDKLIREVKVITLKSKLVSDFRKDFQFYKVREINNYHHAHDAYLNAVVGTALIKKYPKLESEFVYGDYKVYDVRKMIAKSEQEIGKATAKYFFYSNIMNFFKTEITLANGEIRKRPLIETNGETGEIVWDKGRDFATVRKVLSMPQVNIVKKTEVQTGGFSKESILPKRNSDKLIARKKDWDPKKYGGFDSPTVAYSVLVVAKVEKGKSKKLKSVKELLGITIMERSSFEKNPIDFLEAKGYKEVKKDLIIKLPKYSLFELENGRKRMLASAGELQKGNELALPSKYVNFLYLASHYEKLKGSPEDNEQKQLFVEQHKHYLDEIIEQISEFSKRVILADANLDKVLSAYNKHRDKPIREQAENIIHLFTLTNLGAPAAFKYFDTTIDRKRYTSTKEVLDATLIHQSITGLYETRIDLSQLGGDGGGSSGSSGSSGSSGSSGGLDDEYRLYSPLVKPDQNIQFWLEQFPQAWAETAGMGLAKQVPPQVIQLKASATPVSVRQYPLSKEAQEGIRPHVQRLIQQGILVPVQSPWNTPLLPVRKPGTNDYRPVQDLREVNKRVQDIHPTVPNPYNLLCALPPQRSWYTVLDLKDAFFCLRLHPTSQPLFAFEWRDPGTGRTGQLTWTRLPQGFKNSPTIFNEALHRDLANFRIQHPQVTLLQYVDDLLLAGATKQDCLEGTKALLLELSDLGYRASAKKAQICRREVTYLGYSLRDGQRWLTEARKKTVVQIPAPTTAKQVREFLGKAGFCRLFIPGFATLAAPLYPLTKPKGEFSWAPEHQKAFDAIKKALLSAPALALPDVTKPFTLYVDERKGVARGVLTQTLGPWRRPVAYLSKKLDPVASGWPVCLKAIAAVAILVKDADKLTLGQNITVIAPHALENIVRQPPDRWMTNARMTHYQSLLLTERVTFAPPAALNPATLLPEETDEPVTHDCHQLLIEETGVRKDLTDIPLTGEVLTWFTDGSSYVVEGKRMAGAAVVDGTRTIWASSLPEGTSAQKAELMALTQALRLAEGKSINIYTDSRYAFATAHVHGAIYKQRGWLTSAGREIKNKEEILSLLEALHLPKRLAIIHCPGHQKAKDPISRGNQMADRVAKQAAQGVNLLPAGKRTADGSEFEKRTADGSEFESPKKKAKVE

SEQ ID NO: 203 - protein, 2083 aa, synthetic construct; identical to SEQ ID NO: 76

SEQ ID NO: 204 - protein, 2088 aa, synthetic construct; identical to SEQ ID NO: 71

SEQ ID NO: 205 - protein, 2086 aa, synthetic construct; identical to SEQ ID NO: 73

SEQ ID NO: 206 - protein, 2085 aa, synthetic construct; identical to SEQ ID NO: 57

SEQ ID NO: 207 - protein, 2086 aa, synthetic construct; identical to SEQ ID NO: 43

SEQ ID NO: 208 - protein, 2086 aa, synthetic construct
MPAAKRVKLDGGDKKYSIGLDIGTNSVGWAVITDEYKVPSKKFKVLGNTDRHSIKKNLIGALLFDSGETAEATRLKRTARRRYTRRKNRICYLQEIFSNEMAKVDDSFFHRLEESFLVEEDKKHERHPIFGNIVDEVAYHEKYPTIYHLRKKLVDSTDKADLRLIYLALAHMIKFRGHFLIEGDLNPDNSDVDKLFIQLVQTYNQLFEENPINASGVDAKAILSARLSKSRRLENLIAQLPGEKKNGLFGNLIALSLGLTPNFKSNFDLAEDAKLQLSKDTYDDDLDNLLAQIGDQYADLFLAAKNLSDAILLSDILRVNTEITKAPLSASMIKRYDEHHQDLTLLKALVRQQLPEKYKEIFFDQSKNGYAGYIDGGASQEEFYKFIKPILEKMDGTEELLVKLNREDLLRKQRTFDNGSIPHQIHLGELHAILRRQEDFYPFLKDNREKIEKILTFRIPYYVGPLARGNSRFAWMTRKSEETITPWNFEEVVDKGASAQSFIERMTNFDKNLPNEKVLPKHSLLYEYFTVYNELTKVKYVTEGMRKPAFLSGEQKKAIVDLLFKTNRKVTVKQLKEDYFKKIECFDSVEISGVEDRFNASLGTYHDLLKIIKDKDFLDNEENEDILEDIVLTLTLFEDREMIEERLKTYAHLFDDKVMKQLKRRRYTGWGRLSRKLINGIRDKQSGKTILDFLKSDGFANRNFMQLIHDDSLTFKEDIQKAQVSGQGDSLHEHIANLAGSPAIKKGILQTVKVVDELVKVMGRHKPENIVIEMARENQTTQKGQKNSRERMKRIEEGIKELGSQILKEHPVENTQLQNEKLYLYYLQNGRDMYVDQELDINRLSDYDVDHIVPQSFLKDDSIDNKVLTRSDKARGKSDNVPSEEVVKKMKNYWRQLLNAKLITQRKFDNLTKAERGGLSELDKAGFIKRQLVETRQITKHVAQILDSRMNTKYDENDKLIREVKVITLKSKLVSDFRKDFQFYKVREINNYHHAHDAYLNAVVGTALIKKYPKLESEFVYGDYKVYDVRKMIAKSEQEIGKATAKYFFYSNIMNFFKTEITLANGEIRKRPLIETNGETGEIVWDKGRDFATVRKVLSMPQVNIVKKTEVQTGGFSKESILPKRNSDKLIARKKDWDPKKYGGFDSPTVAYSVLVVAKVEKGKSKKLKSVKELLGITIMERSSFEKNPIDFLEAKGYKEVKKDLIIKLPKYSLFELENGRKRMLASAGELQKGNELALPSKYVNFLYLASHYEKLKGSPEDNEQKQLFVEQHKHYLDEIIEQISEFSKRVILADANLDKVLSAYNKHRDKPIREQAENIIHLFTLTNLGAPAAFKYFDTTIDRKRYTSTKEVLDATLIHQSITGLYETRIDLSQLGGDGGGSSGSSGSSGGLDDEYRLYSPLVKPDQNIQFWLEQFPQAWAETAGMGLAKQVPPQVIQLKASATPVSVRQYPLSKEAQEGIRPHVQRLIQQGILVPVQSPWNTPLLPVRKPGTNDYRPVQDLREVNKRVQDIHPTVPNPYNLLCALPPQRSWYTVLDLKDAFFCLRLHPTSQPLFAFEWRDPGTGRTGQLTWTRLPQGFKNSPTIFNEALHRDLANFRIQHPQVTLLQYVDDLLLAGATKQDCLEGTKALLLELSDLGYRASAKKAQICRREVTYLGYSLRDGQRWLTEARKKTVVQIPAPTTAKQVREFLGKAGFCRLFIPGFATLAAPLYPLTKPKGEFSWAPEHQKAFDAIKKALLSAPALALPDVTKPFTLYVDERKGVARGVLTQTLGPWRRPVAYLSKKLDPVASGWPVCLKAIAAVAILVKDADKLTLGQNITVIAPHALENIVRQPPDRWMTNARMTHYQSLLLTERVTFAPPAALNPATLLPEETDEPVTHDCHQLLIEETGVRKDLTDIPLTGEVLTWFTDGSSYVVEGKRMAGAAVVDGTRTIWASSLPEGTSAQKAELMALTQALRLAEGKSINIYTDSRYAFATAHVHGAIYKQRGWLTSAGREIKNKEEILSLLEALHLPKRLAIIHCPGHQKAKDPISRGNQMADRVAKQAAQGVNLLPAGKRTADGSEFEKRTADGSEFESPKKKAKVE

SEQ ID NO: 209 - protein, 2088 aa, synthetic construct
MPAAKRVKLDGGDKKYSIGLDIGTNSVGWAVITDEYKVPSKKFKVLGNTDRHSIKKNLIGALLFDSGETAEATRLKRTARRRYTRRKNRICYLQEIFSNEMAKVDDSFFHRLEESFLVEEDKKHERHPIFGNIVDEVAYHEKYPTIYHLRKKLVDSTDKADLRLIYLALAHMIKFRGHFLIEGDLNPDNSDVDKLFIQLVQTYNQLFEENPINASGVDAKAILSARLSKSRRLENLIAQLPGEKKNGLFGNLIALSLGLTPNFKSNFDLAEDAKLQLSKDTYDDDLDNLLAQIGDQYADLFLAAKNLSDAILLSDILRVNTEITKAPLSASMIKRYDEHHQDLTLLKALVRQQLPEKYKEIFFDQSKNGYAGYIDGGASQEEFYKFIKPILEKMDGTEELLVKLNREDLLRKQRTFDNGSIPHQIHLGELHAILRRQEDFYPFLKDNREKIEKILTFRIPYYVGPLARGNSRFAWMTRKSEETITPWNFEEVVDKGASAQSFIERMTNFDKNLPNEKVLPKHSLLYEYFTVYNELTKVKYVTEGMRKPAFLSGEQKKAIVDLLFKTNRKVTVKQLKEDYFKKIECFDSVEISGVEDRFNASLGTYHDLLKIIKDKDFLDNEENEDILEDIVLTLTLFEDREMIEERLKTYAHLFDDKVMKQLKRRRYTGWGRLSRKLINGIRDKQSGKTILDFLKSDGFANRNFMQLIHDDSLTFKEDIQKAQVSGQGDSLHEHIANLAGSPAIKKGILQTVKVVDELVKVMGRHKPENIVIEMARENQTTQKGQKNSRERMKRIEEGIKELGSQILKEHPVENTQLQNEKLYLYYLQNGRDMYVDQELDINRLSDYDVDHIVPQSFLKDDSIDNKVLTRSDKARGKSDNVPSEEVVKKMKNYWRQLLNAKLITQRKFDNLTKAERGGLSELDKAGFIKRQLVETRQITKHVAQILDSRMNTKYDENDKLIREVKVITLKSKLVSDFRKDFQFYKVREINNYHHAHDAYLNAVVGTALIKKYPKLESEFVYGDYKVYDVRKMIAKSEQEIGKATAKYFFYSNIMNFFKTEITLANGEIRKRPLIETNGETGEIVWDKGRDFATVRKVLSMPQVNIVKKTEVQTGGFSKESILPKRNSDKLIARKKDWDPKKYGGFDSPTVAYSVLVVAKVEKGKSKKLKSVKELLGITIMERSSFEKNPIDFLEAKGYKEVKKDLIIKLPKYSLFELENGRKRMLASAGELQKGNELALPSKYVNFLYLASHYEKLKGSPEDNEQKQLFVEQHKHYLDEIIEQISEFSKRVILADANLDKVLSAYNKHRDKPIREQAENIIHLFTLTNLGAPAAFKYFDTTIDRKRYTSTKEVLDATLIHQSITGLYETRIDLSQLGGDGGGSSEAAAKPAPGGLDDEYRLYSPLVKPDQNIQFWLEQFPQAWAETAGMGLAKQVPPQVIQLKASATPVSVRQYPLSKEAQEGIRPHVQRLIQQGILVPVQSPWNTPLLPVRKPGTNDYRPVQDLREVNKRVQDIHPTVPNPYNLLCALPPQRSWYTVLDLKDAFFCLRLHPTSQPLFAFEWRDPGTGRTGQLTWTRLPQGFKNSPTIFNEALHRDLANFRIQHPQVTLLQYVDDLLLAGATKQDCLEGTKALLLELSDLGYRASAKKAQICRREVTYLGYSLRDGQRWLTEARKKTVVQIPAPTTAKQVREFLGKAGFCRLFIPGFATLAAPLYPLTKPKGEFSWAPEHQKAFDAIKKALLSAPALALPDVTKPFTLYVDERKGVARGVLTQTLGPWRRPVAYLSKKLDPVASGWPVCLKAIAAVAILVKDADKLTLGQNITVIAPHALENIVRQPPDRWMTNARMTHYQSLLLTERVTFAPPAALNPATLLPEETDEPVTHDCHQLLIEETGVRKDLTDIPLTGEVLTWFTDGSSYVVEGKRMAGAAVVDGTRTIWASSLPEGTSAQKAELMALTQALRLAEGKSINIYTDSRYAFATAHVHGAIYKQRGWLTSAGREIKNKEEILSLLEALHLPKRLAIIHCPGHQKAKDPISRGNQMADRVAKQAAQGVNLLPAGKRTADGSEFEKRTADGSEFESPKKKAKVE

SEQ ID NO: 210 - protein, 2086 aa, synthetic construct; identical to SEQ ID NO: 89

SEQ ID NO: 211 - protein, 2088 aa, synthetic construct; identical to SEQ ID NO: 42

SEQ ID NO: 212 - protein, 2083 aa, synthetic construct
MPAAKRVKLDGGDKKYSIGLDIGTNSVGWAVITDEYKVPSKKFKVLGNTDRHSIKKNLIGALLFDSGETAEATRLKRTARRRYTRRKNRICYLQEIFSNEMAKVDDSFFHRLEESFLVEEDKKHERHPIFGNIVDEVAYHEKYPTIYHLRKKLVDSTDKADLRLIYLALAHMIKFRGHFLIEGDLNPDNSDVDKLFIQLVQTYNQLFEENPINASGVDAKAILSARLSKSRRLENLIAQLPGEKKNGLFGNLIALSLGLTPNFKSNFDLAEDAKLQLSKDTYDDDLDNLLAQIGDQYADLFLAAKNLSDAILLSDILRVNTEITKAPLSASMIKRYDEHHQDLTLLKALVRQQLPEKYKEIFFDQSKNGYAGYIDGGASQEEFYKFIKPILEKMDGTEELLVKLNREDLLRKQRTFDNGSIPHQIHLGELHAILRRQEDFYPFLKDNREKIEKILTFRIPYYVGPLARGNSRFAWMTRKSEETITPWNFEEVVDKGASAQSFIERMTNFDKNLPNEKVLPKHSLLYEYFTVYNELTKVKYVTEGMRKPAFLSGEQKKAIVDLLFKTNRKVTVKQLKEDYFKKIECFDSVEISGVEDRFNASLGTYHDLLKIIKDKDFLDNEENEDILEDIVLTLTLFEDREMIEERLKTYAHLFDDKVMKQLKRRRYTGWGRLSRKLINGIRDKQSGKTILDFLKSDGFANRNFMQLIHDDSLTFKEDIQKAQVSGQGDSLHEHIANLAGSPAIKKGILQTVKVVDELVKVMGRHKPENIVIEMARENQTTQKGQKNSRERMKRIEEGIKELGSQILKEHPVENTQLQNEKLYLYYLQNGRDMYVDQELDINRLSDYDVDHIVPQSFLKDDSIDNKVLTRSDKARGKSDNVPSEEVVKKMKNYWRQLLNAKLITQRKFDNLTKAERGGLSELDKAGFIKRQLVETRQITKHVAQILDSRMNTKYDENDKLIREVKVITLKSKLVSDFRKDFQFYKVREINNYHHAHDAYLNAVVGTALIKKYPKLESEFVYGDYKVYDVRKMIAKSEQEIGKATAKYFFYSNIMNFFKTEITLANGEIRKRPLIETNGETGEIVWDKGRDFATVRKVLSMPQVNIVKKTEVQTGGFSKESILPKRNSDKLIARKKDWDPKKYGGFDSPTVAYSVLVVAKVEKGKSKKLKSVKELLGITIMERSSFEKNPIDFLEAKGYKEVKKDLIIKLPKYSLFELENGRKRMLASAGELQKGNELALPSKYVNFLYLASHYEKLKGSPEDNEQKQLFVEQHKHYLDEIIEQISEFSKRVILADANLDKVLSAYNKHRDKPIREQAENIIHLFTLTNLGAPAAFKYFDTTIDRKRYTSTKEVLDATLIHQSITGLYETRIDLSQLGGDGGGGSGSSGGLDDEYRLYSPLVKPDQNIQFWLEQFPQAWAETAGMGLAKQVPPQVIQLKASATPVSVRQYPLSKEAQEGIRPHVQRLIQQGILVPVQSPWNTPLLPVRKPGTNDYRPVQDLREVNKRVQDIHPTVPNPYNLLCALPPQRSWYTVLDLKDAFFCLRLHPTSQPLFAFEWRDPGTGRTGQLTWTRLPQGFKNSPTIFNEALHRDLANFRIQHPQVTLLQYVDDLLLAGATKQDCLEGTKALLLELSDLGYRASAKKAQICRREVTYLGYSLRDGQRWLTEARKKTVVQIPAPTTAKQVREFLGKAGFCRLFIPGFATLAAPLYPLTKPKGEFSWAPEHQKAFDAIKKALLSAPALALPDVTKPFTLYVDERKGVARGVLTQTLGPWRRPVAYLSKKLDPVASGWPVCLKAIAAVAILVKDADKLTLGQNITVIAPHALENIVRQPPDRWMTNARMTHYQSLLLTERVTFAPPAALNPATLLPEETDEPVTHDCHQLLIEETGVRKDLTDIPLTGEVLTWFTDGSSYVVEGKRMAGAAVVDGTRTIWASSLPEGTSAQKAELMALTQALRLAEGKSINIYTDSRYAFATAHVHGAIYKQRGWLTSAGREIKNKEEILSLLEALHLPKRLAIIHCPGHQKAKDPISRGNQMADRVAKQAAQGVNLLPAGKRTADGSEFEKRTADGSEFESPKKKAKVE

SEQ ID NO: 213 - protein, 2086 aa, synthetic construct
MPAAKRVKLDGGDKKYSIGLDIGTNSVGWAVITDEYKVPSKKFKVLGNTDRHSIKKNLIGALLFDSGETAEATRLKRTARRRYTRRKNRICYLQEIFSNEMAKVDDSFFHRLEESFLVEEDKKHERHPIFGNIVDEVAYHEKYPTIYHLRKKLVDSTDKADLRLIYLALAHMIKFRGHFLIEGDLNPDNSDVDKLFIQLVQTYNQLFEENPINASGVDAKAILSARLSKSRRLENLIAQLPGEKKNGLFGNLIALSLGLTPNFKSNFDLAEDAKLQLSKDTYDDDLDNLLAQIGDQYADLFLAAKNLSDAILLSDILRVNTEITKAPLSASMIKRYDEHHQDLTLLKALVRQQLPEKYKEIFFDQSKNGYAGYIDGGASQEEFYKFIKPILEKMDGTEELLVKLNREDLLRKQRTFDNGSIPHQIHLGELHAILRRQEDFYPFLKDNREKIEKILTFRIPYYVGPLARGNSRFAWMTRKSEETITPWNFEEVVDKGASAQSFIERMTNFDKNLPNEKVLPKHSLLYEYFTVYNELTKVKYVTEGMRKPAFLSGEQKKAIVDLLFKTNRKVTVKQLKEDYFKKIECFDSVEISGVEDRFNASLGTYHDLLKIIKDKDFLDNEENEDILEDIVLTLTLFEDREMIEERLKTYAHLFDDKVMKQLKRRRYTGWGRLSRKLINGIRDKQSGKTILDFLKSDGFANRNFMQLIHDDSLTFKEDIQKAQVSGQGDSLHEHIANLAGSPAIKKGILQTVKVVDELVKVMGRHKPENIVIEMARENQTTQKGQKNSRERMKRIEEGIKELGSQILKEHPVENTQLQNEKLYLYYLQNGRDMYVDQELDINRLSDYDVDHIVPQSFLKDDSIDNKVLTRSDKARGKSDNVPSEEVVKKMKNYWRQLLNAKLITQRKFDNLTKAERGGLSELDKAGFIKRQLVETRQITKHVAQILDSRMNTKYDENDKLIREVKVITLKSKLVSDFRKDFQFYKVREINNYHHAHDAYLNAVVGTALIKKYPKLESEFVYGDYKVYDVRKMIAKSEQEIGKATAKYFFYSNIMNFFKTEITLANGEIRKRPLIETNGETGEIVWDKGRDFATVRKVLSMPQVNIVKKTEVQTGGFSKESILPKRNSDKLIARKKDWDPKKYGGFDSPTVAYSVLVVAKVEKGKSKKLKSVKELLGITIMERSSFEKNPIDFLEAKGYKEVKKDLIIKLPKYSLFELENGRKRMLASAGELQKGNELALPSKYVNFLYLASHYEKLKGSPEDNEQKQLFVEQHKHYLDEIIEQISEFSKRVILADANLDKVLSAYNKHRDKPIREQAENIIHLFTLTNLGAPAAFKYFDTTIDRKRYTSTKEVLDATLIHQSITGLYETRIDLSQLGGDGGGGSGGGPAPGGLDDEYRLYSPLVKPDQNIQFWLEQFPQAWAETAGMGLAKQVPPQVIQLKASATPVSVRQYPLSKEAQEGIRPHVQRLIQQGILVPVQSPWNTPLLPVRKPGTNDYRPVQDLREVNKRVQDIHPTVPNPYNLLCALPPQRSWYTVLDLKDAFFCLRLHPTSQPLFAFEWRDPGTGRTGQLTWTRLPQGFKNSPTIFNEALHRDLANFRIQHPQVTLLQYVDDLLLAGATKQDCLEGTKALLLELSDLGYRASAKKAQICRREVTYLGYSLRDGQRWLTEARKKTVVQIPAPTTAKQVREFLGKAGFCRLFIPGFATLAAPLYPLTKPKGEFSWAPEHQKAFDAIKKALLSAPALALPDVTKPFTLYVDERKGVARGVLTQTLGPWRRPVAYLSKKLDPVASGWPVCLKAIAAVAILVKDADKLTLGQNITVIAPHALENIVRQPPDRWMTNARMTHYQSLLLTERVTFAPPAALNPATLLPEETDEPVTHDCHQLLIEETGVRKDLTDIPLTGEVLTWFTDGSSYVVEGKRMAGAAVVDGTRTIWASSLPEGTSAQKAELMALTQALRLAEGKSINIYTDSRYAFATAHVHGAIYKQRGWLTSAGREIKNKEEILSLLEALHLPKRLAIIHCPGHQKAKDPISRGNQMADRVAKQAAQGVNLLPAGKRTADGSEFEKRTADGSEFESPKKKAKVE

SEQ ID NO: 214 - protein, 2095 aa, synthetic construct
MPAAKRVKLDGGDKKYSIGLDIGTNSVGWAVITDEYKVPSKKFKVLGNTDRHSIKKNLIGALLFDSGETAEATRLKRTARRRYTRRKNRICYLQEIFSNEMAKVDDSFFHRLEESFLVEEDKKHERHPIFGNIVDEVAYHEKYPTIYHLRKKLVDSTDKADLRLIYLALAHMIKFRGHFLIEGDLNPDNSDVDKLFIQLVQTYNQLFEENPINASGVDAKAILSARLSKSRRLENLIAQLPGEKKNGLFGNLIALSLGLTPNFKSNFDLAEDAKLQLSKDTYDDDLDNLLAQIGDQYADLFLAAKNLSDAILLSDILRVNTEITKAPLSASMIKRYDEHHQDLTLLKALVRQQLPEKYKEIFFDQSKNGYAGYIDGGASQEEFYKFIKPILEKMDGTEELLVKLNREDLLRKQRTFDNGSIPHQIHLGELHAILRRQEDFYPFLKDNREKIEKILTFRIPYYVGPLARGNSRFAWMTRKSEETITPWNFEEVVDKGASAQSFIERMTNFDKNLPNEKVLPKHSLLYEYFTVYNELTKVKYVTEGMRKPAFLSGEQKKAIVDLLFKTNRKVTVKQLKEDYFKKIECFDSVEISGVEDRFNASLGTYHDLLKIIKDKDFLDNEENEDILEDIVLTLTLFEDREMIEERLKTYAHLFDDKVMKQLKRRRYTGWGRLSRKLINGIRDKQSGKTILDFLKSDGFANRNFMQLIHDDSLTFKEDIQKAQVSGQGDSLHEHIANLAGSPAIKKGILQTVKVVDELVKVMGRHKPENIVIEMARENQTTQKGQKNSRERMKRIEEGIKELGSQILKEHPVENTQLQNEKLYLYYLQNGRDMYVDQELDINRLSDYDVDHIVPQSFLKDDSIDNKVLTRSDKARGKSDNVPSEEVVKKMKNYWRQLLNAKLITQRKFDNLTKAERGGLSELDKAGFIKRQLVETRQITKHVAQILDSRMNTKYDENDKLIREVKVITLKSKLVSDFRKDFQFYKVREINNYHHAHDAYLNAVVGTALIKKYPKLESEFVYGDYKVYDVRKMIAKSEQEIGKATAKYFFYSNIMNFFKTEITLANGEIRKRPLIETNGETGEIVWDKGRDFATVRKVLSMPQVNIVKKTEVQTGGFSKESILPKRNSDKLIARKKDWDPKKYGGFDSPTVAYSVLVVAKVEKGKSKKLKSVKELLGITIMERSSFEKNPIDFLEAKGYKEVKKDLIIKLPKYSLFELENGRKRMLASAGELQKGNELALPSKYVNFLYLASHYEKLKGSPEDNEQKQLFVEQHKHYLDEIIEQISEFSKRVILADANLDKVLSAYNKHRDKPIREQAENIIHLFTLTNLGAPAAFKYFDTTIDRKRYTSTKEVLDATLIHQSITGLYETRIDLSQLGGDGGGSSGSSGSSGSSGSSGSSGGLDDEYRLYSPLVKPDQNIQFWLEQFPQAWAETAGMGLAKQVPPQVIQLKASATPVSVRQYPLSKEAQEGIRPHVQRLIQQGILVPVQSPWNTPLLPVRKPGTNDYRPVQDLREVNKRVQDIHPTVPNPYNLLCALPPQRSWYTVLDLKDAFFCLRLHPTSQPLFAFEWRDPGTGRTGQLTWTRLPQGFKNSPTIFNEALHRDLANFRIQHPQVTLLQYVDDLLLAGATKQDCLEGTKALLLELSDLGYRASAKKAQICRREVTYLGYSLRDGQRWLTEARKKTVVQIPAPTTAKQVREFLGKAGFCRLFIPGFATLAAPLYPLTKPKGEFSWAPEHQKAFDAIKKALLSAPALALPDVTKPFTLYVDERKGVARGVLTQTLGPWRRPVAYLSKKLDPVASGWPVCLKAIAAVAILVKDADKLTLGQNITVIAPHALENIVRQPPDRWMTNARMTHYQSLLLTERVTFAPPAALNPATLLPEETDEPVTHDCHQLLIEETGVRKDLTDIPLTGEVLTWFTDGSSYVVEGKRMAGAAVVDGTRTIWASSLPEGTSAQKAELMALTQALRLAEGKSINIYTDSRYAFATAHVHGAIYKQRGWLTSAGREIKNKEEILSLLEALHLPKRLAIIHCPGHQKAKDPISRGNQMADRVAKQAAQGVNLLPAGKRTADGSEFEKRTADGSEFESPKKKAKVE

SEQ ID NO: 215 - protein, 2097 aa, synthetic construct; identical to SEQ ID NO: 46

SEQ ID NO: 216 - protein, 2092 aa, synthetic construct; identical to SEQ ID NO: 51

SEQ ID NO: 217 - protein, 2088 aa, synthetic construct
MPAAKRVKLDGGDKKYSIGLDIGTNSVGWAVITDEYKVPSKKFKVLGNTDRHSIKKNLIGALLFDSGETAEATRLKRTARRRYTRRKNRICYLQEIFSNEMAKVDDSFFHRLEESFLVEEDKKHERHPIFGNIVDEVAYHEKYPTIYHLRKKLVDSTDKADLRLIYLALAHMIKFRGHFLIEGDLNPDNSDVDKLFIQLVQTYNQLFEENPINASGVDAKAILSARLSKSRRLENLIAQLPGEKKNGLFGNLIALSLGLTPNFKSNFDLAEDAKLQLSKDTYDDDLDNLLAQIGDQYADLFLAAKNLSDAILLSDILRVNTEITKAPLSASMIKRYDEHHQDLTLLKALVRQQLPEKYKEIFFDQSKNGYAGYIDGGASQEEFYKFIKPILEKMDGTEELLVKLNREDLLRKQRTFDNGSIPHQIHLGELHAILRRQEDFYPFLKDNREKIEKILTFRIPYYVGPLARGNSRFAWMTRKSEETITPWNFEEVVDKGASAQSFIERMTNFDKNLPNEKVLPKHSLLYEYFTVYNELTKVKYVTEGMRKPAFLSGEQKKAIVDLLFKTNRKVTVKQLKEDYFKKIECFDSVEISGVEDRFNASLGTYHDLLKIIKDKDFLDNEENEDILEDIVLTLTLFEDREMIEERLKTYAHLFDDKVMKQLKRRRYTGWGRLSRKLINGIRDKQSGKTILDFLKSDGFANRNFMQLIHDDSLTFKEDIQKAQVSGQGDSLHEHIANLAGSPAIKKGILQTVKVVDELVKVMGRHKPENIVIEMARENQTTQKGQKNSRERMKRIEEGIKELGSQILKEHPVENTQLQNEKLYLYYLQNGRDMYVDQELDINRLSDYDVDHIVPQSFLKDDSIDNKVLTRSDKARGKSDNVPSEEVVKKMKNYWRQLLNAKLITQRKFDNLTKAERGGLSELDKAGFIKRQLVETRQITKHVAQILDSRMNTKYDENDKLIREVKVITLKSKLVSDFRKDFQFYKVREINNYHHAHDAYLNAVVGTALIKKYPKLESEFVYGDYKVYDVRKMIAKSEQEIGKATAKYFFYSNIMNFFKTEITLANGEIRKRPLIETNGETGEIVWDKGRDFATVRKVLSMPQVNIVKKTEVQTGGFSKESILPKRNSDKLIARKKDWDPKKYGGFDSPTVAYSVLVVAKVEKGKSKKLKSVKELLGITIMERSSFEKNPIDFLEAKGYKEVKKDLIIKLPKYSLFELENGRKRMLASAGELQKGNELALPSKYVNFLYLASHYEKLKGSPEDNEQKQLFVEQHKHYLDEIIEQISEFSKRVILADANLDKVLSAYNKHRDKPIREQAENIIHLFTLTNLGAPAAFKYFDTTIDRKRYTSTKEVLDATLIHQSITGLYETRIDLSQLGGDGGPAPGGSEAAAKGGLDDEYRLYSPLVKPDQNIQFWLEQFPQAWAETAGMGLAKQVPPQVIQLKASATPVSVRQYPLSKEAQEGIRPHVQRLIQQGILVPVQSPWNTPLLPVRKPGTNDYRPVQDLREVNKRVQDIHPTVPNPYNLLCALPPQRSWYTVLDLKDAFFCLRLHPTSQPLFAFEWRDPGTGRTGQLTWTRLPQGFKNSPTIFNEALHRDLANFRIQHPQVTLLQYVDDLLLAGATKQDCLEGTKALLLELSDLGYRASAKKAQICRREVTYLGYSLRDGQRWLTEARKKTVVQIPAPTTAKQVREFLGKAGFCRLFIPGFATLAAPLYPLTKPKGEFSWAPEHQKAFDAIKKALLSAPALALPDVTKPFTLYVDERKGVARGVLTQTLGPWRRPVAYLSKKLDPVASGWPVCLKAIAAVAILVKDADKLTLGQNITVIAPHALENIVRQPPDRWMTNARMTHYQSLLLTERVTFAPPAALNPATLLPEETDEPVTHDCHQLLIEETGVRKDLTDIPLTGEVLTWFTDGSSYVVEGKRMAGAAVVDGTRTIWASSLPEGTSAQKAELMALTQALRLAEGKSINIYTDSRYAFATAHVHGAIYKQRGWLTSAGREIKNKEEILSLLEALHLPKRLAIIHCPGHQKAKDPISRGNQMADRVAKQAAQGVNLLPAGKRTADGSEFEKRTADGSEFESPKKKAKVE

SEQ ID NO: 218 - protein, 2082 aa, synthetic construct; identical to SEQ ID NO: 70

SEQ ID NO: 219 - protein, 2085 aa, synthetic construct; identical to SEQ ID NO: 48

SEQ ID NO: 220 - protein, 2086 aa, synthetic construct
MPAAKRVKLDGGDKKYSIGLDIGTNSVGWAVITDEYKVPSKKFKVLGNTDRHSIKKNLIGALLFDSGETAEATRLKRTARRRYTRRKNRICYLQEIFSNEMAKVDDSFFHRLEESFLVEEDKKHERHPIFGNIVDEVAYHEKYPTIYHLRKKLVDSTDKADLRLIYLALAHMIKFRGHFLIEGDLNPDNSDVDKLFIQLVQTYNQLFEENPINASGVDAKAILSARLSKSRRLENLIAQLPGEKKNGLFGNLIALSLGLTPNFKSNFDLAEDAKLQLSKDTYDDDLDNLLAQIGDQYADLFLAAKNLSDAILLSDILRVNTEITKAPLSASMIKRYDEHHQDLTLLKALVRQQLPEKYKEIFFDQSKNGYAGYIDGGASQEEFYKFIKPILEKMDGTEELLVKLNREDLLRKQRTFDNGSIPHQIHLGELHAILRRQEDFYPFLKDNREKIEKILTFRIPYYVGPLARGNSRFAWMTRKSEETITPWNFEEVVDKGASAQSFIERMTNFDKNLPNEKVLPKHSLLYEYFTVYNELTKVKYVTEGMRKPAFLSGEQKKAIVDLLFKTNRKVTVKQLKEDYFKKIECFDSVEISGVEDRFNASLGTYHDLLKIIKDKDFLDNEENEDILEDIVLTLTLFEDREMIEERLKTYAHLFDDKVMKQLKRRRYTGWGRLSRKLINGIRDKQSGKTILDFLKSDGFANRNFMQLIHDDSLTFKEDIQKAQVSGQGDSLHEHIANLAGSPAIKKGILQTVKVVDELVKVMGRHKPENIVIEMARENQTTQKGQKNSRERMKRIEEGIKELGSQILKEHPVENTQLQNEKLYLYYLQNGRDMYVDQELDINRLSDYDVDHIVPQSFLKDDSIDNKVLTRSDKARGKSDNVPSEEVVKKMKNYWRQLLNAKLITQRKFDNLTKAERGGLSELDKAGFIKRQLVETRQITKHVAQILDSRMNTKYDENDKLIREVKVITLKSKLVSDFRKDFQFYKVREINNYHHAHDAYLNAVVGTALIKKYPKLESEFVYGDYKVYDVRKMIAKSEQEIGKATAKYFFYSNIMNFFKTEITLANGEIRKRPLIETNGETGEIVWDKGRDFATVRKVLSMPQVNIVKKTEVQTGGFSKESILPKRNSDKLIARKKDWDPKKYGGFDSPTVAYSVLVVAKVEKGKSKKLKSVKELLGITIMERSSFEKNPIDFLEAKGYKEVKKDLIIKLPKYSLFELENGRKRMLASAGELQKGNELALPSKYVNFLYLASHYEKLKGSPEDNEQKQLFVEQHKHYLDEIIEQISEFSKRVILADANLDKVLSAYNKHRDKPIREQAENIIHLFTLTNLGAPAAFKYFDTTIDRKRYTSTKEVLDATLIHQSITGLYETRIDLSQLGGDGGGGGPAPGSSGGLDDEYRLYSPLVKPDQNIQFWLEQFPQAWAETAGMGLAKQVPPQVIQLKASATPVSVRQYPLSKEAQEGIRPHVQRLIQQGILVPVQSPWNTPLLPVRKPGTNDYRPVQDLREVNKRVQDIHPTVPNPYNLLCALPPQRSWYTVLDLKDAFFCLRLHPTSQPLFAFEWRDPGTGRTGQLTWTRLPQGFKNSPTIFNEALHRDLANFRIQHPQVTLLQYVDDLLLAGATKQDCLEGTKALLLELSDLGYRASAKKAQICRREVTYLGYSLRDGQRWLTEARKKTVVQIPAPTTAKQVREFLGKAGFCRLFIPGFATLAAPLYPLTKPKGEFSWAPEHQKAFDAIKKALLSAPALALPDVTKPFTLYVDERKGVARGVLTQTLGPWRRPVAYLSKKLDPVASGWPVCLKAIAAVAILVKDADKLTLGQNITVIAPHALENIVRQPPDRWMTNARMTHYQSLLLTERVTFAPPAALNPATLLPEETDEPVTHDCHQLLIEETGVRKDLTDIPLTGEVLTWFTDGSSYVVEGKRMAGAAVVDGTRTIWASSLPEGTSAQKAELMALTQALRLAEGKSINIYTDSRYAFATAHVHGAIYKQRGWLTSAGREIKNKEEILSLLEALHLPKRLAIIHCPGHQKAKDPISRGNQMADRVAKQAAQGVNLLPAGKRTADGSEFEKRTADGSEFESPKKKAKVE

SEQ ID NO: 221 - protein, 2085 aa, synthetic construct
MPAAKRVKLDGGDKKYSIGLDIGTNSVGWAVITDEYKVPSKKFKVLGNTDRHSIKKNLIGALLFDSGETAEATRLKRTARRRYTRRKNRICYLQEIFSNEMAKVDDSFFHRLEESFLVEEDKKHERHPIFGNIVDEVAYHEKYPTIYHLRKKLVDSTDKADLRLIYLALAHMIKFRGHFLIEGDLNPDNSDVDKLFIQLVQTYNQLFEENPINASGVDAKAILSARLSKSRRLENLIAQLPGEKKNGLFGNLIALSLGLTPNFKSNFDLAEDAKLQLSKDTYDDDLDNLLAQIGDQYADLFLAAKNLSDAILLSDILRVNTEITKAPLSASMIKRYDEHHQDLTLLKALVRQQLPEKYKEIFFDQSKNGYAGYIDGGASQEEFYKFIKPILEKMDGTEELLVKLNREDLLRKQRTFDNGSIPHQIHLGELHAILRRQEDFYPFLKDNREKIEKILTFRIPYYVGPLARGNSRFAWMTRKSEETITPWNFEEVVDKGASAQSFIERMTNFDKNLPNEKVLPKHSLLYEYFTVYNELTKVKYVTEGMRKPAFLSGEQKKAIVDLLFKTNRKVTVKQLKEDYFKKIECFDSVEISGVEDRFNASLGTYHDLLKIIKDKDFLDNEENEDILEDIVLTLTLFEDREMIEERLKTYAHLFDDKVMKQLKRRRYTGWGRLSRKLINGIRDKQSGKTILDFLKSDGFANRNFMQLIHDDSLTFKEDIQKAQVSGQGDSLHEHIANLAGSPAIKKGILQTVKVVDELVKVMGRHKPENIVIEMARENQTTQKGQKNSRERMKRIEEGIKELGSQILKEHPVENTQLQNEKLYLYYLQNGRDMYVDQELDINRLSDYDVDHIVPQSFLKDDSIDNKVLTRSDKARGKSDNVPSEEVVKKMKNYWRQLLNAKLITQRKFDNLTKAERGGLSELDKAGFIKRQLVETRQITKHVAQILDSRMNTKYDENDKLIREVKVITLKSKLVSDFRKDFQFYKVREINNYHHAHDAYLNAVVGTALIKKYPKLESEFVYGDYKVYDVRKMIAKSEQEIGKATAKYFFYSNIMNFFKTEITLANGEIRKRPLIETNGETGEIVWDKGRDFATVRKVLSMPQVNIVKKTEVQTGGFSKESILPKRNSDKLIARKKDWDPKKYGGFDSPTVAYSVLVVAKVEKGKSKKLKSVKELLGITIMERSSFEKNPIDFLEAKGYKEVKKDLIIKLPKYSLFELENGRKRMLASAGELQKGNELALPSKYVNFLYLASHYEKLKGSPEDNEQKQLFVEQHKHYLDEIIEQISEFSKRVILADANLDKVLSAYNKHRDKPIREQAENIIHLFTLTNLGAPAAFKYFDTTIDRKRYTSTKEVLDATLIHQSITGLYETRIDLSQLGGDGGEAAAKGGSGGLDDEYRLYSPLVKPDQNIQFWLEQFPQAWAETAGMGLAKQVPPQVIQLKASATPVSVRQYPLSKEAQEGIRPHVQRLIQQGILVPVQSPWNTPLLPVRKPGTNDYRPVQDLREVNKRVQDIHPTVPNPYNLLCALPPQRSWYTVLDLKDAFFCLRLHPTSQPLFAFEWRDPGTGRTGQLTWTRLPQGFKNSPTIFNEALHRDLANFRIQHPQVTLLQYVDDLLLAGATKQDCLEGTKALLLELSDLGYRASAKKAQICRREVTYLGYSLRDGQRWLTEARKKTVVQIPAPTTAKQVREFLGKAGFCRLFIPGFATLAAPLYPLTKPKGEFSWAPEHQKAFDAIKKALLSAPALALPDVTKPFTLYVDERKGVARGVLTQTLGPWRRPVAYLSKKLDPVASGWPVCLKAIAAVAILVKDADKLTLGQNITVIAPHALENIVRQPPDRWMTNARMTHYQSLLLTERVTFAPPAALNPATLLPEETDEPVTHDCHQLLIEETGVRKDLTDIPLTGEVLTWFTDGSSYVVEGKRMAGAAVVDGTRTIWASSLPEGTSAQKAELMALTQALRLAEGKSINIYTDSRYAFATAHVHGAIYKQRGWLTSAGREIKNKEEILSLLEALHLPKRLAIIHCPGHQKAKDPISRGNQMADRVAKQAAQGVNLLPAGKRTADGSEFEKRTADGSEFESPKKKAKVE

SEQ ID NO: 222 - protein, 2083 aa, synthetic construct
MPAAKRVKLDGGDKKYSIGLDIGTNSVGWAVITDEYKVPSKKFKVLGNTDRHSIKKNLIGALLFDSGETAEATRLKRTARRRYTRRKNRICYLQEIFSNEMAKVDDSFFHRLEESFLVEEDKKHERHPIFGNIVDEVAYHEKYPTIYHLRKKLVDSTDKADLRLIYLALAHMIKFRGHFLIEGDLNPDNSDVDKLFIQLVQTYNQLFEENPINASGVDAKAILSARLSKSRRLENLIAQLPGEKKNGLFGNLIALSLGLTPNFKSNFDLAEDAKLQLSKDTYDDDLDNLLAQIGDQYADLFLAAKNLSDAILLSDILRVNTEITKAPLSASMIKRYDEHHQDLTLLKALVRQQLPEKYKEIFFDQSKNGYAGYIDGGASQEEFYKFIKPILEKMDGTEELLVKLNREDLLRKQRTFDNGSIPHQIHLGELHAILRRQEDFYPFLKDNREKIEKILTFRIPYYVGPLARGNSRFAWMTRKSEETITPWNFEEVVDKGASAQSFIERMTNFDKNLPNEKVLPKHSLLYEYFTVYNELTKVKYVTEGMRKPAFLSGEQKKAIVDLLFKTNRKVTVKQLKEDYFKKIECFDSVEISGVEDRFNASLGTYHDLLKIIKDKDFLDNEENEDILEDIVLTLTLFEDREMIEERLKTYAHLFDDKVMKQLKRRRYTGWGRLSRKLINGIRDKQSGKTILDFLKSDGFANRNFMQLIHDDSLTFKEDIQKAQVSGQGDSLHEHIANLAGSPAIKKGILQTVKVVDELVKVMGRHKPENIVIEMARENQTTQKGQKNSRERMKRIEEGIKELGSQILKEHPVENTQLQNEKLYLYYLQNGRDMYVDQELDINRLSDYDVDHIVPQSFLKDDSIDNKVLTRSDKARGKSDNVPSEEVVKKMKNYWRQLLNAKLITQRKFDNLTKAERGGLSELDKAGFIKRQLVETRQITKHVAQILDSRMNTKYDENDKLIREVKVITLKSKLVSDFRKDFQFYKVREINNYHHAHDAYLNAVVGTALIKKYPKLESEFVYGDYKVYDVRKMIAKSEQEIGKATAKYFFYSNIMNFFKTEITLANGEIRKRPLIETNGETGEIVWDKGRDFATVRKVLSMPQVNIVKKTEVQTGGFSKESILPKRNSDKLIARKKDWDPKKYGGFDSPTVAYSVLVVAKVEKGKSKKLKSVKELLGITIMERSSFEKNPIDFLEAKGYKEVKKDLIIKLPKYSLFELENGRKRMLASAGELQKGNELALPSKYVNFLYLASHYEKLKGSPEDNEQKQLFVEQHKHYLDEIIEQISEFSKRVILADANLDKVLSAYNKHRDKPIREQAENIIHLFTLTNLGAPAAFKYFDTTIDRKRYTSTKEVLDATLIHQSITGLYETRIDLSQLGGDGGGGSGGGGGLDDEYRLYSPLVKPDQNIQFWLEQFPQAWAETAGMGLAKQVPPQVIQLKASATPVSVRQYPLSKEAQEGIRPHVQRLIQQGILVPVQSPWNTPLLPVRKPGTNDYRPVQDLREVNKRVQDIHPTVPNPYNLLCALPPQRSWYTVLDLKDAFFCLRLHPTSQPLFAFEWRDPGTGRTGQLTWTRLPQGFKNSPTIFNEALHRDLANFRIQHPQVTLLQYVDDLLLAGATKQDCLEGTKALLLELSDLGYRASAKKAQICRREVTYLGYSLRDGQRWLTEARKKTVVQIPAPTTAKQVREFLGKAGFCRLFIPGFATLAAPLYPLTKPKGEFSWAPEHQKAFDAIKKALLSAPALALPDVTKPFTLYVDERKGVARGVLTQTLGPWRRPVAYLSKKLDPVASGWPVCLKAIAAVAILVKDADKLTLGQNITVIAPHALENIVRQPPDRWMTNARMTHYQSLLLTERVTFAPPAALNPATLLPEETDEPVTHDCHQLLIEETGVRKDLTDIPLTGEVLTWFTDGSSYVVEGKRMAGAAVVDGTRTIWASSLPEGTSAQKAELMALTQALRLAEGKSINIYTDSRYAFATAHVHGAIYKQRGWLTSAGREIKNKEEILSLLEALHLPKRLAIIHCPGHQKAKDPISRGNQMADRVAKQAAQGVNLLPAGKRTADGSEFEKRTADGSEFESPKKKAKVE

SEQ ID NO: 223 - protein, 2083 aa, synthetic construct; identical to SEQ ID NO: 47

SEQ ID NO: 224 - protein, 2088 aa, synthetic construct
MPAAKRVKLDGGDKKYSIGLDIGTNSVGWAVITDEYKVPSKKFKVLGNTDRHSIKKNLIGALLFDSGETAEATRLKRTARRRYTRRKNRICYLQEIFSNEMAKVDDSFFHRLEESFLVEEDKKHERHPIFGNIVDEVAYHEKYPTIYHLRKKLVDSTDKADLRLIYLALAHMIKFRGHFLIEGDLNPDNSDVDKLFIQLVQTYNQLFEENPINASGVDAKAILSARLSKSRRLENLIAQLPGEKKNGLFGNLIALSLGLTPNFKSNFDLAEDAKLQLSKDTYDDDLDNLLAQIGDQYADLFLAAKNLSDAILLSDILRVNTEITKAPLSASMIKRYDEHHQDLTLLKALVRQQLPEKYKEIFFDQSKNGYAGYIDGGASQEEFYKFIKPILEKMDGTEELLVKLNREDLLRKQRTFDNGSIPHQIHLGELHAILRRQEDFYPFLKDNREKIEKILTFRIPYYVGPLARGNSRFAWMTRKSEETITPWNFEEVVDKGASAQSFIERMTNFDKNLPNEKVLPKHSLLYEYFTVYNELTKVKYVTEGMRKPAFLSGEQKKAIVDLLFKTNRKVTVKQLKEDYFKKIECFDSVEISGVEDRFNASLGTYHDLLKIIKDKDFLDNEENEDILEDIVLTLTLFEDREMIEERLKTYAHLFDDKVMKQLKRRRYTGWGRLSRKLINGIRDKQSGKTILDFLKSDGFANRNFMQLIHDDSLTFKEDIQKAQVSGQGDSLHEHIANLAGSPAIKKGILQTVKVVDELVKVMGRHKPENIVIEMARENQTTQKGQKNSRERMKRIEEGIKELGSQILKEHPVENTQLQNEKLYLYYLQNGRDMYVDQELDINRLSDYDVDHIVPQSFLKDDSIDNKVLTRSDKARGKSDNVPSEEVVKKMKNYWRQLLNAKLITQRKFDNLTKAERGGLSELDKAGFIKRQLVETRQITKHVAQILDSRMNTKYDENDKLIREVKVITLKSKLVSDFRKDFQFYKVREINNYHHAHDAYLNAVVGTALIKKYPKLESEFVYGDYKVYDVRKMIAKSEQEIGKATAKYFFYSNIMNFFKTEITLANGEIRKRPLIETNGETGEIVWDKGRDFATVRKVLSMPQVNIVKKTEVQTGGFSKESILPKRNSDKLIARKKDWDPKKYGGFDSPTVAYSVLVVAKVEKGKSKKLKSVKELLGITIMERSSFEKNPIDFLEAKGYKEVKKDLIIKLPKYSLFELENGRKRMLASAGELQKGNELALPSKYVNFLYLASHYEKLKGSPEDNEQKQLFVEQHKHYLDEIIEQISEFSKRVILADANLDKVLSAYNKHRDKPIREQAENIIHLFTLTNLGAPAAFKYFDTTIDRKRYTSTKEVLDATLIHQSITGLYETRIDLSQLGGDGGEAAAKPAPGSSGGLDDEYRLYSPLVKPDQNIQFWLEQFPQAWAETAGMGLAKQVPPQVIQLKASATPVSVRQYPLSKEAQEGIRPHVQRLIQQGILVPVQSPWNTPLLPVRKPGTNDYRPVQDLREVNKRVQDIHPTVPNPYNLLCALPPQRSWYTVLDLKDAFFCLRLHPTSQPLFAFEWRDPGTGRTGQLTWTRLPQGFKNSPTIFNEALHRDLANFRIQHPQVTLLQYVDDLLLAGATKQDCLEGTKALLLELSDLGYRASAKKAQICRREVTYLGYSLRDGQRWLTEARKKTVVQIPAPTTAKQVREFLGKAGFCRLFIPGFATLAAPLYPLTKPKGEFSWAPEHQKAFDAIKKALLSAPALALPDVTKPFTLYVDERKGVARGVLTQTLGPWRRPVAYLSKKLDPVASGWPVCLKAIAAVAILVKDADKLTLGQNITVIAPHALENIVRQPPDRWMTNARMTHYQSLLLTERVTFAPPAALNPATLLPEETDEPVTHDCHQLLIEETGVRKDLTDIPLTGEVLTWFTDGSSYVVEGKRMAGAAVVDGTRTIWASSLPEGTSAQKAELMALTQALRLAEGKSINIYTDSRYAFATAHVHGAIYKQRGWLTSAGREIKNKEEILSLLEALHLPKRLAIIHCPGHQKAKDPISRGNQMADRVAKQAAQGVNLLPAGKRTADGSEFEKRTADGSEFESPKKKAKVE

SEQ ID NO: 225 - protein, 2088 aa, synthetic construct
MPAAKRVKLDGGDKKYSIGLDIGTNSVGWAVITDEYKVPSKKFKVLGNTDRHSIKKNLIGALLFDSGETAEATRLKRTARRRYTRRKNRICYLQEIFSNEMAKVDDSFFHRLEESFLVEEDKKHERHPIFGNIVDEVAYHEKYPTIYHLRKKLVDSTDKADLRLIYLALAHMIKFRGHFLIEGDLNPDNSDVDKLFIQLVQTYNQLFEENPINASGVDAKAILSARLSKSRRLENLIAQLPGEKKNGLFGNLIALSLGLTPNFKSNFDLAEDAKLQLSKDTYDDDLDNLLAQIGDQYADLFLAAKNLSDAILLSDILRVNTEITKAPLSASMIKRYDEHHQDLTLLKALVRQQLPEKYKEIFFDQSKNGYAGYIDGGASQEEFYKFIKPILEKMDGTEELLVKLNREDLLRKQRTFDNGSIPHQIHLGELHAILRRQEDFYPFLKDNREKIEKILTFRIPYYVGPLARGNSRFAWMTRKSEETITPWNFEEVVDKGASAQSFIERMTNFDKNLPNEKVLPKHSLLYEYFTVYNELTKVKYVTEGMRKPAFLSGEQKKAIVDLLFKTNRKVTVKQLKEDYFKKIECFDSVEISGVEDRFNASLGTYHDLLKIIKDKDFLDNEENEDILEDIVLTLTLFEDREMIEERLKTYAHLFDDKVMKQLKRRRYTGWGRLSRKLINGIRDKQSGKTILDFLKSDGFANRNFMQLIHDDSLTFKEDIQKAQVSGQGDSLHEHIANLAGSPAIKKGILQTVKVVDELVKVMGRHKPENIVIEMARENQTTQKGQKNSRERMKRIEEGIKELGSQILKEHPVENTQLQNEKLYLYYLQNGRDMYVDQELDINRLSDYDVDHIVPQSFLKDDSIDNKVLTRSDKARGKSDNVPSEEVVKKMKNYWRQLLNAKLITQRKFDNLTKAERGGLSELDKAGFIKRQLVETRQITKHVAQILDSRMNTKYDENDKLIREVKVITLKSKLVSDFRKDFQFYKVREINNYHHAHDAYLNAVVGTALIKKYPKLESEFVYGDYKVYDVRKMIAKSEQEIGKATAKYFFYSNIMNFFKTEITLANGEIRKRPLIETNGETGEIVWDKGRDFATVRKVLSMPQVNIVKKTEVQTGGFSKESILPKRNSDKLIARKKDWDPKKYGGFDSPTVAYSVLVVAKVEKGKSKKLKSVKELLGITIMERSSFEKNPIDFLEAKGYKEVKKDLIIKLPKYSLFELENGRKRMLASAGELQKGNELALPSKYVNFLYLASHYEKLKGSPEDNEQKQLFVEQHKHYLDEIIEQISEFSKRVILADANLDKVLSAYNKHRDKPIREQAENIIHLFTLTNLGAPAAFKYFDTTIDRKRYTSTKEVLDATLIHQSITGLYETRIDLSQLGGDGGPAPGSSEAAAKGGLDDEYRLYSPLVKPDQNIQFWLEQFPQAWAETAGMGLAKQVPPQVIQLKASATPVSVRQYPLSKEAQEGIRPHVQRLIQQGILVPVQSPWNTPLLPVRKPGTNDYRPVQDLREVNKRVQDIHPTVPNPYNLLCALPPQRSWYTVLDLKDAFFCLRLHPTSQPLFAFEWRDPGTGRTGQLTWTRLPQGFKNSPTIFNEALHRDLANFRIQHPQVTLLQYVDDLLLAGATKQDCLEGTKALLLELSDLGYRASAKKAQICRREVTYLGYSLRDGQRWLTEARKKTVVQIPAPTTAKQVREFLGKAGFCRLFIPGFATLAAPLYPLTKPKGEFSWAPEHQKAFDAIKKALLSAPALALPDVTKPFTLYVDERKGVARGVLTQTLGPWRRPVAYLSKKLDPVASGWPVCLKAIAAVAILVKDADKLTLGQNITVIAPHALENIVRQPPDRWMTNARMTHYQSLLLTERVTFAPPAALNPATLLPEETDEPVTHDCHQLLIEETGVRKDLTDIPLTGEVLTWFTDGSSYVVEGKRMAGAAVVDGTRTIWASSLPEGTSAQKAELMALTQALRLAEGKSINIYTDSRYAFATAHVHGAIYKQRGWLTSAGREIKNKEEILSLLEALHLPKRLAIIHCPGHQKAKDPISRGNQMADRVAKQAAQGVNLLPAGKRTADGSEFEKRTADGSEFESPKKKAKVE

SEQ ID NO: 226 - protein, 2086 aa, synthetic construct
MPAAKRVKLDGGDKKYSIGLDIGTNSVGWAVITDEYKVPSKKFKVLGNTDRHSIKKNLIGALLFDSGETAEATRLKRTARRRYTRRKNRICYLQEIFSNEMAKVDDSFFHRLEESFLVEEDKKHERHPIFGNIVDEVAYHEKYPTIYHLRKKLVDSTDKADLRLIYLALAHMIKFRGHFLIEGDLNPDNSDVDKLFIQLVQTYNQLFEENPINASGVDAKAILSARLSKSRRLENLIAQLPGEKKNGLFGNLIALSLGLTPNFKSNFDLAEDAKLQLSKDTYDDDLDNLLAQIGDQYADLFLAAKNLSDAILLSDILRVNTEITKAPLSASMIKRYDEHHQDLTLLKALVRQQLPEKYKEIFFDQSKNGYAGYIDGGASQEEFYKFIKPILEKMDGTEELLVKLNREDLLRKQRTFDNGSIPHQIHLGELHAILRRQEDFYPFLKDNREKIEKILTFRIPYYVGPLARGNSRFAWMTRKSEETITPWNFEEVVDKGASAQSFIERMTNFDKNLPNEKVLPKHSLLYEYFTVYNELTKVKYVTEGMRKPAFLSGEQKKAIVDLLFKTNRKVTVKQLKEDYFKKIECFDSVEISGVEDRFNASLGTYHDLLKIIKDKDFLDNEENEDILEDIVLTLTLFEDREMIEERLKTYAHLFDDKVMKQLKRRRYTGWGRLSRKLINGIRDKQSGKTILDFLKSDGFANRNFMQLIHDDSLTFKEDIQKAQVSGQGDSLHEHIANLAGSPAIKKGILQTVKVVDELVKVMGRHKPENIVIEMARENQTTQKGQKNSRERMKRIEEGIKELGSQILKEHPVENTQLQNEKLYLYYLQNGRDMYVDQELDINRLSDYDVDHIVPQSFLKDDSIDNKVLTRSDKARGKSDNVPSEEVVKKMKNYWRQLLNAKLITQRKFDNLTKAERGGLSELDKAGFIKRQLVETRQITKHVAQILDSRMNTKYDENDKLIREVKVITLKSKLVSDFRKDFQFYKVREINNYHHAHDAYLNAVVGTALIKKYPKLESEFVYGDYKVYDVRKMIAKSEQEIGKATAKYFFYSNIMNFFKTEITLANGEIRKRPLIETNGETGEIVWDKGRDFATVRKVLSMPQVNIVKKTEVQTGGFSKESILPKRNSDKLIARKKDWDPKKYGGFDSPTVAYSVLVVAKVEKGKSKKLKSVKELLGITIMERSSFEKNPIDFLEAKGYKEVKKDLIIKLPKYSLFELENGRKRMLASAGELQKGNELALPSKYVNFLYLASHYEKLKGSPEDNEQKQLFVEQHKHYLDEIIEQISEFSKRVILADANLDKVLSAYNKHRDKPIREQAENIIHLFTLTNLGAPAAFKYFDTTIDRKRYTSTKEVLDATLIHQSITGLYETRIDLSQLGGDGGGGSGGSGGSGGLDDEYRLYSPLVKPDQNIQFWLEQFPQAWAETAGMGLAKQVPPQVIQLKASATPVSVRQYPLSKEAQEGIRPHVQRLIQQGILVPVQSPWNTPLLPVRKPGTNDYRPVQDLREVNKRVQDIHPTVPNPYNLLCALPPQRSWYTVLDLKDAFFCLRLHPTSQPLFAFEWRDPGTGRTGQLTWTRLPQGFKNSPTIFNEALHRDLANFRIQHPQVTLLQYVDDLLLAGATKQDCLEGTKALLLELSDLGYRASAKKAQICRREVTYLGYSLRDGQRWLTEARKKTVVQIPAPTTAKQVREFLGKAGFCRLFIPGFATLAAPLYPLTKPKGEFSWAPEHQKAFDAIKKALLSAPALALPDVTKPFTLYVDERKGVARGVLTQTLGPWRRPVAYLSKKLDPVASGWPVCLKAIAAVAILVKDADKLTLGQNITVIAPHALENIVRQPPDRWMTNARMTHYQSLLLTERVTFAPPAALNPATLLPEETDEPVTHDCHQLLIEETGVRKDLTDIPLTGEVLTWFTDGSSYVVEGKRMAGAAVVDGTRTIWASSLPEGTSAQKAELMALTQALRLAEGKSINIYTDSRYAFATAHVHGAIYKQRGWLTSAGREIKNKEEILSLLEALHLPKRLAIIHCPGHQKAKDPISRGNQMADRVAKQAAQGVNLLPAGKRTADGSEFEKRTADGSEFESPKKKAKVE

SEQ ID NO: 227 - protein, 2083 aa, synthetic construct; identical to SEQ ID NO: 78

SEQ ID NO: 228 - protein, 2089 aa, synthetic construct; identical to SEQ ID NO: 41

SEQ ID NO: 229 - protein, 2088 aa, synthetic construct; identical to SEQ ID NO: 65

SEQ ID NO: 230 - protein, 2088 aa, synthetic construct; identical to SEQ ID NO: 80

SEQ ID NO: 231 - protein, 2088 aa, synthetic construct
MPAAKRVKLDGGDKKYSIGLDIGTNSVGWAVITDEYKVPSKKFKVLGNTDRHSIKKNLIGALLFDSGETAEATRLKRTARRRYTRRKNRICYLQEIFSNEMAKVDDSFFHRLEESFLVEEDKKHERHPIFGNIVDEVAYHEKYPTIYHLRKKLVDSTDKADLRLIYLALAHMIKFRGHFLIEGDLNPDNSDVDKLFIQLVQTYNQLFEENPINASGVDAKAILSARLSKSRRLENLIAQLPGEKKNGLFGNLIALSLGLTPNFKSNFDLAEDAKLQLSKDTYDDDLDNLLAQIGDQYADLFLAAKNLSDAILLSDILRVNTEITKAPLSASMIKRYDEHHQDLTLLKALVRQQLPEKYKEIFFDQSKNGYAGYIDGGASQEEFYKFIKPILEKMDGTEELLVKLNREDLLRKQRTFDNGSIPHQIHLGELHAILRRQEDFYPFLKDNREKIEKILTFRIPYYVGPLARGNSRFAWMTRKSEETITPWNFEEVVDKGASAQSFIERMTNFDKNLPNEKVLPKHSLLYEYFTVYNELTKVKYVTEGMRKPAFLSGEQKKAIVDLLFKTNRKVTVKQLKEDYFKKIECFDSVEISGVEDRFNASLGTYHDLLKIIKDKDFLDNEENEDILEDIVLTLTLFEDREMIEERLKTYAHLFDDKVMKQLKRRRYTGWGRLSRKLINGIRDKQSGKTILDFLKSDGFANRNFMQLIHDDSLTFKEDIQKAQVSGQGDSLHEHIANLAGSPAIKKGILQTVKVVDELVKVMGRHKPENIVIEMARENQTTQKGQKNSRERMKRIEEGIKELGSQILKEHPVENTQLQNEKLYLYYLQNGRDMYVDQELDINRLSDYDVDHIVPQSFLKDDSIDNKVLTRSDKARGKSDNVPSEEVVKKMKNYWRQLLNAKLITQRKFDNLTKAERGGLSELDKAGFIKRQLVETRQITKHVAQILDSRMNTKYDENDKLIREVKVITLKSKLVSDFRKDFQFYKVREINNYHHAHDAYLNAVVGTALIKKYPKLESEFVYGDYKVYDVRKMIAKSEQEIGKATAKYFFYSNIMNFFKTEITLANGEIRKRPLIETNGETGEIVWDKGRDFATVRKVLSMPQVNIVKKTEVQTGGFSKESILPKRNSDKLIARKKDWDPKKYGGFDSPTVAYSVLVVAKVEKGKSKKLKSVKELLGITIMERSSFEKNPIDFLEAKGYKEVKKDLIIKLPKYSLFELENGRKRMLASAGELQKGNELALPSKYVNFLYLASHYEKLKGSPEDNEQKQLFVEQHKHYLDEIIEQISEFSKRVILADANLDKVLSAYNKHRDKPIREQAENIIHLFTLTNLGAPAAFKYFDTTIDRKRYTSTKEVLDATLIHQSITGLYETRIDLSQLGGDGGEAAAKGGGGGSGGLDDEYRLYSPLVKPDQNIQFWLEQFPQAWAETAGMGLAKQVPPQVIQLKASATPVSVRQYPLSKEAQEGIRPHVQRLIQQGILVPVQSPWNTPLLPVRKPGTNDYRPVQDLREVNKRVQDIHPTVPNPYNLLCALPPQRSWYTVLDLKDAFFCLRLHPTSQPLFAFEWRDPGTGRTGQLTWTRLPQGFKNSPTIFNEALHRDLANFRIQHPQVTLLQYVDDLLLAGATKQDCLEGTKALLLELSDLGYRASAKKAQICRREVTYLGYSLRDGQRWLTEARKKTVVQIPAPTTAKQVREFLGKAGFCRLFIPGFATLAAPLYPLTKPKGEFSWAPEHQKAFDAIKKALLSAPALALPDVTKPFTLYVDERKGVARGVLTQTLGPWRRPVAYLSKKLDPVASGWPVCLKAIAAVAILVKDADKLTLGQNITVIAPHALENIVRQPPDRWMTNARMTHYQSLLLTERVTFAPPAALNPATLLPEETDEPVTHDCHQLLIEETGVRKDLTDIPLTGEVLTWFTDGSSYVVEGKRMAGAAVVDGTRTIWASSLPEGTSAQKAELMALTQALRLAEGKSINIYTDSRYAFATAHVHGAIYKQRGWLTSAGREIKNKEEILSLLEALHLPKRLAIIHCPGHQKAKDPISRGNQMADRVAKQAAQGVNLLPAGKRTADGSEFEKRTADGSEFESPKKKAKVE

SEQ ID NO: 232 - protein, 2102 aa, synthetic construct; identical to SEQ ID NO: 39

SEQ ID NO: 233 - protein, 2085 aa, synthetic construct
MPAAKRVKLDGGDKKYSIGLDIGTNSVGWAVITDEYKVPSKKFKVLGNTDRHSIKKNLIGALLFDSGETAEATRLKRTARRRYTRRKNRICYLQEIFSNEMAKVDDSFFHRLEESFLVEEDKKHERHPIFGNIVDEVAYHEKYPTIYHLRKKLVDSTDKADLRLIYLALAHMIKFRGHFLIEGDLNPDNSDVDKLFIQLVQTYNQLFEENPINASGVDAKAILSARLSKSRRLENLIAQLPGEKKNGLFGNLIALSLGLTPNFKSNFDLAEDAKLQLSKDTYDDDLDNLLAQIGDQYADLFLAAKNLSDAILLSDILRVNTEITKAPLSASMIKRYDEHHQDLTLLKALVRQQLPEKYKEIFFDQSKNGYAGYIDGGASQEEFYKFIKPILEKMDGTEELLVKLNREDLLRKQRTFDNGSIPHQIHLGELHAILRRQEDFYPFLKDNREKIEKILTFRIPYYVGPLARGNSRFAWMTRKSEETITPWNFEEVVDKGASAQSFIERMTNFDKNLPNEKVLPKHSLLYEYFTVYNELTKVKYVTEGMRKPAFLSGEQKKAIVDLLFKTNRKVTVKQLKEDYFKKIECFDSVEISGVEDRFNASLGTYHDLLKIIKDKDFLDNEENEDILEDIVLTLTLFEDREMIEERLKTYAHLFDDKVMKQLKRRRYTGWGRLSRKLINGIRDKQSGKTILDFLKSDGFANRNFMQLIHDDSLTFKEDIQKAQVSGQGDSLHEHIANLAGSPAIKKGILQTVKVVDELVKVMGRHKPENIVIEMARENQTTQKGQKNSRERMKRIEEGIKELGSQILKEHPVENTQLQNEKLYLYYLQNGRDMYVDQELDINRLSDYDVDHIVPQSFLKDDSIDNKVLTRSDKARGKSDNVPSEEVVKKMKNYWRQLLNAKLITQRKFDNLTKAERGGLSELDKAGFIKRQLVETRQITKHVAQILDSRMNTKYDENDKLIREVKVITLKSKLVSDFRKDFQFYKVREINNYHHAHDAYLNAVVGTALIKKYPKLESEFVYGDYKVYDVRKMIAKSEQEIGKATAKYFFYSNIMNFFKTEITLANGEIRKRPLIETNGETGEIVWDKGRDFATVRKVLSMPQVNIVKKTEVQTGGFSKESILPKRNSDKLIARKKDWDPKKYGGFDSPTVAYSVLVVAKVEKGKSKKLKSVKELLGITIMERSSFEKNPIDFLEAKGYKEVKKDLIIKLPKYSLFELENGRKRMLASAGELQKGNELALPSKYVNFLYLASHYEKLKGSPEDNEQKQLFVEQHKHYLDEIIEQISEFSKRVILADANLDKVLSAYNKHRDKPIREQAENIIHLFTLTNLGAPAAFKYFDTTIDRKRYTSTKEVLDATLIHQSITGLYETRIDLSQLGGDGGEAAAKPAPGGLDDEYRLYSPLVKPDQNIQFWLEQFPQAWAETAGMGLAKQVPPQVIQLKASATPVSVRQYPLSKEAQEGIRPHVQRLIQQGILVPVQSPWNTPLLPVRKPGTNDYRPVQDLREVNKRVQDIHPTVPNPYNLLCALPPQRSWYTVLDLKDAFFCLRLHPTSQPLFAFEWRDPGTGRTGQLTWTRLPQGFKNSPTIFNEALHRDLANFRIQHPQVTLLQYVDDLLLAGATKQDCLEGTKALLLELSDLGYRASAKKAQICRREVTYLGYSLRDGQRWLTEARKKTVVQIPAPTTAKQVREFLGKAGFCRLFIPGFATLAAPLYPLTKPKGEFSWAPEHQKAFDAIKKALLSAPALALPDVTKPFTLYVDERKGVARGVLTQTLGPWRRPVAYLSKKLDPVASGWPVCLKAIAAVAILVKDADKLTLGQNITVIAPHALENIVRQPPDRWMTNARMTHYQSLLLTERVTFAPPAALNPATLLPEETDEPVTHDCHQLLIEETGVRKDLTDIPLTGEVLTWFTDGSSYVVEGKRMAGAAVVDGTRTIWASSLPEGTSAQKAELMALTQALRLAEGKSINIYTDSRYAFATAHVHGAIYKQRGWLTSAGREIKNKEEILSLLEALHLPKRLAIIHCPGHQKAKDPISRGNQMADRVAKQAAQGVNLLPAGKRTADGSEFEKRTADGSEFESPKKKAKVE

SEQ ID NO: 234 - protein, 2092 aa, synthetic construct; identical to SEQ ID NO: 56

SEQ ID NO: 235 - protein, 2083 aa, synthetic construct
MPAAKRVKLDGGDKKYSIGLDIGTNSVGWAVITDEYKVPSKKFKVLGNTDRHSIKKNLIGALLFDSGETAEATRLKRTARRRYTRRKNRICYLQEIFSNEMAKVDDSFFHRLEESFLVEEDKKHERHPIFGNIVDEVAYHEKYPTIYHLRKKLVDSTDKADLRLIYLALAHMIKFRGHFLIEGDLNPDNSDVDKLFIQLVQTYNQLFEENPINASGVDAKAILSARLSKSRRLENLIAQLPGEKKNGLFGNLIALSLGLTPNFKSNFDLAEDAKLQLSKDTYDDDLDNLLAQIGDQYADLFLAAKNLSDAILLSDILRVNTEITKAPLSASMIKRYDEHHQDLTLLKALVRQQLPEKYKEIFFDQSKNGYAGYIDGGASQEEFYKFIKPILEKMDGTEELLVKLNREDLLRKQRTFDNGSIPHQIHLGELHAILRRQEDFYPFLKDNREKIEKILTFRIPYYVGPLARGNSRFAWMTRKSEETITPWNFEEVVDKGASAQSFIERMTNFDKNLPNEKVLPKHSLLYEYFTVYNELTKVKYVTEGMRKPAFLSGEQKKAIVDLLFKTNRKVTVKQLKEDYFKKIECFDSVEISGVEDRFNASLGTYHDLLKIIKDKDFLDNEENEDILEDIVLTLTLFEDREMIEERLKTYAHLFDDKVMKQLKRRRYTGWGRLSRKLINGIRDKQSGKTILDFLKSDGFANRNFMQLIHDDSLTFKEDIQKAQVSGQGDSLHEHIANLAGSPAIKKGILQTVKVVDELVKVMGRHKPENIVIEMARENQTTQKGQKNSRERMKRIEEGIKELGSQILKEHPVENTQLQNEKLYLYYLQNGRDMYVDQELDINRLSDYDVDHIVPQSFLKDDSIDNKVLTRSDKARGKSDNVPSEEVVKKMKNYWRQLLNAKLITQRKFDNLTKAERGGLSELDKAGFIKRQLVETRQITKHVAQILDSRMNTKYDENDKLIREVKVITLKSKLVSDFRKDFQFYKVREINNYHHAHDAYLNAVVGTALIKKYPKLESEFVYGDYKVYDVRKMIAKSEQEIGKATAKYFFYSNIMNFFKTEITLANGEIRKRPLIETNGETGEIVWDKGRDFATVRKVLSMPQVNIVKKTEVQTGGFSKESILPKRNSDKLIARKKDWDPKKYGGFDSPTVAYSVLVVAKVEKGKSKKLKSVKELLGITIMERSSFEKNPIDFLEAKGYKEVKKDLIIKLPKYSLFELENGRKRMLASAGELQKGNELALPSKYVNFLYLASHYEKLKGSPEDNEQKQLFVEQHKHYLDEIIEQISEFSKRVILADANLDKVLSAYNKHRDKPIREQAENIIHLFTLTNLGAPAAFKYFDTTIDRKRYTSTKEVLDATLIHQSITGLYETRIDLSQLGGDGGGSSGSSGGLDDEYRLYSPLVKPDQNIQFWLEQFPQAWAETAGMGLAKQVPPQVIQLKASATPVSVRQYPLSKEAQEGIRPHVQRLIQQGILVPVQSPWNTPLLPVRKPGTNDYRPVQDLREVNKRVQDIHPTVPNPYNLLCALPPQRSWYTVLDLKDAFFCLRLHPTSQPLFAFEWRDPGTGRTGQLTWTRLPQGFKNSPTIFNEALHRDLANFRIQHPQVTLLQYVDDLLLAGATKQDCLEGTKALLLELSDLGYRASAKKAQICRREVTYLGYSLRDGQRWLTEARKKTVVQIPAPTTAKQVREFLGKAGFCRLFIPGFATLAAPLYPLTKPKGEFSWAPEHQKAFDAIKKALLSAPALALPDVTKPFTLYVDERKGVARGVLTQTLGPWRRPVAYLSKKLDPVASGWPVCLKAIAAVAILVKDADKLTLGQNITVIAPHALENIVRQPPDRWMTNARMTHYQSLLLTERVTFAPPAALNPATLLPEETDEPVTHDCHQLLIEETGVRKDLTDIPLTGEVLTWFTDGSSYVVEGKRMAGAAVVDGTRTIWASSLPEGTSAQKAELMALTQALRLAEGKSINIYTDSRYAFATAHVHGAIYKQRGWLTSAGREIKNKEEILSLLEALHLPKRLAIIHCPGHQKAKDPISRGNQMADRVAKQAAQGVNLLPAGKRTADGSEFEKRTADGSEFESPKKKAKVE

SEQ ID NO: 236 - protein, 2089 aa, synthetic construct; identical to SEQ ID NO: 67

SEQ ID NO: 237 - protein, 2085 aa, synthetic construct
MPAAKRVKLDGGDKKYSIGLDIGTNSVGWAVITDEYKVPSKKFKVLGNTDRHSIKKNLIGALLFDSGETAEATRLKRTARRRYTRRKNRICYLQEIFSNEMAKVDDSFFHRLEESFLVEEDKKHERHPIFGNIVDEVAYHEKYPTIYHLRKKLVDSTDKADLRLIYLALAHMIKFRGHFLIEGDLNPDNSDVDKLFIQLVQTYNQLFEENPINASGVDAKAILSARLSKSRRLENLIAQLPGEKKNGLFGNLIALSLGLTPNFKSNFDLAEDAKLQLSKDTYDDDLDNLLAQIGDQYADLFLAAKNLSDAILLSDILRVNTEITKAPLSASMIKRYDEHHQDLTLLKALVRQQLPEKYKEIFFDQSKNGYAGYIDGGASQEEFYKFIKPILEKMDGTEELLVKLNREDLLRKQRTFDNGSIPHQIHLGELHAILRRQEDFYPFLKDNREKIEKILTFRIPYYVGPLARGNSRFAWMTRKSEETITPWNFEEVVDKGASAQSFIERMTNFDKNLPNEKVLPKHSLLYEYFTVYNELTKVKYVTEGMRKPAFLSGEQKKAIVDLLFKTNRKVTVKQLKEDYFKKIECFDSVEISGVEDRFNASLGTYHDLLKIIKDKDFLDNEENEDILEDIVLTLTLFEDREMIEERLKTYAHLFDDKVMKQLKRRRYTGWGRLSRKLINGIRDKQSGKTILDFLKSDGFANRNFMQLIHDDSLTFKEDIQKAQVSGQGDSLHEHIANLAGSPAIKKGILQTVKVVDELVKVMGRHKPENIVIEMARENQTTQKGQKNSRERMKRIEEGIKELGSQILKEHPVENTQLQNEKLYLYYLQNGRDMYVDQELDINRLSDYDVDHIVPQSFLKDDSIDNKVLTRSDKARGKSDNVPSEEVVKKMKNYWRQLLNAKLITQRKFDNLTKAERGGLSELDKAGFIKRQLVETRQITKHVAQILDSRMNTKYDENDKLIREVKVITLKSKLVSDFRKDFQFYKVREINNYHHAHDAYLNAVVGTALIKKYPKLESEFVYGDYKVYDVRKMIAKSEQEIGKATAKYFFYSNIMNFFKTEITLANGEIRKRPLIETNGETGEIVWDKGRDFATVRKVLSMPQVNIVKKTEVQTGGFSKESILPKRNSDKLIARKKDWDPKKYGGFDSPTVAYSVLVVAKVEKGKSKKLKSVKELLGITIMERSSFEKNPIDFLEAKGYKEVKKDLIIKLPKYSLFELENGRKRMLASAGELQKGNELALPSKYVNFLYLASHYEKLKGSPEDNEQKQLFVEQHKHYLDEIIEQISEFSKRVILADANLDKVLSAYNKHRDKPIREQAENIIHLFTLTNLGAPAAFKYFDTTIDRKRYTSTKEVLDATLIHQSITGLYETRIDLSQLGGDGGGSSEAAAKGGLDDEYRLYSPLVKPDQNIQFWLEQFPQAWAETAGMGLAKQVPPQVIQLKASATPVSVRQYPLSKEAQEGIRPHVQRLIQQGILVPVQSPWNTPLLPVRKPGTNDYRPVQDLREVNKRVQDIHPTVPNPYNLLCALPPQRSWYTVLDLKDAFFCLRLHPTSQPLFAFEWRDPGTGRTGQLTWTRLPQGFKNSPTIFNEALHRDLANFRIQHPQVTLLQYVDDLLLAGATKQDCLEGTKALLLELSDLGYRASAKKAQICRREVTYLGYSLRDGQRWLTEARKKTVVQIPAPTTAKQVREFLGKAGFCRLFIPGFATLAAPLYPLTKPKGEFSWAPEHQKAFDAIKKALLSAPALALPDVTKPFTLYVDERKGVARGVLTQTLGPWRRPVAYLSKKLDPVASGWPVCLKAIAAVAILVKDADKLTLGQNITVIAPHALENIVRQPPDRWMTNARMTHYQSLLLTERVTFAPPAALNPATLLPEETDEPVTHDCHQLLIEETGVRKDLTDIPLTGEVLTWFTDGSSYVVEGKRMAGAAVVDGTRTIWASSLPEGTSAQKAELMALTQALRLAEGKSINIYTDSRYAFATAHVHGAIYKQRGWLTSAGREIKNKEEILSLLEALHLPKRLAIIHCPGHQKAKDPISRGNQMADRVAKQAAQGVNLLPAGKRTADGSEFEKRTADGSEFESPKKKAKVE

SEQ ID NO: 238 - protein, 2092 aa, synthetic construct; identical to SEQ ID NO: 52

SEQ ID NO: 239 - protein, 2088 aa, synthetic construct; identical to SEQ ID NO: 49

SEQ ID NO: 240 - protein, 2088 aa, synthetic construct
MPAAKRVKLDGGDKKYSIGLDIGTNSVGWAVITDEYKVPSKKFKVLGNTDRHSIKKNLIGALLFDSGETAEATRLKRTARRRYTRRKNRICYLQEIFSNEMAKVDDSFFHRLEESFLVEEDKKHERHPIFGNIVDEVAYHEKYPTIYHLRKKLVDSTDKADLRLIYLALAHMIKFRGHFLIEGDLNPDNSDVDKLFIQLVQTYNQLFEENPINASGVDAKAILSARLSKSRRLENLIAQLPGEKKNGLFGNLIALSLGLTPNFKSNFDLAEDAKLQLSKDTYDDDLDNLLAQIGDQYADLFLAAKNLSDAILLSDILRVNTEITKAPLSASMIKRYDEHHQDLTLLKALVRQQLPEKYKEIFFDQSKNGYAGYIDGGASQEEFYKFIKPILEKMDGTEELLVKLNREDLLRKQRTFDNGSIPHQIHLGELHAILRRQEDFYPFLKDNREKIEKILTFRIPYYVGPLARGNSRFAWMTRKSEETITPWNFEEVVDKGASAQSFIERMTNFDKNLPNEKVLPKHSLLYEYFTVYNELTKVKYVTEGMRKPAFLSGEQKKAIVDLLFKTNRKVTVKQLKEDYFKKIECFDSVEISGVEDRFNASLGTYHDLLKIIKDKDFLDNEENEDILEDIVLTLTLFEDREMIEERLKTYAHLFDDKVMKQLKRRRYTGWGRLSRKLINGIRDKQSGKTILDFLKSDGFANRNFMQLIHDDSLTFKEDIQKAQVSGQGDSLHEHIANLAGSPAIKKGILQTVKVVDELVKVMGRHKPENIVIEMARENQTTQKGQKNSRERMKRIEEGIKELGSQILKEHPVENTQLQNEKLYLYYLQNGRDMYVDQELDINRLSDYDVDHIVPQSFLKDDSIDNKVLTRSDKARGKSDNVPSEEVVKKMKNYWRQLLNAKLITQRKFDNLTKAERGGLSELDKAGFIKRQLVETRQITKHVAQILDSRMNTKYDENDKLIREVKVITLKSKLVSDFRKDFQFYKVREINNYHHAHDAYLNAVVGTALIKKYPKLESEFVYGDYKVYDVRKMIAKSEQEIGKATAKYFFYSNIMNFFKTEITLANGEIRKRPLIETNGETGEIVWDKGRDFATVRKVLSMPQVNIVKKTEVQTGGFSKESILPKRNSDKLIARKKDWDPKKYGGFDSPTVAYSVLVVAKVEKGKSKKLKSVKELLGITIMERSSFEKNPIDFLEAKGYKEVKKDLIIKLPKYSLFELENGRKRMLASAGELQKGNELALPSKYVNFLYLASHYEKLKGSPEDNEQKQLFVEQHKHYLDEIIEQISEFSKRVILADANLDKVLSAYNKHRDKPIREQAENIIHLFTLTNLGAPAAFKYFDTTIDRKRYTSTKEVLDATLIHQSITGLYETRIDLSQLGGDGGGGGEAAAKGSSGGLDDEYRLYSPLVKPDQNIQFWLEQFPQAWAETAGMGLAKQVPPQVIQLKASATPVSVRQYPLSKEAQEGIRPHVQRLIQQGILVPVQSPWNTPLLPVRKPGTNDYRPVQDLREVNKRVQDIHPTVPNPYNLLCALPPQRSWYTVLDLKDAFFCLRLHPTSQPLFAFEWRDPGTGRTGQLTWTRLPQGFKNSPTIFNEALHRDLANFRIQHPQVTLLQYVDDLLLAGATKQDCLEGTKALLLELSDLGYRASAKKAQICRREVTYLGYSLRDGQRWLTEARKKTVVQIPAPTTAKQVREFLGKAGFCRLFIPGFATLAAPLYPLTKPKGEFSWAPEHQKAFDAIKKALLSAPALALPDVTKPFTLYVDERKGVARGVLTQTLGPWRRPVAYLSKKLDPVASGWPVCLKAIAAVAILVKDADKLTLGQNITVIAPHALENIVRQPPDRWMTNARMTHYQSLLLTERVTFAPPAALNPATLLPEETDEPVTHDCHQLLIEETGVRKDLTDIPLTGEVLTWFTDGSSYVVEGKRMAGAAVVDGTRTIWASSLPEGTSAQKAELMALTQALRLAEGKSINIYTDSRYAFATAHVHGAIYKQRGWLTSAGREIKNKEEILSLLEALHLPKRLAIIHCPGHQKAKDPISRGNQMADRVAKQAAQGVNLLPAGKRTADGSEFEKRTADGSEFESPKKKAKVE

SEQ ID NO: 241 - protein, 2086 aa, synthetic construct
MPAAKRVKLDGGDKKYSIGLDIGTNSVGWAVITDEYKVPSKKFKVLGNTDRHSIKKNLIGALLFDSGETAEATRLKRTARRRYTRRKNRICYLQEIFSNEMAKVDDSFFHRLEESFLVEEDKKHERHPIFGNIVDEVAYHEKYPTIYHLRKKLVDSTDKADLRLIYLALAHMIKFRGHFLIEGDLNPDNSDVDKLFIQLVQTYNQLFEENPINASGVDAKAILSARLSKSRRLENLIAQLPGEKKNGLFGNLIALSLGLTPNFKSNFDLAEDAKLQLSKDTYDDDLDNLLAQIGDQYADLFLAAKNLSDAILLSDILRVNTEITKAPLSASMIKRYDEHHQDLTLLKALVRQQLPEKYKEIFFDQSKNGYAGYIDGGASQEEFYKFIKPILEKMDGTEELLVKLNREDLLRKQRTFDNGSIPHQIHLGELHAILRRQEDFYPFLKDNREKIEKILTFRIPYYVGPLARGNSRFAWMTRKSEETITPWNFEEVVDKGASAQSFIERMTNFDKNLPNEKVLPKHSLLYEYFTVYNELTKVKYVTEGMRKPAFLSGEQKKAIVDLLFKTNRKVTVKQLKEDYFKKIECFDSVEISGVEDRFNASLGTYHDLLKIIKDKDFLDNEENEDILEDIVLTLTLFEDREMIEERLKTYAHLFDDKVMKQLKRRRYTGWGRLSRKLINGIRDKQSGKTILDFLKSDGFANRNFMQLIHDDSLTFKEDIQKAQVSGQGDSLHEHIANLAGSPAIKKGILQTVKVVDELVKVMGRHKPENIVIEMARENQTTQKGQKNSRERMKRIEEGIKELGSQILKEHPVENTQLQNEKLYLYYLQNGRDMYVDQELDINRLSDYDVDHIVPQSFLKDDSIDNKVLTRSDKARGKSDNVPSEEVVKKMKNYWRQLLNAKLITQRKFDNLTKAERGGLSELDKAGFIKRQLVETRQITKHVAQILDSRMNTKYDENDKLIREVKVITLKSKLVSDFRKDFQFYKVREINNYHHAHDAYLNAVVGTALIKKYPKLESEFVYGDYKVYDVRKMIAKSEQEIGKATAKYFFYSNIMNFFKTEITLANGEIRKRPLIETNGETGEIVWDKGRDFATVRKVLSMPQVNIVKKTEVQTGGFSKESILPKRNSDKLIARKKDWDPKKYGGFDSPTVAYSVLVVAKVEKGKSKKLKSVKELLGITIMERSSFEKNPIDFLEAKGYKEVKKDLIIKLPKYSLFELENGRKRMLASAGELQKGNELALPSKYVNFLYLASHYEKLKGSPEDNEQKQLFVEQHKHYLDEIIEQISEFSKRVILADANLDKVLSAYNKHRDKPIREQAENIIHLFTLTNLGAPAAFKYFDTTIDRKRYTSTKEVLDATLIHQSITGLYETRIDLSQLGGDGGGGSGSSGGGGGLDDEYRLYSPLVKPDQNIQFWLEQFPQAWAETAGMGLAKQVPPQVIQLKASATPVSVRQYPLSKEAQEGIRPHVQRLIQQGILVPVQSPWNTPLLPVRKPGTNDYRPVQDLREVNKRVQDIHPTVPNPYNLLCALPPQRSWYTVLDLKDAFFCLRLHPTSQPLFAFEWRDPGTGRTGQLTWTRLPQGFKNSPTIFNEALHRDLANFRIQHPQVTLLQYVDDLLLAGATKQDCLEGTKALLLELSDLGYRASAKKAQICRREVTYLGYSLRDGQRWLTEARKKTVVQIPAPTTAKQVREFLGKAGFCRLFIPGFATLAAPLYPLTKPKGEFSWAPEHQKAFDAIKKALLSAPALALPDVTKPFTLYVDERKGVARGVLTQTLGPWRRPVAYLSKKLDPVASGWPVCLKAIAAVAILVKDADKLTLGQNITVIAPHALENIVRQPPDRWMTNARMTHYQSLLLTERVTFAPPAALNPATLLPEETDEPVTHDCHQLLIEETGVRKDLTDIPLTGEVLTWFTDGSSYVVEGKRMAGAAVVDGTRTIWASSLPEGTSAQKAELMALTQALRLAEGKSINIYTDSRYAFATAHVHGAIYKQRGWLTSAGREIKNKEEILSLLEALHLPKRLAIIHCPGHQKAKDPISRGNQMADRVAKQAAQGVNLLPAGKRTADGSEFEKRTADGSEFESPKKKAKVE

SEQ ID NO: 242 - protein, 2088 aa, synthetic construct
MPAAKRVKLDGGDKKYSIGLDIGTNSVGWAVITDEYKVPSKKFKVLGNTDRHSIKKNLIGALLFDSGETAEATRLKRTARRRYTRRKNRICYLQEIFSNEMAKVDDSFFHRLEESFLVEEDKKHERHPIFGNIVDEVAYHEKYPTIYHLRKKLVDSTDKADLRLIYLALAHMIKFRGHFLIEGDLNPDNSDVDKLFIQLVQTYNQLFEENPINASGVDAKAILSARLSKSRRLENLIAQLPGEKKNGLFGNLIALSLGLTPNFKSNFDLAEDAKLQLSKDTYDDDLDNLLAQIGDQYADLFLAAKNLSDAILLSDILRVNTEITKAPLSASMIKRYDEHHQDLTLLKALVRQQLPEKYKEIFFDQSKNGYAGYIDGGASQEEFYKFIKPILEKMDGTEELLVKLNREDLLRKQRTFDNGSIPHQIHLGELHAILRRQEDFYPFLKDNREKIEKILTFRIPYYVGPLARGNSRFAWMTRKSEETITPWNFEEVVDKGASAQSFIERMTNFDKNLPNEKVLPKHSLLYEYFTVYNELTKVKYVTEGMRKPAFLSGEQKKAIVDLLFKTNRKVTVKQLKEDYFKKIECFDSVEISGVEDRFNASLGTYHDLLKIIKDKDFLDNEENEDILEDIVLTLTLFEDREMIEERLKTYAHLFDDKVMKQLKRRRYTGWGRLSRKLINGIRDKQSGKTILDFLKSDGFANRNFMQLIHDDSLTFKEDIQKAQVSGQGDSLHEHIANLAGSPAIKKGILQTVKVVDELVKVMGRHKPENIVIEMARENQTTQKGQKNSRERMKRIEEGIKELGSQILKEHPVENTQLQNEKLYLYYLQNGRDMYVDQELDINRLSDYDVDHIVPQSFLKDDSIDNKVLTRSDKARGKSDNVPSEEVVKKMKNYWRQLLNAKLITQRKFDNLTKAERGGLSELDKAGFIKRQLVETRQITKHVAQILDSRMNTKYDENDKLIREVKVITLKSKLVSDFRKDFQFYKVREINNYHHAHDAYLNAVVGTALIKKYPKLESEFVYGDYKVYDVRKMIAKSEQEIGKATAKYFFYSNIMNFFKTEITLANGEIRKRPLIETNGETGEIVWDKGRDFATVRKVLSMPQVNIVKKTEVQTGGFSKESILPKRNSDKLIARKKDWDPKKYGGFDSPTVAYSVLVVAKVEKGKSKKLKSVKELLGITIMERSSFEKNPIDFLEAKGYKEVKKDLIIKLPKYSLFELENGRKRMLASAGELQKGNELALPSKYVNFLYLASHYEKLKGSPEDNEQKQLFVEQHKHYLDEIIEQISEFSKRVILADANLDKVLSAYNKHRDKPIREQAENIIHLFTLTNLGAPAAFKYFDTTIDRKRYTSTKEVLDATLIHQSITGLYETRIDLSQLGGDGGEAAAKGSSPAPGGLDDEYRLYSPLVKPDQNIQFWLEQFPQAWAETAGMGLAKQVPPQVIQLKASATPVSVRQYPLSKEAQEGIRPHVQRLIQQGILVPVQSPWNTPLLPVRKPGTNDYRPVQDLREVNKRVQDIHPTVPNPYNLLCALPPQRSWYTVLDLKDAFFCLRLHPTSQPLFAFEWRDPGTGRTGQLTWTRLPQGFKNSPTIFNEALHRDLANFRIQHPQVTLLQYVDDLLLAGATKQDCLEGTKALLLELSDLGYRASAKKAQICRREVTYLGYSLRDGQRWLTEARKKTVVQIPAPTTAKQVREFLGKAGFCRLFIPGFATLAAPLYPLTKPKGEFSWAPEHQKAFDAIKKALLSAPALALPDVTKPFTLYVDERKGVARGVLTQTLGPWRRPVAYLSKKLDPVASGWPVCLKAIAAVAILVKDADKLTLGQNITVIAPHALENIVRQPPDRWMTNARMTHYQSLLLTERVTFAPPAALNPATLLPEETDEPVTHDCHQLLIEETGVRKDLTDIPLTGEVLTWFTDGSSYVVEGKRMAGAAVVDGTRTIWASSLPEGTSAQKAELMALTQALRLAEGKSINIYTDSRYAFATAHVHGAIYKQRGWLTSAGREIKNKEEILSLLEALHLPKRLAIIHCPGHQKAKDPISRGNQMADRVAKQAAQGVNLLPAGKRTADGSEFEKRTADGSEFESPKKKAKVE

SEQ ID NO: 243 - protein, 2088 aa, synthetic construct
MPAAKRVKLDGGDKKYSIGLDIGTNSVGWAVITDEYKVPSKKFKVLGNTDRHSIKKNLIGALLFDSGETAEATRLKRTARRRYTRRKNRICYLQEIFSNEMAKVDDSFFHRLEESFLVEEDKKHERHPIFGNIVDEVAYHEKYPTIYHLRKKLVDSTDKADLRLIYLALAHMIKFRGHFLIEGDLNPDNSDVDKLFIQLVQTYNQLFEENPINASGVDAKAILSARLSKSRRLENLIAQLPGEKKNGLFGNLIALSLGLTPNFKSNFDLAEDAKLQLSKDTYDDDLDNLLAQIGDQYADLFLAAKNLSDAILLSDILRVNTEITKAPLSASMIKRYDEHHQDLTLLKALVRQQLPEKYKEIFFDQSKNGYAGYIDGGASQEEFYKFIKPILEKMDGTEELLVKLNREDLLRKQRTFDNGSIPHQIHLGELHAILRRQEDFYPFLKDNREKIEKILTFRIPYYVGPLARGNSRFAWMTRKSEETITPWNFEEVVDKGASAQSFIERMTNFDKNLPNEKVLPKHSLLYEYFTVYNELTKVKYVTEGMRKPAFLSGEQKKAIVDLLFKTNRKVTVKQLKEDYFKKIECFDSVEISGVEDRFNASLGTYHDLLKIIKDKDFLDNEENEDILEDIVLTLTLFEDREMIEERLKTYAHLFDDKVMKQLKRRRYTGWGRLSRKLINGIRDKQSGKTILDFLKSDGFANRNFMQLIHDDSLTFKEDIQKAQVSGQGDSLHEHIANLAGSPAIKKGILQTVKVVDELVKVMGRHKPENIVIEMARENQTTQKGQKNSRERMKRIEEGIKELGSQILKEHPVENTQLQNEKLYLYYLQNGRDMYVDQELDINRLSDYDVDHIVPQSFLKDDSIDNKVLTRSDKARGKSDNVPSEEVVKKMKNYWRQLLNAKLITQRKFDNLTKAERGGLSELDKAGFIKRQLVETRQITKHVAQILDSRMNTKYDENDKLIREVKVITLKSKLVSDFRKDFQFYKVREINNYHHAHDAYLNAVVGTALIKKYPKLESEFVYGDYKVYDVRKMIAKSEQEIGKATAKYFFYSNIMNFFKTEITLANGEIRKRPLIETNGETGEIVWDKGRDFATVRKVLSMPQVNIVKKTEVQTGGFSKESILPKRNSDKLIARKKDWDPKKYGGFDSPTVAYSVLVVAKVEKGKSKKLKSVKELLGITIMERSSFEKNPIDFLEAKGYKEVKKDLIIKLPKYSLFELENGRKRMLASAGELQKGNELALPSKYVNFLYLASHYEKLKGSPEDNEQKQLFVEQHKHYLDEIIEQISEFSKRVILADANLDKVLSAYNKHRDKPIREQAENIIHLFTLTNLGAPAAFKYFDTTIDRKRYTSTKEVLDATLIHQSITGLYETRIDLSQLGGDGGGGSPAPEAAAKGGLDDEYRLYSPLVKPDQNIQFWLEQFPQAWAETAGMGLAKQVPPQVIQLKASATPVSVRQYPLSKEAQEGIRPHVQRLIQQGILVPVQSPWNTPLLPVRKPGTNDYRPVQDLREVNKRVQDIHPTVPNPYNLLCALPPQRSWYTVLDLKDAFFCLRLHPTSQPLFAFEWRDPGTGRTGQLTWTRLPQGFKNSPTIFNEALHRDLANFRIQHPQVTLLQYVDDLLLAGATKQDCLEGTKALLLELSDLGYRASAKKAQICRREVTYLGYSLRDGQRWLTEARKKTVVQIPAPTTAKQVREFLGKAGFCRLFIPGFATLAAPLYPLTKPKGEFSWAPEHQKAFDAIKKALLSAPALALPDVTKPFTLYVDERKGVARGVLTQTLGPWRRPVAYLSKKLDPVASGWPVCLKAIAAVAILVKDADKLTLGQNITVIAPHALENIVRQPPDRWMTNARMTHYQSLLLTERVTFAPPAALNPATLLPEETDEPVTHDCHQLLIEETGVRKDLTDIPLTGEVLTWFTDGSSYVVEGKRMAGAAVVDGTRTIWASSLPEGTSAQKAELMALTQALRLAEGKSINIYTDSRYAFATAHVHGAIYKQRGWLTSAGREIKNKEEILSLLEALHLPKRLAIIHCPGHQKAKDPISRGNQMADRVAKQAAQGVNLLPAGKRTADGSEFEKRTADGSEFESPKKKAKVE

SEQ ID NO: 244 - protein, 2084 aa, synthetic construct; identical to SEQ ID NO: 77

SEQ ID NO: 245 - protein, 2081 aa, synthetic construct; identical to SEQ ID NO: 66

SEQ ID NO: 246 - protein, 2080 aa, synthetic construct
MPAAKRVKLDGGDKKYSIGLDIGTNSVGWAVITDEYKVPSKKFKVLGNTDRHSIKKNLIGALLFDSGETAEATRLKRTARRRYTRRKNRICYLQEIFSNEMAKVDDSFFHRLEESFLVEEDKKHERHPIFGNIVDEVAYHEKYPTIYHLRKKLVDSTDKADLRLIYLALAHMIKFRGHFLIEGDLNPDNSDVDKLFIQLVQTYNQLFEENPINASGVDAKAILSARLSKSRRLENLIAQLPGEKKNGLFGNLIALSLGLTPNFKSNFDLAEDAKLQLSKDTYDDDLDNLLAQIGDQYADLFLAAKNLSDAILLSDILRVNTEITKAPLSASMIKRYDEHHQDLTLLKALVRQQLPEKYKEIFFDQSKNGYAGYIDGGASQEEFYKFIKPILEKMDGTEELLVKLNREDLLRKQRTFDNGSIPHQIHLGELHAILRRQEDFYPFLKDNREKIEKILTFRIPYYVGPLARGNSRFAWMTRKSEETITPWNFEEVVDKGASAQSFIERMTNFDKNLPNEKVLPKHSLLYEYFTVYNELTKVKYVTEGMRKPAFLSGEQKKAIVDLLFKTNRKVTVKQLKEDYFKKIECFDSVEISGVEDRFNASLGTYHDLLKIIKDKDFLDNEENEDILEDIVLTLTLFEDREMIEERLKTYAHLFDDKVMKQLKRRRYTGWGRLSRKLINGIRDKQSGKTILDFLKSDGFANRNFMQLIHDDSLTFKEDIQKAQVSGQGDSLHEHIANLAGSPAIKKGILQTVKVVDELVKVMGRHKPENIVIEMARENQTTQKGQKNSRERMKRIEEGIKELGSQILKEHPVENTQLQNEKLYLYYLQNGRDMYVDQELDINRLSDYDVDHIVPQSFLKDDSIDNKVLTRSDKARGKSDNVPSEEVVKKMKNYWRQLLNAKLITQRKFDNLTKAERGGLSELDKAGFIKRQLVETRQITKHVAQILDSRMNTKYDENDKLIREVKVITLKSKLVSDFRKDFQFYKVREINNYHHAHDAYLNAVVGTALIKKYPKLESEFVYGDYKVYDVRKMIAKSEQEIGKATAKYFFYSNIMNFFKTEITLANGEIRKRPLIETNGETGEIVWDKGRDFATVRKVLSMPQVNIVKKTEVQTGGFSKESILPKRNSDKLIARKKDWDPKKYGGFDSPTVAYSVLVVAKVEKGKSKKLKSVKELLGITIMERSSFEKNPIDFLEAKGYKEVKKDLIIKLPKYSLFELENGRKRMLASAGELQKGNELALPSKYVNFLYLASHYEKLKGSPEDNEQKQLFVEQHKHYLDEIIEQISEFSKRVILADANLDKVLSAYNKHRDKPIREQAENIIHLFTLTNLGAPAAFKYFDTTIDRKRYTSTKEVLDATLIHQSITGLYETRIDLSQLGGDGGGGGGGLDDEYRLYSPLVKPDQNIQFWLEQFPQAWAETAGMGLAKQVPPQVIQLKASATPVSVRQYPLSKEAQEGIRPHVQRLIQQGILVPVQSPWNTPLLPVRKPGTNDYRPVQDLREVNKRVQDIHPTVPNPYNLLCALPPQRSWYTVLDLKDAFFCLRLHPTSQPLFAFEWRDPGTGRTGQLTWTRLPQGFKNSPTIFNEALHRDLANFRIQHPQVTLLQYVDDLLLAGATKQDCLEGTKALLLELSDLGYRASAKKAQICRREVTYLGYSLRDGQRWLTEARKKTVVQIPAPTTAKQVREFLGKAGFCRLFIPGFATLAAPLYPLTKPKGEFSWAPEHQKAFDAIKKALLSAPALALPDVTKPFTLYVDERKGVARGVLTQTLGPWRRPVAYLSKKLDPVASGWPVCLKAIAAVAILVKDADKLTLGQNITVIAPHALENIVRQPPDRWMTNARMTHYQSLLLTERVTFAPPAALNPATLLPEETDEPVTHDCHQLLIEETGVRKDLTDIPLTGEVLTWFTDGSSYVVEGKRMAGAAVVDGTRTIWASSLPEGTSAQKAELMALTQALRLAEGKSINIYTDSRYAFATAHVHGAIYKQRGWLTSAGREIKNKEEILSLLEALHLPKRLAIIHCPGHQKAKDPISRGNQMADRVAKQAAQGVNLLPAGKRTADGSEFEKRTADGSEFESPKKKAKVE

SEQ ID NO: 247 - protein, 2088 aa, synthetic construct
MPAAKRVKLDGGDKKYSIGLDIGTNSVGWAVITDEYKVPSKKFKVLGNTDRHSIKKNLIGALLFDSGETAEATRLKRTARRRYTRRKNRICYLQEIFSNEMAKVDDSFFHRLEESFLVEEDKKHERHPIFGNIVDEVAYHEKYPTIYHLRKKLVDSTDKADLRLIYLALAHMIKFRGHFLIEGDLNPDNSDVDKLFIQLVQTYNQLFEENPINASGVDAKAILSARLSKSRRLENLIAQLPGEKKNGLFGNLIALSLGLTPNFKSNFDLAEDAKLQLSKDTYDDDLDNLLAQIGDQYADLFLAAKNLSDAILLSDILRVNTEITKAPLSASMIKRYDEHHQDLTLLKALVRQQLPEKYKEIFFDQSKNGYAGYIDGGASQEEFYKFIKPILEKMDGTEELLVKLNREDLLRKQRTFDNGSIPHQIHLGELHAILRRQEDFYPFLKDNREKIEKILTFRIPYYVGPLARGNSRFAWMTRKSEETITPWNFEEVVDKGASAQSFIERMTNFDKNLPNEKVLPKHSLLYEYFTVYNELTKVKYVTEGMRKPAFLSGEQKKAIVDLLFKTNRKVTVKQLKEDYFKKIECFDSVEISGVEDRFNASLGTYHDLLKIIKDKDFLDNEENEDILEDIVLTLTLFEDREMIEERLKTYAHLFDDKVMKQLKRRRYTGWGRLSRKLINGIRDKQSGKTILDFLKSDGFANRNFMQLIHDDSLTFKEDIQKAQVSGQGDSLHEHIANLAGSPAIKKGILQTVKVVDELVKVMGRHKPENIVIEMARENQTTQKGQKNSRERMKRIEEGIKELGSQILKEHPVENTQLQNEKLYLYYLQNGRDMYVDQELDINRLSDYDVDHIVPQSFLKDDSIDNKVLTRSDKARGKSDNVPSEEVVKKMKNYWRQLLNAKLITQRKFDNLTKAERGGLSELDKAGFIKRQLVETRQITKHVAQILDSRMNTKYDENDKLIREVKVITLKSKLVSDFRKDFQFYKVREINNYHHAHDAYLNAVVGTALIKKYPKLESEFVYGDYKVYDVRKMIAKSEQEIGKATAKYFFYSNIMNFFKTEITLANGEIRKRPLIETNGETGEIVWDKGRDFATVRKVLSMPQVNIVKKTEVQTGGFSKESILPKRNSDKLIARKKDWDPKKYGGFDSPTVAYSVLVVAKVEKGKSKKLKSVKELLGITIMERSSFEKNPIDFLEAKGYKEVKKDLIIKLPKYSLFELENGRKRMLASAGELQKGNELALPSKYVNFLYLASHYEKLKGSPEDNEQKQLFVEQHKHYLDEIIEQISEFSKRVILADANLDKVLSAYNKHRDKPIREQAENIIHLFTLTNLGAPAAFKYFDTTIDRKRYTSTKEVLDATLIHQSITGLYETRIDLSQLGGDGGEAAAKPAPGGSGGLDDEYRLYSPLVKPDQNIQFWLEQFPQAWAETAGMGLAKQVPPQVIQLKASATPVSVRQYPLSKEAQEGIRPHVQRLIQQGILVPVQSPWNTPLLPVRKPGTNDYRPVQDLREVNKRVQDIHPTVPNPYNLLCALPPQRSWYTVLDLKDAFFCLRLHPTSQPLFAFEWRDPGTGRTGQLTWTRLPQGFKNSPTIFNEALHRDLANFRIQHPQVTLLQYVDDLLLAGATKQDCLEGTKALLLELSDLGYRASAKKAQICRREVTYLGYSLRDGQRWLTEARKKTVVQIPAPTTAKQVREFLGKAGFCRLFIPGFATLAAPLYPLTKPKGEFSWAPEHQKAFDAIKKALLSAPALALPDVTKPFTLYVDERKGVARGVLTQTLGPWRRPVAYLSKKLDPVASGWPVCLKAIAAVAILVKDADKLTLGQNITVIAPHALENIVRQPPDRWMTNARMTHYQSLLLTERVTFAPPAALNPATLLPEETDEPVTHDCHQLLIEETGVRKDLTDIPLTGEVLTWFTDGSSYVVEGKRMAGAAVVDGTRTIWASSLPEGTSAQKAELMALTQALRLAEGKSINIYTDSRYAFATAHVHGAIYKQRGWLTSAGREIKNKEEILSLLEALHLPKRLAIIHCPGHQKAKDPISRGNQMADRVAKQAAQGVNLLPAGKRTADGSEFEKRTADGSEFESPKKKAKVE

SEQ ID NO: 248 - protein, 2088 aa, synthetic construct; identical to SEQ ID NO: 94

SEQ ID NO: 249 - protein, 2086 aa, synthetic construct; identical to SEQ ID NO: 60

SEQ ID NO: 250 - protein, 2088 aa, synthetic construct
MPAAKRVKLDGGDKKYSIGLDIGTNSVGWAVITDEYKVPSKKFKVLGNTDRHSIKKNLIGALLFDSGETAEATRLKRTARRRYTRRKNRICYLQEIFSNEMAKVDDSFFHRLEESFLVEEDKKHERHPIFGNIVDEVAYHEKYPTIYHLRKKLVDSTDKADLRLIYLALAHMIKFRGHFLIEGDLNPDNSDVDKLFIQLVQTYNQLFEENPINASGVDAKAILSARLSKSRRLENLIAQLPGEKKNGLFGNLIALSLGLTPNFKSNFDLAEDAKLQLSKDTYDDDLDNLLAQIGDQYADLFLAAKNLSDAILLSDILRVNTEITKAPLSASMIKRYDEHHQDLTLLKALVRQQLPEKYKEIFFDQSKNGYAGYIDGGASQEEFYKFIKPILEKMDGTEELLVKLNREDLLRKQRTFDNGSIPHQIHLGELHAILRRQEDFYPFLKDNREKIEKILTFRIPYYVGPLARGNSRFAWMTRKSEETITPWNFEEVVDKGASAQSFIERMTNFDKNLPNEKVLPKHSLLYEYFTVYNELTKVKYVTEGMRKPAFLSGEQKKAIVDLLFKTNRKVTVKQLKEDYFKKIECFDSVEISGVEDRFNASLGTYHDLLKIIKDKDFLDNEENEDILEDIVLTLTLFEDREMIEERLKTYAHLFDDKVMKQLKRRRYTGWGRLSRKLINGIRDKQSGKTILDFLKSDGFANRNFMQLIHDDSLTFKEDIQKAQVSGQGDSLHEHIANLAGSPAIKKGILQTVKVVDELVKVMGRHKPENIVIEMARENQTTQKGQKNSRERMKRIEEGIKELGSQILKEHPVENTQLQNEKLYLYYLQNGRDMYVDQELDINRLSDYDVDHIVPQSFLKDDSIDNKVLTRSDKARGKSDNVPSEEVVKKMKNYWRQLLNAKLITQRKFDNLTKAERGGLSELDKAGFIKRQLVETRQITKHVAQILDSRMNTKYDENDKLIREVKVITLKSKLVSDFRKDFQFYKVREINNYHHAHDAYLNAVVGTALIKKYPKLESEFVYGDYKVYDVRKMIAKSEQEIGKATAKYFFYSNIMNFFKTEITLANGEIRKRPLIETNGETGEIVWDKGRDFATVRKVLSMPQVNIVKKTEVQTGGFSKESILPKRNSDKLIARKKDWDPKKYGGFDSPTVAYSVLVVAKVEKGKSKKLKSVKELLGITIMERSSFEKNPIDFLEAKGYKEVKKDLIIKLPKYSLFELENGRKRMLASAGELQKGNELALPSKYVNFLYLASHYEKLKGSPEDNEQKQLFVEQHKHYLDEIIEQISEFSKRVILADANLDKVLSAYNKHRDKPIREQAENIIHLFTLTNLGAPAAFKYFDTTIDRKRYTSTKEVLDATLIHQSITGLYETRIDLSQLGGDGGGGSEAAAKGGGGGLDDEYRLYSPLVKPDQNIQFWLEQFPQAWAETAGMGLAKQVPPQVIQLKASATPVSVRQYPLSKEAQEGIRPHVQRLIQQGILVPVQSPWNTPLLPVRKPGTNDYRPVQDLREVNKRVQDIHPTVPNPYNLLCALPPQRSWYTVLDLKDAFFCLRLHPTSQPLFAFEWRDPGTGRTGQLTWTRLPQGFKNSPTIFNEALHRDLANFRIQHPQVTLLQYVDDLLLAGATKQDCLEGTKALLLELSDLGYRASAKKAQICRREVTYLGYSLRDGQRWLTEARKKTVVQIPAPTTAKQVREFLGKAGFCRLFIPGFATLAAPLYPLTKPKGEFSWAPEHQKAFDAIKKALLSAPALALPDVTKPFTLYVDERKGVARGVLTQTLGPWRRPVAYLSKKLDPVASGWPVCLKAIAAVAILVKDADKLTLGQNITVIAPHALENIVRQPPDRWMTNARMTHYQSLLLTERVTFAPPAALNPATLLPEETDEPVTHDCHQLLIEETGVRKDLTDIPLTGEVLTWFTDGSSYVVEGKRMAGAAVVDGTRTIWASSLPEGTSAQKAELMALTQALRLAEGKSINIYTDSRYAFATAHVHGAIYKQRGWLTSAGREIKNKEEILSLLEALHLPKRLAIIHCPGHQKAKDPISRGNQMADRVAKQAAQGVNLLPAGKRTADGSEFEKRTADGSEFESPKKKAKVE

SEQ ID NO: 251 - protein, 2086 aa, synthetic construct; identical to SEQ ID NO: 82

SEQ ID NO: 252 - protein, 2083 aa, synthetic construct
MPAAKRVKLDGGDKKYSIGLDIGTNSVGWAVITDEYKVPSKKFKVLGNTDRHSIKKNLIGALLFDSGETAEATRLKRTARRRYTRRKNRICYLQEIFSNEMAKVDDSFFHRLEESFLVEEDKKHERHPIFGNIVDEVAYHEKYPTIYHLRKKLVDSTDKADLRLIYLALAHMIKFRGHFLIEGDLNPDNSDVDKLFIQLVQTYNQLFEENPINASGVDAKAILSARLSKSRRLENLIAQLPGEKKNGLFGNLIALSLGLTPNFKSNFDLAEDAKLQLSKDTYDDDLDNLLAQIGDQYADLFLAAKNLSDAILLSDILRVNTEITKAPLSASMIKRYDEHHQDLTLLKALVRQQLPEKYKEIFFDQSKNGYAGYIDGGASQEEFYKFIKPILEKMDGTEELLVKLNREDLLRKQRTFDNGSIPHQIHLGELHAILRRQEDFYPFLKDNREKIEKILTFRIPYYVGPLARGNSRFAWMTRKSEETITPWNFEEVVDKGASAQSFIERMTNFDKNLPNEKVLPKHSLLYEYFTVYNELTKVKYVTEGMRKPAFLSGEQKKAIVDLLFKTNRKVTVKQLKEDYFKKIECFDSVEISGVEDRFNASLGTYHDLLKIIKDKDFLDNEENEDILEDIVLTLTLFEDREMIEERLKTYAHLFDDKVMKQLKRRRYTGWGRLSRKLINGIRDKQSGKTILDFLKSDGFANRNFMQLIHDDSLTFKEDIQKAQVSGQGDSLHEHIANLAGSPAIKKGILQTVKVVDELVKVMGRHKPENIVIEMARENQTTQKGQKNSRERMKRIEEGIKELGSQILKEHPVENTQLQNEKLYLYYLQNGRDMYVDQELDINRLSDYDVDHIVPQSFLKDDSIDNKVLTRSDKARGKSDNVPSEEVVKKMKNYWRQLLNAKLITQRKFDNLTKAERGGLSELDKAGFIKRQLVETRQITKHVAQILDSRMNTKYDENDKLIREVKVITLKSKLVSDFRKDFQFYKVREINNYHHAHDAYLNAVVGTALIKKYPKLESEFVYGDYKVYDVRKMIAKSEQEIGKATAKYFFYSNIMNFFKTEITLANGEIRKRPLIETNGETGEIVWDKGRDFATVRKVLSMPQVNIVKKTEVQTGGFSKESILPKRNSDKLIARKKDWDPKKYGGFDSPTVAYSVLVVAKVEKGKSKKLKSVKELLGITIMERSSFEKNPIDFLEAKGYKEVKKDLIIKLPKYSLFELENGRKRMLASAGELQKGNELALPSKYVNFLYLASHYEKLKGSPEDNEQKQLFVEQHKHYLDEIIEQISEFSKRVILADANLDKVLSAYNKHRDKPIREQAENIIHLFTLTNLGAPAAFKYFDTTIDRKRYTSTKEVLDATLIHQSITGLYETRIDLSQLGGDGGPAPGGSGGLDDEYRLYSPLVKPDQNIQFWLEQFPQAWAETAGMGLAKQVPPQVIQLKASATPVSVRQYPLSKEAQEGIRPHVQRLIQQGILVPVQSPWNTPLLPVRKPGTNDYRPVQDLREVNKRVQDIHPTVPNPYNLLCALPPQRSWYTVLDLKDAFFCLRLHPTSQPLFAFEWRDPGTGRTGQLTWTRLPQGFKNSPTIFNEALHRDLANFRIQHPQVTLLQYVDDLLLAGATKQDCLEGTKALLLELSDLGYRASAKKAQICRREVTYLGYSLRDGQRWLTEARKKTVVQIPAPTTAKQVREFLGKAGFCRLFIPGFATLAAPLYPLTKPKGEFSWAPEHQKAFDAIKKALLSAPALALPDVTKPFTLYVDERKGVARGVLTQTLGPWRRPVAYLSKKLDPVASGWPVCLKAIAAVAILVKDADKLTLGQNITVIAPHALENIVRQPPDRWMTNARMTHYQSLLLTERVTFAPPAALNPATLLPEETDEPVTHDCHQLLIEETGVRKDLTDIPLTGEVLTWFTDGSSYVVEGKRMAGAAVVDGTRTIWASSLPEGTSAQKAELMALTQALRLAEGKSINIYTDSRYAFATAHVHGAIYKQRGWLTSAGREIKNKEEILSLLEALHLPKRLAIIHCPGHQKAKDPISRGNQMADRVAKQAAQGVNLLPAGKRTADGSEFEKRTADGSEFESPKKKAKVE

SEQ ID NO: 253 - protein, 2083 aa, synthetic construct; identical to SEQ ID NO: 59

SEQ ID NO: 254 - protein, 2088 aa, synthetic construct
MPAAKRVKLDGGDKKYSIGLDIGTNSVGWAVITDEYKVPSKKFKVLGNTDRHSIKKNLIGALLFDSGETAEATRLKRTARRRYTRRKNRICYLQEIFSNEMAKVDDSFFHRLEESFLVEEDKKHERHPIFGNIVDEVAYHEKYPTIYHLRKKLVDSTDKADLRLIYLALAHMIKFRGHFLIEGDLNPDNSDVDKLFIQLVQTYNQLFEENPINASGVDAKAILSARLSKSRRLENLIAQLPGEKKNGLFGNLIALSLGLTPNFKSNFDLAEDAKLQLSKDTYDDDLDNLLAQIGDQYADLFLAAKNLSDAILLSDILRVNTEITKAPLSASMIKRYDEHHQDLTLLKALVRQQLPEKYKEIFFDQSKNGYAGYIDGGASQEEFYKFIKPILEKMDGTEELLVKLNREDLLRKQRTFDNGSIPHQIHLGELHAILRRQEDFYPFLKDNREKIEKILTFRIPYYVGPLARGNSRFAWMTRKSEETITPWNFEEVVDKGASAQSFIERMTNFDKNLPNEKVLPKHSLLYEYFTVYNELTKVKYVTEGMRKPAFLSGEQKKAIVDLLFKTNRKVTVKQLKEDYFKKIECFDSVEISGVEDRFNASLGTYHDLLKIIKDKDFLDNEENEDILEDIVLTLTLFEDREMIEERLKTYAHLFDDKVMKQLKRRRYTGWGRLSRKLINGIRDKQSGKTILDFLKSDGFANRNFMQLIHDDSLTFKEDIQKAQVSGQGDSLHEHIANLAGSPAIKKGILQTVKVVDELVKVMGRHKPENIVIEMARENQTTQKGQKNSRERMKRIEEGIKELGSQILKEHPVENTQLQNEKLYLYYLQNGRDMYVDQELDINRLSDYDVDHIVPQSFLKDDSIDNKVLTRSDKARGKSDNVPSEEVVKKMKNYWRQLLNAKLITQRKFDNLTKAERGGLSELDKAGFIKRQLVETRQITKHVAQILDSRMNTKYDENDKLIREVKVITLKSKLVSDFRKDFQFYKVREINNYHHAHDAYLNAVVGTALIKKYPKLESEFVYGDYKVYDVRKMIAKSEQEIGKATAKYFFYSNIMNFFKTEITLANGEIRKRPLIETNGETGEIVWDKGRDFATVRKVLSMPQVNIVKKTEVQTGGFSKESILPKRNSDKLIARKKDWDPKKYGGFDSPTVAYSVLVVAKVEKGKSKKLKSVKELLGITIMERSSFEKNPIDFLEAKGYKEVKKDLIIKLPKYSLFELENGRKRMLASAGELQKGNELALPSKYVNFLYLASHYEKLKGSPEDNEQKQLFVEQHKHYLDEIIEQISEFSKRVILADANLDKVLSAYNKHRDKPIREQAENIIHLFTLTNLGAPAAFKYFDTTIDRKRYTSTKEVLDATLIHQSITGLYETRIDLSQLGGDGGGSSGGSEAAAKGGLDDEYRLYSPLVKPDQNIQFWLEQFPQAWAETAGMGLAKQVPPQVIQLKASATPVSVRQYPLSKEAQEGIRPHVQRLIQQGILVPVQSPWNTPLLPVRKPGTNDYRPVQDLREVNKRVQDIHPTVPNPYNLLCALPPQRSWYTVLDLKDAFFCLRLHPTSQPLFAFEWRDPGTGRTGQLTWTRLPQGFKNSPTIFNEALHRDLANFRIQHPQVTLLQYVDDLLLAGATKQDCLEGTKALLLELSDLGYRASAKKAQICRREVTYLGYSLRDGQRWLTEARKKTVVQIPAPTTAKQVREFLGKAGFCRLFIPGFATLAAPLYPLTKPKGEFSWAPEHQKAFDAIKKALLSAPALALPDVTKPFTLYVDERKGVARGVLTQTLGPWRRPVAYLSKKLDPVASGWPVCLKAIAAVAILVKDADKLTLGQNITVIAPHALENIVRQPPDRWMTNARMTHYQSLLLTERVTFAPPAALNPATLLPEETDEPVTHDCHQLLIEETGVRKDLTDIPLTGEVLTWFTDGSSYVVEGKRMAGAAVVDGTRTIWASSLPEGTSAQKAELMALTQALRLAEGKSINIYTDSRYAFATAHVHGAIYKQRGWLTSAGREIKNKEEILSLLEALHLPKRLAIIHCPGHQKAKDPISRGNQMADRVAKQAAQGVNLLPAGKRTADGSEFEKRTADGSEFESPKKKAKVE

SEQ ID NO: 255 - protein, 2088 aa, synthetic construct; identical to SEQ ID NO: 86

SEQ ID NO: 256 - protein, 2107 aa, synthetic construct
MPAAKRVKLDGGDKKYSIGLDIGTNSVGWAVITDEYKVPSKKFKVLGNTDRHSIKKNLIGALLFDSGETAEATRLKRTARRRYTRRKNRICYLQEIFSNEMAKVDDSFFHRLEESFLVEEDKKHERHPIFGNIVDEVAYHEKYPTIYHLRKKLVDSTDKADLRLIYLALAHMIKFRGHFLIEGDLNPDNSDVDKLFIQLVQTYNQLFEENPINASGVDAKAILSARLSKSRRLENLIAQLPGEKKNGLFGNLIALSLGLTPNFKSNFDLAEDAKLQLSKDTYDDDLDNLLAQIGDQYADLFLAAKNLSDAILLSDILRVNTEITKAPLSASMIKRYDEHHQDLTLLKALVRQQLPEKYKEIFFDQSKNGYAGYIDGGASQEEFYKFIKPILEKMDGTEELLVKLNREDLLRKQRTFDNGSIPHQIHLGELHAILRRQEDFYPFLKDNREKIEKILTFRIPYYVGPLARGNSRFAWMTRKSEETITPWNFEEVVDKGASAQSFIERMTNFDKNLPNEKVLPKHSLLYEYFTVYNELTKVKYVTEGMRKPAFLSGEQKKAIVDLLFKTNRKVTVKQLKEDYFKKIECFDSVEISGVEDRFNASLGTYHDLLKIIKDKDFLDNEENEDILEDIVLTLTLFEDREMIEERLKTYAHLFDDKVMKQLKRRRYTGWGRLSRKLINGIRDKQSGKTILDFLKSDGFANRNFMQLIHDDSLTFKEDIQKAQVSGQGDSLHEHIANLAGSPAIKKGILQTVKVVDELVKVMGRHKPENIVIEMARENQTTQKGQKNSRERMKRIEEGIKELGSQILKEHPVENTQLQNEKLYLYYLQNGRDMYVDQELDINRLSDYDVDHIVPQSFLKDDSIDNKVLTRSDKARGKSDNVPSEEVVKKMKNYWRQLLNAKLITQRKFDNLTKAERGGLSELDKAGFIKRQLVETRQITKHVAQILDSRMNTKYDENDKLIREVKVITLKSKLVSDFRKDFQFYKVREINNYHHAHDAYLNAVVGTALIKKYPKLESEFVYGDYKVYDVRKMIAKSEQEIGKATAKYFFYSNIMNFFKTEITLANGEIRKRPLIETNGETGEIVWDKGRDFATVRKVLSMPQVNIVKKTEVQTGGFSKESILPKRNSDKLIARKKDWDPKKYGGFDSPTVAYSVLVVAKVEKGKSKKLKSVKELLGITIMERSSFEKNPIDFLEAKGYKEVKKDLIIKLPKYSLFELENGRKRMLASAGELQKGNELALPSKYVNFLYLASHYEKLKGSPEDNEQKQLFVEQHKHYLDEIIEQISEFSKRVILADANLDKVLSAYNKHRDKPIREQAENIIHLFTLTNLGAPAAFKYFDTTIDRKRYTSTKEVLDATLIHQSITGLYETRIDLSQLGGDGGGGGGSGGGGSGGGGSGGGGSGGGGSGGGGSGGLDDEYRLYSPLVKPDQNIQFWLEQFPQAWAETAGMGLAKQVPPQVIQLKASATPVSVRQYPLSKEAQEGIRPHVQRLIQQGILVPVQSPWNTPLLPVRKPGTNDYRPVQDLREVNKRVQDIHPTVPNPYNLLCALPPQRSWYTVLDLKDAFFCLRLHPTSQPLFAFEWRDPGTGRTGQLTWTRLPQGFKNSPTIFNEALHRDLANFRIQHPQVTLLQYVDDLLLAGATKQDCLEGTKALLLELSDLGYRASAKKAQICRREVTYLGYSLRDGQRWLTEARKKTVVQIPAPTTAKQVREFLGKAGFCRLFIPGFATLAAPLYPLTKPKGEFSWAPEHQKAFDAIKKALLSAPALALPDVTKPFTLYVDERKGVARGVLTQTLGPWRRPVAYLSKKLDPVASGWPVCLKAIAAVAILVKDADKLTLGQNITVIAPHALENIVRQPPDRWMTNARMTHYQSLLLTERVTFAPPAALNPATLLPEETDEPVTHDCHQLLIEETGVRKDLTDIPLTGEVLTWFTDGSSYVVEGKRMAGAAVVDGTRTIWASSLPEGTSAQKAELMALTQALRLAEGKSINIYTDSRYAFATAHVHGAIYKQRGWLTSAGREIKNKEEILSLLEALHLPKRLAIIHCPGHQKAKDPISRGNQMADRVAKQAAQGVNLLPAGKRTADGSEFEKRTADGSEFESPKKKAKVE

SEQ ID NO: 257 - protein, 2086 aa, synthetic construct; identical to SEQ ID NO: 64

SEQ ID NO: 258 - protein, 2088 aa, synthetic construct
MPAAKRVKLDGGDKKYSIGLDIGTNSVGWAVITDEYKVPSKKFKVLGNTDRHSIKKNLIGALLFDSGETAEATRLKRTARRRYTRRKNRICYLQEIFSNEMAKVDDSFFHRLEESFLVEEDKKHERHPIFGNIVDEVAYHEKYPTIYHLRKKLVDSTDKADLRLIYLALAHMIKFRGHFLIEGDLNPDNSDVDKLFIQLVQTYNQLFEENPINASGVDAKAILSARLSKSRRLENLIAQLPGEKKNGLFGNLIALSLGLTPNFKSNFDLAEDAKLQLSKDTYDDDLDNLLAQIGDQYADLFLAAKNLSDAILLSDILRVNTEITKAPLSASMIKRYDEHHQDLTLLKALVRQQLPEKYKEIFFDQSKNGYAGYIDGGASQEEFYKFIKPILEKMDGTEELLVKLNREDLLRKQRTFDNGSIPHQIHLGELHAILRRQEDFYPFLKDNREKIEKILTFRIPYYVGPLARGNSRFAWMTRKSEETITPWNFEEVVDKGASAQSFIERMTNFDKNLPNEKVLPKHSLLYEYFTVYNELTKVKYVTEGMRKPAFLSGEQKKAIVDLLFKTNRKVTVKQLKEDYFKKIECFDSVEISGVEDRFNASLGTYHDLLKIIKDKDFLDNEENEDILEDIVLTLTLFEDREMIEERLKTYAHLFDDKVMKQLKRRRYTGWGRLSRKLINGIRDKQSGKTILDFLKSDGFANRNFMQLIHDDSLTFKEDIQKAQVSGQGDSLHEHIANLAGSPAIKKGILQTVKVVDELVKVMGRHKPENIVIEMARENQTTQKGQKNSRERMKRIEEGIKELGSQILKEHPVENTQLQNEKLYLYYLQNGRDMYVDQELDINRLSDYDVDHIVPQSFLKDDSIDNKVLTRSDKARGKSDNVPSEEVVKKMKNYWRQLLNAKLITQRKFDNLTKAERGGLSELDKAGFIKRQLVETRQITKHVAQILDSRMNTKYDENDKLIREVKVITLKSKLVSDFRKDFQFYKVREINNYHHAHDAYLNAVVGTALIKKYPKLESEFVYGDYKVYDVRKMIAKSEQEIGKATAKYFFYSNIMNFFKTEITLANGEIRKRPLIETNGETGEIVWDKGRDFATVRKVLSMPQVNIVKKTEVQTGGFSKESILPKRNSDKLIARKKDWDPKKYGGFDSPTVAYSVLVVAKVEKGKSKKLKSVKELLGITIMERSSFEKNPIDFLEAKGYKEVKKDLIIKLPKYSLFELENGRKRMLASAGELQKGNELALPSKYVNFLYLASHYEKLKGSPEDNEQKQLFVEQHKHYLDEIIEQISEFSKRVILADANLDKVLSAYNKHRDKPIREQAENIIHLFTLTNLGAPAAFKYFDTTIDRKRYTSTKEVLDATLIHQSITGLYETRIDLSQLGGDGGGSSEAAAKGGSGGLDDEYRLYSPLVKPDQNIQFWLEQFPQAWAETAGMGLAKQVPPQVIQLKASATPVSVRQYPLSKEAQEGIRPHVQRLIQQGILVPVQSPWNTPLLPVRKPGTNDYRPVQDLREVNKRVQDIHPTVPNPYNLLCALPPQRSWYTVLDLKDAFFCLRLHPTSQPLFAFEWRDPGTGRTGQLTWTRLPQGFKNSPTIFNEALHRDLANFRIQHPQVTLLQYVDDLLLAGATKQDCLEGTKALLLELSDLGYRASAKKAQICRREVTYLGYSLRDGQRWLTEARKKTVVQIPAPTTAKQVREFLGKAGFCRLFIPGFATLAAPLYPLTKPKGEFSWAPEHQKAFDAIKKALLSAPALALPDVTKPFTLYVDERKGVARGVLTQTLGPWRRPVAYLSKKLDPVASGWPVCLKAIAAVAILVKDADKLTLGQNITVIAPHALENIVRQPPDRWMTNARMTHYQSLLLTERVTFAPPAALNPATLLPEETDEPVTHDCHQLLIEETGVRKDLTDIPLTGEVLTWFTDGSSYVVEGKRMAGAAVVDGTRTIWASSLPEGTSAQKAELMALTQALRLAEGKSINIYTDSRYAFATAHVHGAIYKQRGWLTSAGREIKNKEEILSLLEALHLPKRLAIIHCPGHQKAKDPISRGNQMADRVAKQAAQGVNLLPAGKRTADGSEFEKRTADGSEFESPKKKAKVE

SEQ ID NO: 259 - protein, 2083 aa, synthetic construct
MPAAKRVKLDGGDKKYSIGLDIGTNSVGWAVITDEYKVPSKKFKVLGNTDRHSIKKNLIGALLFDSGETAEATRLKRTARRRYTRRKNRICYLQEIFSNEMAKVDDSFFHRLEESFLVEEDKKHERHPIFGNIVDEVAYHEKYPTIYHLRKKLVDSTDKADLRLIYLALAHMIKFRGHFLIEGDLNPDNSDVDKLFIQLVQTYNQLFEENPINASGVDAKAILSARLSKSRRLENLIAQLPGEKKNGLFGNLIALSLGLTPNFKSNFDLAEDAKLQLSKDTYDDDLDNLLAQIGDQYADLFLAAKNLSDAILLSDILRVNTEITKAPLSASMIKRYDEHHQDLTLLKALVRQQLPEKYKEIFFDQSKNGYAGYIDGGASQEEFYKFIKPILEKMDGTEELLVKLNREDLLRKQRTFDNGSIPHQIHLGELHAILRRQEDFYPFLKDNREKIEKILTFRIPYYVGPLARGNSRFAWMTRKSEETITPWNFEEVVDKGASAQSFIERMTNFDKNLPNEKVLPKHSLLYEYFTVYNELTKVKYVTEGMRKPAFLSGEQKKAIVDLLFKTNRKVTVKQLKEDYFKKIECFDSVEISGVEDRFNASLGTYHDLLKIIKDKDFLDNEENEDILEDIVLTLTLFEDREMIEERLKTYAHLFDDKVMKQLKRRRYTGWGRLSRKLINGIRDKQSGKTILDFLKSDGFANRNFMQLIHDDSLTFKEDIQKAQVSGQGDSLHEHIANLAGSPAIKKGILQTVKVVDELVKVMGRHKPENIVIEMARENQTTQKGQKNSRERMKRIEEGIKELGSQILKEHPVENTQLQNEKLYLYYLQNGRDMYVDQELDINRLSDYDVDHIVPQSFLKDDSIDNKVLTRSDKARGKSDNVPSEEVVKKMKNYWRQLLNAKLITQRKFDNLTKAERGGLSELDKAGFIKRQLVETRQITKHVAQILDSRMNTKYDENDKLIREVKVITLKSKLVSDFRKDFQFYKVREINNYHHAHDAYLNAVVGTALIKKYPKLESEFVYGDYKVYDVRKMIAKSEQEIGKATAKYFFYSNIMNFFKTEITLANGEIRKRPLIETNGETGEIVWDKGRDFATVRKVLSMPQVNIVKKTEVQTGGFSKESILPKRNSDKLIARKKDWDPKKYGGFDSPTVAYSVLVVAKVEKGKSKKLKSVKELLGITIMERSSFEKNPIDFLEAKGYKEVKKDLIIKLPKYSLFELENGRKRMLASAGELQKGNELALPSKYVNFLYLASHYEKLKGSPEDNEQKQLFVEQHKHYLDEIIEQISEFSKRVILADANLDKVLSAYNKHRDKPIREQAENIIHLFTLTNLGAPAAFKYFDTTIDRKRYTSTKEVLDATLIHQSITGLYETRIDLSQLGGDGGGGSGGSGGLDDEYRLYSPLVKPDQNIQFWLEQFPQAWAETAGMGLAKQVPPQVIQLKASATPVSVRQYPLSKEAQEGIRPHVQRLIQQGILVPVQSPWNTPLLPVRKPGTNDYRPVQDLREVNKRVQDIHPTVPNPYNLLCALPPQRSWYTVLDLKDAFFCLRLHPTSQPLFAFEWRDPGTGRTGQLTWTRLPQGFKNSPTIFNEALHRDLANFRIQHPQVTLLQYVDDLLLAGATKQDCLEGTKALLLELSDLGYRASAKKAQICRREVTYLGYSLRDGQRWLTEARKKTVVQIPAPTTAKQVREFLGKAGFCRLFIPGFATLAAPLYPLTKPKGEFSWAPEHQKAFDAIKKALLSAPALALPDVTKPFTLYVDERKGVARGVLTQTLGPWRRPVAYLSKKLDPVASGWPVCLKAIAAVAILVKDADKLTLGQNITVIAPHALENIVRQPPDRWMTNARMTHYQSLLLTERVTFAPPAALNPATLLPEETDEPVTHDCHQLLIEETGVRKDLTDIPLTGEVLTWFTDGSSYVVEGKRMAGAAVVDGTRTIWASSLPEGTSAQKAELMALTQALRLAEGKSINIYTDSRYAFATAHVHGAIYKQRGWLTSAGREIKNKEEILSLLEALHLPKRLAIIHCPGHQKAKDPISRGNQMADRVAKQAAQGVNLLPAGKRTADGSEFEKRTADGSEFESPKKKAKVE

SEQ ID NO: 260 - protein, 2088 aa, synthetic construct; identical to SEQ ID NO: 93

SEQ ID NO: 261 - protein, 2083 aa, synthetic construct; identical to SEQ ID NO: 81

SEQ ID NO: 262 - protein, 2080 aa, synthetic construct
MPAAKRVKLDGGDKKYSIGLDIGTNSVGWAVITDEYKVPSKKFKVLGNTDRHSIKKNLIGALLFDSGETAEATRLKRTARRRYTRRKNRICYLQEIFSNEMAKVDDSFFHRLEESFLVEEDKKHERHPIFGNIVDEVAYHEKYPTIYHLRKKLVDSTDKADLRLIYLALAHMIKFRGHFLIEGDLNPDNSDVDKLFIQLVQTYNQLFEENPINASGVDAKAILSARLSKSRRLENLIAQLPGEKKNGLFGNLIALSLGLTPNFKSNFDLAEDAKLQLSKDTYDDDLDNLLAQIGDQYADLFLAAKNLSDAILLSDILRVNTEITKAPLSASMIKRYDEHHQDLTLLKALVRQQLPEKYKEIFFDQSKNGYAGYIDGGASQEEFYKFIKPILEKMDGTEELLVKLNREDLLRKQRTFDNGSIPHQIHLGELHAILRRQEDFYPFLKDNREKIEKILTFRIPYYVGPLARGNSRFAWMTRKSEETITPWNFEEVVDKGASAQSFIERMTNFDKNLPNEKVLPKHSLLYEYFTVYNELTKVKYVTEGMRKPAFLSGEQKKAIVDLLFKTNRKVTVKQLKEDYFKKIECFDSVEISGVEDRFNASLGTYHDLLKIIKDKDFLDNEENEDILEDIVLTLTLFEDREMIEERLKTYAHLFDDKVMKQLKRRRYTGWGRLSRKLINGIRDKQSGKTILDFLKSDGFANRNFMQLIHDDSLTFKEDIQKAQVSGQGDSLHEHIANLAGSPAIKKGILQTVKVVDELVKVMGRHKPENIVIEMARENQTTQKGQKNSRERMKRIEEGIKELGSQILKEHPVENTQLQNEKLYLYYLQNGRDMYVDQELDINRLSDYDVDHIVPQSFLKDDSIDNKVLTRSDKARGKSDNVPSEEVVKKMKNYWRQLLNAKLITQRKFDNLTKAERGGLSELDKAGFIKRQLVETRQITKHVAQILDSRMNTKYDENDKLIREVKVITLKSKLVSDFRKDFQFYKVREINNYHHAHDAYLNAVVGTALIKKYPKLESEFVYGDYKVYDVRKMIAKSEQEIGKATAKYFFYSNIMNFFKTEITLANGEIRKRPLIETNGETGEIVWDKGRDFATVRKVLSMPQVNIVKKTEVQTGGFSKESILPKRNSDKLIARKKDWDPKKYGGFDSPTVAYSVLVVAKVEKGKSKKLKSVKELLGITIMERSSFEKNPIDFLEAKGYKEVKKDLIIKLPKYSLFELENGRKRMLASAGELQKGNELALPSKYVNFLYLASHYEKLKGSPEDNEQKQLFVEQHKHYLDEIIEQISEFSKRVILADANLDKVLSAYNKHRDKPIREQAENIIHLFTLTNLGAPAAFKYFDTTIDRKRYTSTKEVLDATLIHQSITGLYETRIDLSQLGGDGGGGSGGLDDEYRLYSPLVKPDQNIQFWLEQFPQAWAETAGMGLAKQVPPQVIQLKASATPVSVRQYPLSKEAQEGIRPHVQRLIQQGILVPVQSPWNTPLLPVRKPGTNDYRPVQDLREVNKRVQDIHPTVPNPYNLLCALPPQRSWYTVLDLKDAFFCLRLHPTSQPLFAFEWRDPGTGRTGQLTWTRLPQGFKNSPTIFNEALHRDLANFRIQHPQVTLLQYVDDLLLAGATKQDCLEGTKALLLELSDLGYRASAKKAQICRREVTYLGYSLRDGQRWLTEARKKTVVQIPAPTTAKQVREFLGKAGFCRLFIPGFATLAAPLYPLTKPKGEFSWAPEHQKAFDAIKKALLSAPALALPDVTKPFTLYVDERKGVARGVLTQTLGPWRRPVAYLSKKLDPVASGWPVCLKAIAAVAILVKDADKLTLGQNITVIAPHALENIVRQPPDRWMTNARMTHYQSLLLTERVTFAPPAALNPATLLPEETDEPVTHDCHQLLIEETGVRKDLTDIPLTGEVLTWFTDGSSYVVEGKRMAGAAVVDGTRTIWASSLPEGTSAQKAELMALTQALRLAEGKSINIYTDSRYAFATAHVHGAIYKQRGWLTSAGREIKNKEEILSLLEALHLPKRLAIIHCPGHQKAKDPISRGNQMADRVAKQAAQGVNLLPAGKRTADGSEFEKRTADGSEFESPKKKAKVE

SEQ ID NO: 263 - protein, 2088 aa, synthetic construct; identical to SEQ ID NO: 92

SEQ ID NO: 264 - protein, 2088 aa, synthetic construct; identical to SEQ ID NO: 53

SEQ ID NO: 265 - protein, 2083 aa, synthetic construct; identical to SEQ ID NO: 79

SEQ ID NO: 266 - protein, 2082 aa, synthetic construct
MPAAKRVKLDGGDKKYSIGLDIGTNSVGWAVITDEYKVPSKKFKVLGNTDRHSIKKNLIGALLFDSGETAEATRLKRTARRRYTRRKNRICYLQEIFSNEMAKVDDSFFHRLEESFLVEEDKKHERHPIFGNIVDEVAYHEKYPTIYHLRKKLVDSTDKADLRLIYLALAHMIKFRGHFLIEGDLNPDNSDVDKLFIQLVQTYNQLFEENPINASGVDAKAILSARLSKSRRLENLIAQLPGEKKNGLFGNLIALSLGLTPNFKSNFDLAEDAKLQLSKDTYDDDLDNLLAQIGDQYADLFLAAKNLSDAILLSDILRVNTEITKAPLSASMIKRYDEHHQDLTLLKALVRQQLPEKYKEIFFDQSKNGYAGYIDGGASQEEFYKFIKPILEKMDGTEELLVKLNREDLLRKQRTFDNGSIPHQIHLGELHAILRRQEDFYPFLKDNREKIEKILTFRIPYYVGPLARGNSRFAWMTRKSEETITPWNFEEVVDKGASAQSFIERMTNFDKNLPNEKVLPKHSLLYEYFTVYNELTKVKYVTEGMRKPAFLSGEQKKAIVDLLFKTNRKVTVKQLKEDYFKKIECFDSVEISGVEDRFNASLGTYHDLLKIIKDKDFLDNEENEDILEDIVLTLTLFEDREMIEERLKTYAHLFDDKVMKQLKRRRYTGWGRLSRKLINGIRDKQSGKTILDFLKSDGFANRNFMQLIHDDSLTFKEDIQKAQVSGQGDSLHEHIANLAGSPAIKKGILQTVKVVDELVKVMGRHKPENIVIEMARENQTTQKGQKNSRERMKRIEEGIKELGSQILKEHPVENTQLQNEKLYLYYLQNGRDMYVDQELDINRLSDYDVDHIVPQSFLKDDSIDNKVLTRSDKARGKSDNVPSEEVVKKMKNYWRQLLNAKLITQRKFDNLTKAERGGLSELDKAGFIKRQLVETRQITKHVAQILDSRMNTKYDENDKLIREVKVITLKSKLVSDFRKDFQFYKVREINNYHHAHDAYLNAVVGTALIKKYPKLESEFVYGDYKVYDVRKMIAKSEQEIGKATAKYFFYSNIMNFFKTEITLANGEIRKRPLIETNGETGEIVWDKGRDFATVRKVLSMPQVNIVKKTEVQTGGFSKESILPKRNSDKLIARKKDWDPKKYGGFDSPTVAYSVLVVAKVEKGKSKKLKSVKELLGITIMERSSFEKNPIDFLEAKGYKEVKKDLIIKLPKYSLFELENGRKRMLASAGELQKGNELALPSKYVNFLYLASHYEKLKGSPEDNEQKQLFVEQHKHYLDEIIEQISEFSKRVILADANLDKVLSAYNKHRDKPIREQAENIIHLFTLTNLGAPAAFKYFDTTIDRKRYTSTKEVLDATLIHQSITGLYETRIDLSQLGGDGGPAPAPGGLDDEYRLYSPLVKPDQNIQFWLEQFPQAWAETAGMGLAKQVPPQVIQLKASATPVSVRQYPLSKEAQEGIRPHVQRLIQQGILVPVQSPWNTPLLPVRKPGTNDYRPVQDLREVNKRVQDIHPTVPNPYNLLCALPPQRSWYTVLDLKDAFFCLRLHPTSQPLFAFEWRDPGTGRTGQLTWTRLPQGFKNSPTIFNEALHRDLANFRIQHPQVTLLQYVDDLLLAGATKQDCLEGTKALLLELSDLGYRASAKKAQICRREVTYLGYSLRDGQRWLTEARKKTVVQIPAPTTAKQVREFLGKAGFCRLFIPGFATLAAPLYPLTKPKGEFSWAPEHQKAFDAIKKALLSAPALALPDVTKPFTLYVDERKGVARGVLTQTLGPWRRPVAYLSKKLDPVASGWPVCLKAIAAVAILVKDADKLTLGQNITVIAPHALENIVRQPPDRWMTNARMTHYQSLLLTERVTFAPPAALNPATLLPEETDEPVTHDCHQLLIEETGVRKDLTDIPLTGEVLTWFTDGSSYVVEGKRMAGAAVVDGTRTIWASSLPEGTSAQKAELMALTQALRLAEGKSINIYTDSRYAFATAHVHGAIYKQRGWLTSAGREIKNKEEILSLLEALHLPKRLAIIHCPGHQKAKDPISRGNQMADRVAKQAAQGVNLLPAGKRTADGSEFEKRTADGSEFESPKKKAKVE

SEQ ID NO: 267 - protein, 2086 aa, synthetic construct
MPAAKRVKLDGGDKKYSIGLDIGTNSVGWAVITDEYKVPSKKFKVLGNTDRHSIKKNLIGALLFDSGETAEATRLKRTARRRYTRRKNRICYLQEIFSNEMAKVDDSFFHRLEESFLVEEDKKHERHPIFGNIVDEVAYHEKYPTIYHLRKKLVDSTDKADLRLIYLALAHMIKFRGHFLIEGDLNPDNSDVDKLFIQLVQTYNQLFEENPINASGVDAKAILSARLSKSRRLENLIAQLPGEKKNGLFGNLIALSLGLTPNFKSNFDLAEDAKLQLSKDTYDDDLDNLLAQIGDQYADLFLAAKNLSDAILLSDILRVNTEITKAPLSASMIKRYDEHHQDLTLLKALVRQQLPEKYKEIFFDQSKNGYAGYIDGGASQEEFYKFIKPILEKMDGTEELLVKLNREDLLRKQRTFDNGSIPHQIHLGELHAILRRQEDFYPFLKDNREKIEKILTFRIPYYVGPLARGNSRFAWMTRKSEETITPWNFEEVVDKGASAQSFIERMTNFDKNLPNEKVLPKHSLLYEYFTVYNELTKVKYVTEGMRKPAFLSGEQKKAIVDLLFKTNRKVTVKQLKEDYFKKIECFDSVEISGVEDRFNASLGTYHDLLKIIKDKDFLDNEENEDILEDIVLTLTLFEDREMIEERLKTYAHLFDDKVMKQLKRRRYTGWGRLSRKLINGIRDKQSGKTILDFLKSDGFANRNFMQLIHDDSLTFKEDIQKAQVSGQGDSLHEHIANLAGSPAIKKGILQTVKVVDELVKVMGRHKPENIVIEMARENQTTQKGQKNSRERMKRIEEGIKELGSQILKEHPVENTQLQNEKLYLYYLQNGRDMYVDQELDINRLSDYDVDHIVPQSFLKDDSIDNKVLTRSDKARGKSDNVPSEEVVKKMKNYWRQLLNAKLITQRKFDNLTKAERGGLSELDKAGFIKRQLVETRQITKHVAQILDSRMNTKYDENDKLIREVKVITLKSKLVSDFRKDFQFYKVREINNYHHAHDAYLNAVVGTALIKKYPKLESEFVYGDYKVYDVRKMIAKSEQEIGKATAKYFFYSNIMNFFKTEITLANGEIRKRPLIETNGETGEIVWDKGRDFATVRKVLSMPQVNIVKKTEVQTGGFSKESILPKRNSDKLIARKKDWDPKKYGGFDSPTVAYSVLVVAKVEKGKSKKLKSVKELLGITIMERSSFEKNPIDFLEAKGYKEVKKDLIIKLPKYSLFELENGRKRMLASAGELQKGNELALPSKYVNFLYLASHYEKLKGSPEDNEQKQLFVEQHKHYLDEIIEQISEFSKRVILADANLDKVLSAYNKHRDKPIREQAENIIHLFTLTNLGAPAAFKYFDTTIDRKRYTSTKEVLDATLIHQSITGLYETRIDLSQLGGDGGGGSPAPGSSGGLDDEYRLYSPLVKPDQNIQFWLEQFPQAWAETAGMGLAKQVPPQVIQLKASATPVSVRQYPLSKEAQEGIRPHVQRLIQQGILVPVQSPWNTPLLPVRKPGTNDYRPVQDLREVNKRVQDIHPTVPNPYNLLCALPPQRSWYTVLDLKDAFFCLRLHPTSQPLFAFEWRDPGTGRTGQLTWTRLPQGFKNSPTIFNEALHRDLANFRIQHPQVTLLQYVDDLLLAGATKQDCLEGTKALLLELSDLGYRASAKKAQICRREVTYLGYSLRDGQRWLTEARKKTVVQIPAPTTAKQVREFLGKAGFCRLFIPGFATLAAPLYPLTKPKGEFSWAPEHQKAFDAIKKALLSAPALALPDVTKPFTLYVDERKGVARGVLTQTLGPWRRPVAYLSKKLDPVASGWPVCLKAIAAVAILVKDADKLTLGQNITVIAPHALENIVRQPPDRWMTNARMTHYQSLLLTERVTFAPPAALNPATLLPEETDEPVTHDCHQLLIEETGVRKDLTDIPLTGEVLTWFTDGSSYVVEGKRMAGAAVVDGTRTIWASSLPEGTSAQKAELMALTQALRLAEGKSINIYTDSRYAFATAHVHGAIYKQRGWLTSAGREIKNKEEILSLLEALHLPKRLAIIHCPGHQKAKDPISRGNQMADRVAKQAAQGVNLLPAGKRTADGSEFEKRTADGSEFESPKKKAKVE

SEQ ID NO: 268 - protein, 2086 aa, synthetic construct; identical to SEQ ID NO: 38

SEQ ID NO: 269 - protein, 2080 aa, synthetic construct
MPAAKRVKLDGGDKKYSIGLDIGTNSVGWAVITDEYKVPSKKFKVLGNTDRHSIKKNLIGALLFDSGETAEATRLKRTARRRYTRRKNRICYLQEIFSNEMAKVDDSFFHRLEESFLVEEDKKHERHPIFGNIVDEVAYHEKYPTIYHLRKKLVDSTDKADLRLIYLALAHMIKFRGHFLIEGDLNPDNSDVDKLFIQLVQTYNQLFEENPINASGVDAKAILSARLSKSRRLENLIAQLPGEKKNGLFGNLIALSLGLTPNFKSNFDLAEDAKLQLSKDTYDDDLDNLLAQIGDQYADLFLAAKNLSDAILLSDILRVNTEITKAPLSASMIKRYDEHHQDLTLLKALVRQQLPEKYKEIFFDQSKNGYAGYIDGGASQEEFYKFIKPILEKMDGTEELLVKLNREDLLRKQRTFDNGSIPHQIHLGELHAILRRQEDFYPFLKDNREKIEKILTFRIPYYVGPLARGNSRFAWMTRKSEETITPWNFEEVVDKGASAQSFIERMTNFDKNLPNEKVLPKHSLLYEYFTVYNELTKVKYVTEGMRKPAFLSGEQKKAIVDLLFKTNRKVTVKQLKEDYFKKIECFDSVEISGVEDRFNASLGTYHDLLKIIKDKDFLDNEENEDILEDIVLTLTLFEDREMIEERLKTYAHLFDDKVMKQLKRRRYTGWGRLSRKLINGIRDKQSGKTILDFLKSDGFANRNFMQLIHDDSLTFKEDIQKAQVSGQGDSLHEHIANLAGSPAIKKGILQTVKVVDELVKVMGRHKPENIVIEMARENQTTQKGQKNSRERMKRIEEGIKELGSQILKEHPVENTQLQNEKLYLYYLQNGRDMYVDQELDINRLSDYDVDHIVPQSFLKDDSIDNKVLTRSDKARGKSDNVPSEEVVKKMKNYWRQLLNAKLITQRKFDNLTKAERGGLSELDKAGFIKRQLVETRQITKHVAQILDSRMNTKYDENDKLIREVKVITLKSKLVSDFRKDFQFYKVREINNYHHAHDAYLNAVVGTALIKKYPKLESEFVYGDYKVYDVRKMIAKSEQEIGKATAKYFFYSNIMNFFKTEITLANGEIRKRPLIETNGETGEIVWDKGRDFATVRKVLSMPQVNIVKKTEVQTGGFSKESILPKRNSDKLIARKKDWDPKKYGGFDSPTVAYSVLVVAKVEKGKSKKLKSVKELLGITIMERSSFEKNPIDFLEAKGYKEVKKDLIIKLPKYSLFELENGRKRMLASAGELQKGNELALPSKYVNFLYLASHYEKLKGSPEDNEQKQLFVEQHKHYLDEIIEQISEFSKRVILADANLDKVLSAYNKHRDKPIREQAENIIHLFTLTNLGAPAAFKYFDTTIDRKRYTSTKEVLDATLIHQSITGLYETRIDLSQLGGDGGPAPGGLDDEYRLYSPLVKPDQNIQFWLEQFPQAWAETAGMGLAKQVPPQVIQLKASATPVSVRQYPLSKEAQEGIRPHVQRLIQQGILVPVQSPWNTPLLPVRKPGTNDYRPVQDLREVNKRVQDIHPTVPNPYNLLCALPPQRSWYTVLDLKDAFFCLRLHPTSQPLFAFEWRDPGTGRTGQLTWTRLPQGFKNSPTIFNEALHRDLANFRIQHPQVTLLQYVDDLLLAGATKQDCLEGTKALLLELSDLGYRASAKKAQICRREVTYLGYSLRDGQRWLTEARKKTVVQIPAPTTAKQVREFLGKAGFCRLFIPGFATLAAPLYPLTKPKGEFSWAPEHQKAFDAIKKALLSAPALALPDVTKPFTLYVDERKGVARGVLTQTLGPWRRPVAYLSKKLDPVASGWPVCLKAIAAVAILVKDADKLTLGQNITVIAPHALENIVRQPPDRWMTNARMTHYQSLLLTERVTFAPPAALNPATLLPEETDEPVTHDCHQLLIEETGVRKDLTDIPLTGEVLTWFTDGSSYVVEGKRMAGAAVVDGTRTIWASSLPEGTSAQKAELMALTQALRLAEGKSINIYTDSRYAFATAHVHGAIYKQRGWLTSAGREIKNKEEILSLLEALHLPKRLAIIHCPGHQKAKDPISRGNQMADRVAKQAAQGVNLLPAGKRTADGSEFEKRTADGSEFESPKKKAKVE

SEQ ID NO: 270 - protein, 2086 aa, synthetic construct; identical to SEQ ID NO: 69

SEQ ID NO: 271 - protein, 2083 aa, synthetic construct; identical to SEQ ID NO: 88

SEQ ID NO: 272 - protein, 2086 aa, synthetic construct; identical to SEQ ID NO: 85

SEQ ID NO: 273 - protein, 2085 aa, synthetic construct
MPAAKRVKLDGGDKKYSIGLDIGTNSVGWAVITDEYKVPSKKFKVLGNTDRHSIKKNLIGALLFDSGETAEATRLKRTARRRYTRRKNRICYLQEIFSNEMAKVDDSFFHRLEESFLVEEDKKHERHPIFGNIVDEVAYHEKYPTIYHLRKKLVDSTDKADLRLIYLALAHMIKFRGHFLIEGDLNPDNSDVDKLFIQLVQTYNQLFEENPINASGVDAKAILSARLSKSRRLENLIAQLPGEKKNGLFGNLIALSLGLTPNFKSNFDLAEDAKLQLSKDTYDDDLDNLLAQIGDQYADLFLAAKNLSDAILLSDILRVNTEITKAPLSASMIKRYDEHHQDLTLLKALVRQQLPEKYKEIFFDQSKNGYAGYIDGGASQEEFYKFIKPILEKMDGTEELLVKLNREDLLRKQRTFDNGSIPHQIHLGELHAILRRQEDFYPFLKDNREKIEKILTFRIPYYVGPLARGNSRFAWMTRKSEETITPWNFEEVVDKGASAQSFIERMTNFDKNLPNEKVLPKHSLLYEYFTVYNELTKVKYVTEGMRKPAFLSGEQKKAIVDLLFKTNRKVTVKQLKEDYFKKIECFDSVEISGVEDRFNASLGTYHDLLKIIKDKDFLDNEENEDILEDIVLTLTLFEDREMIEERLKTYAHLFDDKVMKQLKRRRYTGWGRLSRKLINGIRDKQSGKTILDFLKSDGFANRNFMQLIHDDSLTFKEDIQKAQVSGQGDSLHEHIANLAGSPAIKKGILQTVKVVDELVKVMGRHKPENIVIEMARENQTTQKGQKNSRERMKRIEEGIKELGSQILKEHPVENTQLQNEKLYLYYLQNGRDMYVDQELDINRLSDYDVDHIVPQSFLKDDSIDNKVLTRSDKARGKSDNVPSEEVVKKMKNYWRQLLNAKLITQRKFDNLTKAERGGLSELDKAGFIKRQLVETRQITKHVAQILDSRMNTKYDENDKLIREVKVITLKSKLVSDFRKDFQFYKVREINNYHHAHDAYLNAVVGTALIKKYPKLESEFVYGDYKVYDVRKMIAKSEQEIGKATAKYFFYSNIMNFFKTEITLANGEIRKRPLIETNGETGEIVWDKGRDFATVRKVLSMPQVNIVKKTEVQTGGFSKESILPKRNSDKLIARKKDWDPKKYGGFDSPTVAYSVLVVAKVEKGKSKKLKSVKELLGITIMERSSFEKNPIDFLEAKGYKEVKKDLIIKLPKYSLFELENGRKRMLASAGELQKGNELALPSKYVNFLYLASHYEKLKGSPEDNEQKQLFVEQHKHYLDEIIEQISEFSKRVILADANLDKVLSAYNKHRDKPIREQAENIIHLFTLTNLGAPAAFKYFDTTIDRKRYTSTKEVLDATLIHQSITGLYETRIDLSQLGGDGGGGGEAAAKGGLDDEYRLYSPLVKPDQNIQFWLEQFPQAWAETAGMGLAKQVPPQVIQLKASATPVSVRQYPLSKEAQEGIRPHVQRLIQQGILVPVQSPWNTPLLPVRKPGTNDYRPVQDLREVNKRVQDIHPTVPNPYNLLCALPPQRSWYTVLDLKDAFFCLRLHPTSQPLFAFEWRDPGTGRTGQLTWTRLPQGFKNSPTIFNEALHRDLANFRIQHPQVTLLQYVDDLLLAGATKQDCLEGTKALLLELSDLGYRASAKKAQICRREVTYLGYSLRDGQRWLTEARKKTVVQIPAPTTAKQVREFLGKAGFCRLFIPGFATLAAPLYPLTKPKGEFSWAPEHQKAFDAIKKALLSAPALALPDVTKPFTLYVDERKGVARGVLTQTLGPWRRPVAYLSKKLDPVASGWPVCLKAIAAVAILVKDADKLTLGQNITVIAPHALENIVRQPPDRWMTNARMTHYQSLLLTERVTFAPPAALNPATLLPEETDEPVTHDCHQLLIEETGVRKDLTDIPLTGEVLTWFTDGSSYVVEGKRMAGAAVVDGTRTIWASSLPEGTSAQKAELMALTQALRLAEGKSINIYTDSRYAFATAHVHGAIYKQRGWLTSAGREIKNKEEILSLLEALHLPKRLAIIHCPGHQKAKDPISRGNQMADRVAKQAAQGVNLLPAGKRTADGSEFEKRTADGSEFESPKKKAKVE

SEQ ID NO: 274 - protein, 2086 aa, synthetic construct
MPAAKRVKLDGGDKKYSIGLDIGTNSVGWAVITDEYKVPSKKFKVLGNTDRHSIKKNLIGALLFDSGETAEATRLKRTARRRYTRRKNRICYLQEIFSNEMAKVDDSFFHRLEESFLVEEDKKHERHPIFGNIVDEVAYHEKYPTIYHLRKKLVDSTDKADLRLIYLALAHMIKFRGHFLIEGDLNPDNSDVDKLFIQLVQTYNQLFEENPINASGVDAKAILSARLSKSRRLENLIAQLPGEKKNGLFGNLIALSLGLTPNFKSNFDLAEDAKLQLSKDTYDDDLDNLLAQIGDQYADLFLAAKNLSDAILLSDILRVNTEITKAPLSASMIKRYDEHHQDLTLLKALVRQQLPEKYKEIFFDQSKNGYAGYIDGGASQEEFYKFIKPILEKMDGTEELLVKLNREDLLRKQRTFDNGSIPHQIHLGELHAILRRQEDFYPFLKDNREKIEKILTFRIPYYVGPLARGNSRFAWMTRKSEETITPWNFEEVVDKGASAQSFIERMTNFDKNLPNEKVLPKHSLLYEYFTVYNELTKVKYVTEGMRKPAFLSGEQKKAIVDLLFKTNRKVTVKQLKEDYFKKIECFDSVEISGVEDRFNASLGTYHDLLKIIKDKDFLDNEENEDILEDIVLTLTLFEDREMIEERLKTYAHLFDDKVMKQLKRRRYTGWGRLSRKLINGIRDKQSGKTILDFLKSDGFANRNFMQLIHDDSLTFKEDIQKAQVSGQGDSLHEHIANLAGSPAIKKGILQTVKVVDELVKVMGRHKPENIVIEMARENQTTQKGQKNSRERMKRIEEGIKELGSQILKEHPVENTQLQNEKLYLYYLQNGRDMYVDQELDINRLSDYDVDHIVPQSFLKDDSIDNKVLTRSDKARGKSDNVPSEEVVKKMKNYWRQLLNAKLITQRKFDNLTKAERGGLSELDKAGFIKRQLVETRQITKHVAQILDSRMNTKYDENDKLIREVKVITLKSKLVSDFRKDFQFYKVREINNYHHAHDAYLNAVVGTALIKKYPKLESEFVYGDYKVYDVRKMIAKSEQEIGKATAKYFFYSNIMNFFKTEITLANGEIRKRPLIETNGETGEIVWDKGRDFATVRKVLSMPQVNIVKKTEVQTGGFSKESILPKRNSDKLIARKKDWDPKKYGGFDSPTVAYSVLVVAKVEKGKSKKLKSVKELLGITIMERSSFEKNPIDFLEAKGYKEVKKDLIIKLPKYSLFELENGRKRMLASAGELQKGNELALPSKYVNFLYLASHYEKLKGSPEDNEQKQLFVEQHKHYLDEIIEQISEFSKRVILADANLDKVLSAYNKHRDKPIREQAENIIHLFTLTNLGAPAAFKYFDTTIDRKRYTSTKEVLDATLIHQSITGLYETRIDLSQLGGDGGGGSGGGGSSGGLDDEYRLYSPLVKPDQNIQFWLEQFPQAWAETAGMGLAKQVPPQVIQLKASATPVSVRQYPLSKEAQEGIRPHVQRLIQQGILVPVQSPWNTPLLPVRKPGTNDYRPVQDLREVNKRVQDIHPTVPNPYNLLCALPPQRSWYTVLDLKDAFFCLRLHPTSQPLFAFEWRDPGTGRTGQLTWTRLPQGFKNSPTIFNEALHRDLANFRIQHPQVTLLQYVDDLLLAGATKQDCLEGTKALLLELSDLGYRASAKKAQICRREVTYLGYSLRDGQRWLTEARKKTVVQIPAPTTAKQVREFLGKAGFCRLFIPGFATLAAPLYPLTKPKGEFSWAPEHQKAFDAIKKALLSAPALALPDVTKPFTLYVDERKGVARGVLTQTLGPWRRPVAYLSKKLDPVASGWPVCLKAIAAVAILVKDADKLTLGQNITVIAPHALENIVRQPPDRWMTNARMTHYQSLLLTERVTFAPPAALNPATLLPEETDEPVTHDCHQLLIEETGVRKDLTDIPLTGEVLTWFTDGSSYVVEGKRMAGAAVVDGTRTIWASSLPEGTSAQKAELMALTQALRLAEGKSINIYTDSRYAFATAHVHGAIYKQRGWLTSAGREIKNKEEILSLLEALHLPKRLAIIHCPGHQKAKDPISRGNQMADRVAKQAAQGVNLLPAGKRTADGSEFEKRTADGSEFESPKKKAKVE

SEQ ID NO: 275 - protein, 2086 aa, synthetic construct; identical to SEQ ID NO: 91

SEQ ID NO: 276 - protein, 2086 aa, synthetic construct; identical to SEQ ID NO: 95

SEQ ID NO: 277 - protein, 2085 aa, synthetic construct
MPAAKRVKLDGGDKKYSIGLDIGTNSVGWAVITDEYKVPSKKFKVLGNTDRHSIKKNLIGALLFDSGETAEATRLKRTARRRYTRRKNRICYLQEIFSNEMAKVDDSFFHRLEESFLVEEDKKHERHPIFGNIVDEVAYHEKYPTIYHLRKKLVDSTDKADLRLIYLALAHMIKFRGHFLIEGDLNPDNSDVDKLFIQLVQTYNQLFEENPINASGVDAKAILSARLSKSRRLENLIAQLPGEKKNGLFGNLIALSLGLTPNFKSNFDLAEDAKLQLSKDTYDDDLDNLLAQIGDQYADLFLAAKNLSDAILLSDILRVNTEITKAPLSASMIKRYDEHHQDLTLLKALVRQQLPEKYKEIFFDQSKNGYAGYIDGGASQEEFYKFIKPILEKMDGTEELLVKLNREDLLRKQRTFDNGSIPHQIHLGELHAILRRQEDFYPFLKDNREKIEKILTFRIPYYVGPLARGNSRFAWMTRKSEETITPWNFEEVVDKGASAQSFIERMTNFDKNLPNEKVLPKHSLLYEYFTVYNELTKVKYVTEGMRKPAFLSGEQKKAIVDLLFKTNRKVTVKQLKEDYFKKIECFDSVEISGVEDRFNASLGTYHDLLKIIKDKDFLDNEENEDILEDIVLTLTLFEDREMIEERLKTYAHLFDDKVMKQLKRRRYTGWGRLSRKLINGIRDKQSGKTILDFLKSDGFANRNFMQLIHDDSLTFKEDIQKAQVSGQGDSLHEHIANLAGSPAIKKGILQTVKVVDELVKVMGRHKPENIVIEMARENQTTQKGQKNSRERMKRIEEGIKELGSQILKEHPVENTQLQNEKLYLYYLQNGRDMYVDQELDINRLSDYDVDHIVPQSFLKDDSIDNKVLTRSDKARGKSDNVPSEEVVKKMKNYWRQLLNAKLITQRKFDNLTKAERGGLSELDKAGFIKRQLVETRQITKHVAQILDSRMNTKYDENDKLIREVKVITLKSKLVSDFRKDFQFYKVREINNYHHAHDAYLNAVVGTALIKKYPKLESEFVYGDYKVYDVRKMIAKSEQEIGKATAKYFFYSNIMNFFKTEITLANGEIRKRPLIETNGETGEIVWDKGRDFATVRKVLSMPQVNIVKKTEVQTGGFSKESILPKRNSDKLIARKKDWDPKKYGGFDSPTVAYSVLVVAKVEKGKSKKLKSVKELLGITIMERSSFEKNPIDFLEAKGYKEVKKDLIIKLPKYSLFELENGRKRMLASAGELQKGNELALPSKYVNFLYLASHYEKLKGSPEDNEQKQLFVEQHKHYLDEIIEQISEFSKRVILADANLDKVLSAYNKHRDKPIREQAENIIHLFTLTNLGAPAAFKYFDTTIDRKRYTSTKEVLDATLIHQSITGLYETRIDLSQLGGDGGGGSEAAAKGGLDDEYRLYSPLVKPDQNIQFWLEQFPQAWAETAGMGLAKQVPPQVIQLKASATPVSVRQYPLSKEAQEGIRPHVQRLIQQGILVPVQSPWNTPLLPVRKPGTNDYRPVQDLREVNKRVQDIHPTVPNPYNLLCALPPQRSWYTVLDLKDAFFCLRLHPTSQPLFAFEWRDPGTGRTGQLTWTRLPQGFKNSPTIFNEALHRDLANFRIQHPQVTLLQYVDDLLLAGATKQDCLEGTKALLLELSDLGYRASAKKAQICRREVTYLGYSLRDGQRWLTEARKKTVVQIPAPTTAKQVREFLGKAGFCRLFIPGFATLAAPLYPLTKPKGEFSWAPEHQKAFDAIKKALLSAPALALPDVTKPFTLYVDERKGVARGVLTQTLGPWRRPVAYLSKKLDPVASGWPVCLKAIAAVAILVKDADKLTLGQNITVIAPHALENIVRQPPDRWMTNARMTHYQSLLLTERVTFAPPAALNPATLLPEETDEPVTHDCHQLLIEETGVRKDLTDIPLTGEVLTWFTDGSSYVVEGKRMAGAAVVDGTRTIWASSLPEGTSAQKAELMALTQALRLAEGKSINIYTDSRYAFATAHVHGAIYKQRGWLTSAGREIKNKEEILSLLEALHLPKRLAIIHCPGHQKAKDPISRGNQMADRVAKQAAQGVNLLPAGKRTADGSEFEKRTADGSEFESPKKKAKVE

SEQ ID NO: 278 - protein, 2090 aa, synthetic construct; identical to SEQ ID NO: 112

SEQ ID NO: 279 - protein, 2094 aa, synthetic construct
MPAAKRVKLDGGDKKYSIGLDIGTNSVGWAVITDEYKVPSKKFKVLGNTDRHSIKKNLIGALLFDSGETAEATRLKRTARRRYTRRKNRICYLQEIFSNEMAKVDDSFFHRLEESFLVEEDKKHERHPIFGNIVDEVAYHEKYPTIYHLRKKLVDSTDKADLRLIYLALAHMIKFRGHFLIEGDLNPDNSDVDKLFIQLVQTYNQLFEENPINASGVDAKAILSARLSKSRRLENLIAQLPGEKKNGLFGNLIALSLGLTPNFKSNFDLAEDAKLQLSKDTYDDDLDNLLAQIGDQYADLFLAAKNLSDAILLSDILRVNTEITKAPLSASMIKRYDEHHQDLTLLKALVRQQLPEKYKEIFFDQSKNGYAGYIDGGASQEEFYKFIKPILEKMDGTEELLVKLNREDLLRKQRTFDNGSIPHQIHLGELHAILRRQEDFYPFLKDNREKIEKILTFRIPYYVGPLARGNSRFAWMTRKSEETITPWNFEEVVDKGASAQSFIERMTNFDKNLPNEKVLPKHSLLYEYFTVYNELTKVKYVTEGMRKPAFLSGEQKKAIVDLLFKTNRKVTVKQLKEDYFKKIECFDSVEISGVEDRFNASLGTYHDLLKIIKDKDFLDNEENEDILEDIVLTLTLFEDREMIEERLKTYAHLFDDKVMKQLKRRRYTGWGRLSRKLINGIRDKQSGKTILDFLKSDGFANRNFMQLIHDDSLTFKEDIQKAQVSGQGDSLHEHIANLAGSPAIKKGILQTVKVVDELVKVMGRHKPENIVIEMARENQTTQKGQKNSRERMKRIEEGIKELGSQILKEHPVENTQLQNEKLYLYYLQNGRDMYVDQELDINRLSDYDVDHIVPQSFLKDDSIDNKVLTRSDKARGKSDNVPSEEVVKKMKNYWRQLLNAKLITQRKFDNLTKAERGGLSELDKAGFIKRQLVETRQITKHVAQILDSRMNTKYDENDKLIREVKVITLKSKLVSDFRKDFQFYKVREINNYHHAHDAYLNAVVGTALIKKYPKLESEFVYGDYKVYDVRKMIAKSEQEIGKATAKYFFYSNIMNFFKTEITLANGEIRKRPLIETNGETGEIVWDKGRDFATVRKVLSMPQVNIVKKTEVQTGGFSKESILPKRNSDKLIARKKDWDPKKYGGFDSPTVAYSVLVVAKVEKGKSKKLKSVKELLGITIMERSSFEKNPIDFLEAKGYKEVKKDLIIKLPKYSLFELENGRKRMLASAGELQKGNELALPSKYVNFLYLASHYEKLKGSPEDNEQKQLFVEQHKHYLDEIIEQISEFSKRVILADANLDKVLSAYNKHRDKPIREQAENIIHLFTLTNLGAPAAFKYFDTTIDRKRYTSTKEVLDATLIHQSITGLYETRIDLSQLGGDGGEAAAKEAAAKEAAAKGGTLQLDDEYRLYSPLVKPDQNIQFWLEQFPQAWAETAGMGLAKQVPPQVIQLKASATPVSVRQYPLSKEAQEGIRPHVQRLIQQGILVPVQSPWNTPLLPVRKPGTNDYRPVQDLREVNKRVQDIHPTVPNPYNLLCALPPQRSWYTVLDLKDAFFCLRLHPTSQPLFAFEWRDPGTGRTGQLTWTRLPQGFKNSPTIFDEALHRDLANFRIQHPQVTLLQYVDDLLLAGATKQDCLEGTKALLLELSDLGYRASAKKAQICRREVTYLGYSLRDGQRWLTEARKKTVVQIPAPTTAKQVREFLGTAGFCRLWIPGFATLAAPLYPLTKEKGEFSWAPEHQKAFDAIKKALLSAPALALPDVTKPFTLYVDERKGVARGVLTQTLGPWRRPVAYLSKKLDPVASGWPVCLKAIAAVAILVKDADKLTLGQNITVIAPHALENIVRQPPDRWMTNARMTHYQSLLLTERVTFAPPAALNPATLLPEETDEPVTHDCHQLLIEETGVRKDLTDIPLTGEVLTWFTDGSSYVVEGKRMAGAAVVDGTRTIWASSLPEGTSAQKAELMALTQALRLAEGKSINIYTDSRYAFATAHVHGAIYKQRGLLTSAGREIKNKEEILSLLEALHLPKRLAIIHCPGHQKAKDPISRGNQMADRVAKQAAQGVNLLAGKRTADGSEFEKRTADGSEFESPKKKAKVE

SEQ ID NO: 280 - protein, 2109 aa, synthetic construct
MPAAKRVKLDGGDKKYSIGLDIGTNSVGWAVITDEYKVPSKKFKVLGNTDRHSIKKNLIGALLFDSGETAEATRLKRTARRRYTRRKNRICYLQEIFSNEMAKVDDSFFHRLEESFLVEEDKKHERHPIFGNIVDEVAYHEKYPTIYHLRKKLVDSTDKADLRLIYLALAHMIKFRGHFLIEGDLNPDNSDVDKLFIQLVQTYNQLFEENPINASGVDAKAILSARLSKSRRLENLIAQLPGEKKNGLFGNLIALSLGLTPNFKSNFDLAEDAKLQLSKDTYDDDLDNLLAQIGDQYADLFLAAKNLSDAILLSDILRVNTEITKAPLSASMIKRYDEHHQDLTLLKALVRQQLPEKYKEIFFDQSKNGYAGYIDGGASQEEFYKFIKPILEKMDGTEELLVKLNREDLLRKQRTFDNGSIPHQIHLGELHAILRRQEDFYPFLKDNREKIEKILTFRIPYYVGPLARGNSRFAWMTRKSEETITPWNFEEVVDKGASAQSFIERMTNFDKNLPNEKVLPKHSLLYEYFTVYNELTKVKYVTEGMRKPAFLSGEQKKAIVDLLFKTNRKVTVKQLKEDYFKKIECFDSVEISGVEDRFNASLGTYHDLLKIIKDKDFLDNEENEDILEDIVLTLTLFEDREMIEERLKTYAHLFDDKVMKQLKRRRYTGWGRLSRKLINGIRDKQSGKTILDFLKSDGFANRNFMQLIHDDSLTFKEDIQKAQVSGQGDSLHEHIANLAGSPAIKKGILQTVKVVDELVKVMGRHKPENIVIEMARENQTTQKGQKNSRERMKRIEEGIKELGSQILKEHPVENTQLQNEKLYLYYLQNGRDMYVDQELDINRLSDYDVDHIVPQSFLKDDSIDNKVLTRSDKARGKSDNVPSEEVVKKMKNYWRQLLNAKLITQRKFDNLTKAERGGLSELDKAGFIKRQLVETRQITKHVAQILDSRMNTKYDENDKLIREVKVITLKSKLVSDFRKDFQFYKVREINNYHHAHDAYLNAVVGTALIKKYPKLESEFVYGDYKVYDVRKMIAKSEQEIGKATAKYFFYSNIMNFFKTEITLANGEIRKRPLIETNGETGEIVWDKGRDFATVRKVLSMPQVNIVKKTEVQTGGFSKESILPKRNSDKLIARKKDWDPKKYGGFDSPTVAYSVLVVAKVEKGKSKKLKSVKELLGITIMERSSFEKNPIDFLEAKGYKEVKKDLIIKLPKYSLFELENGRKRMLASAGELQKGNELALPSKYVNFLYLASHYEKLKGSPEDNEQKQLFVEQHKHYLDEIIEQISEFSKRVILADANLDKVLSAYNKHRDKPIREQAENIIHLFTLTNLGAPAAFKYFDTTIDRKRYTSTKEVLDATLIHQSITGLYETRIDLSQLGGDGGEAAAKEAAAKEAAAKEAAAKEAAAKEAAAKGGTLQLDDEYRLYSPLVKPDQNIQFWLEQFPQAWAETAGMGLAKQVPPQVIQLKASATPVSVRQYPLSKEAQEGIRPHVQRLIQQGILVPVQSPWNTPLLPVRKPGTNDYRPVQDLREVNKRVQDIHPTVPNPYNLLCALPPQRSWYTVLDLKDAFFCLRLHPTSQPLFAFEWRDPGTGRTGQLTWTRLPQGFKNSPTIFDEALHRDLANFRIQHPQVTLLQYVDDLLLAGATKQDCLEGTKALLLELSDLGYRASAKKAQICRREVTYLGYSLRDGQRWLTEARKKTVVQIPAPTTAKQVREFLGTAGFCRLWIPGFATLAAPLYPLTKEKGEFSWAPEHQKAFDAIKKALLSAPALALPDVTKPFTLYVDERKGVARGVLTQTLGPWRRPVAYLSKKLDPVASGWPVCLKAIAAVAILVKDADKLTLGQNITVIAPHALENIVRQPPDRWMTNARMTHYQSLLLTERVTFAPPAALNPATLLPEETDEPVTHDCHQLLIEETGVRKDLTDIPLTGEVLTWFTDGSSYVVEGKRMAGAAVVDGTRTIWASSLPEGTSAQKAELMALTQALRLAEGKSINIYTDSRYAFATAHVHGAIYKQRGLLTSAGREIKNKEEILSLLEALHLPKRLAIIHCPGHQKAKDPISRGNQMADRVAKQAAQGVNLLAGKRTADGSEFEKRTADGSEFESPKKKAKVE

SEQ ID NO: 281 - protein, 2088 aa, synthetic construct
MPAAKRVKLDGGDKKYSIGLDIGTNSVGWAVITDEYKVPSKKFKVLGNTDRHSIKKNLIGALLFDSGETAEATRLKRTARRRYTRRKNRICYLQEIFSNEMAKVDDSFFHRLEESFLVEEDKKHERHPIFGNIVDEVAYHEKYPTIYHLRKKLVDSTDKADLRLIYLALAHMIKFRGHFLIEGDLNPDNSDVDKLFIQLVQTYNQLFEENPINASGVDAKAILSARLSKSRRLENLIAQLPGEKKNGLFGNLIALSLGLTPNFKSNFDLAEDAKLQLSKDTYDDDLDNLLAQIGDQYADLFLAAKNLSDAILLSDILRVNTEITKAPLSASMIKRYDEHHQDLTLLKALVRQQLPEKYKEIFFDQSKNGYAGYIDGGASQEEFYKFIKPILEKMDGTEELLVKLNREDLLRKQRTFDNGSIPHQIHLGELHAILRRQEDFYPFLKDNREKIEKILTFRIPYYVGPLARGNSRFAWMTRKSEETITPWNFEEVVDKGASAQSFIERMTNFDKNLPNEKVLPKHSLLYEYFTVYNELTKVKYVTEGMRKPAFLSGEQKKAIVDLLFKTNRKVTVKQLKEDYFKKIECFDSVEISGVEDRFNASLGTYHDLLKIIKDKDFLDNEENEDILEDIVLTLTLFEDREMIEERLKTYAHLFDDKVMKQLKRRRYTGWGRLSRKLINGIRDKQSGKTILDFLKSDGFANRNFMQLIHDDSLTFKEDIQKAQVSGQGDSLHEHIANLAGSPAIKKGILQTVKVVDELVKVMGRHKPENIVIEMARENQTTQKGQKNSRERMKRIEEGIKELGSQILKEHPVENTQLQNEKLYLYYLQNGRDMYVDQELDINRLSDYDVDHIVPQSFLKDDSIDNKVLTRSDKARGKSDNVPSEEVVKKMKNYWRQLLNAKLITQRKFDNLTKAERGGLSELDKAGFIKRQLVETRQITKHVAQILDSRMNTKYDENDKLIREVKVITLKSKLVSDFRKDFQFYKVREINNYHHAHDAYLNAVVGTALIKKYPKLESEFVYGDYKVYDVRKMIAKSEQEIGKATAKYFFYSNIMNFFKTEITLANGEIRKRPLIETNGETGEIVWDKGRDFATVRKVLSMPQVNIVKKTEVQTGGFSKESILPKRNSDKLIARKKDWDPKKYGGFDSPTVAYSVLVVAKVEKGKSKKLKSVKELLGITIMERSSFEKNPIDFLEAKGYKEVKKDLIIKLPKYSLFELENGRKRMLASAGELQKGNELALPSKYVNFLYLASHYEKLKGSPEDNEQKQLFVEQHKHYLDEIIEQISEFSKRVILADANLDKVLSAYNKHRDKPIREQAENIIHLFTLTNLGAPAAFKYFDTTIDRKRYTSTKEVLDATLIHQSITGLYETRIDLSQLGGDGGPAPGGSGSSGGTLQLDDEYRLYSPLVKPDQNIQFWLEQFPQAWAETAGMGLAKQVPPQVIQLKASATPVSVRQYPLSKEAQEGIRPHVQRLIQQGILVPVQSPWNTPLLPVRKPGTNDYRPVQDLREVNKRVQDIHPTVPNPYNLLCALPPQRSWYTVLDLKDAFFCLRLHPTSQPLFAFEWRDPGTGRTGQLTWTRLPQGFKNSPTIFDEALHRDLANFRIQHPQVTLLQYVDDLLLAGATKQDCLEGTKALLLELSDLGYRASAKKAQICRREVTYLGYSLRDGQRWLTEARKKTVVQIPAPTTAKQVREFLGTAGFCRLWIPGFATLAAPLYPLTKEKGEFSWAPEHQKAFDAIKKALLSAPALALPDVTKPFTLYVDERKGVARGVLTQTLGPWRRPVAYLSKKLDPVASGWPVCLKAIAAVAILVKDADKLTLGQNITVIAPHALENIVRQPPDRWMTNARMTHYQSLLLTERVTFAPPAALNPATLLPEETDEPVTHDCHQLLIEETGVRKDLTDIPLTGEVLTWFTDGSSYVVEGKRMAGAAVVDGTRTIWASSLPEGTSAQKAELMALTQALRLAEGKSINIYTDSRYAFATAHVHGAIYKQRGLLTSAGREIKNKEEILSLLEALHLPKRLAIIHCPGHQKAKDPISRGNQMADRVAKQAAQGVNLLAGKRTADGSEFEKRTADGSEFESPKKKAKVE

SEQ ID NO: 282 - protein, 2087 aa, synthetic construct
MPAAKRVKLDGGDKKYSIGLDIGTNSVGWAVITDEYKVPSKKFKVLGNTDRHSIKKNLIGALLFDSGETAEATRLKRTARRRYTRRKNRICYLQEIFSNEMAKVDDSFFHRLEESFLVEEDKKHERHPIFGNIVDEVAYHEKYPTIYHLRKKLVDSTDKADLRLIYLALAHMIKFRGHFLIEGDLNPDNSDVDKLFIQLVQTYNQLFEENPINASGVDAKAILSARLSKSRRLENLIAQLPGEKKNGLFGNLIALSLGLTPNFKSNFDLAEDAKLQLSKDTYDDDLDNLLAQIGDQYADLFLAAKNLSDAILLSDILRVNTEITKAPLSASMIKRYDEHHQDLTLLKALVRQQLPEKYKEIFFDQSKNGYAGYIDGGASQEEFYKFIKPILEKMDGTEELLVKLNREDLLRKQRTFDNGSIPHQIHLGELHAILRRQEDFYPFLKDNREKIEKILTFRIPYYVGPLARGNSRFAWMTRKSEETITPWNFEEVVDKGASAQSFIERMTNFDKNLPNEKVLPKHSLLYEYFTVYNELTKVKYVTEGMRKPAFLSGEQKKAIVDLLFKTNRKVTVKQLKEDYFKKIECFDSVEISGVEDRFNASLGTYHDLLKIIKDKDFLDNEENEDILEDIVLTLTLFEDREMIEERLKTYAHLFDDKVMKQLKRRRYTGWGRLSRKLINGIRDKQSGKTILDFLKSDGFANRNFMQLIHDDSLTFKEDIQKAQVSGQGDSLHEHIANLAGSPAIKKGILQTVKVVDELVKVMGRHKPENIVIEMARENQTTQKGQKNSRERMKRIEEGIKELGSQILKEHPVENTQLQNEKLYLYYLQNGRDMYVDQELDINRLSDYDVDHIVPQSFLKDDSIDNKVLTRSDKARGKSDNVPSEEVVKKMKNYWRQLLNAKLITQRKFDNLTKAERGGLSELDKAGFIKRQLVETRQITKHVAQILDSRMNTKYDENDKLIREVKVITLKSKLVSDFRKDFQFYKVREINNYHHAHDAYLNAVVGTALIKKYPKLESEFVYGDYKVYDVRKMIAKSEQEIGKATAKYFFYSNIMNFFKTEITLANGEIRKRPLIETNGETGEIVWDKGRDFATVRKVLSMPQVNIVKKTEVQTGGFSKESILPKRNSDKLIARKKDWDPKKYGGFDSPTVAYSVLVVAKVEKGKSKKLKSVKELLGITIMERSSFEKNPIDFLEAKGYKEVKKDLIIKLPKYSLFELENGRKRMLASAGELQKGNELALPSKYVNFLYLASHYEKLKGSPEDNEQKQLFVEQHKHYLDEIIEQISEFSKRVILADANLDKVLSAYNKHRDKPIREQAENIIHLFTLTNLGAPAAFKYFDTTIDRKRYTSTKEVLDATLIHQSITGLYETRIDLSQLGGDGGEAAAKGGGGGTLQLDDEYRLYSPLVKPDQNIQFWLEQFPQAWAETAGMGLAKQVPPQVIQLKASATPVSVRQYPLSKEAQEGIRPHVQRLIQQGILVPVQSPWNTPLLPVRKPGTNDYRPVQDLREVNKRVQDIHPTVPNPYNLLCALPPQRSWYTVLDLKDAFFCLRLHPTSQPLFAFEWRDPGTGRTGQLTWTRLPQGFKNSPTIFDEALHRDLANFRIQHPQVTLLQYVDDLLLAGATKQDCLEGTKALLLELSDLGYRASAKKAQICRREVTYLGYSLRDGQRWLTEARKKTVVQIPAPTTAKQVREFLGTAGFCRLWIPGFATLAAPLYPLTKEKGEFSWAPEHQKAFDAIKKALLSAPALALPDVTKPFTLYVDERKGVARGVLTQTLGPWRRPVAYLSKKLDPVASGWPVCLKAIAAVAILVKDADKLTLGQNITVIAPHALENIVRQPPDRWMTNARMTHYQSLLLTERVTFAPPAALNPATLLPEETDEPVTHDCHQLLIEETGVRKDLTDIPLTGEVLTWFTDGSSYVVEGKRMAGAAVVDGTRTIWASSLPEGTSAQKAELMALTQALRLAEGKSINIYTDSRYAFATAHVHGAIYKQRGLLTSAGREIKNKEEILSLLEALHLPKRLAIIHCPGHQKAKDPISRGNQMADRVAKQAAQGVNLLAGKRTADGSEFEKRTADGSEFESPKKKAKVE

SEQ ID NO: 283 - protein, 2091 aa, synthetic construct
MPAAKRVKLDGGDKKYSIGLDIGTNSVGWAVITDEYKVPSKKFKVLGNTDRHSIKKNLIGALLFDSGETAEATRLKRTARRRYTRRKNRICYLQEIFSNEMAKVDDSFFHRLEESFLVEEDKKHERHPIFGNIVDEVAYHEKYPTIYHLRKKLVDSTDKADLRLIYLALAHMIKFRGHFLIEGDLNPDNSDVDKLFIQLVQTYNQLFEENPINASGVDAKAILSARLSKSRRLENLIAQLPGEKKNGLFGNLIALSLGLTPNFKSNFDLAEDAKLQLSKDTYDDDLDNLLAQIGDQYADLFLAAKNLSDAILLSDILRVNTEITKAPLSASMIKRYDEHHQDLTLLKALVRQQLPEKYKEIFFDQSKNGYAGYIDGGASQEEFYKFIKPILEKMDGTEELLVKLNREDLLRKQRTFDNGSIPHQIHLGELHAILRRQEDFYPFLKDNREKIEKILTFRIPYYVGPLARGNSRFAWMTRKSEETITPWNFEEVVDKGASAQSFIERMTNFDKNLPNEKVLPKHSLLYEYFTVYNELTKVKYVTEGMRKPAFLSGEQKKAIVDLLFKTNRKVTVKQLKEDYFKKIECFDSVEISGVEDRFNASLGTYHDLLKIIKDKDFLDNEENEDILEDIVLTLTLFEDREMIEERLKTYAHLFDDKVMKQLKRRRYTGWGRLSRKLINGIRDKQSGKTILDFLKSDGFANRNFMQLIHDDSLTFKEDIQKAQVSGQGDSLHEHIANLAGSPAIKKGILQTVKVVDELVKVMGRHKPENIVIEMARENQTTQKGQKNSRERMKRIEEGIKELGSQILKEHPVENTQLQNEKLYLYYLQNGRDMYVDQELDINRLSDYDVDHIVPQSFLKDDSIDNKVLTRSDKARGKSDNVPSEEVVKKMKNYWRQLLNAKLITQRKFDNLTKAERGGLSELDKAGFIKRQLVETRQITKHVAQILDSRMNTKYDENDKLIREVKVITLKSKLVSDFRKDFQFYKVREINNYHHAHDAYLNAVVGTALIKKYPKLESEFVYGDYKVYDVRKMIAKSEQEIGKATAKYFFYSNIMNFFKTEITLANGEIRKRPLIETNGETGEIVWDKGRDFATVRKVLSMPQVNIVKKTEVQTGGFSKESILPKRNSDKLIARKKDWDPKKYGGFDSPTVAYSVLVVAKVEKGKSKKLKSVKELLGITIMERSSFEKNPIDFLEAKGYKEVKKDLIIKLPKYSLFELENGRKRMLASAGELQKGNELALPSKYVNFLYLASHYEKLKGSPEDNEQKQLFVEQHKHYLDEIIEQISEFSKRVILADANLDKVLSAYNKHRDKPIREQAENIIHLFTLTNLGAPAAFKYFDTTIDRKRYTSTKEVLDATLIHQSITGLYETRIDLSQLGGDGGGSAGSAAGSGEFGGTLQLDDEYRLYSPLVKPDQNIQFWLEQFPQAWAETAGMGLAKQVPPQVIQLKASATPVSVRQYPLSKEAQEGIRPHVQRLIQQGILVPVQSPWNTPLLPVRKPGTNDYRPVQDLREVNKRVQDIHPTVPNPYNLLCALPPQRSWYTVLDLKDAFFCLRLHPTSQPLFAFEWRDPGTGRTGQLTWTRLPQGFKNSPTIFDEALHRDLANFRIQHPQVTLLQYVDDLLLAGATKQDCLEGTKALLLELSDLGYRASAKKAQICRREVTYLGYSLRDGQRWLTEARKKTVVQIPAPTTAKQVREFLGTAGFCRLWIPGFATLAAPLYPLTKEKGEFSWAPEHQKAFDAIKKALLSAPALALPDVTKPFTLYVDERKGVARGVLTQTLGPWRRPVAYLSKKLDPVASGWPVCLKAIAAVAILVKDADKLTLGQNITVIAPHALENIVRQPPDRWMTNARMTHYQSLLLTERVTFAPPAALNPATLLPEETDEPVTHDCHQLLIEETGVRKDLTDIPLTGEVLTWFTDGSSYVVEGKRMAGAAVVDGTRTIWASSLPEGTSAQKAELMALTQALRLAEGKSINIYTDSRYAFATAHVHGAIYKQRGLLTSAGREIKNKEEILSLLEALHLPKRLAIIHCPGHQKAKDPISRGNQMADRVAKQAAQGVNLLAGKRTADGSEFEKRTADGSEFESPKKKAKVE

(The sequence listing continues in the following parts.)
